United States Patent Application Publication US 2026/0103690 A1 - sequence listing, part 54

SEQ ID NO: 260254 - protein, 352 aa, unidentified
MAKHEFDELMSIGIDIGKDTFHLVGFDRSGQRVLRKQIKRLALVSTFEKLPRCIVGMEACLSAHFVSRTLRKLGFEPRIIPAIYVEPFNKGQKNDYNDAEAIAEAALRPNLKIVSEKSQDQLDLQALHRVRSRLVSRRTATINQIRAFLIEQGITVRKGLRALKASFHAILEDRKDEISRRMKCILIGLYGDWLWMDERIDTVSDEIEEISRTDENCVNVMTVPGIGPMISTALVAAVGEGEAFDRGRDFAAWVGLVPKQYSTGGRTVLGRISKRGSRYLRMLFVQAAKIIMMRPHRWPDFSFGEWLTRASERMHRNKVAVALANKLARMAWSILRHNTAFDAPRYEVAIGI

SEQ ID NO: 260255 - protein, 418 aa, unidentified
MKVVYPTCCGVDVHKKFFVATIIKTEGIEPKYSKKRFSTFNNDILRFKQWLVENDCFDVCMESTGKYWVPVYNILEDKINVVVASPKWVRAVKGNKDDVKDSKWIGDLFRLGLVPGSFIPPKPIRILREYTRYRYKLVSCKSSEKNRYQNSFTVCNIALDSVVSDMFGKSASLITDYLVKTDHFDPEHCRTLLYRSLKKKYDAVVESIVGYEIAPAQKERMIMVKAHLDYVERSIEMMDEGIDRLVEPYENHISLLSTIPGVDRRTAITIISEIGTDINQFSNSKRLCCWAGLTPSNNQSAGKKKSVRITRAGVYLKPALVQAAHAAVKSKDSPYYKNKYERISKRRGKKRAIIAIARMILTALFHMFKTGEVWNPVDLFKVDMPPVLMEKQKQKVIKNAIKLLASQGIAVVEIQPVA

SEQ ID NO: 260256 - protein, 334 aa, unidentified
MDKVTTAGIDLAKRVFALHGVDGAGRVGLRKTVRREQLMQTVAALPPCLIGMEACSGAHEWARRFQQLGHTVRLMAPVFVAPYRKSGKNDGNDAEAICEAVTRPNMRFVPIKSAEQQAVLALHRVRQGWIEERTATINRLRAVLTEFGVVLPNRAQYVRREAHAAAEALPELARQAVEDLRAHLGVLDERIAAYDRELQAQARQSESAQRLMQIRGIGPLTAVAMVATVGCARDFRSGRQFAAWLGLTPRQHSSGGKHRLGHISRRGDAYLRCLLVQGARSVLLTAMRHSDRLSRWALSVQARRGYHKALVAIAAKNARIAWALLCKNQTLRAA

SEQ ID NO: 260257 - protein, 350 aa, unidentified
MNKITTLGIDLAKTVFQLHGVDCAGKVVLCREVRRTQLMRAIAQFEPCLIGIEACGGANYWARRFAEFGHRVKIMSPQFVKPYRKSDKNDRNDAEAICEAVTRPSMRFVAVKSIEQQDMLTLHRVREGLMKERVALINRIRGSLTEYGIVIAKNVCNLRRTLPGILEDAGNELTTIARRLFSDLYEELGAREQRLAQLEQSIRALGSQHDVVRRLETVPGIGYLSATALYGAVGDAKHYKNGRQLAAWMGLVPRQCSSGGKQRLLGITKRGDKYLRKLLVHGARSIATHAERTPKSRDRWLNELRERRGKPRSYVAQANKTARIAWAIMARGEVYRAPEATPDTLVAVAA

SEQ ID NO: 260258 - protein, 387 aa, unidentified
MYFIGIDISKFKHDCAIIDEAGDTVTASWSFANNCEGFSLLKQLLDALDGQKKIGFESTGHYGHNLKLFLETNNFSFMEFNPLLVSKFVRSKSLRNTKTDSLDAVSIAQYLMTVEYKPYPPSFYHMDQLKSLTRFRDSLVRQHSRQLVELTNILDKVFPEFKPFFDGRFSATALYILTHYQSPEKIANMNAKSYEALRKKSRGKFSMVKFAQLKTLAKNTVGRSDAFLLKQMEITIDIENQLDAKIDETESQILECIRALNPPILTIPGIGELTAAIILSEYGNINKFENPAQLLSFAGLEPGYYQSGLAEHQGHMVKHGSSHLRYALMNACLPLITYEPVFAEYYAKKRAEGKPHRVALTHVAKKLLRVIFTLQTKNISYDPTLIR

SEQ ID NO: 260259 - protein, 345 aa, unidentified
MESMYNIGLDVHKKTISSCVKDVSGRIHAEGKIPATRFDLDRWMKTLPQPWTVAMEATIFTGWIYDHLRPHAAAVKVAHPLMLRAIAAAKKKNDRIDAKKIADVLRCNFLPECYMAPTAIRERRRTLRYRNLLVRQTVQLKNRISGLLMEAGVSYNKAKLHKVGYFRELLKSNPDIDESLRPLLQLCRETLVRLQKTESALIRSLARDRFLVERVEHLMTIPAVGPITALTWALEVGEVSRFSSIKKAISYCGLCGDEQSSGEHVKRTPISKQRNKHLQWVLVEAAHMAPRLSPELALLYDREKQKGNANRATLAVARKLVAYLVAIDRSQRDFLLVEKENQAAA

SEQ ID NO: 260260 - protein, 410 aa, unidentified
MEVLVSRGCGLDVHQATVVACLLTGEPGRLPRKQVKTFSTMTSGLIELRDWLKADGCTAVAMEATGVYWKPVYTILEGHFELVVANARHIKAVPGRKTDVKDAEWIADLLRHGLLQPSYVPPPELRELRSLLRYRVKLVNARSGERNRIIKLLESANIKISSIVSDVFGVSGRLMLEALKRGHTTPEEMAELAQKRMRSKIPLLKLALDGRMEAHHRQLLSLQLDRLDRFEADLRQLNAKLEVKLKPYERQMELLDGIPGIDWVVAATVIAEIGVRMSQWPSVGHLTSWAGLCPGQNESAGKRGKSSVRPGNPYLRSALVEAALAVTREKNCYFREKYYRLKARRGHKRAVVAIAHKILVAIYHVLTSDTPYQELGADYLEKLEPERLKLNLVRRLERLGYRVNLEPNRG

SEQ ID NO: 260261 - protein, 354 aa, unidentified
MSQTSNTAIAVIGIDIGKNSFHVVGHDGRGAIVLRQKWSRGQVEARLANVPPCLIGMEACVGAHHLSRNLASLGHDARLMPAKYVRPYSKGQKNDFNDAEAIAEAVQRPTMKFVATKTAEQLDLQALHRVRERLVSQRTGVTNQIRAFMLERGIAVRQGIGFLRMELPTILATRTDALSPRMLRVIEELAGDWRWLDQRIDGLSGEIEALARLDQACLRLMTVPGIGPIISSAMVAAIGTGDVFSKGRDFGAWLGLVPKQISTGDRTILGKISRRGNRYLRVLFVQAARVVLARIKHLERYGLKSWIEAAKKRLHPNVLAIALANKLARIAWAVLAKGRGFELTRTDDAGVRPA

SEQ ID NO: 260262 - protein, 403 aa, unidentified
MAAVCGIDWASQWHDVDIADEHGKRLLAARFEHDERGICALVEALTEHRVCRVAIERPDGLLVGRLLAAGITVLAIHPNQLAAARDRFRAAAGKSDPFDAFALRELARTDSHRFPALAPCSDETLALRALVRAREDLVGARVALANQLRAQLDAAWPGANRIFADIDSPIALAFIARYPSHADARGLGPKRLAAFLARHAYCGRKTPEQLLERLSSAPTPAIGEHESDARRNAVAGLAAALTPIVEQIAQLTGEIRGAIHRHPDGPIFLSFFRDPKSVICAAGLLAEIGDNRARYPTSDTLAADCGHAPVTKQSGKHHAVSFRWACDKRLRNHISVLADATRRWHPWAHDVYQRASDRGCDHPHATRILGRAWTRILWKCWQDRVPYDPARHRALTRHLAQQG

SEQ ID NO: 260263 - protein, 398 aa, unidentified
MPQQLWAGIDAGKSEHHCVVVDVDGKRVLSRRVANDEATLGELINAVTTLADGGDLTWAIDLAGGGAALLITLLLDASQRLLYIPGRSVYYASGAYRGDAKSDAKDAAIIADQARMRRDLQPLRPGDEITVELRILTARRADLVADRTRAINRLRAQLLEYFPALERAFDYSNSKAALILLTGYQTPEALRRAGAARLVAWPQKRKARNADAVAAAAIEAAHAQHTIVPGQDLAAAMVARAAGEVMNLDTEIGATETMIEERFRRHRHAEIILSMPGFGVILGAEFLAATGGDMSAFDSADRLAGICGLAPVPRDSGRISGNLKRPRRYHRRLLRTCYLAAQSAARTDPASRTYYDRKRAEGKHHRQAVLALARRRLNVLWAMLRDHMPYETSTATAA

SEQ ID NO: 260264 - protein, 338 aa, unidentified
MKTYAGIDLHSSNNYIGIINEEDQRLYGKRIPNELDRVLMALEPFRDTLQGVVVESTYNWYWLVDGLQEHGYKLHLANPAAIKQYEGLKHTDDKWDAFWLAHMRRLNILPEGYIYPKQHRAVRDLLRRRLLFVRHSTSHILSLQSMITRNLGFKMSGNAIKKLKGKEVEGMFDSSNLVFMAKNNIATIQFLKKIIKDIAKKVKSQVKLRKEFNRLLTITGIGDILGLTIMLEVGDIKRFAKVGNYSSYCRCVKSERLSNGKKKGENNKKNGNKYLSWAYVEAANFAIRYSAKAHRFYQRKKAKKNGIVAIKALSNKICRASYYIMRDRVPFNEEMLFR

SEQ ID NO: 260265 - protein, 360 aa, unidentified
MAKTKSVRPPFVVGGVDTHKDLHVAAVVDENNRVLGSDFFATTRLGYRQMLTWMASFGTVARIGVECTGSYGAGLLRHLQNAGITVLEVTAPDKMERRRRGKSDTIDAESAAHAAFSLIRTVTPKTRSGMIEALRVLKVCRKTAVAARRIALQMIQMNIVSSPDELRDQLRNLTRMQLIRTLAAWRPDVTAYRNVQDAYRIALKSLARRYLELHDEIADLDIMIASIVDELAPELIKRNAIGYESASQLLITAGDNPQRLQSEPGFAALCGVSPVPVSSGKTNRHRLNRGGDRAANSALHIIAIGRLRTDTKTQEYVAKRVAEGHSKMEALRCLRRYIAREVFTLLRNQNRQINSTQITT

SEQ ID NO: 260266 - protein, 402 aa, unidentified
MAASQLWTGVDVGKEQHWVCVVDDTGAVVLSRKLANDEHQIRQLVADVDALGAQASWTVDLTTVYAGLLLTVLADAGKSVRYLSGRQVWQASATYRGGEGKTDAKDARVIADQSRMRGSDLPVLHPGDNLITELRMLTGHRADLVADRTRTINRLRQQLAAVCPALERVAQPTSDRGWVVLLTRYQRPKAIRQSGVSRLTRILTDAGVRNASTIASAAVAAAKTQTVRLPGEQVAAGLVAELAQGVIALDERIKTTDADIEDRFRRHPLAEVITSLPGMGFRLGAEFLAAVGDPALIGSADQLAAWAGLAPVSRDSGKRTGRLHAPRRYSRRLRRVMYMSALTAIRCDPISRTYYQHKREQGKRPIPATICLARRRTNVLYALIRDNRTWQPGSPQITETAA

SEQ ID NO: 260267 - protein, 365 aa, unidentified
MEKISTVKTKGKKILKGQLTIGLDLGDRSSCYCVLDENGEIIREQKIPTTPEGMQQAFGKMARSRIAMETGTHSPWVSRVLTELGHEVIVAHAQKVRLIVKSRRKDDRLDARTLARLARIDPELLSPVQHRSAQAQLHLAEIRARAGLVSARTALVNAARGLVKSYGERLRKCGTQQFGQETTSGLSAGLREALEPLMQEVESLNERIKEYDRRIEKMAKETYPETELLKQVKGVGDLIATAYVLTVEDPHRFRKSRDAGCFVGLQPGRRNSGESEPQMHITKEGDEYLRTLLVQGAHYILGPFGEDSDLRRWGLKLSARGGKNAKKRAVVAVARKLAVLLHRLWVSGEVYEPLRNSQKAMTVAA

SEQ ID NO: 260268 - protein, 402 aa, unidentified
MNAVGIDVSKGKSMVAIMRPFGEIVSTPFEIKHTSSDINSLVKLIKSIEGESRIVMEHTGRYYEVLAHQLSEANLFVSAINPKLIKDFDNDSLRKVKTDKADSVKIARYALDKWQNLKQYSVMDELRNQLKTMNRQFGFYMKHKTAMKNNLIGILDQTYPGVNTYFDSPARSDGSQKWVDFASTYWHVDCVRKMSINAFIDHYENWCKRKKYNFSKSKAEEIYGKAKELVPVLPKDDITKLIIKQAVDQLNSASITVESLRTLMNETASKLPEYPVVMAMKGVGTSLGPQLMAEIGDVSRFTHKGAITAFAGVDPGVNESGSYEQKSVPTSKRGSSDLRKTLFQVMDVLIKTHPQDDPVYQFLDKKRAQKKPYYVYMTAGANKFLRIYYGRMKEYLASLPES

SEQ ID NO: 260269 - protein, 377 aa, unidentified
MNRILKIGMDVHSTNYTLCAMEPVIGAEDRVFANIQVAPDYKNVILFIENLKLKLGMNDTYDIECGYEAGCLGYSLYNQLTSAGVKCVILAPTTMLTEQGQRIKTDSRDAHLIAQCLSYGGYHPVYIPTEQDDSVKEYLRMRDDHKKALKKIKQQIGMFCMRHGYCYEGTKWTVAHLKWLKKLELSPMYQETLNEYLASYDEQSAKIDRFDARIEEIASQAEYAEKVKKLGCFLGIKTHTALSLIVETGDFERFAKGNVYAAYLGLAPGEHSSAAKVNRLGITKAGNSHLRLLLIEAAGGICKGAVGHKSKALKQRQQGNRAETIAYADKANTRLRSKYYRLIRHGKKRNVAVAAVARELACFVWGMMTGHIDVTAA

SEQ ID NO: 260270 - protein, 372 aa, unidentified
MNAKTKNTNQPFATFIGIDLGDKKHHVCATGTDGVILQEFTIPNDRAAFKKLSEDYPQAAVAIEVGAHSPWISRYLTNAGMNVTVANARKLRAIYQNDRKCDQLDARMLAKLLRADRDLLSPIQHGSEQAQKDLISLKIRDSLVRQRVNIIATIRGVLKSLGLRIPTSSSEAFHHRAETFLTAHPELADAITPALQSIKSLTDQIKHYEKTIQQSARQHHPQAMALQKIPSIGPITSMVFVLSIEDPRRFKDPRDIGAYLGLVPRRDQSGGSDKQLPISKAGNKYLRALLTQCAQYLLGRYGPDCAIRQYGLKLAARGGKAAKKKAITAVARKLAVMMIALWQKGGEYQPFPAATDRPLPTPSKPKTKKKAA

SEQ ID NO: 260271 - protein, 361 aa, unidentified
MRIIGCDLHARQQTLAMLDTETGEVVNLTLMHEGNELREFYSQLPRPVLVGIEATGSMHWFLNLMEELEIECRVGHPATIRAAEPRKQKHDRRDADLILKLLAENRFPAIWLPTRELLDLRALVLHRHQWVRIRTRIQNALQAIALANGLRRGPGLWSYDGQAKIAFLPLLPHASYRRSALQALYRKMEEEIENLTQQVAEQAEQRSGARQLMTHPGVGPVTALATDVFLGDPKRFVDGKALASYVGIIPREYSSGERQRFGGVTKQGNPLLRFLWCEAGAHAVRRDPELKRFYRRKLVQKGLGKARVAVARKLGIRLWIMLRDEIDYEEFCRRGQKQQSGVACAGMLEVGNGANRHRPVD

SEQ ID NO: 260272 - protein, 397 aa, unidentified
MDTSYAVFCGIDVGKGEHHAVGLTAAGKKIYDKALPNDETKLRAVFDGLAAHGPVLVIVDQPNTIGALPVTIARACGHDVAYLPGLSMRRIADLYPGQAKTDARDAFIIADTARTMPHTLRRVDTGDEALAELEVLVGFDDDLAGEATRISNRIRGLLTSVHPALERVLGPRVTHPAVLEILSRCGGPAGIRQAGKRKLTTLAVKHAPRMGARLATEILTALETQSVTVPGSKAAEIVLPKLADSLKEVLLQRKTIGDDVERMLDDHPLSRVLTSMPGIGVRTAARILLEVGDGSAFKSAGHLAAYAGIAPVTHRSGSSIRGEHPARSGNRKLKRALFLSAFAALGDPTSRGYYDRKRAEGKKHNAALICLARRRCDVLYAMLKNKTHYQPPVTAAA

SEQ ID NO: 260273 - protein, 458 aa, unidentified
MARPKRTKETLPVLNPHAAGIDIGNEEVFVAIPEDADPNPVRHFQTFTRDLHTLADWLKEKGIQTIAMESTGVYWIPLFQVLEERGFKVCLVNARHLNNVPGKTDVADCQWIQYLHACGLLQASFRPEQAVCAVRTLLRHRDGLIRDAAGHIQHVQKAMTQMNLRLQNVISDITGKSGLAILDAILAGERDPKLLAELRDGRIKATEETVVKSLEGDYRPEHLFTLRQALGLYRTYQTLINECDSEIERMLSEFDSRSEPPSDPSSGGPGKFKSTSRKLAGGNRLQFKHSDMNSEVYRLYGTDLTLVPGMGALTLVTLFSEVGRDMSAFRSDKHFCSWLGLCPGNKVTGGKVISSKTNSVASRAARAFRMAANGLWNNHSCLGDYHRRMAARLGKQEAVTATAHKLARIYYHLVLTQETYDDSKFILDEQAHKIKREARLRREARRLGFEIVAQATVT

SEQ ID NO: 260274 - protein, 397 aa, unidentified
MYIVGIDIAKRKHEAAVIDGEGTVIIKPFSFTNNCSGYNRLLAMLTKAKLPLDEVSFAMEATGHYWLALFTRLQKEGFRVQVINPVQTNSIRSFYIRQAKTDPRDALLIAEVIRFGHFSESTLHPENIYELRELCRGRHAIVSMQADVKRKVVALLDQVFPEYETAFTNMFSDTSMAILQTCPTPKELSEMPLEELCHLIEVSSHKRFRMAKAQELQALARNSFGFAMAGDVFSTMIRLYAKHLDFLKQQVREMDRKIAEIMETLDTPITTITGIGPTLGAYILSEIGDISRFSSAAKLAAYAGIDPTMRQSGEYNGVRNRMSKRGSPYLRHAIWLAASSAVLHDPALKLYFQKKRDEGKPYMASVGHACRKMVSIIYAVMRDNKAYTPYIPNEISA

SEQ ID NO: 260275 - protein, 358 aa, unidentified
MASIASTSRVVVGGIDTHKDLHVAAVLDTGGVLLGTEAFSTTRAGYRALVGWLRGFGDVRLVGIEGTGSYGAGITRHLGEAGIEVAEVDRPDRSDRRRRGKNDTIDAENAARAALAGRRTSTPKTKDGTVEALRVLRLTRTTAVKSRRAALQLLGNHIVAAPEELRDQVRNLTRMQLIRTCAAWRPDTSGFRDPVCATRIALKSLARRILELNDEIADLDQLITALVGELAPQLLAAVGIGVETAGQLLVTAGDNPQRLRSEPAFAMLCGAAPLPASSGKTQRHRLNRGGDRQANSALHLIVITRMRVDQRTRDYVARRTAQGHSKLEIIRCLKRYVAREIYYLLKPPTQANMKSRAA

SEQ ID NO: 260276 - protein, 346 aa, unidentified
MLYAGLDLSRKRLDFHLLDGEGATVELGSAPPDADGLHTLTRRLKRYGEPIRAAIESMNGARFVHDRLELAGWQVEIADAQKVKGLAPLACKTDRIDAWVLAELSRRELVPAIWLPDPLVRAERERARWRLHLVRHRSSLKQRVHAVLLTHGKPCPVSDLFGLRGRELLHRLALPEPWQATLEASLRLIDELDREIGDCEAELRTLGADHRYVPRLLTVPGIGWVLAYTIAAEIGDITRFPSPRKLAGYSGLCPRVYQSGESDRRGPLAKQGPKYLRWALVEAAVHASTHPAYRNRYHRTKQRLGKQRGAKVAQVDLARRLAEAIWHMLTRNQPFAPAGATDPLAA

SEQ ID NO: 260277 - protein, 339 aa, unidentified
MKNVSTIGLDLGKVVFQVHGVDAQGTVAVQRALRRSQVVDFFAKLPACLVGLEACPAAHHWARELKQLGHDVRLIPPAYAKAYVRRNKNDAADAAAICEAVSRPSMRFVAIKTPKQQAAAGVHRVRELLVKQRTMLTNQLRGLMAEFGVVAAPGRGRLGGLLAILADAEDQRIPPLLAEALAANVQVLQVVEEQIAAVDKLILAWGRDDQTCRHLRSIPGFGPILASAMAAMVVEPRAFCSGRDFAASLGLVPRQMGTGGKTLLGPISKRGNGYLRRLLVNGAMSVLSSKRARQDPWLVKLLETKKRKVAAVALANKMARIAWAVMLRQENFRVQPTAA

SEQ ID NO: 260278 - protein, 324 aa, unidentified
MDIQPLVFVGIDIAAKTFTATWLHQGQSLAKPITFAQTPDGWQSLQQRLLATGVAPEQILVVMEATGSYWITGATTLVAAHFRVSVINPAQAHYFAKALLKRSKTDAIDAATLAQLLQPASWTPPPAVYHEVQQRLHQREALLAMRQQVRNQRHALLQHPIVVTAVHDRMDVLITTLTEQIAAVEAEIATALDQDAAWAAAAKRLQTIPGIGVLTAATLLTTTLKFTVCDTAEATASYAGLVPREWSSGTSIARTARIGHTGNTQLRTSLYLATLSACRHNPIIKPFYDRLRAKGKRNKVARCAAARKLLPGIQASGTATAALR

SEQ ID NO: 260279 - protein, 383 aa, unidentified
MISVGIDVSKGKSTVCILKPYGEIMCSPFEMLHGEKELNALDDLLNKLDGEIRIVMEATGIYHLPILTFFHEKGYFVSVINPFAMKKYAKDSSIRGAKTDKLDSIMIANYGIEKWFKLQRYKGDEEIYAELKLLGRRYRHYMELHVKALQELTHILDYVMPGIKKMFNSWNEANGKDKLSDFVEQFWHFDLITAMSLEKFTEEYLDWAKEKKYHRSRSKAEAVYELASNGISTLSSGTPSTKMLVQEAISVLRTVDSSLFLILTRMQELAKTLPEYSTVREMGGVGDVLAVKLIAEIGDIRRLHSAKALIAWAGIDPPPYESGQFIGSKRKITKRGSSTLRKVGYEVMRVLKSHPAPKDDAVYNYILKKESDCLLYTSDAADD

SEQ ID NO: 260280 - protein, 348 aa, unidentified
MAVTIVETRAITGGAGTHAGTHVAAALDPVGGLLGVREFPATSAGYTGLLGWLGGFGTVCLAGVEGTGSYGAGLARHVTAAGVRVVEAGRPDRQDRRRQGKSDPLDAVSAARAAQSGRARGAPKGRDGAVEAIRALMVARRSAGGERTRTTSQARALVLTGPGDLRTRFARHTPAALVTGLASLRPRPGDVVGYATRIALRELGRRAEFPGGQLERLDELIVPLVTARAPGLLALFGVGPNTAALLLIAAGDHPGRLRSEAAWAHLCGAAPIPASSGKTVRHRLNPGGDRQANHALWRIVFTRLGAHPATRAYAERRTAEGKSKAEIIRCLKRYVAREVYPRLRTPAG

SEQ ID NO: 260281 - protein, 372 aa, unidentified
MREYSTDPIWVGLDVHQSRVTAAVLHGDSEKVHVVNLPGEVNAVRKFFRRLSEEGAPRSCYEASGAGFVLKRMLDRDGFHCEVIAPSLIPRKPGDRRKTDRLDAVRLAELHRGGYLTSVRVPDEDQEAVRQLVRTRLSVQRHITRVKHRIVRVLAGQGHRFTGTRSNWTGKHRAWLERMRHELEGPQRVVLSTHLDHLEYLESEQRSLDAEIERYSHMEPWRESVEALLCFRGIKTLTAMTLVTEIGDIRRFRSPRGLMGYTGLVPSERSSGDVERRGSITKSGNAHLRRVLVEAGWHYRHRSRTDQRLIRRRQGQPAEVVAIAVKAQHRLTKRFWRLRERKHMNKAMTAVARELCGFIWAAMNVVARTREA

SEQ ID NO: 260282 - protein, 345 aa, unidentified
MSMVRMIVGGVDTHADTHVAAAIDANGGVLGIESFPADQSGFEALVGWFTSHGEISMIGVEGTGSWGVGLSRFLHGHEIVVVEVDRQNRQNRRKVGKSDPTDAVSAARAALSGSASVTPKTRNGPVEQMRILMVARRSARQQRIATLNQLRHLVFTGPEKVRARFKDRYKTGLITEVARLRPRKGSDPVLYTTMATMRGLARRIQTLNNEIKGLDEMLTELVIDTAPSLVGLYGVGTDTAATLLVTAGDNPDRLHSERSWAHLCGVTPIPAGSGKTSGRHRLNRGGDRQANAALYRVVLTRMSRDERTRAYVARRRAEGKNTPEIMRCLKRFVARETYKHLPRTT

SEQ ID NO: 260283 - protein, 336 aa, unidentified
MKKISYFIGVDISKSTLDVAIIDQNQPNAVLHSVFSNTKTGINSLLSWVRKNTCKDKEEVVFCMEHTGVYGLPLCSTLSEKNLLYSLVSALEIQRSIGIQRGKSDKADSKAIAKYIYLRRDNIKVTRMPDKELLKLRYILSQRDRVIKAKVMFENSKEVERFCDTAASKVLEKENKAIILFLKKRITHFDTLIEKIIIENPVMENQYKLITSIPGIGLQISANIIAYTQAFTLFDCPRKFACYSGVAPFPYQSGTSIKGRSRVSHLANKKMKSILSLGALLAIRNDTEMRLYYQRKVNEGKNKMLVLNAVRNKLLQRIFAVVKRETPYVKLALHIA

SEQ ID NO: 260284 - protein, 331 aa, unidentified
MKNVNESAGIDVSKLTIDVHLFKKNKHHQFVNKSNGFKEMIQWIKKEGLVVEEVLFCFEHTGWYCLELSFFLHEIALKYTCVNPIEIKRSIGLKRAKTDKDDAGYLAHYAWLRREEIKQPVPPSQNIIELQRMMSLREQLVKQSVALKNLRTGMLQIVISREIDPSILILDQTIKELEQQTKNIEKEMELLIKSDTNLKENYLLSKTVKGVGKILAVQMLIHTHNYTRFLSWRQFSSYCGLVPYPYQSGTSIRGRNKIHSISDRKMKSLLSMSAISAIRSDKELKMYYEQRVKEGKPKMVVINIIRNKIVARVFSTVKRGTPYVELNKFTA

SEQ ID NO: 260285 - protein, 409 aa, unidentified
MDIVPIYKRVIGLDVHQAQITGCAITEQPDGSVTYERREFGGFKRDRKALAEWARAIAPDVVVMESTGIYWKSPYAALESVGIVAWVVNARHVKAVPGRKTDVADAQWLASLARAGLLRASFIAKADLRSLRHIARQRQKLGGMLASEKNRLHKLLTDAGIRLGVVVSDLHGQSARAMVKALIAGKTVPEVLSLASKRLRASRQDIFEALQAEEITAAHRFVLTEIMAHIEELEARMARFDMELLRCLHEAGYGGALRLLQTLPGIDQMGAAMLLVEIGSDMSVFGSAQRLASWVGMCPGNNESAGKRKSGRIRKGNAWVRRLLCEFAQAAGRSRCALKDKFQALNVRKGHKRSIVALGHKMLRTIYAMLSKNTHYVDKTVDYEALMVARNAPRWLQMLVKHGFVPTPA

SEQ ID NO: 260286 - protein, 348 aa, unidentified
MTIVSEKYAHVIGVDTHARTHTYAIVSTTTGARAGCEAFPVTSAGMKRAIAWIRRGTSGQVLASVEGTSSYGASLTRALTAEGITVVEAKPPRKAVRAGVGKTDEINGTAAATGVLGTDVDRLLHPRTDGARAALSVLLASRRRVEKQSTANRNALNALVGQIDLGLDTRWAVTDKQVAEIRAWRPRTTDSVEQQIAREEAIDLARGITAAAARVKLIKAHLAELDEQLAPGLQAQPGLRPVTVGIILAAYSRSGRVRNEAAFASLAEVSPLQASSGNTTRHRLNRHGDRQLNMALDVIIKTRMRFDETTKKYVERRTAQGPSYREIKRLLKRYLARDLFRQLQQLLS

SEQ ID NO: 260287 - protein, 338 aa, unidentified
MTSKISILAIDLAKGSFQVCAVGLDGMVVFNRAVSRTRLATLLAEHPACIVAMEACATSHHWGRFAQSHGHEVRLVPAAYVKPFVKRQKNDRADAEAIAEAALRPTMRFVAVKSAATQGRAVAFRTHQCMVRQRTQLINALRGHLAEFGLVAPKGPASLKLLENALADQSTDLPAPVRHMGSIYVEQIARLTEVIDRLSDELETSSKTDEQLRRLCTIPGIGPVTAGAVAAFAPDLDTFDSGRNFAAWLGLVPRQRSTGGKARLGSVSKMGQTDIRRLLIVGAMSVIRWVVRKGGSANRWLAAIVARKPKMVAAVALANKMARMIWALSTKQENYRMA

SEQ ID NO: 260288 - protein, 405 aa, unidentified
MTVYIGIDWSSKKHDIVYLNEAGGMIAYQTIPHTPLGFEAFDDQRMKLGVEVEDCLVGIETEHNLFMDYLSSHQYRHIYVIPPTTIKDSRGRFGASKANTDRSDAHLIADMLRTDRARLHLWHADSLLTQQIAALASLEQFLTHTIIQTNNRLRNVLWRYYPNAASVFSGLDLQISLQFICAYPTPQAAAQLTFEQFKTFARSHHHSAPSKLPACFARLQKPQPEARQQTVLAFQSEAVRLARLSLQAVRDKAATIREIQELFVEHPDYPIFSSLPGVGKILAPALLAKFGDDRQRFPTPQVLQSVAGTCPVTRQSGKHKYVSFRYACDHEFRWIVQQWAKCSIDDSVWAYSYFQSIRPHCDSLSHAYRRLANRWLEIAWRLWQDKVPYDEERHLRFHALRVKPI

SEQ ID NO: 260289 - protein, 449 aa, unidentified
MPKKRAKSVNLPIMEPNAAGVDIGTTQIFVAAPPERDPDPGRCFQTFTVDLEKLADWLQQCQIQTVAMESTGVYWIPLFQILEKRKIEVRLVNAHHVKNVPGKKTDVEDCQWIQHLHACGLLRGSFRPADEICAIRSLWRHRDNLIELATIHLQHMQKALDQMNVQLHHVISDLAGATGLAIVDAILAGERDPAQLARLRDWRIRASEETIMKSLVGDYREEHVFTLRQSLESYRHYQDQIQKVDARVKQMIQTVPSKVAEGEKPPKERNPRKTPWRNEPPQLRDDLYRTFGVDLTQIPGINTLTAQMIFTEIGPDFSRFPTAAAFCSWLRLCPDPKISGGQVLSSRTRPTKNRAALALRMSAQGLHRSQSYLGDYFRRMRARMGTPKAMTAAAHKLARIVHYMVTTQREYDATVFQDQERRTQDRKRTKLYAQGKEFGLQLVPAEAVP

SEQ ID NO: 260290 - protein, 416 aa, unidentified
MKSASSSLPDQPVNGVTAGLDWACEDHAVAVVDDRGQEIARRTVAHSAAGLRDLAGLLDLYRVEEVAIERPDGPVVEALLEAEITVVVISPNQVKSLRGRYGSAGHKDDRFDAFVLADTLRTDRARLVPLVRDSEATIALRQMCRARKDLVGHRVAATNQLRAHLHNVLPGVVGLFADLDSAISLAFLARFDCQDRVDWLSAKRLAAWLASVGYSGRVDPAELYARLVAAPRGATGQYGAAQTHTTKALLAVLTTLSEQIKALTVQISRQLALHADQQIFTSLPRSGRIRAARLAEIGDCRGRFPSPDSLACLAGVAPSTRQSGKSRAVNFRWACDKNLRDAVCDFAGDSRHTNPWAADLYQRARDRGHDHPHAVRILARAWLYVIWHCWQNSSAYDPNQHRALQRFLNQDHRAAA

SEQ ID NO: 260291 - protein, 412 aa, unidentified
MLFVGDDWAEDHHDVEVQDEGGHRLARARLPEGIAGLSRLHELIAENLTDDDVDAETGFLTQSVMIGIETDRGTWVSALVAAGYQVFPLNPVQVARYRERHGASGAKSDRGDAHVLAEIVRLDRAHHRAMAGDSPEVEGLKLVARSHQAFIWDRTRHFQRLRSALREFFPAALEAFPDLMAAEALELLERAPDPARAARLSRSKITAALLRAHRRDPETKAEAIQALLRAPALRQDPAIEAAYAVIVASAVRLIAQLNTQIVELQAVVAEGFGRHPDAEIVTSQPGLGPVLGARVLAEFGDDRHRYADAKARKNYAGTSPITRASGTRRVVLARYARNKHLADAAHQWAFCALTASPGARAYYDSIRARGAGHHAALRQLGNRLVGILHGCLKNRTPYSEDTAWPQRNANAA

SEQ ID NO: 260292 - protein, 320 aa, unidentified
MRNAVGLDISKTTFDATAIIGGIEKSAKFDNDSKGFEQFKDWLDKLNSPDAHICMEATGNYYEGIADYIGSLYKVSVVNPLKISKYAESRFARTKTDKQDAKLIAEYCQTAKAQDLVIRKPIIDDGYKLKRLSALYAQLTADSTAQKNRLEAAKDTFVVKICQSNIKHLQRQIKAVKKELEKLTKQPALKDQTDRLATIPAIGRLTAVMLLNYLSGADFQTSNKFAAFAGLTPQIKDSGTSVRGKQSLTRYGNRRLRAMLFMPAMVAYRIKAFPDFIARLEAKNKPKKVILAAIMRKLAVIAYHVHKKGENYDPTRYKAA

SEQ ID NO: 260293 - protein, 359 aa, unidentified
MLALGDSALRKGADAMTFVGCDLHTRMQQVAVLDTGTGEVSERQLAHDGSAIEEFYAALPGPVTIGIESTGYAVWFHTLMQRLGHAVLVGDAAKIRAMVVRKTKTDRRDALHILDLLRHDRFPTIWVPDPATRDLRALLTHRMRLVRIRTMVKNGLHAIALNYRLVRGSKLLRQAGLAQLHALALPPHTARRRDQSLELLAGLNTQIRELDDAITTAALAHPDAPRLITHPGVGALTALATVVVLGPVARFSDSKHVVSYVGLAPALNASADKYHLGHITKQGSTLLRFALGQAAAHAARMDVDLKRTYFTLVHRRGRPKAKVAIARKLLVRLFIMLRDQIDYDEFQRRGRLTPAIASG

SEQ ID NO: 260294 - protein, 421 aa, unidentified
MKDSGVKKTNTVKEGTLIVTVDIGMSSNHGYCTAGDGRSTKTFKFDNTREGLDTFWSMVLSSKARFRCTEVIVGYESTGPYGEPLIHYLKQKPVKIVQVNPMHTKKMKEINDNSPLKTDSKDPGVIADIIRLGHALSVVVPEGDVAYLRRLNNARERHVKERTGLLNQLQQFVFITFPEFARILKTIDSKTALYILKKYTTPARIGSANHEELGKEMRRQSMGKFSTEHAAALINFAKTTIGIQEGLQGLVMDIQHVLIQLDLLNGFIAAILDEMEITLNRIPYSRKLLSIKGFGIVTVAGLIGEIADFTKFTTQSEITKLAGLNLYEVSSGKKRGQLKISKRGRSLLRKILYYAAIQTVRKNGIMHDYYQKLIGRGMKSIKALVAVSRKLLRITFAMVRDDSEFIVNYEAQKKEVMKEAA

SEQ ID NO: 260295 - protein, 370 aa, unidentified
MREYNTYVGLDVHKDSISIAIADESRTGEVRYYGSTGGDLVSLDKVVKKLRSHGGELHFVYEAGPCGYGIYRHLSRQGLSCTVVAPSMIPKRPGDRIKNDRRDAESLARLHRSGELTAIYVPREDDEAMRDLTRAREDAVKAQRISRQELGAFLLRHGLRYSGKSHWTSIHKRWFAEIRMGHPGQQITLQEYINTEQENGERVDRLTEQIRQLIGSWRMEPVVKALQAMRGISLIVSATTVAEIGDMSRFANPRELMAYIGLNPSEHSSGDKIKRGRITKTGNGHVRRSLIEAAQAYAHPARISRRLVGRQESLPKSIRDIAWKAQLRLCGRFTRFIARGKNRNTAITAIARELCGFIWAMAKEVSLQPA

SEQ ID NO: 260296 - protein, 318 aa, unidentified
MTFIPIGIDIAKAKFDAAALRNGKYKTKVFQNTPEGFKAFLAWLQAFPTPHVCLEATGRYGEGLALFLVDHGLAVSVVNPAQIHAFGQAELSRTKTDKTDAKLIARFCLSQRPLLWQPPPPAVRQLQALVRRLESLLEMRQMEKNRLDGADPTVRASIEAVLASLDAEIAATQKRIREHIDRDPDLRQRRDLLDTIPGLGDATIPVLLAALGDVHRFENARSVAAFAGLSPKEHQSGKWKGHTRLSKTGDALLRKALYMPAIVARRHNPLIRAFCERLKAQGKNGKLIVGAAMRKLLVLAYGVLKSGRPFDPNFALAS

SEQ ID NO: 260297 - protein, 415 aa, unidentified
MEIVYERVAGIDVHKRQITVAVRTPGQRGKRRTQVRRFATFYAALREMTAWLVGEGVTHVAMESTGVYWMPVFHALAEPDALEIVLCNAQHVKNVPGRKTDVKDAQWLAQLMEVGLLRGSFIPPAQIAVIRQLCRYRRTLVEERTREGQRLRKVLEDGGIKLDSVASDVLGVSSRAMIRALIDGERDAAVLADLAQRTLRRKIPDLTLALAGRFAEHHGVLCQLHLDHIDHLDAMIARLDARIAQATAPFADACHRLTSIPGVGEHAARAIIGEIGVDMSRFPTAAHLASWAGLCPGNHESAGKHRSGKTRHGNAHLCTILVEAAWATDHTHSRLGSRLRRLKRRMGKKSGPKAAVAVAHTILTIVWHLLAHGGTYTDLGADYYTRREHDPEQLAATLKRKIESLGYTVELSPAA

SEQ ID NO: 260298 - protein, 330 aa, unidentified
MKNYDEVVGIDVSKKTLDAYCYQAEVHRVFVNDIIGYKSLLKWVFKVTKDSNVFYCFENTGYYSLKLALYLDSQELVYVEESPLKIKRCSGIVKEKTDQLDAKLIARYAWIYKEELCPSTVKSTSHLELGRLLALRDQLVRNNAGLKGTLKEMKVLLSSSTTDLGCISLKRSIDYLSKQVKAIEARIKAIISNEVSMSRNYELLSSLKGVGLVVACQLIYHTGNFTRFDSWRAFSNYCGTAPFEHRSGTSIHRRKKCHYLGDRKMKSLLSMASVSAIQHDSELRLYYKRKLAEGKDKMLAINNVRNKLIARAFAVVKRGTPYVVLQQHVA

SEQ ID NO: 260299 - protein, 341 aa, unidentified
MTKPNLLAIDLAKNVFQVCKLCPNGKVIYNREVSRAKLKEILINEKQALVAMEACGSAHYWARFAISAGHIVKVINARAVKAFQTKQKTDRNDALAIGVAAQQEHIHGTHIHSTEEQALQSLERMRHLAKVQLVAQSNQMRGVLAEFGVILPQGLSKLRKEIPFILEDADNSLPDSFRTALHRSWSHLLCQIEHLQELDRQLESLVKSHHICKKLMKLEGVGALGLALRLGRGENFSNGREASANIGLTPKQNSSGGKERIGHISKYSADKRLRSVLFQGALSVITHVLNRPATTNKEQWLQALVERRGKKIAAIALANKTVRTAYALLKNDSDYQPIKLS

SEQ ID NO: 260300 - protein, 412 aa, unidentified
MKILEAIHERTAGIDIHQKTAVVSALIEQKNGEVEIITQEFGTSKKRLQDLAKWLLELKVDLCVIESTGVYWKPVHRVLEMAGLTLAVVNARHVKNVPGRKTDIKDSQWLGSLGRYGLLKASFVPDEDLQQIRLITRYRNKLVGMLASEKNRMHKMLVDAGVHLANVVSDINGISAQAIIEGLLNDVAIEEILKQLKGSLKGKATAIREVLEEITLSKRHRFVLSEIRGHMRELEKRLAGVTAEIFEAMKPYEQQWKLLQTIPGIDAVGAAMLIAEMGVNMERFGSEEEFCSWSGMCPGNHESAGKSKSGKRRKGNAVIRKVLCELSNGAIRTKSQFKSKYQTLVIRRGHKRAVVAIGHKIQRVIYCVLKKGQPYRDPGIDYQGLVVKKNAPRWMRALEEFGYLPKPATQFA

SEQ ID NO: 260301 - protein, 351 aa, unidentified
MNKKYLCFGLGLDISKATFDACFGGKLSNGDFKVIRTKKFKNNPTGFEAFITWIEQNRVKNKLEKLDFKIMMEVTGVYHESVLYCLYRKGYQVCLELGSRVKHYCKAIGLKSKNDKIDSKGMCQMAYTLNLKLWKPVSESILNIRSLLRHRKALLKTKTSLGNQLHANMISEVKDPEVANSLIKMIKQLKQEIKIIEARAKLLSKSDKEFHRKVMMVTKSVFGLGFISVLTVVSETNGFKEFRNRKQLESYAGLDIIENSSGVFSGKTRISKKGNANIRTVLYMSVLTIIKSKSKPYYDLYSRLMKRNGGISKKANVAVQRKLLLIIYTLWKKDEAFDISHYASVKEVVPA

SEQ ID NO: 260302 - protein, 391 aa, unidentified
MTILVGIDVAKDKHDCFFMNSEGEVLAKPFTIFNNKEGFDFLYEKIQSVSSSDNIKVGLEATGHYSYNIIGFLLNKGLATFILNPLHTNLYRKSLSLRKTKTDKIDSKTIAMMLLSDVSLKSYSDISYHNEDLKSLTRYRFSKVEERAKLKTSLSRLAQILFPELEKLVPTLHMTSIYQLLEEFPSASAIASVHLTRLTNLLSKASKGHYDRETAIKIRDAAKNSIGSNMPAKSLELKHTIKLIRALTIDIGEIEAEISKMMDMIASPITTIPGIGRNIGAMIISEIGDFSRFSSPDKILAYAGFSPSIYQSGKRDNCYAHMEKRGSRYLRYALFHAAKLVCHWDKTFADYLAKKRAEGKHYYVAISHAVKKLVRVIFHIEKTKQAFLKAS

SEQ ID NO: 260303 - protein, 370 aa, unidentified
MHETITSYVGLDIHKDSVAIAIAPAGRGAPQFIGTTASNLAQVCKILTRQKCVRSTTLVVYEAGPCGYGWARYLNAQGWCCEVISPAHIAHSAASKAIKTDRRDALLLARESRAGNLTQIVLPDSRDEAMRDLSRAREDAIAARLRARQQLKSMMLRHGRSYHSNTWTPAHERELAKVRFDHPAQQIAFDEYRQMVTEAHERLERITQALREQCAEWRMRPVVEALMCLRGFDFVAAITIVAELGDLTRFAHPRALMAYLGLVPSEHSSGNTRRQGAITRTGNRHARRILVESAWTYRFAAHVGREQQVRQERQPKLIRDIAWKAQLRLTQRFRKLNLGRKMKMTKVCVAIARELCGFIWDLARHVPVHA

SEQ ID NO: 260304 - protein, 401 aa, unidentified
MNAVGIDISKGKSMVCVMRPFGEVVLEPFEVLHTAQNLNDLAGKLKALDGETRVVMEATGNYHKPVAFVLHDAGLFVSVVNPVLIHDYDNNSLRRIKTDRKDAVKIANYTLDKWTRLRQYLPEDDTRLALKNCYRQYQQAVAIRTMLKNNLISSLDLTFPDANKLFTSPAKNNGCEKWVDFIGDFWHSECISSLSADAFAKKYLKWCQKHGYYFTRSKSDEIYTCAVNAASLPKSATSKLIIQQQVAQLKAVSKSVAAFQQEMLRLSQQLPEFDTVMEMYGVGPSLGPQLMAEIGDVRRFSSKKSLVAFAGIEPQPNDSGKVVGNDSGISKVGSAVLRRTLFLIMSVILQTRPKNEPVYDFMDKKRSEGKPYKVYMMASANKFLRIYYARVKAVMDSTSSN

SEQ ID NO: 260305 - protein, 353 aa, unidentified
MPSKADTAIARTIGIDTGKNTLHVIGLDEKGAIVLRERVSRTRIAARFVNVPPCLIGIEAGMASHHIARELVALGHEVKQVPPAYSKPFRQGHKNDFRDAHAVAEAAERPSTRCVPIKTDEQLDLQALHRVRSRLISNRTAVTNQIRGFLLEHGIPVRQGHHFLRRQLPQLLGTRTDVLSPRMIRVIGDLMSDWNYLDERIERVTDEIESLARADEGCQQLITVPGIGPIISSAMVAAIGTGAAFCKGRDFAAWLGLVPKQMSTGDRTILGRITRRGNRYLRTLFIQGARAILLRPTGWAKHSFGSWLAAAARRMHRNVLAVALANKLARIAWTVLAQARCYEARVEPRVEPA

SEQ ID NO: 260306 - protein, 341 aa, unidentified
MQIRSVGIDLGKTTFHLVALSAAGKVLLRKKFTQKQLLTFTANLQTSLIGLEACSGAHFLGRALREQGHDVKLIPAQFVKPFVKSNKNDFLDAEAIAEAVDRQNMRFVPIKTDDQLQAIHRVRDRLIARRTSVINQLRAFLLERGMTFAKTPAKLKLAMPEILENADANLTPRMRNLVGLLWSEWKDLEQQIVAMNMEVEQIASSEPACQRLRQIPGIGPLVATAIVAAIGNGAAFHKGREFASWLGLVPRQHSTGGKARLFGISKRGNRYLRKILVHGARSAVLRVKRERAPFGTWLDALQTRAPLNVVVTAMANKLARIAWAVLSSGQEYRPAASVVAN

SEQ ID NO: 260307 - protein, 344 aa, unidentified
MVYAGLDVHKRCTQICLEEENGALLERRILTERHRLLEEFGGKPPMRILLESATESEWVARCLESAGHEVIVGDPNFAPMYAQRSRRVKTDRRDARALMEACKLGAYKPAHRCSDVHHRVRARISARDLLVQTRTKCISLVRALLRHEGIKPERKSSATFAQRVREIGAPDALAIELAPVLDLIDALNEKIRRADERVSEIARDETHQRLMSVPGVGPVTAVAFIATLDDPKRFRGPKQVRAYLGLVPREHSSGEKALRGRITKQGSSRMRRLFVQAAWAVLRSKPTPEAEPLRRWTTNVAGRRGRYVAIVALARRLAGILFAVWRDGTSYRAPGPLGGGEVTT

SEQ ID NO: 260308 - protein, 346 aa, unidentified
MKILALDLGKYKTVGCDYEGESGVHQFKKSYTTPAALQKLVQEVKPDRVVIEVCSIAGWVCDLLRPMGVEVQVANTSDDAWRWRKVKQKDDRRDALKIARLSAVNQLREVYIPQIDVRQWRALITYRQQLVRRRTKIKNHIRDLLLREGQILVRGSKCWNKLNLELLSSLAQPLAEVSMAELWRGELHEELQQLQLLQARIATVEEKLNGMGAADERVQLLRTIPGVGPRLAEAIVALLDQPQRFRKASQVSGYIGMVPKALDSGETERRGRITRQGSRLVRSLLVEVAWAGLRHSAWVRQTYQRLSGGKKARKKIAIVAVGRKLLVRCWAMLRDKRAWDWQPQIT

SEQ ID NO: 260309 - protein, 412 aa, unidentified
MRVVFSVGCGLDVHKRTVTACLLKLGARGKVVKETRTFQTTTAELRKLAAWLAANGCQHVAMESTGVYWKPVYNVLEEVCTLVMLVNAQHIKNVPGRKTDVKDAEWIAELLVHGLLTGSFVPPKEIRELRELTRYRKKLIQQRGDQCNRIQKLLEACNIKLASVATDVLGVSGRDMLEALVAGETDPAVMADMARGRMRSKIPQLTAALEGVASDTQRWLLGEQLDHIAELDEKVVRLDEKIEELMRPFAVLIEKLCEIPGVGVRIAQVILAEIGTDMEQFPTSKHLASWAAMCPGHHESAGKRKSGRTRRGNNWLKTALMEAGWAASHTKDTYLAAQYGRISRRRGKKRACVAVGHSILTIVYHLLSHPESHYSDLGPDYFQLQDKQRLAQKLMRRLANLGYHVAIQWTAG

SEQ ID NO: 260310 - protein, 278 aa, unidentified
MEKRYIGIDLHRNRFTCCIRLENERTYVTEWALEDLARFVKKLRTTDEVAVEITSNTRLFFDAVAPQVKRVVVVDTNQFRVISQSVKKTDPHDARLLSLYLSKDLLPEVRMKDKDLAQLASLTQTRDTLVKQRSALKNKVNNILSARGLNLAKEALSSEKKLNEVVELPFDEIVRIELRVIVEQIRSLNKSIAELEKAIGDEGSKLEGHQGLSSIKGIGKITGAILLSVIGDVNDFPDEGRLASYFGIVPRVSNSNETERSGRIHKRGSKLGRTALVQ

SEQ ID NO: 260311 - protein, 331 aa, unidentified
MNYSHFVGLDVGKKTFDASLMSADEKELSHKSFDNTPEGIQSLLDWIAGYHLSLSKLLFCAENMGSYVTELSVSSVSMGFSLALVCPLTIKKSIGLQRGKNDRIDAKRIANYAVLHYRKLELYKLPDKDLVRLRGWIIIRDNLVKQKVSSIKLLETFSQMAKLANATEAISFLEEQLKSIKEKILEVEEDMEQLIAVSTSLYTNYLLLRSIKGIGIINAIVLLCVTDNFQRFDNPRKFACYCGVTPFEHTSGISIRGKTQTSSLANKEVKVYLTRAAITAISWDPQMKAYYKRKIAEGKHKASVINAVRAKIIARSFAVIRRQTPFVTLAV

SEQ ID NO: 260312 - protein, 414 aa, unidentified
MRNLFVGIDVSMKDFKVQFMDHLGETITKRQRFSNDNPGMESLVQLILEICQANDIGCVMVGLEATSVYSWHLQMGLTSDTRLTPYNCQVYSFNPKVVANFKKAYPDLPKNDWTDAWVIADRIRFGRLPENSQVDFRYLPLQRLTRFRYHLMQTISREKNYFLTNLFLKFNTLQQNEVFSNLFGATSEAILTEFLSPEEIAARPLEDLIDFLMEKGNKHFSDPKATAEALKKAARNAHRLRGDLLEPVNLILATSLETIRCLEKQVKTIDKAIARELANFKHTLDSVPGLGPVMCAGLIAEIGNIHRFNNDSALAKFAGLTWRSHQSGEFEADETPLTRTGNAYLRYYFVQAANLVRQHEPEYRDFYARKYRESKTHHHRRALVLTARKLVRMVDALLRSNQLYMPQGQRRDSN

SEQ ID NO: 260313 - protein, 425 aa, unidentified
MTLHSDVATAGAAEDYAAFVAIDWADKKHVWVLQKAGSSDRQQGEIEASPEAVDAWVSELLLRFPGRRIAVALEQKRGALLCLLSKYEALVLYPVHPATVSGMRSALYPSSSKDDPKDAHLLLDLLVYHRHRLRRLDADTVETRKLQILVEDRRKLVDEQTGYSNQLRAKLKLYYPQALRWLPELHSTLAGDFLQRWPTLPLLQKARPGTLRQFLQEHNCRSEEWIQRRLEEIPKAMVATTDPAVVDSSVAMVRALVALLGTLRTHIAEFDRQIAATAAVHPELPIMDSLPGAGPVMVPRLLAAMGTQRERFACASELAAMTGIAPVKQDSGQSQWTHFRWKCPKFLRQTFHEWAGHSIAQSKWAKAYYDDQIRKNKRHHAAVRALAFKWQRILFRCWKDHQPYDEQKYLQALRRRGSPLAQALS

SEQ ID NO: 260314 - protein, 409 aa, unidentified
MIIVEVVYERCCGIDVHKKMLAVCFKNGRKHEHRQISTTTKEIKELSEWLLESDCQAVAMESTGSFWKPIYNILELSGLEVMVVNAQHMKALPGRKTDVSDAAWIADLLQHGLLRASYIPDREQRELREIVRYRKSLIEERSRELNRLQKMLEGANIKLASFVKNINGKSSRNILNKIVANEELGEKEVNELLYRGMRKKLSDIMLAIDGSVSPLQRRLIGSILDHIDDMTRRIEDMDEIVKEYLIEYEEAIAALDEIPGIGRTGAETILAEIGLDMSRFPTAAHLCSWAGIAPWNNESAGKRKSGKTTKGNPTLKTMLVQCAKAGKKVKDSFFHAQFERIAMRRGKNRAVVAVAHSMLIAIYHVLKNNTPYRRLGSDYYTKFNREKKVNAYLKKLSELGFAVSATVTA

SEQ ID NO: 260315 - protein, 359 aa, unidentified
MVSPILAQWTTLSEDFVLLGAIMDTVSLIGIDLGKHCFHLHAQDGSGRMVLRKKLTRNQMFTLLSNFPSCTVVMEACAGAHWIARRLQTLGHEAKLISPHFVKPFRQGNKNDFADAQAICEAASRPSMRFVSPRNEAQQVVSALHRVREALVRERTGTINQIHAFLLEFGISLPRGMAVIRRLPAVLETQALPPRLVAVLERLQAHFKYLDEQIGQLEHELLTQLHEDERSERLLEIPGIGPITASVLMSELGDAHQYGSARQFAASIGLVPRQYSTGGKPTLLGISKRGDKGLRRLLVQCARVIMLRIERRTDSLGVWVRSLLARRHSNVVACALANKLGSSRISVKARPKGKRCPKE

SEQ ID NO: 260316 - protein, 412 aa, unidentified
MQTLVECGCGLDVHQATVVACLLSVLKSGKVQKQMRLLGTTTRELLALRGWLLSQRCTHVAMESTGVYWKPVYAVLEAEGALEIVVANAQHVKKVPGRKTDVKDAEWIADLLCHGLLRSSFVPPKPIRELRDLTRYRRKLVESQAAERNRLLKLLESANIKLASVATNVFGVSGRLMLRALIEGKTTTREMAELAKGKLRNKISELEPALEGKLEEHHRFLLKLQLERLEAAEKDLAILEQRIQEKLEPYVTQLALLQEIPGVDWTLAAVIIAELGVDMKVFGNVSQLASWAGVCPGNNESAGKRKGSRIPKGNVYLKTALVEAANAAARAKGTYLRDKFFRLKARRGYKRAAVAVAHKILVAIYHMFSDRVSYTELGDLYLDKLNKHHLTRNLVHRLERLGYTVTLEQKAA

SEQ ID NO: 260317 - protein, 449 aa, unidentified
MKTLPVLNPNAAAIDVGSEQLHLSIAGDAPVVFGTFTDEVYRLRDYLKAQGVTSVAMEATGVYWLYAYAVLEAAGLEVVVVNGRHVRNLPGRKTDMADCQWLATLHAHGLLRGGFVPPAAIRRLQDYQRLRADHIMGAGSQVQKMQQALERMNIKFHDVISDLDGVSGLKVVRAILAGEREPQALLRLCDPQIQKKKGDRVLRSLQGTWAPEHLFALGQGLAAWEFYQKLLGECDQQIEGVLRELAGPEPPAPDPGAPAETPGKKAGKNAPQIQQLHRLLLRLCGGRDVTAIAGIGDYLLLQLLAETGPDLKAWPSEKHFSAWLGLAPGSRQSGKRKGSVKVQRNRAGRLFCAGARSLVQSVDKALGGFYRRLAARKGGLVAMKALARKLAGLYYRVLRYGLAYAEQGLRVYEEKYAESQRRLLAKLAAKQGFKLVSLQLEAHPTGVSV

SEQ ID NO: 260318 - protein, 370 aa, unidentified
MQKVLHVGLDVDDKSFHIGGFCKESGEVFEMKSKPNLGSLIKKLEKFTQQGFELRLCYEATYIGYSLCRGLIKNGYPTEIIAPSMIPELASNRVKTDRLDSIKLAKYYANELLTPIHIPDEEEQVDRGFIRSRSFLVDQRKVLRRHILSVCRFSGLHFKLETESKHHWTKKHENWLIEKVNELEGVAKLNFEILLHQLEKLNEGIAEYEKQIEVLSEQERYKKKKDALNCFRGISTLTAMTFITEIGDVRRFKHPKQLTSYCGLDVSEYSSGGKEKKFGITKMGNKRIRTAAVESCQRLDRVKTLSRRLKVQREGQDMKIIDIADRCTKRLKKKANNLLNNGKHRNKVKTACAREFLGFVWEALQVIEEV

SEQ ID NO: 260319 - protein, 427 aa, unidentified
MNETNDSNPLDQFAAFVAVDWADKKHAFSLQAAGQKKKESGTLEQKPELIGTWVASLRERFGGRPVAVAVEQSRGALIHALLSYDFLVIYPIHPTTVAKFREAFKFSGVKSDPLDTDQILQILTKHLDLLQPLRPDTQETRLLARLVEDRRKTVELRASHIQALKASLKEYFPQALELLSDNVTSRLAYDFLKKWPTFGEFQQAKPSTVKRFFYGHNVRSAQRIEQVQQMAQQSQALTTDAAIVESGVRLSQMHATVIHTLNPLIEQYDRKIQTAFHDHPEAQLFGGVPGAGPALAPRLLVAFGTDRSRYEAAGNVQSFSGIAPVTRESGQTRVVYARCACPKFLRQTFHELARLSVAQCQWARNYVDHYTGRGKKYHTVIRALAFKWIRILYRCWKDRLPYDDQKHMKSLEQRSSIFATLHLHKNS

SEQ ID NO: 260320 - protein, 351 aa, unidentified
MSKNIVIGLDTAKTFTQVCVMTRDGEILKERRVRRGKLMSFLEGYPGSVVALEACSGSHHLGRELRAGGFWPRLLHPARVRPYVGVQKNDRMDARAVCEAALRPLIRSVPVKTRCQQDLRVVLRRRQGMVSERTRLINRLRGLLAEYGLVLPRGAKAFQRGLRELMGEARWTEALSPLIQETFAEMAEELQALFAKDRALIKQIKRLQQDDEVAQHLLSIPGVGPITTAEVMASVEEARVFASGRQMAAWIGLVPRQRSTGGRTRLGRITKRGQGELRRLLVQGAKSLIRAAKHRDGPPRHQLEAWIYSHQDRLQSNIMAVALANKIARTLWVVMARNEPFKPISGNTVSA

SEQ ID NO: 260321 - protein, 422 aa, unidentified
MKNTAARKRKQVPEGYLIVGIDPHKKKHAAVAITQDLTIQAKFKFDNNRDGLDLLLQRAKSEMDKSECRGVMLAIETGGHYWRNIAYYLDDKGIPFRFINQYTLKRRREGKDINKRKNDYRDAEVAAQLLCTGEFVESVIPQGVYAELRTAHNAYRRLVKERTRITNLLKGLLDSLFPEFVGVFIDPCGLTALSVLSTCSIPGVIAGMTDDEFIAVIEKEHHRKRLMRRKLGELHDVAKTSIGIKAGAHSLSVEVFFLVEKLKLIRGHIETIDRTLVKLVDETEEGKYLLSIRGINYISVAGLLAELGCFKLYPSAKQMIKMAGSNPTESESAGRRKLRTPMSKHGRPVLRYCAWTAVIPMLRLNPDFRAWAKERRERPAHANPLNGREVVGAALNRLLRLCFAMVKNKTYYQSPYLVEAVS

SEQ ID NO: 260322 - protein, 351 aa, unidentified
MTSDHNQPTPSFASIGIDIGKDVFHIIGFDTSGKIVLRKKFKRLALETELAKLPPSIVGLEACLSAHFVSRTLRRLGHNPRIIPAIYVKPFAKGQKNDYNDAEAIAEAALRPNLRVVREKTQDQLDLQALHRVRARLVSRRTATINQIRAFLIEHGIAVRTGAHALRNSLFTIIEKRADELSLRMISIIQGLCDDWRHLDDRIETLTGEIEEISHKEKNCRRLMSVPGIGPMISTAMVAAIGAGDAFERGRDFGAWLGLVPRQYSTGGKPILGRISKRGNKYLRTLFIQAANVILMRPQNWERFSFGAWLTTAATRMHRNKLATALANKLARIAWSVLRHRTRFDEALAAV

SEQ ID NO: 260323 - protein, 341 aa, unidentified
MSAIYYIGLDIHKKVISYCIKRIDGELVRQGTVSADRKALMKWLTELPGPWYGAMEATIFTGWVYDFLKPHAVELKVAHPAMLKAITAAKKKNDRTDAEKIADLLRVNLLPQCHMMSEELRELRRVLRYRSMIVSAAVKMKNKMSGLLMEVGATYDKKRLHGKNYFGALLERVEDVPDSVKKLLKMSRSGYEMFDAIQKKLVTALRHNRLIRDRVERLMSIPGVGELTALTWILEIGDASRFSSSRQVISYCGLCSGQHESGGKEQRGPISKKRNKHLQTKLIEAAKLAPRWNEQLAHLHEKELSRGNRNRATLAVARKLVEYLLAVDRRETDFELLEKAA

SEQ ID NO: 260324 - protein, 411 aa, unidentified
MQVIYERCCGLDVHKRTITACRLKWMGSEWQKEIRQFGTMTKDLLGLSDWLVSEGCTHVAMESTGVYWKPVYNILEGQFELLVVNAQHLKAVPGRKTDVRDAEWIAELLAHGLLRGSFVPPPSVRELRELTRYRTSLIRDRARTINRLQKVLEAANIKLASVVSDIDGVSARLMLEGLVAGQRDTEQLASLAKGRLKEKHTQLVEALSCRLQPHQSFLIAEHLAQIDYLEGAVERLSRQIEEKLRPFEQEIGWLDTIPGVNRRTAEVLWAETGGDMGRFASARHLASWAGMCPGNNESAGKRRSGRTRKGSPWLRHCLVEAAHGAAHTKNKYLRSQYHRLAARRGKKKALMAVGHSILVIAYHLLTRKQAYCDLGANYFDERDRQAVTRRCVNRLQKLGYQISLEKLQMAA

SEQ ID NO: 260325 - protein, 389 aa, unidentified
MDHEGQVVGERWTQHSGASITELITWLCDHSGATPPELAIAIEIPRGAIVEALTEHGFAVFSINPKQLDRFRDRYSPAGAKDDRRDAFVLADSLRTDPHCFHAVRLDEPAIIRLRDLSRLEDDIRDEQRRLNNQLREQWHRFFPQLLALCPSTDEPWVWDLFEAAPTPALAARLSEKKILKILVRHRIRRIGVREVRAVLATPPLQLAPGTTEAASEHATFLLPRLQLLRQQRTKIATRLRKLLEELAAPNTVEGETKEHRDAEVLLSLPGVGRIVAATMLSEASQAIADRDYHGLRCYAGTAPVTRQSGKKTVVLMRHGCNERLRNVLYHWARVSIICDPRSRTHYAQLRANGHSHGRSLRGIADRWLRVLIAMLKHRTLYDPNLQSA

SEQ ID NO: 260326 - protein, 384 aa, unidentified
MQKATNTATVSVNTLECALELSKKTWLLAIQFPDREQPSVYTIKSGDAAALLANLIAARDRWAKVSGSPPSIVLCYEVGYDAFWLARFLLAHGIECLVIDPGSLEVKRRPRRVKTDRVDLKKLVRTLSAWRRGERHVWSVVRIPTIEEEDLRHSHRERSRLISERTAHINRIKGLLFAQGIRVGKITSKTLAIEKLVTGDGHRLPPRLAAEITREMQRLATVEQQIDAIEKERDTAPTTCKETEKKRHLLLQLKSIGPANAALLSREVYYRHFDNQRQIGSFLGLTPSPFKSGEEERCQGISRAGSGRVRAVMIEAAWLWVRHQPKSALTRWFLERTAGQSKRVRKIMIVALARKLAIALWRFVELGLVPEGAILSPRVIAKAR

SEQ ID NO: 260327 - protein, 410 aa, unidentified
MMKKHSYRARKVNAINWLEIKEQLGGQALVLAVDVAKEQQFALLTDYQQLSVLVKWTLLETLPLIAELKQLNCPISVVMESTGCYGDAMRHQFRQAGFAVHQASAKRVHDAKEIFDGVPSLHDAKAACLIAKLHRDGLTRPWPELDNNGRALSAARREYELHQSQYGRNLNRLEAVLSRHWPEVLALLALDSVTLENLLLHYGSPQAIAADVDAAAQQMRVWGKHFLSADKIDRVIAAARQTIGQPCLDSERRYIQTLVAELRHSRQHGQAAKQHLEEAVKTDAGLKEMAALLGHLTTAILISLHLDPRHFANARGFLKALGLNLKEKSSGQQHGPLKLSKRGSAMARQYLYLAALRLIQKDPVIGQWYRNKADPNAKMKTVIACVRKLAKALWHVSRGERFDARKLVTL

SEQ ID NO: 260328 - protein, 320 aa, unidentified
MASRESLFIGIDVSKQTLDVAFGADPHAPLETIPSTDEGVQLLVTRLQRLQPTLIVLEATGGLERMVFAQLLQAGLPTARVQPRRVRALAHAEGRQAKTDRLDARLLARFAERVRPPHHQATDEQRASLRDLLVRREQVIPMRTAEINRLTAAAPNLRPGIQQHIDWLDQEIRALEQERDNEAERTDEVRRKRELRESVPGIGAITALNLLLRLPELGTIKRTEAAAFVGVAPYANQSGAQHKPRHISGGRRDVRSVLYMATLAATRRRLVRRAFDQRLCQAGKPRKVAIVAAMRKLLTILGAILRQQKPWDPAVHTSAP

SEQ ID NO: 260329 - protein, 347 aa, unidentified
MKVLIGVDPHKGSVAVAAIDEATGELLERAGFSQDRSGLRALESWAKRFSERRWAVENAGGLGRYLAGRLTTAGESVVDVPPKLSARVRVLSTGNARKNDGLDALATALAASRTGRLAPVEPESESEVLRLLSERREDLVAERTRALNRLHGLLRDLVPGGVAGTLSADRAARVLRGIRPQEGSSSRVRRRLASEVLRDVRTLDRKIADLSGRIEAEVEASGTTLTEIFGIGPILAAKIIGTVGSVARFPSRGHFASYSGTAPVEASSGEVVHHRLSLAGNRHLNYALHMVAVCQARSDARGGTYYRKKMAEGKSRKEALRCLKRRISDAVLASLMADSQVLSRSAA

SEQ ID NO: 260330 - protein, 355 aa, unidentified
MTSTKYIGLDVHKESISIAVLNSAGKVVMECVIETKASTILQFIHGLGGDVHLTFEEGTWAGWLYDLLKPHVTELVVCNPRKNALLKEGSKSDRIDAHKLAELLYMSKLSSVYHGEHGLRMLKELSRSYLTITKDLGRVMNRLKALYRGWAIPCAGTQVYAPHYRSEWLAKIHEAGVRRRAELYYQQLDALRLVRQQARQELLAEARKHRATKLLRQIPGIGPLRAAHLVAVMQTPHRFRTKRQLWNYSGLGLETHDSAQYRVVEGQLQRSKKPVTLCGLNDNHNHDLKDIFKGAAMRASTAAGPLRDFYEALLAKGRKPTMARLTLARKIAAITLIVWEKEVRFDANYLKQQAA

SEQ ID NO: 260331 - protein, 325 aa, unidentified
MEKVFIGIDISKLTLDVFVNSCSKTQHYQIENSSKAIKKFLKNFSNDANTVVGMENTGRYNFELYEVLSGFKMLVFVINPLHLKKSIGLLRGKNDKLDSQRICMFLEKNYMDLQFWIPKSCDIQKISLLNSERRHRVKIRAGLSRQMKDLSFLKNHTDKEIIKLNKQLISLLDKQIKTIEKKIVEIIESNIELKDQYTRIQTVPGVGKILATMLIVKTNGFTEIQSARKMACYSGVVPFDHRSGSSIYYKPRVSTMADKELKKILHLAALSSIRLKNDLALYFQRKVLEGKNKMSVLNAIRNKIIHRVYALIKNNSVYENSLHTS

SEQ ID NO: 260332 - protein, 309 aa, unidentified
MLTAEADKRKTKVVVNTAAGVQALLAWCAKHGAQPAQLHAILEPTGLYHEQAATALPQVRVSLVNPAQARDFAKALALRSKNDALDSYVLARYGQTLSPALWHPAPLHARQLRALLTRREALSKDLLRELNRKEKSQFSPSAPVVDGSIDKAIAFLREQIKQIERAIDQHIDNHPDLKQDCELLNSIPAIGPQAGNAILAVMHNRHIDSAQSLAAYLGVVPVQRQSGSSLNSCARLSKAGPSQVRATLYMAALVGTRHNPHIRALYQRLLKAGKSKKAALGAAMRKQVHLCFGVLKNRIPYQPNYAMNG

SEQ ID NO: 260333 - protein, 312 aa, unidentified
MDGIFVGLDVSKDRVDAHVQPTGDRFAVGTDEAAVATLVTRVSALSPTLVVVEATGGYEIPVPAALANAGLPVAVVNPRQIRDDARATGQLAKTDALDARAIARFAAAVQPAVRPLPTPQAQALADLVARRRQVVDMLGAELNRHRQARQPRLQKRIAAHVAWLRRALEVLDEDLTELVRSSPVWREKENLLTSMPGVGDVTAQALIADRPELGQLDRRRIAALVGIAPFNHDSGQWRGRRMIGGGRPAVRRALYMATIVAIQHNPTIAACYQRLVTAGRPKKVAVIAAMRKLLTTLNAMLRDRRPWQPEIA

SEQ ID NO: 260334 - protein, 377 aa, unidentified
MSKLRFVGLDVHADTIAVAVAEAGGEVRSLGIIPNRLESIRKVIGKLAPIETLKCCYEAGPTGYVLYWQLAQMGVGCEVIAPSLIPTKAGDRVKTDRRDAEKLARCYRAGELTPVWVPDANHEALRDLVRAREAAKKDQLRHRHRLGKFLLRHGKRPTDAGKAWTQKYLNWIRIHVRFEQPALEATLKHYQEEVDHIAERIVKLEQAIDEAVKQAPAEIRVAIEALQALRGVAQTTAATVVAELGSLSRFASPSQLMGYSGLVSREYTSGNRVQRGTITKSGNAHLRRVLVEAAWTYRHRPNVQGRVLRRQKALALSEEAVKIAWKAQQRLHKRFAALTARGKESNVAAIAIARELLGFMWAIAVHTEAQQKQAKAA

SEQ ID NO: 260335 - protein, 371 aa, unidentified
MGFYWTETWQWWMNRIEQGWVGIDAGKGHHHVVLIDRDGRQLLSRRVDNDELALTGLIETVRGRVMEPTWAIDLADGAAALVIGLLLHRDQPVFYLPGIAVNRASAGYRGEGKTDAKDAAIIADQARMRRDLRRLQVLDEDIAELRLMTAYRADLAADRTRCINRLRNLLLGVFPALERVLDFTCHGPLVLISGFQTPTAIRRLGATRLLRWLERRGVRHPGRLATAAAEAAGQQTIQLPGEAAAASLVARLAQTILELDRQLADVDRKVAASFHIQQDAAIITSLTGIGDVLGAQFLAAVGGSLSGFASADHLAGYAGLAPTPRDSGYRTGNLHRPERYNRQLQRVFYTSAMISVQRSPASRAFYDGKRA

SEQ ID NO: 260336 - protein, 483 aa, unidentified
MAAGKKDANGKGSAPGGPAGDGGDGAEVSEDQARVVERAAAIDVAKGSGMVCTRVPGSRPDRRRQKVWQVPATYREVIALMDHLRCEGIQRLVLESTSDYWRLWYYLAEAAGLEVWLVNARDVKHLPGRGKSDRADCVWLCKLNERGMLRRSFVPPQAVRDLRALTRTRARLAQDQARHQARVEKILEDALLKISVVISDLFGASGRRFLDALVAGERSPAALAALGDPRLKATRRELEEALTGQFRDIHAFEIKTHLRILDVINEETARLDQAIGEQLALVPRTAPACTACGVTGGSHAPGCAGEGTPLPGLAERLDEITGVGLCNARVLIAELGTDPSQFPTPGHAAAWARLTPRTLQSGQSARPGRTGKGNPYLRGALGQSAMAAAHTDTRLGAMYRRIARKRGKQKAIVAVARVICEIAWILICDPGARFEELGPDYYTPRSRERQTRDKIRDLKRLNPGMKVLLVPDDGPGPHAATAA

SEQ ID NO: 260337 - protein, 310 aa, unidentified
MNEPRVYMGVDISKDSLDFWGSSGRPGTYANNKSGCRALACRLKKIEHVQVICEATGGYERMLVDALQSAGIDVSVVNPRQVRDFARAQGRLAKTDRLDAQVLAEYGQAMKPKATPPRSKAHRQIEEVIQRRRQLVDMAQMERCRLRQTADPAMRKSIKGLVRILEAQIKSAERRMNQLMEELPALKQAVTRLCQIKGVAMISALSLLAFMPELGSLNRAEAGALAGVAPFNRDSGTFRGRRIIWGGRSAVRATLYMVALVASRRNPMFAAFYQQLRKRGKQAKVALVAVMRKMIVYINGILKTELPAFA

SEQ ID NO: 260338 - protein, 334 aa, unidentified
MAMTTIGLDISKSWFQIHWITADGEIIRKKLARGKVLDFFSRLPSCLVGLEACGGAHHWARELIKLGHKARLMPARYVRAYVKTNKHDAADAEACWEAVQRPGMRFVPVKTVEQQGILMLHRTRDLLIRQRTGAINALRGHFGELGIVTGKGKANARELMALVDVDERIPQSARSALSILVDQIEDLELHVESYEKMILATAKDNEVCRRLMKVAGVGPFAATALAASVDHPQQFASARHFAAWLGLVPKQHSTGGKERLGGISKRGDGYIRKLLIHGARAAVHRVRIHQVTNTWITELLGRRPFNVVTAALAHKTARIAWAIMANGEEYRAQA

SEQ ID NO: 260339 - protein, 338 aa, unidentified
MQKNYLGIDVSKLSFDVSLITVFNGLKKAAVIAQFYNNAAGLKSFKNWLIELQVSFDENSLLVIENTGIYHRLIWNFCTTNLLPIFIGNAADLKWSFGIARTKNDKVDSLRLCEYGYKNHEDIKPTTGLNKALITLKDLLTNRSKLLRQKNAIKQTLGELKVSNDKTTQQLLENLNKAALEGIKTSIKLIEAEMLRLVTQDDAVEANYRRMLTVPGIGKITAIFIICCTNNFAIKVTGKQLANYAGVVPHEHTSGTSVKGRNRVHFMANKELKAILTMGALSAINAYPEFKDYYDRKVNEGKKHLQVLNAIKNKMLLRVAAVINQQKNYENKYQVACG

SEQ ID NO: 260340 - protein, 457 aa, unidentified
MKTTRLKKTKVNKSNDKMITMPTINPHAAGIDLGSKSHFVCVAQDNVKEFGVFTSDLHAIAEHLKSYGVKTVAIESTGFYWRSIYLVLLDYGFEVFLVNAAHLKNVKGHKTDVVDSRWLQLLHSIGLLSNSFQPDALTHELRTYTRHRKNMITDASHLISKMNKVLVLMNIQLHGVLRNITGESGLKVIRAILQGERDPKILSSLVSLRVKASREDIEKALTGDIRKEYLFELGQCFQLYNFYWQKIEEADKQIEAWLKEHVTNLPPNDGYKRPKNKVRGTNDPKFNVGQYVHRISGGIELLDINGVGSNTILTLVSETGLDMSKFPTAKHFASWLGFVPNRKVTGGRVISSHTRKKTNPLAKVIRDAANSAGNSKSKLGDFFRHLAYRKGRTAAIGATARKIAVIIYKMLTEGKPYSYEYAQEQTEYLKVSKLKNILKTMDKFNISREELQLAWSM

SEQ ID NO: 260341 - protein, 357 aa, unidentified
MHATPGSTPIATVSIDLAKDVFELAFADAQGQLVERRRLTRAAFAKTFDNAPPLRLVMEACGTAHYWARRFQRRGHAVTLLPAHTVRPYVRGNKTDRTDAAGLLEADRCAAIRPVPVKTPEQQGIQGLHRVREWHKAQRTAAINLVRGLLREFGIVIARGSTKVRPAVLAALEDAGNDLPMPLRQTLHALLETIAATEREMVQIEERLQAFAQGDLRSQRLQRAGGIGLLTATALSASVGEMDRFASGRHFASYLGLTPREHSSGKVRRLGRVTKRGDVYLRTLLIHCARAVLRSALLARNKQQSLDRTRQWALALAERVGHNKAAVALANKTARRLWAAEHHRTSFDPDHVSAWPH

SEQ ID NO: 260342 - protein, 357 aa, unidentified
MISKKISVKSKKNNSCSLTENESYGHYIALDWSEKNMAIARMGKKDTVPKVIDVPSDLKELKLYLSKLQGKKILTIEETTTSQWLYVELYEYADRIFICDPYRNRLLTDGPKTDRIDAGKLCKLLKNGMMKEVYHSTNQMYELRKLVSYYDDEVRAGVRLLNQKSALYRAENKSWKKKQELEASRVNKFIVAQLDEKIESYREKKKKYEEEFEKISKKSKVLRSLKSIPGLGPISSVTILSIVIDGRRFKSSNHYLSYCGLVKHEKQSGGRSYGRRSPRYSRRLKAVYVSAAVRVASTENPLRQYYEYLLNEKKLPVYNAKNALARYIAKISLGIIKSGEKYKPYKWRESKKGKEAA

SEQ ID NO: 260343 - protein, 341 aa, unidentified
MKQEMSVLGIDIAKRVFHAIGMDNTGKIVFRKRLSRHDLLPFLVKLPPVLIGMEACGGAHYWARRFRAYGHEVKLMAPQFVKPYVKSNKNDSRDAEAIAEAVTRPTMRFVPIKNVDQQDIQALHRVRERLIGARTALVNEVHGLMHEYGIVMPKGVAKFRQAVVSKLEAEKDKLTPLSQEMFWQLVEEFAALEEQLAYYQEKLDTLAQTHPECQRLMTIPGIGPLTATALVAAVSDASAFKNGRQFAAWLGLVPRQHTTGGKERLLGISKRGDTYLRKLLVHGARATIRWVGRKTDRRSQWIRHLLERRGTNRTAVAVANKNARIVWALLTSHQDYQPATS

SEQ ID NO: 260344 - protein, 419 aa, unidentified
MFKIILNNCCGLDVHKTWIYACVGITDSHNQTHYHEARFTAFSKGLRDLCGWLAKLGCTQVCMESAGKYWIPVFNILEKTCKVTLAHPKYTKPMKGNKTDRKDARWICDLFMCGMVKPSFIPPPVIRQLRDLVRYRMKLTNMITGEKNRAQNCLTVSNLKLDDVFSDVFGKSARSITEYILAHPGETFDVAPFVDRRCKTPISEIQAAVDGAVSHEQAVKLRQCLDHIDELELHRSQIEAEIHCLVSPFTTTLDLIHTVPGFDKNPLTAITVVSEIGADMSVFPSSKNLVSWAGCCPRNDKSNKTVKSSRISTAGSCLKPTLVQVANAVINSKDHPEFGIRYRRIKAHRGHKKAIIAICRMLLTAIWNVLSKREPYSPVGYAVPQPSFVAKPLTKSQGLALLRQMGYVIKDDNPPSATA

SEQ ID NO: 260345 - protein, 423 aa, unidentified
MGDSPVVVEREVGVDVIVARQGALDVHKAQVTACVRLPGAGGERVEEVEQFVTTVSGLLVMGDWLKAHGVTHVVMEATGDYRKPVWHLLESDFELMLVNARDVKQVPGRKTDVGDASWLCRLAEAGLLRASFVPPKPIRDLRLLTRYRRTQISERKREAQRLHKALEDTGIKLDCVATDILGKSGRAMLDALVAGTTDPEILAELAKGKLRKKIPALREALEGRFEALHALLIGAILSHLDFLDEQIEQLSDAIGEQIAPFAAARDLLMTIPGVGQRTAEVIIAEIGIDMTVFPTAGHLASWAGQCPGNDQSAGKRRSGRTRKGSKNLNAALKDAAMAALRTNDSYLQALYRRKKPQLGHGRALGAVKHSMICACWHMLTTGEVYRDLGGDYYSRRNPERQTKRLIAQLERLGHTVTLQDKAA

SEQ ID NO: 260346 - protein, 333 aa, unidentified
MGFEPEPSKEGSWMMAQNGLVVAGIDVAKDKVDVCIRALSQRRTFESTAEGRRQLISWLRKHKATKVVMEASGGYEREWAKALREKEVEVRIVDPKRVRHFAQSAGRLAKNDTIDADTIAWFAETFGEAPGQAYDAEREKLLQIVNARRGLLETETMLANQGEHSVPDVVRKMQARLLKKIALEVAKLDAAIAAMIKATPHFARLAEIIESVPGLGEGASAGLIAGMPELGQVSNKVAAALLGVAPYDDDSGKRRGERQIKGGRRRIRNLFYMPCMGAATRHNPVLKAFYDRLIAKGKLKKVAIVACMRKLIVILNIMIARGEKWDAKRYAVG

SEQ ID NO: 260347 - protein, 357 aa, unidentified
MAALSIADVPANVTVGVDTHKHSHIARAKDGLGRHLGQLEIETDPRGYARLLAWAQGFGPVVTFGIEGTSSYGAGLTRFLRAHGQAVIEVLRPVRRDRRFGGKSDPIDADVAAGAVLSGKATAVPKAGDAGVEMVRALKIAKQTAIKARTQAVNAVKGLIVMAPDPIREQLRNLKTPALVRTCSAYRVDGASDPTSAIKLSLRSMCRRYVVLDQEVRSLEKELDALTIRLVPQLRQLFGVGQDVAASLVLAAGNSGDRLRSEASFSMLCGASPIPASSGMVRRHRLNRGGDRQANAALHQIVVVRLRYDEATRAYFSKRKADGKSKKEIFRCLKRYVAREVYRTLVDPREEAVRSVA

SEQ ID NO: 260348 - protein, 352 aa, unidentified
MRKYKQITVKGKSLFIGIDVHQVHWHVTIRTEDVGLFNGSIPGTWEALRKLLDRYPGTLMQAVYEAGFSGFWLHDLLTECGVNCVVTPPSLLPIQYGNKVKTDRRDSEKLAYLLAKGMLKRVWVPSPEERFHRQVIRRRRQLIGDRVRTQNRIKSELFFYGIQMPPTNHRWSAAYVVNLHRLQFNNHWMQESFRRLLEEYDFLSDQILKQTKVLQELAETPLYKERVKILQTAPGIGLIAAMELLLELQDMERFRRADQLAAYVGLTPSQYSSADRVRMGRITAIGKNNLRGILVEVAWRVIVKDRVMRRKYERIKVRAGAKRAIVAIARITLLKTRRMLLDNTPYVTRRAA

SEQ ID NO: 260349 - protein, 353 aa, unidentified
MKRDKYIGMDVHHAMTVVAVLDEKGKVIWETIIATQANPIIEMLESLSGNLHVTFEETTQADWLYEIVRRHVAEVVVCDPRRNKLLSEGSKADKVDARRLAELLRVGMLRPVYHGKEGAGKLKQLVRGYQTFLSDTQRTMARIKAMYRSRGIQTPGRGVYQAKQREQWLSLLTDPGVRQRTAWLYEQLDQLTPLRRQAKLAMLAESRKHQAVALLRTIPQLGPIRSALIVAILDTPHRFRTRRQLWNYSGLAVVTHMSAEYEMKENRVVRSRKPVATRGLNRNCNRALKDVFIGAATGGGQREPYRQYLEGLKNRGIRKEMARLTLARKISSIALTIWKKGEAFDPKKLNWTT

SEQ ID NO: 260350 - protein, 410 aa, unidentified
MLFVGDDWAEGHHDVELVDETGSRVAVRRFAEGLAGVTALHGLIADHLPEPGPDLNPGTPNVVVGIETDRGPWVAALVAAGYQVFAINPMQVARYRERHSTSGAKSDAADAHLLAEIVRLDRAHHRPIAGDSPDAEAIKLVARAHQTMIWDRSRAVLRLRAALREFFPAALDVFVDLDAPDTLELLGKAPDPDSAARLSRATIAAALTRARRKDVATKAERIREMLRTPQLRQPAAVQAAYAVIVAGDVRLIGQLNDQIGELAQVVGEHFGRHRDADIYLNQPGLGTILGARVLAEFGDDPHRFIDAKGRKNYAGTSPITRASGTRRVVLARYARNRRLADAVHQWAFCVMRGSPGARNYYTAMRARGIGHQAAIRQLSNRLVGILHGCLKTGTPYNEHTAWDHHNQAVA

SEQ ID NO: 260351 - protein, 337 aa, unidentified
MSYLGVDLHSNSFTVCYRSSQGKERISVFDIKCIGQFRKSLRKHDKLAVEATGNTAWFVEQVRDRVSRIVVVDPHQFRVIRNSVKKTDKHDARTLAFFLSKDMLPEARMKSKENAQLHSLAGTRDKLVKQRTALINKIHNVLNNHGIKYKKESLSAEKHLRSVLSFDWDVIVRVELEVLVEQIRSLNSSIKKLDNEISQRGKTLKGHKNLSSIKGIGERSATVLLSVIDDVNDFADEDKLAAYFGIVPRVSDSNETIRHGRITKNGSKIGRTTLVQCTLVAKRYSPYLRRYYERIKRHRGSGEAIIATARKFLGIIYQTLKNDWIFEDFPKFVIANT

SEQ ID NO: 260352 - protein, 371 aa, unidentified
MRFYSSQHQFYAGIDLHARSMHVCVLDAGGTVVYDRNLACHFPTLLQAIAPYRGDLVIGAECMFGWYWLADRCAENHIPFVLGHALYMKLIHGGKPKNDRLDAAKIARLLKGGNFPLAYVYPQGMRETRDLLRRRMYLVHKRAELITHLEILNAQNNLPPFGKKLSYAGNRAELHIPERFAHPSVHMSATLDLDLIDKLDELIAEVELYLTRTAKVDDVQMYHRLRTIPGVGPILALVLLYEIHDLARFEEVGQFLSYARLVRCEHESAGKKLGWGAKKIGNAHLRWAFAEIACLFLRASERAKQWKQKQEQKHGSGKALGILAARLARSVFHMIRKQEAFDAKRFWNGQVSGEQPGPSRKKPAKSRRKAS

SEQ ID NO: 260353 - protein, 411 aa, unidentified
MRRVIGMDIHRTFAEVVFWEAGKLRPAGRVSMTRAGLEGFGRSLHKDDEVVIEATGNAMAVVRVLSPYVGRVIVANPLQVKAIAHAHVKTDKIDAGVLASLRAADFLPEIWLPDAETERLRRLVARRNQVVRHRTRIKNEVHAILHAHLIPSCPHAELFGRLGRIWLSRQDVPDDERAAIDRHLRELDRLGEDLAVLDREIAQAAVDDPAIKRLLTITGVNLIVAAGLVAAIGDVRRFPDPQRLVSYIGLNPRVRQSGLGLAQHGRISKRGRSHARAMLVEAAWAASKAPGPLRAFFLRIRARRGHQIAAVAVARKLAVLCWHLLTKNTDYQWARPALIANKLRSMELQAGQPARKGNKRGAAYAYNVKELRDREIDLARHAEQAYERFVSQWQRRGNPKQRTGAAKEERR

SEQ ID NO: 260354 - protein, 343 aa, unidentified
MQTITTIGFDIAKSVFQVHGIDAAGEVVIRRQLKRRYVLAFFQKLSPCLVGIEACASSHYWSRELQALGHSVRLMPPAYVKPYVKRQKNDMADAEAICEAVTRANMRFVPTKTPEQQSCLMLHRTRHLFIRQQTAVINSIRAHLAEFGIVAPVGRKGVTELLHVVADPSDKRVPEVARACLAALGTQLLSLKQQILEFDRLIMAWHRSNQTSKRLHYIPGVGPMLATALVASVADPRTFRSGRNFSAWVGLVPKQHSSGGKDRLGSISKQGDRYLRSLFVAGALAVIRYAKIHGTKHRPWLTALLARRPTKVAAIALANKIARMAWAMMAKGERYKQPVALAA

SEQ ID NO: 260355 - protein, 333 aa, unidentified
MIYFVGIDVSKSTLDIAVVNSGVLIKEEQISNEKASLRDFLKTLKQSFNLSLERIVVCMEHTGIYNYRALEVLHDSGINVCLEPALQIKQSQGMTRGKDDKVDARRIAMYAYKNREQLVFWKPQREVLQKLQALLTTRERLIKVKKQLQVPLQESAGFIDPSILKSMKTSTISIIKSITKELKELDLKIRNTVKMDEKIAKQYSYATSVPGVGPIIALNVIIRTAEFQRIKEAKQFACYSGVAPFKHQSGSSIRGRTRVSKLANMTMKTLFSLGATSAIQHNPEIKLYYKRKLAEGKKPMSVINAVRNKLITRIFACVNQERKYEKNYQYALA

SEQ ID NO: 260356 - protein, 349 aa, unidentified
MPIVADEYTQVIGVDTHARTHTYVVLDTRTGGIIDTAMFPTNPAGLARALAWIDRRTSAGRLAAIEGTSSYGASLTEALQQAGIPVVEARPPRRADRGARGKSDPIDAEAAARAVLRTDTALLSWPRTGKIRSALRLLLSARRSMDGQRTASRNALIALLRTIDLGVDARRPLTDKQIASIAVWRHHPSDDIDRLIARGEAVRLARDVIDLTGKLEANHDALRLHVSALAPSVLDIGGVGPVPAAVFLTAYSHVGRVRSEAAFASLAGAAPIPASSGNTSRHRLNRHGDRRLNSALETVARVRLSYDPDTRAYKQRRLAEGKTTREVKRMLKRYIARQIYRHLTATMTA

SEQ ID NO: 260357 - protein, 341 aa, unidentified
MSIVTVGIDLAKNVFAVHGIDAAGKALLVKPRVARDQLATLVAELPPCLIGMEACSGAHHWARLFSVHGHTVKLMAPRLVAPYRMSGKRGKNDAADAAAICEAVTRPNMRFVPTKNEHQQAILCLHRTRQGFVEERTAVYNRLRGLLAEFGVVLPQKPDRLRREIGAHLESLPGWASRCISDLLEHVGSVEDRLAEYDRAIADVARNDARSRQLMQLRGIGPTTASALLASIGMGHDFKNGRQVAAWLGLTPEQHSSGGKQRLGSITKAGDAYLRTLLVLGARAVTANLGDKQDRFSRWVRSLVERRGYWRAAVAIAAKNARLAWAVLQFGDAFKPEPNSR

SEQ ID NO: 260358 - protein, 485 aa, unidentified
MKIVYARCAGLDVHKKSVNVCIRQGKGNKVELVRGLFGTSTEELERMRAFLREHKVQRVVMESTGVYWIPVWNVLEQSTGKFSVVVVNPQHVKALPGRKTDEQDCERLAELGQYDMLRGSFIPPPEVRRWRDLTRRRTHLQEDRNRVINRIGRHLETANIKLSSVVSDIVGKTGWAILNALAAGEIDPEFLARLAYGTLKAKRAELTSALRGFVTPHFRWLLRELLDDLSRLDRKLTELDMLIREQMRGHEEEIRRLCTIPGVKETTAWTILAELGTNMSQFPDAAHAASWAGLCPGNCESAGKRQSGRTRKGNRYLRRMLVQNAWAVSHKSDCFLTALFHRVATRRGLKRACMAVAHKILIIAYHLLRDGTVYQELGGDHYDRRSPERTAKRLTRRLQNIGYTVVLTRPEQGAAPAKVSPAAKALGTARWKAPYDGITPRVADDRPPATPEECRKCAKWGIPCLHKSRQLLKRQDPAAIVKPST

SEQ ID NO: 260359 - protein, 311 aa, unidentified
MTFLHHPPRRCLGFDIAKDTIAISDGHKATSIPNERKQIRRFLRNCNADFAVCEPTGGYEAILIEECLRCELAVHRADTRKLKAFIRSRGRLGKSDAIDAREMVAYGLERWADLTLWQAEEPSEARLKALVRRRADLVAIRVAEHNRSKAPGSRELASTFKAMLDVINRQIALLDKAIRALMHAPPLARRAETATAMTGIGETTAAALIATLPELGRMDRKQAAALAGLAPHPNESGNKIGYRRMRGGRPAVRTILFMPAMQAAKGRGEFAAFYKRLIEAGKKPIVAIAAVMRKIVITLNARFRDQFAQQS

SEQ ID NO: 260360 - protein, 343 aa, unidentified
MNVFIGLDVSLASTAICVLGPQGRIVEELQAESEPEALVRAIASLSYSIDAIGLEAGPLSQWLSKEMEEAGFDVVMMETRLVKAALKAMPIKTDRRDAQGIARLLQMGWYRPVHRKSVSSQEIRALLTARKSVQQAIINLELSMRGVLRNFGMKLGHVTRIRYEARVRELVEQNEILSASTEALLRARSQLRTELADLDAKIAGLAKHDDVCRLMMTMPGVGPIVALTVKSAIDDPTRFARSKDVGPWAGLTPRRTQSGEMDIVGQITRAGDRGLRTALYQAAMILMHRGAPNWLQSWALKVAHRRGAKRAMIALARRIGVVLHRMWIDGTPFRYTQNSGATA

SEQ ID NO: 260361 - protein, 370 aa, unidentified
MKEYSEAFIGFDTAKKKHAVAIADVGREGEIRYLGEIDSSPLTIERMIRKLAGRYEKLHFCYEAGPTGYGLYRQVRGLGHDCTVVAPSLIPKKSGERVKTNRRDAVTLARLFRAGELTSVWVPDTVHEAVRDLVRARETASQDLRRKRQQLLSFLLRHGRIFSGRQHWSRAHLRWLAQQKFDHPAQQIVFQDAVDAIDDAAARLRRLDEQVAAIVPSWSMAPVVEAYQAMRGVSFVVAVTFVAEVGDLRRFDNPRQLMAFLGLVPSERSTGERVRRAGLTLAGNKRARRVLIEGAWSYRYPARVSQTLQARLEGLPKAVREIAWKAQIRLCARYRRLNATGKKLPVVIAAIAREMAAFLWAIARHVAPAA

SEQ ID NO: 260362 - protein, 358 aa, unidentified
MKIIGVDLHARQQTIAMLDTDTGEMVEKTLEHESERVREFYSALPGPVRVGIEATGSMQWFLKLMEELKIDCQVGHPAKIRKAETRKQKHDRRDARLLLKLLAENRFPSIWMPSTEQRDLRTLLRHRHQWVQMRTRVQNTLQAMALSNGLRRGTSLWSQAGQHALKALPLAPHASQRRIALLALYLRLREGIDDLDQQVSEQARQRPQARRLVTHPGVGPVTALASEVFLGDPARFADGKAVASYIGMIPSEHSSGGRQKLGALSKQGNSLLRYLWVEAAMHAVRKDPDLQRFYRRKLVQKGLGKARIAVARKLGIRLWIMLRDQIDYQEFCRRGQMRQKSGGARAGMPDFNSGPALQ

SEQ ID NO: 260363 - protein, 347 aa, unidentified
MLIIGCDFHPGFQQIAIFDNLTGEIQEKRLQHRAEAEEFYGSLAGQQVRVGMEACGHYPWFERWLEKLGFELWFGDAARVRAAVVRKQKTDRRDAEHLLDLLRQERFPRIWVPSLEVRDVRQLLVHRHKQVQARTRTKNQLQAMALSHGVQKRRKLWSEAGRAELEQLPLLPYAAERRKRLLEALDSLDAAIGELDRRVAEEAGQRPEAVRLMTHPGVGPLTALAMVLTLGPAERFASGKQVGSYFGLIPREESSGGKQRLGKISKQGSSFLRFLLVEAGQTAARYDPQLKRFYRRLAVRKNRSVAKVAVARKLATRLYLMLREDWTYAQLSQTVMQVSPSHSVAGE

SEQ ID NO: 260364 - protein, 340 aa, unidentified
MGEQYVGIDLHRRRSVIVRMTGGGEVLETVRVDNDPVALSLQIAKAGSDPEVVLEATYGWYWAADLLQACGAKVHLAHPLGVKMFGYQRVKTDARDSTNLAELLRMQRLPEAWLAPPQVRELRELVRYRAKLVALRSGLKAQVHAVLAKEGVRVPMSDLFGVAGTRLLDQLHLGHAYALRVASLRTLVAVYDQEIAMLGREISTALAGDVGYLAIQTIPGVGPVLAAVLVAEIGDVHRFAAAPQLCSWAGLTPRHRESDTTVRRGPITKQGPRLVRWAAVEAVQRLPVASKQAADFHRIADRRGTGIGRVAAARKLLTLVYYGLRDGQVRCLASAPAEAA

SEQ ID NO: 260365 - protein, 347 aa, unidentified
MVYVGIDLHRNRSQVAVLDREGNELLSRRIVNAPETFLSLLQGLGDGVRVALEATYGWEWLADLLEDAGYELHLAHPLRTKAIAAARVKTDAVDARTLAHLLRADLLPEAYIAPRGLRDLRDLLRHRVALTRMRSALKQRVGAILAKHGIARPYSNLFGPGGSRFLAELELREGPRRRLDSLLALIADFDREINTTTTEIEQRAQADPYVDVLCQIRGVGRYIAMLVIAEVGDITRFPSARHLCAWAGLTPTVRSSDGKARLGHISGQGSPALRWALVEAAQHTPTGGGPLRAAYERIAKRRGKQVAKVAVARKILTLCYYGLRDGEIRCLAPRAKTRTIRSTAVAT

SEQ ID NO: 260366 - protein, 361 aa, unidentified
MNYIFVGCDSHDKTLVNKIALNRETAERKTFAASRAGRRKMIEYLKARSHAAGNAKVVVAYEASGNGFILCDELKQAGLECHVLAPTKIERSTKQKRNKNDDRDADRLLEILRGHYLAGNKIPSVWVPDPQTRDDREPVRGRQDLSQKQTAVKTQIQMLLKRHGLEKPEGVGRWSKPYRQWLKALAEDAHGGWGVQKALGSLLRQLEFLGSEIKQLDQAMEELADTPRWKPIVAAMRKESGVGLMTALKFSTDIADFSRFRRGRQVGSFYGLTPSSHESGDNDDRKGHITREGSPTGRQVLCQSAWSRVRHDKHEREVYGRLVLKNPKKKKIAVVACMRRLAVRLWHVGFQAQLQMKANEV

SEQ ID NO: 260367 - protein, 412 aa, unidentified
MLFVGDDWAEDHHDIEIVDETGRRVARQRLSEGLSGVSRLHALIAAAMPAEWAELETGEAAGRVKIGIETDRGPWVAALVAAGYEVFAINPMSTARYRERHCTSGAKSDAGDAHVLAEIVRLDRAHHRPVAVDSEAGEAMKLVARSHQTMIWERTRHVLRLRSALREYFPAALTALGDLDEPDTLALLTAAPDPDRAARLSTSRIAAALQRANRRNVDARAAEIQAAMRAPALRQPPAVQAAFTVIAAGEVRLITALNREVDALGEVVAEHFGRHPDADIYASQPGLGVILGARVLAEFGDDPHCFTDAKARKNYAGTSPITRASGTKKKVIARHAKNDRLADALQQWAFGSLRGSPGARAYYDALRARRIGHQAALRQLANRHVGILHGCLKTRSLYNENTAWPDQNTAAA

SEQ ID NO: 260368 - protein, 391 aa, unidentified
MIYVGIDVAKDKHDCFITNSDGEVLFKSFTISNSRDGFETLFQKIESVSDDLTKVKVGLEATGHYSYNLLGFLLDKGLTTFVINPLHTNLYRKSLSLRKTKTDKVDAHTIASMIMSDVNLKSYSDTSYHNEELKSLTRYRFDKVKERTKLKSSVSRLVCILFPELEKLVPTLHMASVYALLSEFPSAHAVASVHLTSLTNLLSESSKNRYGKDTAVRFREAARNSIGSNIPAKSLELKHTIKLIQELTSEIDEIETEIKSIMDTIHSPILTIPGISYRMGAMILAEIGDFSRFDSPDKILAYAGMSPSTYQSGQLDNCYSHMEKRGSRYLRYALYNATKYVCHWDKSFGTYLAKKRAEGKHYNVALSHATKKLVRTIYAMEKSGQAYNKAS

SEQ ID NO: 260369 - protein, 339 aa, unidentified
MAIVCGLDIHRTQVTYDWVDTDTGEGKHGKLAPANRGTFRHWLEQFAGCDGDVVVEGCTGWRFIVEETQAAGMRAHLADPAEASSRIHGLKRRAKTDKVDARGLRELGEQHRVPESWIPPTQVLEVRTAVRLYHDLLTERAAWLHRVHATLFHQGAVAQKQLLRGDRNRLHESELLTPAGQDAVRTILRVIDTLDVEINRLRQHLVRFAGQQPGCKELQKEYGVGKLTSVIIWSELGDCRRFTSSADAVRHTGLDITIYSSNGKRAKPHLARQGPALLRWALFEAGRCGSRPTSPDHAYWQQAAERQDRKRAGISVGRKITRRCHHRLRALGDQAFAEV

SEQ ID NO: 260370 - protein, 400 aa, unidentified
MSHYVGVDISKDNFHFCILTEDSKILSSGEFPMSSQGFSDFFNLLKSLTDTIVVMESSGRFHIPLYCFLVEKSIQTFILNPKIIHRFFEFISANNPSKQDKKDAKILALFALNNLQMLKSYPVAPELRALSRLIQKLKNELAEAKTQIKYCLTVLFPEAERFFNIYFHSFLHILHKYPSAKAIKKTKPEWLSEIIKNSISRGKPASFTPQEVIQTAKNSIGVDNPYLSETLIFYIDKLFFLEPRINKLEEILMDKIDKDQQEQMKLISSIKVISQRLAGLFLAEIKDIRNFPNAKKLIKYAGTDPVVKQSGKYKLRMSISKQESSFLRNILFQMAVGVVKWNSYFRDYFVRKKKDFGSYKKTMIPVVNKLIRVIHALCMKRTFFVHSFSKSILPLKVSHV

SEQ ID NO: 260371 - protein, 375 aa, unidentified
MVERCGVGSFLKPWHSKFATPVFLLKPEQLRGPFEPDSASLGVAEQLKEKEIMSSPSLETNIGIDISKEMLELAVHETNTHWTAKHEFTEFPKLIKSLRSLTPTRIILEASGGLENLLVSYLATAGLPVIVINPRQARDFARATGQLAKTDRLDAFVLAQLGATLKPAVRPLKSVETQELEALVTRRAQLVEMLTAERLRLQQAQQQRRQSIIRDVKAHISWLQKRLDQCEHDLSQLLRSSPLWRETDERLQSVPGVGPVTSLVLIAELPELGHLSNKQIVALCGLAPHARDSGKWHGKRTTRGGRARVRATLYMATLVATKYSLVIKTFYRRLLQAGKQKKVALTACMRKLLVTLNAMFRNHTSWQPSRFVSGA

SEQ ID NO: 260372 - protein, 386 aa, unidentified
MKRNDLSRSLVAFDQASTLVAVVELSLGSWLVAGLVPSLSRQPLKKLRSDPEALLALLLRWRDQATKAGGRIKRIVLAFEAGRDGFWLARWLRARGIETYVIHPSSIPVSREHRRAKTDRLDAGLLMRAVLGWLRGEPKHCSMAAIPTIAEEDARRPNRERETLVREQTRAINRIKSTLIRFGIRTFKAKLGQASKRLEELRGLEGEPLPPNTMAELRRDLARLQVIRGQIREIERARLERLKRAPRQGTHPMMRMLARILGIGIETADMLVHEVLTRKLRDQRGVARYGGLTGSPDESGSKRREKGLARAGNARVRRGMIQLAWRWLMFQNKSVLTKWYRARTAGGKPGLRKAMIVALARKLLIALWRYVTIGEVPAGAVLRPAT

SEQ ID NO: 260373 - protein, 325 aa, unidentified
MEYAEKQVACVGIDISKDFFDAALPVAGGKHRHLQLGNEEAGFERLFQEIKEPAACRVVMEASGPYYLRLAGFLHAKGVMVSVVNPLVIRRFCQMRLTRAKTDKKDAVMIARYGQAEQPAPWEPEAAHVVELKQLQTVAEGLQKTLHQHERQLEALQQAPHVSRQARQSLERMVRQAEKEKQQVEERMELLIREHHQQLYEQVSSIPGLGKKSTLLLILVTGGFTRFAHYKQLVSYLGLSPRIYESGSSVRGRSRICKMGMSRARAVLYVCSWSAIRCNKACKELYERLVTKGKAKRLALIAVANKLIKQAFAIATKGEYYMEKS

SEQ ID NO: 260374 - protein, 507 aa, unidentified
MVGRGEGFRLRDAKPRRSAEAGQDSFPWPTTPIAASQPSERERLTCGRFPGEVSPPAVLKVNPCAPRLAPSSGAQGSNGIQRRSGRPRMDKQEREFRLRGAGNRVKEGGGMMRFAGIDIGAERHMVAVLDEQGEVLCRSSPFGEDASGYARLFELLGPSADCLVALEATGHYWRNLFVALIAKDYAVAVLNPLRTARFAEEELRRTKTDAIDALGIARFAQQKRPRAAQLPDSVTEELRELERLRERVVEDFADRLRQLHRAVDLGFPEFTRYVRTLESQLAATILSRYPTAASFRGVSVKKLARIVYDGSHKIGEELARNLIEAAEKSVGAHHSEPYRRRIKYLCEDLDVLRRRLKDLARDVERKLDDHEVGKLLMTIEGLGPLTAACLIAELGDPARFDSPGAIASYVGVIPRIRQSGKKRFTKGPAIPLGNARLRKSLFMVVLQMVRRNPWLRQYYERLRAAGKPGKVAIIAAMRKLLTAVWSVATHRRPFVPIMPQLPAPKNA

SEQ ID NO: 260375 - protein, 316 aa, unidentified
MLYVGIDVAKNKHDVTALNVPGKTVLKPLTFSNNKASFELLDLSFRQLNQDCLIALEDTGHYAFNLLNFLHEQGYKVYTYTPLLIKEFAKSLSLRKTKTDKKDAHGIALKLLSDPNREQFQHDNRQVELKILARHIHRLKKKQSDWKVQYTRCLDIIFPELDKIVGKHSEYTYQLLTCYPNPQKRLEAGFDKLIEIKRLTASKIQDILSVAPRSIGTTSPAREFEIIEIIKHYKRLIDKAETCVNDLMAEFNSVITTVTGIGGRLGAVILAEIRNIHAFDNPAQLQAFAGLDSSIYQSGQIDLAGRMVKRGSPHLR

SEQ ID NO: 260376 - protein, 320 aa, unidentified
MEKEKVYVGIDVAKSSVDIAVHATEQRWSFPNDDYGISKTVSLLRKLAPALVVMEASGGIELTLTAALASAGLPLAVVNPRQVRDFAKATGKLAKTDTLDARVMAHFAATVRPVPRPLPNAQAEKFSSILARRRQVIEMLTAEKNRFGTASKAVRQGIEAHIKWLEQELSNIDYELRQSIQRSPVWREKDNLLRSVPGVGPVLSTTLLAELPELGTLNRRQIAALVGVAPLNRDSGTMRGKRTVWGGRAPVRATLYMATLVATRYNPVIRGFYQHLCIAGKAKKVAITACMRKLLVILNAMLKHRAPWCYVNAQIFGPCH

SEQ ID NO: 260377 - protein, 541 aa, unidentified
MAITSRRRTRRHRRFLSVSKPSGSIHPRVQQVGPEHFGVVAVDCAKARSKWMLTDFYGKILIAPTPVEHTRQGLDRFTTAISQAMTDHHLGDLIVAIERTGDYHLPVKRAASAAGLEARVVHPLASKQFRLPADPGNKTDDTDLLAITRAAVNGFGLVEPVLDEVHIPLRLLARHRRDLVRKNADLRNQIHAELDARLPGLAAAIGDIFDREPALVIARHLGSPAEVLARGLDGLAALLHAEHIGHHRRSLAKILAWAERAPEPSECPEVHKRIFAYLDDERRARLRAIRDLEAELAGLLVKTPYVLLLSFPGINVVSAAEFAAEMGPIGNSPGDGAITGRAGLYPSRYQSDATDHAGPLVRRGNRALRYVILLIAENLLRCNDHFRRLGERWRAAGTDRRAAVVRAAKRFCRIAYRMVAGGEVYRHPSCRERHSILAKLSMFYIEHETPLEQVSRDLRAAVDRIPRSERAAEARPLASGSLTTAPAGASTAAPPDRAARPMNSNGRRTGPRPLSAILPEVLLRLGVTMVESSASGETDPT

SEQ ID NO: 260378 - protein, 313 aa, unidentified
MSEEGVFVGIDVSKRRLDMVVLPSLEVFSTSNEAAGHEDLVSRLRALEPQLIVVEATGGYEQALVVKLATKELPIRVVNPRHVRHFASAIGLVAKTDRLDARVLAEFGRRLVPPLRATRTEDQQCLLDLAARRHQLMEMLVAEKNRVKQARGVLRQEVTAHIKFLERQVKNVDGELRRLVAESPDWQLQAELLQSVPGVGPTSSTMLMAELPELGRLTGKQLSALVGIAPFNRDSGQWRGQRHIAGGRWRARCALYMAAFNARRCNPVLKALYERLSAKGKPYKVVMTACMRKLLTILNAIVKSGTPWRASTP

SEQ ID NO: 260379 - protein, 323 aa, unidentified
MNKYNETFGIDISKDVFDCYGSVQGHLQFNNSETGFKKFQELLSKDSLVVMEATGYYHYRFAQYLYKKKVAVSVVNPLSVKRFIQMKLAKVKTDKSDAKAICEYGLIQEVPLYNALTDTQSECLQLFRLMDSFLKKRTATKNEIHGEEVLGVPSSWVYRSLKRDKKHLDKELKGIEQKLLSLVKQDQQQQLTLLQSIPGIGMKTALFLIIVTDGFKKFETASQLCSYVGITPTIRESGSSVRGRARISKVGNKKLRNLLFLCSFTACKHNKGCSEIYDRIVNKGKSKKLALIAVSNKLLKQCFAIAKSGHPYDPTFASVFVVK

SEQ ID NO: 260380 - protein, 393 aa, unidentified
MQALLFCCCGVDVHRDILEVCILKGLSNEPEPIRARFKTTQADLIKFVNWLKEHECPHVAMESTGVYWRPVYEAIEKYYDSFKSLLVVNAHHMRNLPGRKTDTQDAEWIATLLRHGLLEASFIPDRIIRTLREYSRTYKTEIQEKTRLLNRLEKFLQSHGFKLSSVLSNITGASGRKILNLLADKGHITVTEIRSSVSKRVKCSIEEIDAAVCGELELFERRLLKHFLEKLDLLEKSIANLLEDMKELTAPYRSALEKMDSVPGIDLTASLLILAEIGASPMNNFKSPEHLCSWAGLSPRNDESAGKIKSKKILHGNPYIKSILCQVSWAAVKCRNSCFANWFWSHQGKLGKKKAIIAVSRKILYIIYLLIQRGVMFDPAISLMSSKRQPALN

SEQ ID NO: 260381 - protein, 345 aa, unidentified
MKKGITIGMDLGDKKHQVCILDKTGKIITEEEVAGNRTAMASFFKQYRGAVVAMEMGAHSRWVSQIAEAEGLAVLVGNARKLRMIWQSRKKSDAPDAVMLARIARMDPALLCPIHHRGEQVQMDLEIIRARDLMVRERTRMVSHVRGVVKSIGERLAPSSAASFGHKARIPEALNEAMKPMLEMIRELTKKIHGYDLMIKDAATKKYPETEQLCQVGGVGPLTALAYVLTLEEPERFAKSRMVGAYLGLVPRLDQSGQIDKQLRITKHGDGYLRRLLVGSAHYILGPFGPDCDLRTFGLKLMQRGGKNAKKRAVVAVARKLAVLLHALWRSGQQYEPKRRQQAAA

SEQ ID NO: 260382 - protein, 466 aa, unidentified
MPLRLGIDIACRAAHQVSLADEQGRFIWTGRRFRTTPQDLDRLWNMLPDGTDPADVLVVMEPTRNAWVPLAAWFRRHGAEVVLVPPERSADLRRYYAKHTKSDRLDSQLLARLPMLHPDGLYAERGLGPGDALKRAAKLHSTLTHRRNQSLARLEALLEILGPAWHDAIGADLANRTPLKFLAAGYADPYVVKRLGRTRLARFCYRHSRGAWGEPHADALLTAAHQTLQLWSGGELDYPDLAEDIAIEARLALHLTEEIKDLDERTALLLGAADPAGILTSAPGVATITATAILGRLGDPNRFSSLAGARAFTGLVPILDASGLNGRHGGPTKRGDAVLREALFMAAGQARRIDPTLAAKYHRLMTEAGKHHNSALCHIATTLLTRLIACWRAGQPYVLRDVDGTAVTIEHARAIIAERYAIPKDLRARRRTTTQERTGEARSRQALHQPVRPTRTLRPPQRLDIT

SEQ ID NO: 260383 - protein, 403 aa, unidentified
MNAVGIDISKGKSMVCIMRPFGEVVASPFEVTHTAGELDELANSLKNLNGETKVIMECTGSYYYPVAYALHEAGLSVSAVHAKLIHDFGNNTIRKVKTDKADSIKIANYGLNHWLELPEYIPDEDIRRMLKAFSRQYSKYGKLKTMLTNNFISLTDETFPGVNELFSSPPRKSDGHEKWFDFAVRFWHCKCVCSLTQKSFKTAYRKWCKQNGYYYSEAKAEDIYIESLGHFNVMPMNETTELLIKQAVAQICSIAETIASVSQKMKQLASSLPEYPIVMDFRGVGDVLCPQLMAEIGNIYRFARKESLVCFAGLEVPPNQSGKFESSRMGISKKGSPHLRKTLFQVMDCLLKHSPADDPVYQFLDRKRAEGKHYRSYMTAGSAKFLRIYYARVTEYLDKYYPE

SEQ ID NO: 260384 - protein, 412 aa, unidentified
MDIIVERACGLDVHQRTIAACVQTENSEKTREVRTFGTTTTELESLKSWLVTKQVTHVAMESTGIYWKPVYNILEDSFHILLANARHIKNVPGRKTDIKDCEWICKLLRAGLLQGSFIPPRPIRELRDLIRYRTKLVQSIAQEKNRILKVLEDGNVKLSSVLSDIFGSCGTFAIRAVLDNRCSPEEMAPILKKKGKNIKATESEIREALRNTITDHHRFMIQLHLDHIEALEEQLQQLMKRIQKQLEPYQDIQKLLTTIPGVGEEGAAAIIAEIGSDMDQFPDEHHLSSWAGMSPGNNESAGKSRSGKTTKGSQQLRCTLVECAWAASHTKDTYLASKFRSLLGRRGNKRSLVAVGHKILISAYYIIKYKAPYHELGQDWLDKTRKKSLIGVYLKKLTDLGCIVQPIQPSLP

SEQ ID NO: 260385 - protein, 312 aa, unidentified
MDAMVIGIDVSKDRLDVAFRPTGESCVFKRTAAGIEDLVASLITASPALVAIEATGGFETVVAAGLAGAGLPVVVVNPAQVRAFAKALGKRAKTDPIDAAVIAHFAEATKPQLRRLPDEMTKLLAELIARRRQIVDMIAAEGQRARRVSDHRLAQSIARLRKALEKELAELDRSIEDHMRGSPVWVENEKLLASVPGVGKTIARTLIAELPELGSLDRRQIAALVGLAPWTRQSGQWRGKSFIGGGRKRVRSSVFVGAMVAARYNPQLKQFRDKLVAAGKPKLLALVAVARKLITILNAILRDRRPWQPLPA

SEQ ID NO: 260386 - protein, 423 aa, unidentified
MKFKSQARQNQLIEKITAQHLVVGIDIAQQMHVARAVNFRGIIIGDHLSFSNDEEGFHNLLLWIQKLPTTHRLSAAIVGMEPTGHYWLNFSRWLTEHHFEVVLVNPHLVKKNKENRDNTPSKSDRKDALVIADMVKNGYYLVSRKTPQAFEDLRVLLSNRDFVVKRLVSAKNQIHRWVDVVFPELRHVFKDITCVGSIATLRLFPTPAELSKLQPQNLIQGWKTIMKRHCGARKAKALIELANHSVGSQSASHYYKLHLNQLLAEYDLACEQLEVVEKEISTVLERIPFAKYILTIKGISVISLAGILGEAGDLSGFVHGNALLRHAGLNLAEASSGKWTGQMKISKRGRSRLRRFLFMATMSLVMNNSEFQAMHAYNVQFKKMKKMRSIMKLCGKLARILVGMARSGKAYMPQKTLPLLQAA

SEQ ID NO: 260387 - protein, 411 aa, unidentified
MKAIGRAIGLDVHLDFCEIAICEEGKVRSAGRVASTPEALRVLAESLLPTDRVALEVTGSSWEILRILEPHVARVIVVSPDDTGIRQARAKTDRLDARTLARLLASGELDGVWTPDELTRVLRRRLARREQLVRSRSRAKNEVHAVLMRRLKGRPPVSDLFGVGGRRWLRQLELPVEECETVEGCMRHVEFLDAEIAEVERLIARQMLSCSDARRLMSVPGVNVICAASFLAAIGDIRRFKTSRQLAAYLGLDPKVRQSGSEPARSGRISKQGSASARWAMVEAAFSVVRQPGPLHAFYERLRSRRGHQIAVVASARKLACLFWCLLTREEQYAHQQPSLTAKKLRRLELTAGAERYDTKAAGVWSTNQAMRDAERKLALAAEASYVRMVSDWQATAPRRGAGASVTPGRA

SEQ ID NO: 260388 - protein, 486 aa, unidentified
MNSVVASIFEDPDQNIYISKIHSLRAFFITNKKNAMNKKVSMQIINPNAAGMDVGSRSHFVAIGQGKEDVKEFGVYNEDLQAIAAWLLLHKVTTVAMESTGTYWQSLFAVLQNAGIQVILCNGKFTKNIKGKKTDVQDCQWIQKLHTIGLLSGSFLPDEATEQLRTYCRHRANLLDNAADTTRKMQTYLRLLNLRLDVVVKDITGLTGLAIIEAICKGEVNAQVLASLRHGNCKKSEEEIAKALQTNGRKDYLFGLKHEYKMYQSLQSAITSCDVEIEKMLTEQINNNDDKRQHIIDKKIHKRINKNSPKNIDINLMAYQYFEGVDLLAIEGVSHSTVLSIMSEVGPEGLKKFDTAKQFASWLRLVPNNKISGGKVLSSKIPKGSNRLKIALRNAANAIGNLKDTPLSNFFNRINFRKGRVSAISATARKLAIIIWNMIIKKQPYNNEHGYEFLDQKRKRKVKEMRKLIHKFDIKTDELGLQLSGL

SEQ ID NO: 260389 - protein, 341 aa, unidentified
MRTIGIDTHKASLAACLVDGLGQALEERTFGNDPAGHAALLAWAGAVAPEALVGIEGSATFGAAAGRYLEAGGRSVREVPPQLSCRERRRTRRAGKSDAGDALAIARVTAREPHLPPLRPADRTRQIALLVEARDDLVVEATRVRNRLHADLVVLVPGYEGTVANLVAERNRRAVGRLLRGWRGIQAELARDRLRRLGHLVAEARALEDRLERLVGDHPLRSLPGCGTLVAAKLIGETGDPSRFRSADAFAMLAGVAPIPASSGQTRRMRLNRGGNRQLNRALHSIALAQAWHHAPAREYIARRRAEGKTWREAMRALKRHLARVVFRLLCLGAPEATLAA

SEQ ID NO: 260390 - protein, 338 aa, unidentified
MYYTGIDLHKFTSYLTTVDSAGKIIKQADLKNVDHNFIQYFDSIPGQHKTTVESTMTWYWLNDLLSSIEIPLTLAHAKYVKAIAYAKVKTDKVDSHTLAQLLRMDYIPEAYKISKDKRVLRDALRARLKIVQRHTSVTNSMHLLLAKYNYDSPSQLTGIAEYQYEQLADVEELLKEQILDLEKQLYPSLIPNEDIQRLLWIPGIGKMNAFNIVLEVDEINRFADVKNFFSYCRLVPSARNSGGKSKQRSSKDGNKYLKVVFMDASVHAVQYYPVIKKYYNSKLRKKNKFVAKSIIAKEIAKIVYYTLKYKTNFNNNFKGIELQHKKSLQWPRVVSPDA

SEQ ID NO: 260391 - protein, 411 aa, unidentified
MDVYCGIDWAEDHHDISLVDRDGKLLARRRIGDDAAGLAQLLELLAGHGDSAEDLIPVAIETPRGLLVACLRATGRKIYPINPMAVARYRDRHSVAGKKSDHGDSFVLANILRTDICMHRPLPDDSELAQAIAVLARAQQDAVWDRTTAHNKLRSHLREYFPGFLAAFADARGGITRPEARAVLAAAPTPAAAGALTLTQLRALLKKAGRSRGIDTEAARLRDAFRIAQMRQPRLVEDAMGRQAIALLRQLDAACASADDLEHAVTQSFNQHPDAGIITSFPGLGPLTGARVLAEIGDDRSRFQDAKGLKAYAGATPVTRASGKTKSVTHRRIKNNRLNAAGYTWAFSALTASPGARAHYDRRKDAGDRHAAAQRNLFGRLLGCLHRCLITGQHYDKATAFPASTKLPAAA

SEQ ID NO: 260392 - protein, 344 aa, unidentified
MPSIVGGLDIHRKQLTFDYLDLVSGEVACGQIAPADRGHFRSWLARFEDPGEVAFAAEACTGWRYVSEELRRAGIEAHLAEPADTAAARGRKKRAKTDRADARLQRELLAQGRLPECWIPPSHVLECRALLETYHDLRAEHTAWVQRAHAVLFHQGAPAFHDLSRADAPAQLAELARGHLSAAGQVQVGVYLRMLAALEAELDATRRRLLAAARQMRGAKVLAEAIYGVGPVTALALTCWLAGAGRFTSARKAVRFAGLDVTVHSSDSKRSPGHLSRQGPPVLRWALYEAGKTHARSVAPDHGYYAAVKARKDGKRAALSEARKIVRRACHILTELGDDALATA

SEQ ID NO: 260393 - protein, 323 aa, unidentified
MNTNTLQNINIGVDTGKSQLDIYIRPFDVFFTVPNNEKGIKQALATIKKHNPQRIVIEATGRLEMPFVLACTEAKLPIVRANPVHIKRFAGAIGRRAKNDRLDAQLIAHYGEAIKPDLTVIKAKNIRLMSDLVIRRNQLLAMQTMEKNRIQILPKHLHSTMTPILTAIKNQVSKIENKLVKLIEDCPEYQTKNTLLQSVPGIGNIAAASIISNVPELCYITNKQAASLIGVAPITRESGRYKGKRVIQGGRAQVRTVLYMAMMSAMQCNPVFKDTYARLLEAGKPKKVAIIACVRKMVVILNSMLRDGIMWDQNIAQNKGLTP

SEQ ID NO: 260394 - protein, 314 aa, unidentified
MNTNTLQNINVGVDTGKTQLDIYIRPLDIYFNVTNDEKGIKQAVRTIAKYHPERIVIEATGRLEMPFILACEKANLPYVIANPLHIKKFSGALGNKAKNDRLDAALIAHYAEAIKPKLTQLKSENIRLMSDLVTRRNQLLSMQTMEKNRHQILPQSLASSIKPILTALKNQIAKVENRIEKLIETCPDYQAKNEILQSVPSIGKIAAASLISNVPELGYITNKQAASLIGVAPITRESGSFKGKRMIKGGRMQVRTVLYMAMMSAMQCNPVFKETYQRLLAAGKPKKVALIACVRKMVVILNSMLRDGCMWNGR

SEQ ID NO: 260395 - protein, 347 aa, unidentified
MIAVGIDISKAKSTVAVIDSDGTVLASPFTMAHTQPEMEAFVSYLKGLGEPTTILMEYTGHYHYPVLKKLQDEGFPVCIVNPYQMKKYGDVEIHKAKTDKKDALRIAAYALEKSYKLVPYSSMEQKYEDLKFLSRQYSQRITYVAKLKVQLIALLDQTMPGITRILPLNSRNPEKCALLLFIKRFKSFDEIQRIGKARFLASYDVLAKKASERSASSKGLSIYELAVVSITTRGEDPYIWLSHNQCVDLLSATQNAADEIISQMRNIAETIPEYKVLRAMHGVGDRLGPIILAEIGDVHRFHSGKALNSYAGNDAPPYQSGQFESRNRHISKPVSYTHLTLPTTSRV

SEQ ID NO: 260396 - protein, 366 aa, unidentified
MKKVMAGMDLHGNNVVVGIVDADGTRLQHRRLPCDLPEIIKFLDPYKAELESIAVESTFNWYWLVDGLRAAGFPVVLANPAKIQQYGGIKHADDKNDAYFLAELQRLKILPTGYIYDPALRPVRDLLRRRTSLMRQRTAMILSAKSQHQRTIGRSLDLRRLKAMEPQEAEALYTHSADQLIARIQKEHIDSLQQSIRQIEKAVLKVAIEQPYYERLKTLPGVGIILGLTIAREVGNIDRFAGPGQFASYCRTVDSKRVSNGKKKGENNEKCGNKHLAWAFVEAAHGAHRFDLACRRWYDRKAAKKGTTIATKALACKLAKAAWYVMAKAVEYESGRMFPGLAEPKTEEISGEQASAIDGVGLNPED

SEQ ID NO: 260397 - protein, 324 aa, unidentified
MTDAVLGIDVSKNTLDTSFLAGTKPRSRSFANSPDGWRQLIAWLAKEGVRQVHACLEATGRHSLGIALALHEAGHVVSLVNPAQIRDFARTKLGRNKTDPVDAARIREYAELFKPRPWTPPSPALRRLCELQTIRAGMVASLTEWTNRSTSGLADDRALALAKATIQHFTSQLEAVDQAIAETIDNDRELCAKRTLLVSISGVGETLAGIVLAELPGPEVLGSSGAAAAYAGLNPRQHQSGTSINRPARISKIGNAVLRSALYMPALSAMRYNPAVAALVDRLKAQGRLTGKQIVVAAMRKLLVICFGVLKSGKEFDPAIALGQ

SEQ ID NO: 260398 - protein, 400 aa, unidentified
MNAVGIDVSKGKSMVAILRPYGELIEAPFEVKHTSSGVQSLIQTIQSIDGESRIVMEHTGRYYEPLFCQLTQAGLFVTAVNPKLIKDFGTNSLRKVKSDKADAIKIAKYALDSWSDLKQYSVMDKIRKQLKTMNRQLDFYMKHKTSMKNNFIGLLDQTFPGVNNYFRSPAREDGSLKWVDFATTYWHVDCVRNMSRSAFINHYQNWCKRKEYNFRQSKAEEIYETAKELVPVLPKDNVTKFIVKQAARQLADASETVAQLKAKMNEAASKLPEYPVVMAMYGVGSSLGPQLMAEIGDVSRFTHKGALTAFAGVDPGVNESGSYEQKSVHVSKRGSAQLRKTLFQVMDCLIKNMPQDDPVYRFMDKKRTEGKPYYVYMTAGANKFLRIYYGRVKEYLLSLQ

SEQ ID NO: 260399 - protein, 464 aa, unidentified
MKRRPQNQKKKNTKINLDSFPLLEPNAAGIDIAHREHWCAVPSDRCQKPVRPFGTFTEDLEKMADWLQDCGIKTVAMESTGVYWIPAFQVLERRGFQVLLVNARHVKNVSGRKSDVLDCQWIQRLHSYGLLNASFRPADHMCVLRSYLRYRDDLVCARSVQCQHMQKALQQMNVQLHQVLSDVTGMSGLRIIQAILAGQRDVKKLAALADRRVHASQATIQKALQGDYRAEHLFVLQSALDLYETYDRKIHLCDEQIIAQLAQLPARVDIQDKPVPPRKSGRPRLQDMVAGTDLREELYRRVGVDLTAIEGIGVLTAQVVISEIGLDMTRWRSEKHFASWVGLCPDNRISGGKVLSSHTRHVLSRVADALRIAAATLQKSKTALGAFYRRMRARLGAASAITATAHKLARIIYRLLKHGELYVQQGMEAYENKYRERLLHNLKKNAATFGFELTPTHHVAPSVS

SEQ ID NO: 260400 - protein, 335 aa, unidentified
MQRQYVGIDLHRRRSVIVRVDEHGDRVSTVRIDNDPLVLAAEVAKAGEHPEVVLEATYGWYWAVDVLTEAGASVHLAHPSGLNWGQRRRKDDVIDANDLVDMLRLGRLPEAFIAPPATRELRELVRYRAKLVALRSGLKAQVHSVLAKEGVHVPVTDLFGVSGQRLLDDVPLGHAYRLRVTSLRELIKAYDREVATADTAVRAELHDHEGWQAIQAIPGVGPVLAAVFVAEIDAVDRFPTARHLCSWAGLTPKHHESDTTVIKGRITKMGSRLVRWAAIEAAQKTGDFLKNDYRRIAERRNNTKIARVAVARKILTLVYYGLRDGEIRCLAAGVA

SEQ ID NO: 260401 - protein, 406 aa, unidentified
MDVIYPRCAGLDVHKQTVVACARIAGAGAPWQEVRTFETTTSGLLALADWLESFGVGHVAMEATGVYWKPVWHVLEGHFELVLANAAHVKNVPGRKTDVNDATWLADLLAHGLIRASFVPPVAVQELRTLTRTRKQFVRERASHVQRIEKLLEDANIKLTSLLSDITGKSGRAVLQALIAGQTDPERLVACIGRVKASRAELLEALRGRVSAHHRFMLQLHQGHIDALDQAIAAIETEVGLGLEPFRQAARLLSTMPGISTISANVIVAEIGIDMPRFASAGHLLSWACLCPRNDESAGKRRSTRLRRGGKWLKTTLVQAAWAAIKVKSSYLQALFHRLRARRGTKKAIVAVAASMLTAAWHMLRDGTEWQDLSAAHFDRADARKTANRLIRRLEQIGYQVSAVPA

SEQ ID NO: 260402 - protein, 397 aa, unidentified
MYIVGIDIAKRKHEAAVIDGEGTVIIKPFSFTNNCSGYNRLLAMLAKAKLPLDEVSFAMEATGHYWLALFTRLQKEGFRVQVINPVQTNSIRSFYIRQAKTDPRDALLIAEVIRFGHFSESTLHPENIYELRELCRGRHAIVSMQADVKRKVVALLDQVFPEYETAFTNLFGDTSMAILQTCPTPKELSEMPFEELCHLIEVSSHKRFRMAKAQELQALARNSFGFAMAGDVFSTMIRLYAKHLDFLKQQVREMDRKIAEIMDTLDTPITTITGIGPTLGAYILSEIGDISRFSSAAKLAAYAGIDPTMRQSGEYNGVRNRMSKRGSPYLRHAIWLAASSAVLHDPALKLYFQKKRDEGKPYMASVGHACRKMVSIIYAVMRGNKAYTPCIPNEISA

SEQ ID NO: 260403 - protein, 401 aa, unidentified
MKRTCGLDVHKDTVFCATYNGKKHGVVKEYSTLTTSIRSMGGDLLAEGIHCIAMESTGIYWIPIWNILEDMGFDLVLVNPYLIKQMPGRKSDIKDAQWIATLLYKGLLRGSLVPCKQIRELRTYSRKYVKLQQRQTTILQEMERTLEMCSIRITSFVSNISGKSIMKVIRQIVEGETDPNVLTELIHGRIVNKHKKNQIKESLKGFITEQHRFTLELSLQEYELLVCQSNQCLQKMESMCNEHYKKEMATLRTVPGINNIAAMIVLAETGADMKSFENSGKFSGWTGLRPRNDESAGKYKSTATTKGNRFLRSILVQIAWAASRTKESYFKEKFNRLAMRKSRKKALIAIARKIGVIIWNVLYYEQEYNPTKLIVYDPCKLKAKMSYHQKEVDRLGKLFQR

SEQ ID NO: 260404 - protein, 357 aa, unidentified
MKIYKINGKTPNVEGSSDLYVGIDVHVKSWHVTILQDGAVLSSSSIPGHWEVLRKMLDRYKKYQLHVVYEAGYFGYSLRDSLVRYGAECIVTPPSLIPREYGNRVKTDRLDSRKLAVLCSQGLLRSIAVPTEEERAHRTVIRRRHQLVKDCIRIQSRIKAELHYYNIPFPEIHGRWTKRFVENLHTLRFTNEWVRKSFESLLTQYDQLIEQIDKQTRLIRELANTDRYREGVKILRTIPGIGILIAMEILVELYNIRRFRTASQLAAYVGLTPSQYSSGEHVRMGRITRIGKGQLRALLIEASWILIRKDPVIGQKYASLRYRAGSKKAIVAIARKLLVRARRVLLDGTPYVIGKAA

SEQ ID NO: 260405 - protein, 452 aa, unidentified
MPSRKPRSKALPPQLQQVQFNAAGIDIGSEFHFVAVPPDRDEQPVRRFSAFTVDLHALADWLKQCGVDTVVMESTGVYWIPLYELLEQRGFEVLLVDPRRLKSVPGRKTDYVDCQWLQELHTFGLLTGAFRPVEEVVVLRSYLRQRGMLVEYASHHIQHIQKALQQMNIKLDKVLSDVTGMTGMAILNAILAGERDPLKLAKLRDPRCQNNEETIAKALQGNWRAEHLFALRQALTLYRAYHEQMAACDEQIKQQLGAMTDKSGGTKLSYQPRSHKAHRNTPTLDLRAGAHRVTGIDLTRIDGIDGHTALKLIGEIGTDMSRWKTVKHFSSWLGLCPGNKQSGGRNISGRTKPCANRAAAVLRLAANGLHRSQSALGGYLRRMKARLGSPKAITATAHKLAQLVYHALRNGWDYVDKGIQWYEQQFRERQLKSLQIKAFQLGYVIVPAPAPA

SEQ ID NO: 260406 - protein, 351 aa, unidentified
MPILAEVVDAVVGVDTHRDTHHAAITDAVGACLSTLQITNTTAGFAELLSWILQHAPGPRVVVSIEGTRSYGIGLARAITNAGLQVIECEQPTHRARRGGGKSDSIDAHLAARYALTLDADQLPTPRADGDREALRILLGTRHELTVTTTAQTNRLRALLLSGEDADRSLSRVTLSDTVLTTLARRRLAPNADRSHTVRHREVRRLAIALREAARALKSNRQEISDVVDALVPGLIDIRGVGPVTAAQVIISYSHVGRVRSEAAFAAMAGTSPLEASSGRTTRHRLNRGGDRALNRAIHTIALTRMRSCPRTRDYVNRRTAEGKTSREVRRMLKRYITRQLYRTLTATTAT

SEQ ID NO: 260407 - protein, 384 aa, unidentified
MPKQSTATAFDHDSTLVLALELSGKGWEVGAVLPGVSRRPRRSLPARDMAALLQQIERWKAEVLRAGRTVRRTVLAYEAGRDGFWIARYLLACGIEVQIMHPASIPVERRGRRVKTDRIDLDMLLRTLLAWLRGEPRVCSIVRIPSEAEEDMRRPERERERLVSERVALENRIENLLCLQGITGFKPRLKKAAVRLDELRRPAGDPLPPQLLEELKRLMVRHRLLSEQLREIEAAREQMAMAAEPDHAVQQIQMLTRLVGLGLATATGLTREVFCRSFADRRAIAGFVGLTGTPFNSGGSEHEQGISKNGNPRVRRILLQLAWRWLRFQPDSALSCWFLERTGGAKGRIRKIMVVALARKLLVALWRYIETGELPAGARLAAAA

SEQ ID NO: 260408 - protein, 310 aa, unidentified
MDCFVGIDVAKATLDLALEPGGEVWSVTNDGAGVQELVSRLVPLAPTLIVLEATGGFEAAVVAAIASAGLPVVVANPRQVRDFAKACGRLAKTDAIDARILARFAERVRPAPRPLPTEAAQLLDALLTRRRQLVEMLTAETNRLGFARGPVRRDISAHIRWLERRLGDVDGELAAAIQASPVWRAKDDLLQSVPGVGRVLSLTLLAELPELGRLSRREIAALVGVAPLNRDSGQRRGKRLVWGGRAPVRAVLYMGALAATRANPVIRGFYERLRTSGKPFKVALTACMRKLLTILNAMVRHDTRWRLAST

SEQ ID NO: 260409 - protein, 365 aa, unidentified
MPSVSHLAPTYLGLDVHKDTISVAILAPDRESPEVDRIPHDEPSVRRLVGRLGDPRWLRACYEAGPTGYELARLLHSMRVGCEVIAPSLIPTAPGDKVKTDRRDCRRLARLYRAGELVAIRIPTMQEEAVRDLCRARADMVTDRTRARHRLGMFLLRHGRPWRGGNAWTLTHERWLLAQRFEEPALAATYAHYRAVLDARDAQLEAIEADLAGWYDAPPFADAVGRLAAYRGITRLGALTLASEVGDWRRFPRAAAFAGFCGLVPSEYSSGTTTRRGHITKTGNAHLRAQLVESAWAYQHRPAVGIDLRQRQQGLDPQVVARAWVAQLRLCGRFRRLAARKDSKNLVVTAIARELTGFLWAEMAA

SEQ ID NO: 260410 - protein, 423 aa, unidentified
MTEEGVRYMVGIDWATEEHMVCAMDPGGSVVWERTVAHSGRGLDELCAWLDKLADGTPESVRVGIEVPHGAVVETLLERGFAVFSINPKQLDRFRDRFSVAGAKDDRLDARVLADSLRTDAHRFRRLRVDDPEVIELREWSRMADELRQERVRMCNRFREQLRRYFPQALGLSRDVGADWFLDLWERVPTPQKAKRARAAAVHKILKAHRIRKISADEALSMLRQPAVTVAPGTAEAATAHLRMLLPRLRLLNQQIRQCHRKLESLLDRFANQGSSSEDDEGQTVEQRDATILRSIPGVGTVVLATLLAEASQPLQRRDYHTLRALCGVAPVTRQSGKRRLVLMRHACHPRLRDALYHWARVASQCDRASRERYAALRHRGHSHGRALRTIGDRLLYVACVLLNKRSCYDPGYGRTPCEEAAA

SEQ ID NO: 260411 - protein, 396 aa, unidentified
MLPKGATLIEDSVLEHRPETVHAWLDELAVRFQGQPVAVAVEASKGAIVAALLEHAWIVIYPIHPATSRRFSTAFTPSGAKDDQPDARVLLELIVHHRARLRAMAPHEPPTRQIGLLCEARRKLVDQRTMLGNQVTSLLKNYYPQALSLIADIVYAPISLAFLERWPELALLQKARPQTLRDFYYANQVRRPEAVEKRLELISQSRALTTDRVLCEIGVLQLRALVAQIRVLNAHLTKLEAALTAAFQAHPDATLFANLPGAGKAMAPRLCVLFGLDRQRWQNASEMQKYYGVAPVIEKSGKQRFIHWRWSAPVFARQTLVEWAGLSVKACAWAKAYYLHQRNKQKNHSAILRSLAFKWLRILWRCWRERTVYDDARYLAQLRQKNVPFLSFLPAD

SEQ ID NO: 260412 - protein, 402 aa, unidentified
MNAVGIDVSKGKSMVAIMRPFGEVVASPFEVTHTGSELSELAKTLKSLHGETKVIMECTGNYFYPIAYDLHEAGLFVSAVHAKLIHDFGNNTIRKVKTDRADAIKIANYGLSNWMELPQYWPEEDIRRMLKAYSRQYTKYNKLKVMLKNNFIALTDQTFPGVNELFKSPPRKSDGHEKWMDFAFKFWHCECVCGLREKEFIERYRKWCKRAGYNFSQEKAEDIYVSALGHVCVVPMNDCTKQLVMLSINQINAVSESLAVVAREMKRLAELLPEYPVVSSFYGVGDILGPQIMAEVGDVIRFRSKGSLVCFAGLEPPEYQSGKFESENRHISKTGSPHLRKALFQVMDCIIKKSPPNDPIYQFLDRKRAEGKHYYSYMTAGCAKFLRMYYARVNEYIDAMED

SEQ ID NO: 260413 - protein, 395 aa, unidentified
MYFLGIDIGKRTHVASLMSEEGKVILKGFSFPNTTEGADSLIERLSKYSETPADFIVGMEATGHYWLSIFSYLHESDFLIHVVNPLQTDGWRKGTEIRKRKNDIIDSVLIADLMRYGSFVETVLSDENVFSLKQLSRYRTYLVGTASDFKRKIIAVLDQVFPEYASIFSKQGIFGKASKELLLEFSSPIELEEISAETLAQYLAELSRNRIKPEKADQLKQAASNSFGVKFAQEAFTFQLRSMIEQLKFIESQVKETEKEIKRIMSNLDSVILTIPGIGPINGATILGEIGDIRKFSNPKKLVAYAGIDASVSQSGQYEATHNVMSKRGSPYLRKALFSAALVASRCDPVFRAFYQKKISEGKYHLTALGAVSRKLCYVIHAILTKNEPYKIVSD

SEQ ID NO: 260414 - protein, 349 aa, unidentified
MVGTFYIGIDLGIRVCANAVLNQAAELIRMKRVPTSAKNLLEMVEPYGRRARVAFEECELSAWAYGVLKGHVREIVVADPKRNAWIARDAFKDDPEDAVKLARLLRAGLLHPIHQAPSEERAIFKRLVQHYEDATRRQATLKLQIGAQLRRDAIGRPATGLWDEARRSEALSQLPNEGTRAIVEDLLQTYDALKKAQKRSADAMKKFGTRFPEVARLDTVPGVGPINACRFVGYVQTPHRFGNRRQLWRYSRLGIVDRRSDGRPLGRRRLDRSGVGTLKDISRKAFEAAMRTRDDNGIRGFYQASRERTGNATHARLSTQRKILSLMMAIWRQGGTYQEERLTPVSTRR

SEQ ID NO: 260415 - protein, 390 aa, unidentified
MFAGIDIASERHVLARLDDAGAAIGKPITITEDRAGYDALLAALAPPPVLIVMEATGHYWKNLFAVLTAAGHEVALLNPLIVIARRFQEASLERTKTDAIDAAGLARLAFEKRPAPTHLHDEVAEALRELVRHRDRLRQDFDDRVRQLHRLVDLGFPEFTRYVRGLGSMLATCLLAEYPTAHAFARATPRRIAKLRYDGRHFVGPELAQSLVEAARRSVGQHHGPAYKLQARHICQDLDTWRKRLAEIEHDIEDLLDTHVPGKLITSIDGIGPQTAARIIAAAGDPAHFKTAGAFAAFVGVVPGLRQSGKQTSTRAGIGPLGNARLRRALWMPVLSAIKRNAWLRAFYLRLRAAGKPAKLALIAAMRKLLHAVYSVAKHQGNRVKLSPRE

SEQ ID NO: 260416 - protein, 407 aa, unidentified
MIFVGVDWAEAHHDVFVEDEDGRRLAGGRLPEGVDGIARFHEMVGSFAEEPEEVVVGIETDRGLFVGALVAAGYRVFAVNPMSTSRYRDRHSTSGAKSDPGDAKVLADMVRTDRHNHRPVAGDSELAEAIKVLARAHQTMIWSRTRQTNFLRSTLREFYPAALVAFDDLTSGDALEVLKAAPTPTLGAGLSRSKIAAALRRGGRQRRIDQRTEEIQEALRAPQLQGSALVATAMGSSVSATLAVIATMNAQVAELAQELEVHFEQHPDAEVVRSLPGLGTILSARVLGEFGDEPNRYATAKHRKNYGGTSPITRASGTKRVVLARHVRNKRLADAIYFWAFASMTASPGARAFYDYRRTAGDTHHAALRYLGNRLVGILHGCMVSHTTYDEKTAWGHRAEMEQARAA

SEQ ID NO: 260417 - protein, 371 aa, unidentified
MGKAIFLIKRRVTFVKERRDYILRNEKVFVGMEDSKKTWCLCVRSGGVIVHETSMPAQYEVLRNYFHNKFPECQIQVMYEAGFRGFELHDQLVADGWECVVTPPHTVTEEKVQRKKNDRTDCRRLAKNLENGDYRKCFVPDKELREDRQISRTCGQVQADIKRVRNRIRRMLEFHGLDNGLPAGRWSGAAYTRLRQHLAEIEMSDSLRLSFETMFKELEYLRQLKKGLLLQLRRLARSDRYKRSVELLKSAPGIGMLTAIRLTLEWGEVNRFGRKEEFASFLGMVPSDYSSGEQERRGHITRQGNRSVRGWLVESSWIAIRYDPVLLEKFRRVLRNCGSKKKAIVAVARKLALRLRWALLSGQPYTVGVVE

SEQ ID NO: 260418 - protein, 340 aa, unidentified
MNIKRIGLDLAKNVFQIHAVDHREHVVLRKTLRRDRMAAFFTQLSPCLIGIEACGSAHYWARELTRMGHTVRIIPPRLVKPYLKGQKNDANDAEAICEAVSRPGMRFVAIRTERQQTLQAEHRVRARLIRARTALSNEIRGLLGEFGVVLPAGIAQLRKALPEIVSQQVQWDECFIRLLCELSEELQGLDERVARHDRRLQQSARDDIRIKRLLVIEGMGPVVASALVAAVGDGRQFRSGREMAAYLGLVPRQHSSGGKARLGHISKRGDRYVRTLIIHGARAVLNACQNKTDRRSQWLQGVSERRNRNIATVALANKNARIAWALLSREEDYHGIQVTG

SEQ ID NO: 260419 - protein, 318 aa, unidentified
MPESIVVGIDVAKRTFDAALGVGGSIKTFTNEDAGHDALVAELGGQSVELVVMEATGGLERDLACALQAAGFAVAVINPRQGRNFAKAMGYLAKTDRIDAKALAELAQVLSRHPERERFVRALPSAQQQTLQALVARRRQLVTMQVAERQRLSNSHAAARSSIEAMIIAIRAQLDALEAELAAHIERHHGDLSRQLGSVRGVGPATVASLIAEVPELGRLTRREISALIGVAPFNRDSGQMRGKRTIFGGRAQVRRGLYMCALAAIRFNAVIRAFYARLVLAGKPKKVAIVACMRKLLTILNAMVRSGKPWDDSLHSA

SEQ ID NO: 260420 - protein, 418 aa, unidentified
MQTELSQFTAIIGIDWADKKHDICVHDMATGRRRRSRVRHKPEDLDEWAGSLHRRFGGPIAVALELSKGPIVSVLQKYDFFVIFPIDPSTLAYHRKTFTPSGAKDDPTDAELALDLLFKHSERFKPLQPQSVEMRTLMLLVEHRRKLMNDRVRITNRLRSALKQYYPQVLEWFDRIDTVLFCDFIRRWPSLSQARRARRATLERFFREHNMNRKALLERRIQAIKTAMPLTEDEAVIVPYRLQVLGLVAQLEVALESIKTYDQEIAALLPQHPDYELFDVLPGAGPVHTSRLMVAFGEQRERYACADEVQMYGGIAPVTKRSGDSTWVHWRWQCPTFMRQTFVEWAGQTINKSYWAGLYYYQQRAKGCSHQAAVRSLAFKWIRILYRCWKTRTPYDEARYLKALQDRGSPLLKTAEAA

SEQ ID NO: 260421 - protein, 408 aa, unidentified
MESCFHYFAGIDWGSEKHRVCLMDREGRTLEERWIDHSGSSLAELTGWLRQRTAESPAALAAAIEVPRGAIVETLLEQGFAVFSINPKQLDRFRDRYSPAGAKDDRRDAFVLADSLRTDRHCFRAVRIDEPAMIRLRELSRLEDELGEELNRAVNRLREQFHRFFPQLLQVCASADEPWLWALFEAAPSAARATRLSQAKIAGILREHRIRRLDAAQVQAALKGKPLTLAPGAAEAAAEHALLLLPRLRLLDRQRADLARRIDAILKELASAPEGRTEHRDAAILLSLPGLGRKVAATMLSEASQAIAERDYHALRCYGGAAPITRQSGKKKSVSMRQGCNERLRNALYHWSRTSVVWDPVSKNTYAQMRSRGHSHGRALRGMADRWLKVLVCMLRNNTLYDLQRRAA

SEQ ID NO: 260422 - protein, 412 aa, unidentified
MTAKDQFAAHVGLDWADKKHDVCVQFKNGDRIFHVIEHTPEALDSWLNELHQRAKGRIAIAVELKKGPVVYALQKYPFVTVFPVHALSLARYRQAFWPSGAKDDPQDAELALDLMLRYPHKIKAIEVDNPDIRLLQQLVEQRRLLVEDKRRFVNRLINTLKQYYPQPLEWFSHRDSSLFCELIIRWPSLQQLKRARSDTVRHFMNAKGGPAVAYTEPRVASIASAIPLTTDKTVIEANALMATALASQIKLTGDLIRTYDERIESLFDTLPDAELFKSLPGMGPCMGPRMLAALGDNRDRFNNAEEIQNYAGIAPVTERSGQKSWVHWRWQCAKFVRQTFVEWTAKTVNSSYWARLYYQSQREKGKSHQSAIRALAFKWIRIIYRCWKTRTRYDEAKYLLALEARKSPLLKP

SEQ ID NO: 260423 - protein, 341 aa, unidentified
MEQATTIGLDIAKHVFQLHGADAAGHVLFRKRITRVKLLGFLAAQTRCVVAMEACAGAHYWAREIAKLGHHVRLIAPAYVKPFIKRQKNDAADAEAICEAAQRPSMRFVPVKTEEQQANGIVFRARDLLVRQRTQCVNALRGHLMEYGYVFPKGITHVEALVALVEDLQSSLPDSVRVILKLLVDTFTALEAQIAVLDAEINRRSKSDPTARRLMTIPGVGPIASTAITALVPAAEGFPAGRDFAAWLGLTPLQKSTGGKQKLGAVSKRGERTIRRLLIIGASAVVQQASRRGAPKGSWLAQMLARKPKMLVTVALANKMARIIWALLVKGGTYRTPAAAA

SEQ ID NO: 260424 - protein, 342 aa, unidentified
MTLYIGVDIHARQQTVSYLDTSDGTTGVVALSHERDDIKAYYSQFEGEVIIGIEACGYTNWFEELIERLGHKLLVGDAAEIRRLARRRQKNDRRDAQLILELLVHGEFPTLFRYSKESREVLRQLRYRHKLVKLRTMVVNSLHALAINAGLSLRAKLLTRDGRQQLRGLSLSAISQQQRDELVTLADELTRRIGTVEQWLKGQAKQDVRVQRLQTHPGVGLLTSLCLVHTLGDVSRFSSLRKVAAYAGFDPMEDSSAERKTYGGISKAGSKLLRYLLVEAAQTAAKDDEQLKQFYRRLLPRRGKARAKVAVARKLLIRCFIMDRSEIDYAEFLRRGKQKETE

SEQ ID NO: 260425 - protein, 425 aa, unidentified
MHSKLNDKINQVSENTLVIGIDIAKKKHFACASDDRGRILEKPFPIIQSRDGFEVFYDYLLTLKAKHEKTDILVGFEPTGHYWMNLAAFLTSCGVRFVMVNPGHVKSSKELIDNLQTKNDQKDAQLIARLVRDGSFSYPRQLKGIEAELRNGATLRSKIQEDLNAIQNRIIRWLDRFFPEFTQVFKNFGKMAYAVLEKTPLPIDVVGKAPEELLFLYRQVDGMKSPQLPKVKRLIEVAQQSIGLTEGLVMARVEIATHLSQRKLMQAQQDELTAQLITLAKQMTDYDYLASVPGMGDITIVDLLAEVGSLTQYAHPRQLIKLAGLTLRESSSGKHKGQKRISKRGRRKLRALLFRVMIPLILHNPAFKQLHEHYTTRAINSLRKKQSIVVLCGKLLKVLHALCKKKQMFNEQRMIDDFTQLQAAA

SEQ ID NO: 260426 - protein, 338 aa, unidentified
MSILYVGIDLAKNVFAVHGVDEHGKPALVRPAVPRAKLHELIAGLPPCTIGMEACSGAHHWARLFQRHGHTVKLMAPKFVAPYRLSGKRGKSDAADAAAICEAVQRPNMRFVPVKSAEQQGRLMVHRARQGFVEQRTATFNRIRGLLSEVGIVLPLKAATVRTQGAALLEDLPGWVNTVIGDLLSEVHRLDERIKAYDRHIAEMARQDHHAQQLMRLRGIGETTATALVAMIGNGHDFKSGRQLSAWIGLVPGQYSSGGKTRLGRITKSGDAYLRSLLIMGARAVLNAAKDKTDSVSRWAVALAQRAGYWKAVVAIAAKNARMAWAMLRQGEQFAVPA

SEQ ID NO: 260427 - protein, 387 aa, unidentified
MPQPNDLSRSLVALDQDSTIIAVVEMSQSSWLVAGVLPGVERQPRKKLEPSAERLLCLLHRWRDEAVRAGKKITRIALAFEAGRDGVWLARWLSARGVEAHVIHPSSVAVSREHRRAKTDRLDTEMLKRGFLGWLRGERGHCSMSRVPTIAEEDAKRPNRERECLVGERTRIINRMKATLARLGIRNFKPTLRKAAERLATLRTPESTPLPPNVSAELQRDMARLGFVVSQIREIEEARQKRLEQEPETGPHAMVRLVARVVGVGIETADMLVHEVLSRPMRDRKAVARYAGLTGSPDESGAKRREQGLARAGNARVRRGMIQLAWRFLRFQKQSALAQWYQARTADSRAGTRKTMIVALARKLLIALWRFVTTGETLEGVILRPAG

SEQ ID NO: 260428 - protein, 347 aa, unidentified
MDQIIIGVDTHKSNHVAVAINTQGARLGSVSVPATSQGYLDLEKWAEGFGPVKAFGIEGTGSYGGGLSRSLLSHDQTVIEVMRPNRQLRFLHGKSDNIDAEGAARSVLNGQATAIAKSQIGSVEMIRHLKVARDSAIKSRSQAAIILKALIINAPAQLRDGLDKVKGSIALVRHMAAFRPGEVTTPTASAKAAMRAIAKRWLFLHEEVRTHDLELSALVELRAPKLMAAHGIGAMTAAEMLILVGDNPERIKSEAALAKLCGVCPIPASSGKTNRMRLNRGGNRQANAALYIVAITRMRNHEATRSYVVKRTAQGKSKREIIRCLKRYIVREIYHHLCVPNDAKCVA

SEQ ID NO: 260429 - protein, 312 aa, unidentified
MREFPATAPGHAGLPGWLGEFGPAALAGVEGTGSYGAGLARHLAAAGVRVVEAARAGRQDRRRQGKSDPLDAVSAARAAQSGRAAGAPKGRDGAVEAVRALMVAKRSARHERAQAINQARALVLTGPDDLRARFAKLTAAALADAIAALRPRPGDMPGYATRIAVRELGRRARFPDAQLGRLDELIVPLAAGRAPGLLALHGVGPDTAAMLLIAAGDHPARLRSEAAWAHMCAVAPIPASSGKVRRHRLSPGGNREASHALWRIVITRMSNHPATRAYVARRTEEGLSKKEVIRCLKRYVAREACHYLRPGS

SEQ ID NO: 260430 - protein, 351 aa, unidentified
MNILAMDLGKSNTVFCLYDSESGRHRFGKARTTPQQVHNLLVERSPDRVVFEICSAAGWVYDIAASLGIEVQVANTNHQAWRWKNIKNKNDRNDALKLAQLSAMNQLSLVHIPRRSVRQKRSLIQYRQSLVGRRTRIKNSIRAILDREGLPVMPQGKSGWSKAAVERLRRLAMPMERCDAGNLWRGQLQVEIEMLESVEGCIRGVEGKLDELGRDDAQVRRLRTVSGVGPRLAEAVVAFLDEPGRFRSGKQVGSYVGLTPRQYQSGQMDHQGKISGQGNKILRSLLVEVSWLGLRHNRWMNETYHRILRGSASRKKIAITAVARKLLVRCWAMLRDEREWMDEVKSKELAA

SEQ ID NO: 260431 - protein, 428 aa, unidentified
MSATLFAGIDISLKTATVCLLNQDGNLVGKIFEVDNNTAGFEKLKDKIESIIPAGGFSLVCMGMEATGMYGFHLLDYFSSTTFKYGVEVKVYQVNAKYISRFKKAFSEKEKTDVVDCQVIAEYLRFGRLPAEYKPESLFLPLRRLVRYRYHLVKHLEREKQLYLANLFLKFPGWVQNRPVSTLGKTTLNLTEEYTADQLCEMPLEQLAGVVAQAGNNRSLDPVAVAEEIQKAARESYRIRPELACSVTFILASISRTIYALKENLKQLDKAIAEQSKGFINPLISVKGIGPVYAAGILACIGDIKRFSSHDQLARYAGLVWKRKQTGKTESEEKHIVQECDKYLRYYLVEAANSLRVHNEEYRSYYQKKYQEVTKHKHKRALLLTARKLVRLVFALLSKNQLYSQFRDSQSPRLTEVNPDCQRANNQV

SEQ ID NO: 260432 - protein, 399 aa, unidentified
MLYIGIDIHKRSHEVVILDDGGKPLGKSFKIGNSHEDLTHLFERIAKVNPIGEPLRFGMEATGHYWLAIHSHLRSGRQEVVILNPLRTHAYRARSLRPAKNDRIDARCIAELIRTEVKSDYRLADEDLLGLRQLTRLRVELVDMVSDQKRRLLTLLDQTFPEFEGLFGEKYCKSALGLLQTYPTPADMVAAGLDALTELLEQYSYKYYGRAKAEEILCAAQRSFGVPFGQHANGIQIRLLAGQVIYLEAQQKALDRDIANCLKAIPNCLTTISGIGNILAAALLGEIGDIRRFRNAKALVAYAGLDPSVIQSGEFTAKKAHLSKRGSTHLRRAVWLAASAATRNDSAFRELLKRKIAEGKPYHVALGAVANKLLHVIYAVLRDNKPYYPLNVAASSVAA

SEQ ID NO: 260433 - protein, 410 aa, unidentified
MDTLIERCAGLDVHKDSVTACVRLPAAGGGREQVLATFATTTADLLALRDWLGALGVTVVGMEATGVYWKPVYYVLEERVQCWLLNARHLHNVPGKKTDTLDAVWICQLVEHGLVRPSFVPPPAIRELRNLTRYRKAQIEERTREAQRLDKVLQDAGVKLSSVASHLLGVSGRAMLQALVEGTRDPATLAELARGTLRKKLPALREALHGRFSRHHALLVGAILTKLDFLDEVISDLSAEIEQVIAPFAAEVALLDTIPGVDRRTAEAIVAEIGVDMSRFGSAARLASWSGFCPGNNESAGRRGPGTTRKGSKWLRTHVVEAAKAASRTKQTYLAAQYARLRPRRGTGRATVAVGHSILVAAFYILDRHQPYRDLGPDYFRRRHSREHHARRLARQLQALGYRVTLEEAA

SEQ ID NO: 260434 - protein, 351 aa, unidentified
MFTQNLGIDVAGKDFRVCLKVRRETGQVKIKGTRKFANTPKGFQALVKWVENKRIADAPMRVTMEATGVYYESLAYFLHEQEWQVFVLLPNRIKGYFKFLNLKSKTDKIEAEGLAELGITQVLPLWEPASPVMYSIKGLNRERHTLIEEKTVISNRLHAEQACKSPNKGTIKRLKAMLRLLAKQVEEVEHEMEQQLDQDTDLKKQVDNICQVKGLGWITVLGIIAETNGFKLVTHKSQLVSYAGYDVVQRQSGSSVNGKTRISKKGNRHIRRALHFPALTVVKYHDEFTQLFNRVYDRTKVKMKGYVAVQRKLLVLIYTLYKNNEAYDPNYYQNQMDEQKSRQGTMPAYTG

SEQ ID NO: 260435 - protein, 356 aa, unidentified
MPRYVKEVPEGTIIFAGIDLHKKTWAVTLRTKDVELFTKVIPGEYRALNILFERYKGSEIKVVYEAGCFGYWLHDELRADGVGCIVTPPSLVPYEHGNKVKTDRKDSRKLARLLANGLLKAVWVPSKEELYHRTVIRRRHQIMQDRIRFQHRIVSELRLYGIKLADARYKWSKAYVSNLKRFRFGDRWMQESFNRLLREYDFLCEELEGQTRLLRELSETDKYRDRVEILRSIPGVGIITAMEFLLEIQDVSRFERADQLAAYVGLTPCQYSSGDKVRMGRITKSGKKYLRSLLIEASWQTIRKDSEKRAIYENIKKRAGGKRAIVGIARRSLLAMRRMLLDSQTYNIKRRSTRAA

SEQ ID NO: 260436 - protein, 350 aa, unidentified
MPATIGCDAHKQFSVFVTIDGKGKTSAAVRVDHHRQQYIDFLHTLPPGSEIALEATGHWYWMVDEMEKAGHRPHLANPVEAKKRMGNTNKTDALDAKGLAILLHNGTLPESWIPPGELRDRRELLRTRMALRDLRSSLKHRIHAAIDRYGLQATGISDLFGVKGRVYIDAVLDRLPSDTAAMIRVQLASLDQLEAQIEEIEERIAVALKPSPEVKLLRTIPGVGEILAPLLWLEIGDIERFPRPENLASYAGLVPRIIASGGHIRHGGTCRNVNQYLKWGFVEAATCSLRIKAYRGTHVERLYQRLAPGKGHGRAVVAIARHLAEASFWVLRKRQPYKDPSPRPAMGDAA

SEQ ID NO: 260437 - protein, 336 aa, unidentified
MDALIRFWLGIDVSKKKLDVALLDERGKFKQRVFANEVAGFAQLMHWLSERGVPPSQSRVCMEATGSYSEACATALADAGWVVAVVNPARVKGFALGEMVRNKTDRTDACLLARFCLKHEPEAWVPAPLEVRHLRALVDRLQIIKDMQQQEFNRLEAHAGNATLEASIRDHIAWLQRCADELQRDIDDHIDGHPQLRRDADLIESIPGIGQVTAPKVLAFLGNVRRFKNAKALAAFIGVTPRLKESGSSVRGRSMISRAGHSEMRRALYMPALVASRHNPAVKAFGDRLRGAGMAPKAVVGACMHKLAMLIYGVLRSGQPFNPQIAMPGLAIQDGI

SEQ ID NO: 260438 - protein, 392 aa, unidentified
MIYVGIDVAKDKHDCFITNSDGEVLIKSFTIPNNREGFESLFLRIESVSKDFNKVKVGLEATGHYSYNLLGFLLDKGLPTYVINPLHTNLYRKSLSLRKTKTDKVDSRTIAAMMMSDMNLKPYSNTSYHNEELKSLTRYRFDKVKERAQLKQSISRLVTILFPELETLVPQLHMASVYALLSEFPGASHIASAHMTRLENLLSKASKGRYGKDSATLFRNAARNSIGSRMPAKSLELKHTINLIQELTTEIDEVEAEIKRIMDEEIHSPILTIPGISYRMGAMIIAEIGDFSRFDSADKLLAYAGMSPSTYQSGQLDNCYAHMEKRGSRYLRYALYNATKYVCHWDESFAAYLSKKRTEGKHYNVAISHAAKKLVRLIYAMEKSGQPYNKAA

SEQ ID NO: 260439 - protein, 413 aa, unidentified
MKENVVHAMPFSPEDHPGHAHLRFSAPNTPAGSVGIVEKVSDFLKFYPDVIQVVIALEATSVYSFHLATFLSVAHFNGHIPAIVYSVNPKEIHAYKKTFTDVGKDDYVDAMVIADYARSNKIRSRPWKGPELLGLRVLTRLRFRIAKLMGIAKNSTGNSIYLECSGLMTGENPFCNVWTTTCQELLTTFQGPDEILSLSDEELLNFITEKGHGRFSHPLDVVEKVKKAARNSYRLDKRVYEPLTSGLSVSFFIIHSLEAAIKKLDKSIETMAKSFSSDSYQILLSIDGVGPVIAGGLLAEIGDIKRFKTDDALAKYIGLTWRGKQSGQSESPVKHLSKAGDVYLRYYVLLATGQIINYSAKYREAYERIRSRKTLFPYRAALNLVARKIVRLIFTLLDKHQLYSDNKVMVTLE

SEQ ID NO: 260440 - protein, 375 aa, unidentified
MRRRCRRAQKKIAGGTRWAPIEIGLTVGVDLGDRWSQYCILGLEGETLAEGQLRTTQEDIREFFQALTVARVVIEVGTHSAWVQDVMTEWGHEVLVANPRLMEGSKRRKRKSDRIDAHKLARLGRVDPQSLYPIRHRSRQVRQDLVVLRARDALVSVRTELINTARGLVKSMGTRLPRCSSPSFAEKVKDAIPVEVREALLPLVQLTETVNDCIARYDQKIEELGQKKYGHTTLLRQVKGVGPITSLAYVLTLEDPQRFSSSREVGPYLGLVPKQEDSGDSQPQLGISKAGDRMLRRLLVGSSQYMLGAFGPDTDLRRYGLRLCERGGKNAKKRAVVAVARKLAVLLHHLWVTGDVYEPLHHPGAETNTVQATAA

SEQ ID NO: 260441 - protein, 400 aa, unidentified
MISVGVDVSKGKSTVCVLKPYGEIVCSPFEVLHVEKELESLDSLLQKLDGEIRVVMEATGIYHLPILLFLQEKGYFVSVVNPYAMKKYAKDNSIRGAKTDRLDSVMIAHYGIEKWFKLQKYDSDEELYAELKLLGRRYRYYMELHVKALQELTHILDYVMPGIKKLFNSWDEASGKDKLSDFVERFWHFDLITSMSLDEFVDEYLIWAEEKKYHRSRSKAETVYELASGGISTLSSSTPSTKMLVQEAVTVLRAVDNSLSLILSRMQELAKSLPEYSTVRAMGGVGDVLAPKLIAEIGDVRRLHSAKALIAWAGIDPPPYESGQFVGSRRKITKRGSSTLRKVGYEVMRVLKSHKAPKDDAVYTYILKKEREGKDKKHAKIAGLNKFLRIYYARVMAVYQ

SEQ ID NO: 260442 - protein, 318 aa, unidentified
MAEAVFVGIDVSKAELAVALRPSGESFTVAHTGAGIKQLVARLEKLHPTLVVVEATGGWQRQVVAGLWSARIPVAAVNPGWVRSYARGRGLLAKTDRIDARLLALFAEREQPEPRAPLDAETQALQELATRRDQLVEMRVAEVQRLHRASPALHKELRKHIAYLAGRIKQLEDEIDKTVRRSEAWRRKREVLRSFPGVGKVFSLTVLSKLPELGTLSGKAAAALVGTAPVPADSGRRRGVRVIRGGRYQVRRKLYMCALSAVRWNPVLKRFYEQLVARGKLEKVALVAVMRKIIVMLNAMLKRDTLWSEPCAGLSAKD

SEQ ID NO: 260443 - protein, 432 aa, unidentified
MCFRPCFPRFGWVWAYGRGLGPGLTSESADAVRVVLRNDLSAGPQVFLAPTGGAGLICPSWTRGRGSQVRRPAGACHPFNLRKEMALPIVESRAITGGVDTHADVHVAAALDPIGGLLGVREFPASPAGYAGLLEWLGGFGTVCLVGIEGTGSYGAGLSRHVTTAGVRVVEVDRSDRQDRRRQGKSDPLDAVSAARAAQSGRARGAPKGRDGTVEAIRALMVAKRSARSERTQTINQARALIVTGPDDLRARFARHTVTALVAGLASLRPRPGSTVGYATRIALRELGRRAEFLDAQLERLDEFIVPLVTAHAPGLLALYGVGPHTAALLLTAAGDHPERLRSEAAWAHMCAVAPIPASSGKTVRHRLNPGGNRQANHALWRIVFTRMGSDPATRAYVERRTAEGKSKPEIIRCLKRYVAREVYPCLRAAAG

SEQ ID NO: 260444 - protein, 349 aa, unidentified
MVAEVVDYVVGVDTHRDEHTLALVEAATGAVLAQRAVASNGRGYAQALRFARRQTEASRVWAVEGAGHYGAGLARYLSERGETVLEVGRSPRGERRLRGKDDRLDAVRAARAALGREPLPLPRSGERREALRLLLVARRSAVDVRRAALVQLRSVIVTAPDRLREELRGLPRQRLLGRCSRLRRTSSATPDEVAARLVLRTLARRVEAASAEAAELEREILAHVRALAPELLDEPGVGPIVAAQLIVAWSHPGRVRSEAAFARLAGVAPLPASSGQTTRQRLSRGGDRQLNRALHTVVLHRRLHDPRTRDYIARRVAEGKSRRDATRLLKRYLARQLFRLLQNQEPLMA

SEQ ID NO: 260445 - protein, 477 aa, unidentified
MFVAVVAVASVVPVSLLVSMVWRVATRTVDCCLEHERQTSKFCLGPPRVERVNRCDNDGRKSIMEIVHSRCAGMDVSKRDAKVCVRVAGRGRRQTVERVRTWGSTTNAVLALREHLINEQVSLVVMEATGDYWKPFYYLLEDAGFEVMLVNARQVKNLPGRKSDVSDAAWLAQLGAHGLVRGSFVPPAPIRQLRDLTRARTAMTRERGREIQRLEKLLEDAGIKLSSVASDITCVSGRLMLQGLIDGQHDPAVLADLAKRRLRAKIPELTEALTGRFSAHHAFLTGMYLDAIDQRSRQIAELTARIEVVIEPFRSFCDLIGTIPGIGQRSAEVIVAETGADMSIFPTAAHLASSAGCCPGSNESAGRVKSTATRPGNPYLKAALGAAALSIANTHNTYLAAKYRRIAARRGPKKALVAIEHTILIAIWNMAHTGALYDDPRADYYTHRDPQRARRNAVTQLQRLGYQVTLTPTAASA

SEQ ID NO: 260446 - protein, 348 aa, unidentified
MEHSMGIDLHRKYFVATIVDEDGEVTRRDRVSTDRLAIEGYLESLDGEKPGKAVMEACYNWSYLYDQLEGEFEEVLLAHPLKTKAIAEARIKNDVLDSETLAQLLRAGLIAQAYAPPRETRDVKNLLRYRSSIVGARTSFKNRTHAVLARNHVEHPTLRELSDIFGRRGMAVMRSLELYGHDTAILNGLLDIVDEFTARELELRKQIKAMNREDDITRLLMTVPGIGDITALLIRYEIDDIDRFLSPGKLCSYAGIVPCTHSSGGKTYHGRITKQGNRWLRWGIIEASHKATVTSPSLAAYHARIKGRRCSRGPGEEAAQDRVLRLEGEEALLRRSDKDWIAAALSNV

SEQ ID NO: 260447 - protein, 593 aa, unidentified
MGAAVSITRLELTAAQLRAAAGREKDGSAARRMLAIAMVLDGADRGTAAETCGMDRQTLRDWVHRYNAEGIRGLHDLKTPGPKPKLTADQQAKLAELVEAGPDPARHGVVRWRRVDLRDELQRCFGVELHERSVGKVLAKLGYRRLSVRPRHPQTDEAAQEAFKKTSPQWSRHGCPTTPKTSPSKSGSRCYGDGLSRYFGSPNQSDGAATMQPIDTVNPTILLAIELSASTWLVAARVPGAEKPHLHRIDGGDTAALLALISSLRARVARRLDAPEIGVVCCFEAGRDGFWLHRLLTAHGVASHVLEPTSILVNRRARRAKTDRLDAEGMLRVLAAYLRGDHQACSMVRVPTPDEEDAKRTHREREKLVQERLRIENRIEALLFTQGIRKRPSLRSWERDLAVLRTGDGREIPRHLRAELDRLRRRLVMALELIREVEAERDQAAETKPQDQACRKIAALCRIRGIGENFAAVLTREVFYRSFDNRRQIASYVGITPMPYQSGGMDRDRRISRAGNPRARTTMIQLAWLWLRYQPGSELAEWFRERVGTLAGRTRRIAIVAMARKLLIALWRYAETGVVPAGAEIRAETTVAA

SEQ ID NO: 260448 - protein, 342 aa, unidentified
MNITVSGLDLAKNVFHFVGCNKAGKIIRKKMLRRNEVLSFFAKLPPCLVGMEACSSAHYWAREIEKLGHTVKQIAPQHVKAFLRGNKNDYNDALAISEAVARPQMRFVVTKTQTQQDIQSIHVFRKKCERDRTANSNEVRGLLSEYGIAIPQGIHNVFKTLPKLFDKTEDNGLSDLFKTLLAQHYEKLVELNKHLDFYTKKIKVQSKSDECQRLQSIPGFGPIVASAFYQHVGNGSGFKNGRCVSASLGVVPKQYSSGGKDKLLGISKRGDKYLRTLLVHGARAVINTLKDKKTPLANWLNRLIVTRGKNKATLALANKLARIGWAILRSGGCYSAEHAAAN

SEQ ID NO: 260449 - protein, 459 aa, unidentified
MNKVKQHKTSRFEKMPVVNLAAGGIDVGSRSHFVAIGQNTEDVKEFGVYTEDLHTLCKHLVASGITTVALESTGSYWQPLFVLLQQYNLDPILVNGKFTKNVKGRKTDVQDCQWIQKLHTMGMLEGSFIPDLFTEQVRQYYRHRQTLVANAASYINKMQKALRLINIRLDTALRDVMGRSGKDIIEAILKGERDAKVLASLAQPTVKTSKEEIVAALTGDWREEYIFELRQCYEIYQHYHKKIDECDEVIKQIVTAEVQRKQTEENLAKAEGVKIKKKKARKNEARINIQQLAVDLTGGVDISRIEGVGLGLVLCITSETGLDLKAFPTAKHFSSWLSVAPDIKKTGGKVINSRTRKGKGRLARALMHAANAIGNMKTGNYLVHFFKRIERRRGRPTAIIATANKLSKIIWNMLVKKQTYNPIMPKEYLDINRKREVKNIQRKIKQLNIQEEEIVFATP

SEQ ID NO: 260450 - protein, 407 aa, unidentified
MIFVGVDWAEAHHDVHVADEGGVRLVKARLPEGVEGIARFHELVGAHVEDPTEVVIGIETDRGLFVAALVAAGYGVYAVNPMSTSRYRDRHSSSGAKSDAGDAQVLSDMVRTDRHNHRLMAGDSEEVEAIKILARAHQSMVWSRGRQTNQLRSTLREFYPAALVAFNDLASGDALEVLRIAPTPTLGRGLSRSKIASALRRGGRQRRIDERAAEIQSALRSEQLEAPATVADAMGASVRASVAVIAEMVAQSTVLAEELSSDFEQHPDAEMVRSLPGLGTILGARVLGEFGDEPNRYATSKCRKNYAGTSPITRASGTKKAVLARHVRNRRLADAIYLWAFASLSASPGARAYYDARRAAGEGHHQALRALGNRLVGVLHGCLTHQVTYDEMIAWAHRPENELALAA

SEQ ID NO: 260451 - protein, 365 aa, unidentified
MSKDSKESAGETRLYVGIDLGDKKSRVCIVGEQGKMVSQEWVVTTPEALLKRFHGQPAMDIAMEVGTHSRWASELLGKCGHDVRVADARQLALISNSDAKSDKRDARTLAQLLRADPRLLSPIEHRAENLQMDLTVIRMRDNLIETRTRLISSVRGVVKATGARLPDCETTRFPQQVTDVIPEPLRAALAPMLEVIDQLNEQLYEYDCLLAHWALTRYTESSRLTQVKGVGTLTALTFMLTVGDKERFSRTRDIGSFLGLRPRLDQSGDSHPQLRITKAGDGLLRKTLVECAQYMLGPFGQDSDLRRWGLKMIENGNGSKRARQRAVVGVARRLAVLLMSLWKSGQSYDPLRHSRTQESSPEVAA

SEQ ID NO: 260452 - protein, 469 aa, unidentified
MAATHPSRLNRKQRHELARRLQSADPGLDIVHPNAAGIDVGNSVHYVAVRPDRDPQPVRRFECFTADLHRLADWLQQCGVTTVALQSTGVYWLPLYDILDARGLEVYLVNARHTKNLPGRKTDVQESQWLLKLHTYGLLRNSFYPSADIRVVRTYWRQRADHVGAVSTCIQRMQKALTQMNIQLANVISDLSGWTGMRILRAILAGERDPQALAALSHPGIHANRDTIAKSLEGTWRVDLLFVLQQEVTTYDAYLHRIAECDQALEQHLRGLADKVDDNGGLLVASAARHQAHTKRRRKAGSHTPQFDLGRELQRISGVDLTRIDGIDVSVAQTVISEVGLDMSRWQDEHHFASWLGLCPDNRITGGKVIRRGTRRVVNRAATALRIAATTLLRSQSYLGAQYRRFRSKLGAPKAITAMAHKLAVLVYRMLRWGHEYVDKGMQYYEERHREQQIRLLKKRAATLGLVLV

SEQ ID NO: 260453 - protein, 346 aa, unidentified
MMIIGCDFHPSWQQVSWLDTETGETGERKLVQASGDAERFYRQVAAPALIGMEATGNCHWLVDLLAELGHELWVGDAAQIRASYVRQQKTDKRDAAHLLKLLVEGRFPRIWMPSSTVRDLRQLLLHRYKLVIMRARVKNELQHLCLNQGVQRKHKLWSQAGQQILRELPLQPWAARRRDDLLKLLAMLDQQIAPLDQAVAEEAQRDKMALLLETQPGVGPITALAYVLTMGDVRRFPRGKQVASYLGLIPREHSSGGRQKLGAITKQGNRMLRMLLVEAAQAAVRYDPQFRKEYLHRCHQKPKAVAKVAAARKLAIRLYWMLRTQRPYPAVVRIESSPRVPLVGAS

SEQ ID NO: 260454 - protein, 362 aa, unidentified
MPMLAEVVDAVVGVDTHRDTHELEIAHPTGAVIGTRSVSNHTTGFAQAVGWIAEHAPGPRVVVAIEGTRSYGAGLARALAGAGLIVVECEQPTRKERRRRGKSDAIDAHLAVRWALELDAAKLPTPRADGDREALRLLLTAREELTTTATGQTNRLKALLLAGDDTDRALGRGKFTGADLNTLARRRPPREATREQAVRHGEIRRLAVALRQERRELKDNHVQLQRIVNDLAPGLTDRKGIGPVCAAQAIVSFSHPGRCRNDAAYAALGGISPLEASSGPNTRHRLNRGGDRALNRAIHIITLTRMRCCPTTKQYIARRIAEGKSSREIQRCLKRYIARELFRTLNANAATLASPTTALAAA

SEQ ID NO: 260455 - protein, 504 aa, unidentified
MRRVGIDIALRAAHKAAVYEDGGRLGRPFSVAQTKEGVDELLRRATAGTTESVEFVMEPTGLAWLPLAAELSRRGHRVYLPKPAKTHALRKFLAQHTKTDAIDACTAALVRHVDHRATELRVPTAAQTTLRLMTKQRARLVVDAAKEKNRIFTWLLLANPHVGRAIGQDPTSQLGRAFLRERLDPFEVLARGRPALRQFLDEHGRGAVNEKQLEALWQACERAGALFEALRTSGRLPFDYAELQLLVDQALDHTAFLEAQIAKLDARIAALYRQLDPTQLLVREVPGFGPTIASAVEAFAGDAERFGSIKRYAAFFGLVPRTKQTGIAGEKPRQALTKGGQNLLKKYMFLAAETARRKDPELAATYERAIARGKHHYSAVIVVAHKLVRRVYALLKARAAGVSDVHYQLRGPDGAAITVDEARAVIAERFPTKAVKEARKRAPQTARQTGTMSQETGSSEDATKAVVAAVPTAFVPNLDPEREISLIASLDPPSPQVENLLDRS

SEQ ID NO: 260456 - protein, 356 aa, unidentified
MPTLADTIDGVIGVDTHRDTLAAAAVSPIGRILAQTAVSADTAGYQAVLDFARAHVPGRRGWAIEGAGSYGAGLARFLTARSERIVEVCRPKRPARRTGAKTDPVDAVRAAREALTQDHPAAPRRRGDREALRVLLSTRRGAVIARVDAINQLKALIVGAPEELRAELRGRATTTQILECARLRHRPARSLEHRATIRALRAVAERIQTLEAEIDALGAELAALVGAIAPWLLELPGVGPIVATQLLVSWSHAGRLRSEAAFAALAGVNPIPASSGQVTRHRLNRGGDRQLNRVLHTIVLVRLRDDPQTRAYAARRLAEGKSARDIKRCLKRIIARQLFKLLERYDQPGVEVLHAA

SEQ ID NO: 260457 - protein, 318 aa, unidentified
MGFLGIDVSKKTLDWARVETADGEVLGEGSVPNTVRGIAALVATLAADGLTLIVVEATGAYHRPLLAALVAAEVPVSLVNPLQIVGFRTVRMGRAKTDRQDARLLARFGATYATELRRYTPPSAEQAQLRAWTRYRASLIRRQTQLAGQGEANGWAGDAQVQRWLTNDTQLIAAKIAVVDAAIEELLARIPEALVVLAIKGVGPQITAAVLGNLPVAVWGNARKASAYFGLVPRIAQSGKRSSSSMSKAGPGEVRRVLWLGARSAITNDPAIQAWHARLLERGKTENQAQCAVMNKLLRHMMGRLKTWQTAQIEAAVA

SEQ ID NO: 260458 - protein, 420 aa, unidentified
MNDSQQWQLHRAFGALDWASEKHSVVLVNQTGKVIEDFEIEHSALGWKKFREKLHPYGSIPFAIETSQGVAVEQLLEAGMLVYPLNPKSAQAYRERKAPSGVKDDRLDAWSFADALRVDGQDWKALRPEEPLIKELRLLCRDEVTLIEQRTAFINQLRHALAEYYPAALEAFEDWTSVSAWMFLQRFPTPELLAQAGKRQWQKFLHSRRLWGSDQGPRRMEIFAHATEFTGTASTVKAKSLLAQSLVQMLFAVEKQLAVYRQRIEELFARHPDHDLFGSLPGAGPKIAPRLLSEIGDDRQRFGGDPQNLQCLAGSAPVTKRSGKQRKYWPVHQRWACDKHLRHAIHLFSEQSLSRCAWAEIYYQHHRQKNQSHANALRRLSHRWLKIIYKMWIDRTHYNAELHHRNQLQHGSWIFQLQKS

SEQ ID NO: 260459 - protein, 350 aa, unidentified
MKKHSKKTDVKVLGIDLAKQSFQLHGVDESGQTVLRKKLTRNKLTQCIAQLPPCLIGVEACSGANHWVRVFKSFGHTVRMIAPQFVKPYVKSNKNDAADAEAICEAVSRPSMRFVPEKSIEQQDIQSVRRIRSQLVARRTAQGNQIRGLLSEYGIVIPKGIQHIRRQIPRILEDGENGLSDLFRELLNELYEELVHLDERVDTLEKKLLRTSQQNEDCRRLLTIPGVGLLSATALVAAIGDIGAFKSGRELAAWLGLVPRQHSTGGEAKLLGISKRGDTYLRTLLIHGGRTVVRVAHKYQDRKNRWISELEQRRGKNISAVAVANKNARIAWALLTKKTSYQAKDPVAQP

SEQ ID NO: 260460 - protein, 362 aa, unidentified
MLIIGCDFHPSGQQVFMVDSESGEVLADRWIEHRGQEAKQFYQSLPSGARVGVEATGNMLWFERLLQSCGHQLWVGDAAAIRSKDTRKQKHDRRDAQLIASLLLQGEPQFPRIWVPSLAERDLRQLLMHRHKLVRMRVQMQNQLQHIAINQGTQKKRKLWSKEGRRLLESLALEPWTRRRRDDLLQLLDQFNERIAELDREVEKAAKANSRANLLMTQKGVGPVISLAMVLTVGDVSRFANSRKLVSYLGLNPSEDSSGERQRQGAISKQGNSFMRFLLVQGAQTAARAEAGWARQYKRLSMQKHRGTAKVMLARKLAVRLYWMLRTNTPHSEAVRMQGSSSHPVVQGPTSLSERPASQCGK

SEQ ID NO: 260461 - protein, 371 aa, unidentified
MEESSKTVYVGLDVHKDAIAVAYAPEDRGTEVVSLGAIGTRQCDIDKLIRKLQSKGATLVFVYEAGPCGYWLYRYLTRKGLSCHIVAPSLIPRKPGDRVKTDRRDAITLARLLRSGDLSAIYVPQLEDEALRDLSRGRDDAMQDLKRSKRRLKSFLLRQDIRYEGRANWNAAHLRWLAEVVCPTAAQQIVFQEYVRAVTEQQERLQRLERELHAAVKSWRLYPVVEAIQALRGVELTGAIILMTELGDLTRFDTPRQLMSYLGLTPSEYSSGARRRQGGITKAGNSHARRALVEGAWAYRYPAKVSRHLQLRLEKLPAEVQAIGWKAQVRLCKRYRQLSARGKHVNQVVVAIAREMAAFAWAIARIVPLAS

SEQ ID NO: 260462 - protein, 347 aa, unidentified
MVTDSLDVVIGVDTHRDAHALALVRCFDGVLIAEQELPANRAGYRAALRLGKRSGERRLWALEGTGSYGAGLARYLAERGERVVEVERPAREGSRARLKSDSLDALRAARAALAGQALASPRAAGRREALRVLLQTREGAVAVRRAGLNQLRALVVSAPEGLRERLRGHGRDGLVRACARLRPQQRSQPELYATSLALRSLARRVERSTREAAELEGELRRLVSELCPQLLALEGVGPISAAQVLVSFSHRGRFRSEAAFARLAGVPPIPASSGKSVRHRLDRGGDRRLNRALHTIVLTRRRSDAATIAYIARRVSEGKSERDAARCLKRYLARQLFRLLEATPAVA

SEQ ID NO: 260463 - protein, 377 aa, unidentified
MESIIYVGIDVHKDTYSLCSFEMQKDVFFSQHTVKASTANVVSYLNKISESNGNAITVCGYEAGPTGYKLCLDLQRQGFNCVIMAPTSIAKTAKDKMLKTDRADAQILARTLAYHSYKQVVLPTENILAIKEVVRLRASVLKSCKKAKQNLLSFLLYHGISYPGGGRESYWTVKFFTWLKTVTFASDYLTYCFEEYVSEVSRQIQRLEQLNAKLKELEGDKEISEGVRKLKCISGIDTVTAISLIAETGDFNRFKSAKEFASYTGLIPGRHDSGLSVGNSVGITKQGNQNLRHLLVESAKSIKRATALSHGQKSRRLLARQEGMKSEIINYADRAALRIKSRMRKLEIRGLNYNKAAVACARELACFAWGIMTNHIQ

SEQ ID NO: 260464 - protein, 363 aa, unidentified
MIESTTVTVGLDVHARSIRLAAVRADELLEERTLAYDEEAVEQLLRRWPAVRCCYEAGPTGFGLYRYLAERGIDCQVVAPGLVPQRAGDRVKTDARDARKLARLHAGGLLEPIHVPSPELEAVRDLVRAREDARLDRMRDRQRLSKFCLRHGRLLPTSAWTVIRRKWLGEQRFEHTAEQITFDTYLHAVGLVDCRVEALERAVRETAEQGPWRELVARLRCLRGVDTLTALSLVGEIGDFSRFRSAEEFMAFVGLVPSEHSSGEKRRQGSISKVGNSHVRRLLVESAWHARRRPTVGYELARRQRAQDALVIEGSWRCQQRLYQRWQRMAGRGKPHQKIVVACARELAGFVWAIATDQPLRQI

SEQ ID NO: 260465 - protein, 349 aa, unidentified
MSEPYAGRQIVGIDLHRRRSVLVRMTEAGERLETVRISNDPEYLREVMTRAGEAPEVVLEACYGWYWAADTLAELGATVHLAHPLGVKMFSYRRLKNDERDAADLADLLRMGRLPEAWIAPPATRELRGWVRHRAKLVGLRSNLKCQVHGILANAGITVPMSDLFGASGQRLLATADLATESRSRIDSLQRMITALDFEVELFAKLVAGRLRTHPGYQAIQLIPGVGPILAAVFVAEIGDITRFRRPEQLASWAGLTPKHHESDTTVHRGRITKQGSRLVRWAAIEAVQRLPGHTRIGQVRDRVAARRGRNIGVVAAARELTELVFYGLRDHHVHALAVHSPARTPLLA

SEQ ID NO: 260466 - protein, 340 aa, unidentified
MARYVGVDLHRDCFTACVRREAGRTQTRSWKLSQVKEFARTLKPSDELAVEATGNTRYFASMVREKVGRFVVVNPSQFKVISQSVKKTDRNDAETLALYLSKGLLPEVRMKDEAHAQMASLAQTRDKLVKLRTTLKNKIHNILCARGIVMPKEAFSSQAGLNKVLAMRFDPMVELELQVIVEQIRHLNEGIGKLDDQIKSGGEKLPGHENLTSIKGIGPTSASILLSVIGDVNDFADEGKLASYFGIVPKVDKSNRTEHIGRITKRGSKIGRTTLVQCTLVAKRYSPYLRAYYERIKKMRGSGKAIIATARKFLGIIYQTLKNHWVFEDFPNFVLAGRAA

SEQ ID NO: 260467 - protein, 339 aa, unidentified
MQATTVGLDVAKTIFHVHGVTEAGEVAFNRPLRRSQVLSFFDRLAPCLVGVEACASSHYWARELSKLGHTVRLMPPMYVKPYVKRGKSDAVDAEAICEAVTRPTMRFVEIKSEEQQALLSLHRARDFVVRQRTQLINMLRSLATEFGIAIARGVSRAIDFAKGIMEGQQADLPELAQDVLRVLSRQLVDLHNRLGWYEITMRVQARLSRQARLLQTIPGVGPVTASAVAATIGSGHQFRSGREFAAWLGLTPRNHSSGGKERLGKITKMGDRYLRQLIVVGMTSRVRQVANHPDRADPWLAHLLQRKPTRLATVAMANKTARIMWAVLTRNEPYTPPTA

SEQ ID NO: 260468 - protein, 430 aa, unidentified
MLCLEHCSISSSLLSFGSVSARATKEMPMVFVGIDWAEAHHDVCVVDEEGRVLARRQVPEGLDGVGKLHALIAAHAEDPSKVVVGIETDRGLLVGSLVTAGYHIYAINPLASSRYRDRHATSGAKSDPGDARVLADLVRTDRHKYRPLAGDSNLAEAVQILARAHQGLVWTRQRQVNQLRNALREFYPGALAAFDDLDAADTVAILERAPTPSRGRALSQAKIISALRQGGRERNLEAKAAQIQAQLRLRQLEAPALLSEAYGHSVAANVAVIKQLNLQIAALEQELAASFELHPDAEIYLSLPGLGVVLGARAMGEFGDDRTRFLHPKARKNYAGTAPITKASGTRKVVLARVARNRRLADACYQWAFSALTRSEGARYRYDVLRARGQTHHQALRALANRLVAILHGCLANRQAYSEHLAWSAQAEVA

SEQ ID NO: 260469 - protein, 352 aa, unidentified
MKYYIGDDAHKKYSVFRTIDEKGTVGAPERVPHEKDLYKRYLTTLPPSSPIAIESVGNWYWMIDAIEQAGHQPILVNPKKAKLLMGNINKTDKLDAKGLALLNLNGSLPAVWIPPAELRDQRELSRMRMALVGVRTKFKNRIHATLAKYAITFDEVSDIFGQKGRRLIQQALEELPPETRRSVIEQLYLLDQISEQIEQVEKHIGEVVKVTPKMQLIKSLPGVGDILATVITLEIGDVERFISAQHLASYCGTVPRINSSGGKTSYGRVRSDVNRYLKGAFIEAANCINLQQHYLSGRHVVELLRRVQKSKGYSKAAVAVARHLSEATFCMLKKNVPYQEPKLKGLVLSSQG

SEQ ID NO: 260470 - protein, 369 aa, unidentified
MNKTTYVGLDVHKDTIAVAVAEDGRGGEIRFFGTIAHTADSVLRLTKQLAAAGSTPSFCYEAGPCGYGLHRHLTKLGFECAVVAPAMIPRKAGDRVKTDRRDAEMLARLWRAGELTAIWTPDEEQEAMRDLIRTRKQAMDAVKVAKQQLLSFLLRHGLRYENGSYWTKRHRRWLAELRRFRFSHQQLAFEELKRAVDQAETRVATLDQAIDEAVQTWRFAPVVDGLRALRGVNTIIAATVVAEIGDITRFENPRQLMAWLGLVPSEHSSGNTTRRGRLTKTGNALARTMLVEAGWSYRHPPKEGEPFLKRSAHLPQEIKDIGWKAQTRLCKRFRHLSNTGKPQPRVLAAIARELAGFIWDIARKTPLPA

SEQ ID NO: 260471 - protein, 343 aa, unidentified
MGHFAGLDVSVKDTSVCIVDETGKIVREVKVASEPDALLHVLRSPAYRFKRIGLEAGPLSQWLFSALGEANLPVICVETRHMRAVLKAQINKTDRNDARGIAQMMRVGLYRPVHVKTLRSQKLRMLLTHRKLLQSKAIAIENDLRGTLRNFGLKVGIVGRSKFEARIEELVEDVPDLVVLVEPLLVVRRVLREQIAALHRRLLTIVRDDEVCRRLTTIPGVGPVVALTYRATVDVPARFRKSKSVGAVFGLTCSRDQSGERDRPGAISRCGDEMMRAMLYEAAQAMLLRSAKWSWLKAWAMQIARRRGMKRAIVALARRLAVIMHRMWVDGAEFRWTKEAAAA

SEQ ID NO: 260472 - protein, 327 aa, unidentified
MQGWAREAGYSITNIVGIDVSKRELVVVVSGHAALRRYTNDAAGRRRLCRDLAKIVGTGTLRVGLEASGGYERKVAAALRKAGFEVIVFQPIQVRAYARYLGQRAKTDPIDAHIIALATAAYEGEIGHSDERLSSMAEHLTFIEQTEEDIVRLKTRLDGFTDTALKTRLAAEIKRLTTRRNAEIRSLRKTLRQHLDLATRLDLVTSIEGIGERTALTLIIRMPELGSLTREEAASLAGLAPFDDQSGKTDRIRHIKGGRAKVRRSLYAAALPAAFKWNTALVDLYHRLTARGATHKKALIACARKLLIFANAVLARGTPWIKSGATA

SEQ ID NO: 260473 - protein, 406 aa, unidentified
MEQVIIGVDPHKLSATIEVVNNQEHLLGSGRFTTDQRGYTAMRSYVKAWPDRVWAVEGANGAGRPLAQRLVEAGEQVLDVPAKLAARVRLFDTGHNRKTDALDAHSIAIVAVRTKGLRVLAADGELEALRMLTDRRDELGHLRVQTVNRLQRLLSELFPGQRKKDLSALQAKAMLTTVRPRDIAGKTRRRMAAEELADLVAVDAKLKKIKAELKAMVIARGSTLLQINGIGPAGAARTLADVGDITRFADRNRFASWTGTAPLDASSGEQIRHRLSRAGNRRMNHVLHIAAIVQLRNDTEGRAYFRRKVAAGKTRMEALRALKRRLSDVLYRRLVADARTRDLDAKSRGLINDGTGPGGHCGATQESSAADLPPHVDTSDQPLPGPAPRRYPDPSEPERPRHPRAR

SEQ ID NO: 260474 - protein, 339 aa, unidentified
MKDQDVSDVIKTKNRTAMRYIGIDVSKATFVVAYSSDKGGGIRTFNNTTAGIRQFIGTLPKDGSIHCVMEATGNYSALLLYMLNVAGITVSMENPLKVKNFAKAMLSTVKTDKSDARLITLYGEKMNPRPFKVQGEAILRLRQKRTVIRQLTKQITAMSNLRGSLVCLPVPDKGATHTVDETIKFLEKRRDRLQSELTELVEVEFSRQLALLTTIKGIGITLATALIITTGGFTYFQNAKQVSRYLGICPTYEQSGTSVNIRGHINRNGDAYTRGLIYVAAWNASRFNAKCGETYTRLRQNGKPGKLAMIAVANKLVRQAFAVVAHDKEYVDGFVSNRH

SEQ ID NO: 260475 - protein, 459 aa, unidentified
MARKKKLEMEIINTEAAGIDVGSRSHFVAVGQSLEDVKEFGVYAEDNTELCQWLLSYGITSVAMESTGDYWQNLYAELLKHDISVVLCNGKFTKHAKGKKTDVKDCRWIQKLHSLGLLSSSFLPDETTEKLRTYCRQRTNMINQSATVSRKMQKYLKFLNFRLDVVVKDVCGLTGMKIIEDICSGNLDPSSLAEHRHYNCRKSKEEIAKALHGNNREDYLFGLKQEYQSYMFYQKKIQQCDNEIAKFIKETLRKSPNKKSFRTVDKPHKRINKNAPAIKDFNQIAFQYFEGVDLMAIEGVSHSTILSIMSEIGPEGFKKFNSSKEFVSWLRVAPNNKISGGKVLSHRIPKGSNRLKIALRQSANAIGNLKDTHLSDFFKRIAYRRGRQAAVSATARKLGVIIWTMITKKVPYSPPTEYLFLDQKRKLKMVSRIKKNIVKFGINLEEIRIDNMQIINNII

SEQ ID NO: 260476 - protein, 405 aa, unidentified
MSKQKVVKKGVVIGVDPHKMSVTIEVVDTHEQLLGGGRFDTTRAGYAAMRRYVRQWPERVWAVEGANGAGRPLAQRLLAAGEHVVDVPAKLAARVRLFDSGHNRKADALDAHSIAVVAVRTDGLRVLVEDGELEALRMLTDRRDELAHQRVQTVNRLQRLLSELLPGQRKRDLSAAQAKAMLATVRPRDIAGKTRRRMAADEIADLVALDTKLRKIKAELTAAVTARGSHLMDIYGIGPAGAARVLADVGDVTRFADRNRFASWTGTAPIDVSSGEQTRHRLSRAGNRRMNHLLHVATIVQVRHDTEGRAYYRRKLAAGKTPMEALRCLKRRLSDVVYRQLVADARGAEHDGGADPGGHCGATLQSSAADSHPLIDTSDQPLPGPANPTLRRPPASRKTLTTSAP

SEQ ID NO: 260477 - protein, 431 aa, unidentified
MNADGKSPSMELLSPLEYEMSQRSKVCGVDVHKQFFVAALLSQSGGSTLKRFQSDKPGLLEFKEWLLNEQCELVALESTGIYWYSLYSTLEDHIEVIVANPYLIKNIPGRKTDIADAQWIAQLALNDLIKPSRIFPKKQREIRNLTRSREHLVNNRTMLKNRVHRVLESASIKLSSVLADIFGKSGLHIIQGLVAGTDLDTILASISNEKVRAKEPELRNAIQHNLESSQILIIDQCLSLIDQITCRINELDVEIGAQMNDREKDLKIAMSVPGIGKISAMTILAEIGNFEEFITPEKLAAWSGLTPSVYQSADHLKTGPITKRGSPHLRRIMVEVAQAAVKTKNSRIRSFFLRLKIKKGYNKSIVAVARKILCILWTILKKREVYCEENVPKKKVLITLKSSRNPPSIQEAIEILARAGYMIQKLNSSGG

SEQ ID NO: 260478 - protein, 460 aa, unidentified
MKLYLGGDASKGYTDWVIISETKKKLLDNFQLDDTFEGHNQLYNAIKCCVDKYPNVEIYAALESTGGYENNWLNTLKGYQKVFNIQVARVNPLAVFHDSKANMTRTITDAVSAISIAEYQINHPDNIRYEQDTTWKSLRRHWNFVELQKKQRVQTINHLDALLYSANPMLLTYKTDKLSNWLLEVIIQYPTANLLAKANAEELSKIPYVSLSKAEEIIASVQKSIASSTDENTGVLIKQIALQIKMFDQTIESQMSLIKKEMVCPEIHILKTFKGIDTTSAIGLILEIGVVERFYSVKSICSFFGLNPKFKQSGDKIIGVRMSKLGSKNMRKILFNIAIGAIVHNPLIYEVYQRKLSEGMSKMAAIGVCMHKILRIIYGMLKNMKAFDAQVDKQNASRSSSKQDEKNQQKVAYIVKTRRFQEYDQNAPISIRQTKKRKEQTLSQCEITSQSAGSANSSQM

SEQ ID NO: 260479 - protein, 323 aa, unidentified
MSTTRRTTYTYVGIDVSKANLDVAILPIGECFVASNDEVGIDELIGKLAEVPEALVLLEATGGGFERPVAAALAASGIALFVVNPRQARDYFAKATGQLAKTDALDAFVLARLAQAIRPTPRAIPDQEAREFGEILARRRQIVRMMSAEKNRLGASGSKAVRGRIEAHIRWLEKELARTDRDLDETIENSPTFKANEALLRSVPGVGPVLCRTLLAELAELGSLSPRELSALVGVAPLNRDSGTLRGRRTVWGGRARVREALYMGALIASRFNPVIKEFYERLLEAGKPKKVALVACMRKLLIILNAVMRDRTPWRCPHILNP

SEQ ID NO: 260480 - protein, 280 aa, unidentified
MLGLMYPVIPLTWQFGNDKKGIAKLCRLMKKVKPALITFEATGGYEMPLYIALCEAELPAAPANPRQARDFAKATGKMAKTDVLDARIIARFASVMLPEPRPIPDSQKIKEIIARRTQLVQMIVAEKNRLHVAREDIKKRTNAHIKWLEEELDDTDKELAQNISDNPEWQKKRDLLQSTPGVGSAFAITLLADLPELGDLNRREIGALVGVAPLNRDSGTWRGKRVVWGGRATCRAALYMAALAATKHNPVIKQFYERLLERGKVKKVALGSSQRFQLFQ

SEQ ID NO: 260481 - protein, 402 aa, unidentified
MNAVGIDVSKGKSMVAIMRPFGEVVRSPFEVSHTESELSELAKLLKSLPGETRVVMEYTGYYHAPVAYSLCEAGIYVSAVNAILVHDYGNNNLRRAKTDKKDAVKLANYALDHWLTLPRYIPEEDARLMLKTCYRQYQQMSKIQTMQNNNLVSLLDITFPNANRLFTSPPRPDGSEKWVDFVSQFWHCDCVGKFSLNAFTERYRKWCKKHRYNFSADKAAKIHEAARNHVAVMPMTETSRFLIQQAVSQLQTTQKVLASMRDQMQSLSSTLPEYPVVMQMYGVGKNLGPQLMAEIGDVRRFHSKKALVAYAGIDAPPFQSGQYELKSGSISKRGSSSLRRTLFLVMSVILQNSPEDQPVYQFMDKKRTEGKPYKVYMMASANKFLRIYYASVTKYLASLETA

SEQ ID NO: 260482 - protein, 359 aa, unidentified
MEAQRKALSFKGQNIYIGIDVHLKSWSVTLMSEATQLKRFSQSPDPDALYAHLVRNYPEAEYHSVYEAGFCGFWIHYRLVGLGIHNIVVNPADVPTTTSEKLRKTDAVDSAKLARSLRAGELKGIYVPGSESLETRSLIRLRDSITKDQTRLKNRIKSHLRYLGIEIPEEFSGPGRCWNRRFVVWLKGAETVTAYGRQTLDFLVRQYEALRGQRLEMLRAVRALSRTERFEKPLENLMTVPGIGQLTGMSLLSEIDDIRRFKSADQLAAFIGMIPMCHSSGEREGVGDITVRRSARLRSVLVEASWVAVRQDPALSMAYGNYCKRMAPGKAIIKIARKLVNRIYFVMKRNQPYVKCVVA

SEQ ID NO: 260483 - protein, 346 aa, unidentified
MKSIAYLAMDLHAKQFTLGVMDENGSFKGSIEFPTTEKNIMTALTSIRSKRKYLTIEQGPLTYWAAQTARPYVDQVVTCDPRANALIFKNPYKKDKVDTKNLCRLLRLGELNHVYQPENDHRAIFKAAALHYIDLRKQQVRLKQKIKAMYRHWGIIEVFTDSVYTKSGRDRFMAKVKHITIHNQLVRLYHLMDESERMRSMAVKTLKTLGRHYSEVRQFMKIPGIADIHAHLFDAFIQTPHRFARITQLWKYCRLSITDRSSDGKPLGYQRIDKAGIGELKALSYRAFVAAMKGDNEVKRFYQQSLQRTHNRKHARLNTQRKILAVMYTIWKKGVAYRPELFTGSA

SEQ ID NO: 260484 - protein, 425 aa, unidentified
MPQATVNGLEIVAFIGLDWSDKQHCICLQASDSSAVEFDELLQTAEALHQWVAKLRCRFGGRKVALALEQSKGAVIYALMQYDFLVLFPINPKALAKYREAFAVSGAKDDPTDAELLADFVRSHHDKLRAWMPDDEKTRALGMLSEQRRKLVDDRTALINRLTSTLKQYFPQAIEWIGPLDSRQAWEFLSRWPTLQSLRKASATQLHRFFDSYRRRNKAQFIQQLVEQISQAVALTDDFAVVTTNSLVVQATVAQLPCLDAAIACFDQQLAALFEQHPDREIFQSLPGAGPALEPRLLAAFGSRRDRFQQAQEIEQLSGVAPVTKRSGKSLYVHRRFACSKFLRQTFHEYAEQSISKSAWARVYYQLQRSRGKGHHAAVRALAFKWIRIIFRCWKDRTLYNEEQYLQALRRRNSPLVPLLQEATI

SEQ ID NO: 260485 - protein, 356 aa, unidentified
MSHKLDSAIAVVGIDIGKNSFHVVGQDKRGALVLRQKWSRGQVEARLANLSPCLIGMEACVGAHHLSRKLQALGHDARLMPAKYVRPYSKGQKNDFRDAEAIAEAVQRPTMKFVATKTVEQLDLQALHRVRERLVGQRTGIINQIRAFLLERGVAVRKGLRFLRAELPTILAKRNDVLSPRMLRIVEDLSGDWRRLDERIEGVSSEITALVEQDAACKRLMTVPGIGPIISSAMVAAIGTGDVFSKGRDFGAWLGLVPKQISTGDRAILGSISKRGNRYLRALFVQAAWVVLVKIGPKHWQRYGLETWIAAASKRLHHNVLAIALANKLARIAWAVLHKGRAFECVKTNAMASRPA

SEQ ID NO: 260486 - protein, 353 aa, unidentified
MNITTVGIDLAKEIITAYAQDAAGHCVMSRNFKFKELAEWLVHLPEGCVIGMEACSSAHHWGRRMQSMGLQPRLMAAEFVQAFRKSKSAKNDHNDAEAIAIAVRQPTMRFVAIKNEAQQSRLSWHRVREGWKEERTALINRCRGLLLEFGYPIARSAAAFQRGLKTSLQEEKLPPNLRRLLAQIESQLQQLDHQLALCDREIAQSAHDDEAAKRLQAIAGVGVITADAVCASVGNARDFKNGRQFAAWIGLTPRQYSSGGKTQLGRISRRGDSYLRSLLVQGARSSLQVTLKKDPAQLNRMQQWVIRLYGRVGYHKTLVAIANKHARQLWALLAKGETYDLNAWQKYANGDAS

SEQ ID NO: 260487 - protein, 326 aa, unidentified
MRNILGIDVSKDKHDLILIVEGRKFHKVVNNDLKGFEHLDKWLKSHHVTEVHACMEATGQYGDALAEWLHRQGHLVSVVNPARIKRYGESKLHRNKTDKADASLIAEFCLKENPDLWKPLSPEIKHLRALIRRLQALKDNLQQEKNRMQSGEKDEWVTTDLAIHIRFLEDRIKATENEIKDLIDKSPGLKSQQGLLRSIPGIGELTANTLLAEIGDFSAFENAPQLAAYAGLNPKGHRSGSSVHKKTQVSKQGRAELRRCLYMPAVVAVNSNPVIQDLADRMAKTNHQKMEILCATMRKLLHLAYGVLKNQLPFDPDYGAQFNFSS

SEQ ID NO: 260488 - protein, 370 aa, unidentified
MKPKLSDYELATIAYHRDTLGVNLVAVDVASRVMQVCYYDSDKKLLKNFQLTRSKFFEFVDKATGPMLFGIEASGSCNYLSRYFESKGHQCRIIPASKVKAFLKLDKNDKIDATGIFKAMLSSVESIPAKSLENQLLMNLFTIRDQLLKQHTQCLNAAHGILYEHGIVTGSACVASSGKIIQGFTDAQESFEHAPMASSHFSVIKTAVFNSLDNLKEQIETINKYLLKYGSSNNTCLNLATIPGVGIQTAVALNAAMGDPERFHGAREFAAYVGVTPIITGSGGKITVMGIRKSGIRSLKKSLYMGAMVYLSNAMKNGTESSWVKDRLKTKRKKVIICAIMNRLARIAYAVAKNGETFDETRCNLIKKLR

SEQ ID NO: 260489 - protein, 397 aa, unidentified
MEAYIGIDLGKESVAAFCGFGETTAHRQTLRFKTSHSEFSRLLKWVTERGVTKGTFVMEASGPYWAPLYAWLIENGQEVYLANPSAPRHFAKSRLKRTKNDRVDARTIAEFAAREKLSGESGRLNAYELQLACRAIRSHIENAAAAKNRIIQLLDVLFPELATVFHDVTCMSSLAFLKKYPTPKAVLDAGEKKISEIKVSKRSLGPSKAQEVYEAARSSVGLKLGPELHAIVLQNQIDVLQQQNRAISRLEDWIAKNASSEALKLLMSHPGCGIRTAAVVMSEVVDPARFPSADKIVAYAGVFPREIQSGKLAKTAKSYRMAKTGNRALRHALYLIALNAVGRDTDLKVYYLRKQKQGKKPMVALGHCMRKVLVTLWAIWRKKKPYEQRIVAEAARG

SEQ ID NO: 260490 - protein, 398 aa, unidentified
MLSIGIDVSKGKSTVCGMKPGGEIVYTPFEVQHTREGMSELLSLLRGSGEEVRVVLESTGSYHCPVVAALLENGIFVSVVNSLRMKRFCSQSIRRVKTDQIDAMQIALYGLAYWQELQPTRLPENTYRELQLLARQYYQMTSLLIKAKVDFNALCDQVLPGMQELMNDHAGRHKLSDFVLRYRHTTHILEMGETRFRKDYCKWAEKKGYRNRERMAALIFATAQNGIPVLPNAPSTQIVITEAIRVLHTVEASRDAILTQMQALAKTLPEYSLVREMPCIGDTLAPRLIAEIGDVRRFHSKRALIAYAGIDAPPYQSGKFSANNRHISKRGNRYLRKTGYEVMQSYVMHKPANDPIFTFIEKKRSEGKSGKLAMVAGLNKFLRVYYGKVTELYRSLPQ

SEQ ID NO: 260491 - protein, 364 aa, unidentified
MQEPTHIGLDVHKETIAVAVLRAGTVECDERVIPNTPEALRKLLSRYPDRSLLRTCYEAGPTGYDTQRLITSLGIACDVIAPSLIPRRSGVRVKTDRTDARNLARLHRAGELVAVRVPTPAEEALRDLVRAREDLKNDRRIARQRIRSFLLRYGKRYPAPGSRWSFRFEVWMRALRFDEPASQAAFDHLVGAYFVRDSQLGAVDAQITELALLEPLAEPVARLRAFRGIDTLTAVTLLTETCDFRRFATAGSYMAFTGLTPSEHSSGASRHQGSITKSGNAHLRRVLVEAAWAYRYAPAVRGKLRARQIGQPPKVVAYSWAAQCRLHGTYRRLAAKKGPNKAVVAVARELAGFVWGAMTDNMAV

SEQ ID NO: 260492 - protein, 423 aa, unidentified
MVAVMIGIDPHKASHTAVAIDPAEVPLGQLRVRACAAQAERLLGWAQAWPQRTWAVEGAGGVGHLLAQQLLAAGERVLDVPPKLAARVRLLATGNINKNDPNDARSVAVAALRSAGVREACGDDHAAVLKVWSKRYRDLGRARTQMACRLHQVLCELIPGGVAGEITAGQAERILASITPAEAVQAARWELAAEFTEDLRGIDARIRQTRKTLAAAVAAAGTSLTGLFGVGPVIAAAVIGDVRHVSRFPDRDHFAACNGTAPIEVSSGGRKIWRLSRRGNRRLNHAIHMAAVTQIRHRHSQGHAYYQKKLAEGKTGKEALRALKRQISDAIYACLQADAQRAAARMKGPGGQPGNGSGSSAAGSHPGHRLFGQATPGPATHPTTPAADPAAGSLPVSLPSRTSGRPGPGPGKARPPSGASRRP

SEQ ID NO: 260493 - protein, 334 aa, unidentified
MWHVGIDLHRLSVVIAAVDDEGNSWGARRIECQDLEGIRQTMRSLQPFRAVIEATGTYRWLYNLLTPLGTVLLAHPLRLRAMVQRRSKTDKLDSQLLANLLRINQIPLAYIPPEKYQQLRDVTRHRARLSRQAAAAKTQLRSLLARHNLVAPYKCVCGVRGCRWLAKQEFGGMDNLVRDELLLRLEHYRRQLAVIDARLKELRDHVPQVGALLDIHGVGLYTALLVIGELGEVERFRTARQVGSYAGLTARVRQSGDHCYRGGITREGSPWLRWILVEAAIKATREDGALKNFYQRIRKRSGAKKARVAVARKLAEICWKRLIAWSGRPAISVA

SEQ ID NO: 260494 - protein, 338 aa, unidentified
MELKRIAIDTSKSVFTLHGVDAQDRPVLRCDLRRGRLVAFFAKLAPTEVVLEACGGSHHWARTLSQLGHRVGLIPPQYVKPFVKRGKTDRNDAEAISEAASRPAMRRVAIKSAAQQADALTLSARELLVAQRTQTINALRGHAAEFGVVVAGGTGRVAELLAAVAQDADIPQAACSLLAFLGQQVAHLDREIAKLDTALMAQHKANPVSRLLAEIPGIGPIGALTLAVRIDPRQFQSGRHLAAWIGLTPREHSSGGKQRMGGISRAGDERLRQLLVLGATAIIRYAKPGRASAWLLSLLERRPRKLAAVALANKMARIAWAMMTTGEAYRRAPLTAAA

SEQ ID NO: 260495 - protein, 388 aa, unidentified
MYLIGIDIAKYNHQCFIATEAGEVINEFSFDNNQIGFNELLKSLKSLDQSQQIKIGLEATGHYGNTLKQFISANGYTFAEFNPYLAKQFFKSTTIRKTKTDKVDARLLSSMLASVDYKALHTKYYHINELKALTRARDSLISDRSNYLVQITNALDIVFPEFKAFFNGRLGKAALFILNKHNSLEKISKTNRSHYDKIQRLARRGMTYNKFLQLKELAKNSIGINSVSHFLLINHYTNLINNLNSELDIIENNIYDIMSNVDTKLTTIPGVSLMSSAIIIGEIGDINNFSSASKLIAYTGFDIAIYQSGESHTYGRLVKRGSPLLRKTIWNLVFGSVRLIPQITDFYYKKRAEGKHHKVAYSAISRKLIRLIYFIESTNTTFDISKYR

SEQ ID NO: 260496 - protein, 526 aa, unidentified
MTNTQRWARGCKLDNRRWLDTATGGMCVTGHSIGIDLSINGAHDCTVLDATGQLVQRFTFDSSSAGLQKLEQCVRATDPSYGAPVVIMEPTGLAWFLPCLCLRAEHPEVKVVRIKTSKVAALRRYLKQDAKSDRLDSLTLAKMPLVDPEKLYAVDLPPAAVQGLDRMTRQRARLVASLTGRKNRLQALVGGYLPGLMAVAGKPWEPVFRAMLAVSLNPFTLTDQGTTALRKSLQDKRSREALPEARLPRLRIACEQLTRLYRPIIEAGLLTEAFFDDVQDEVARELRLMDVEEQEVKELEAAIARRYQEIVPEDHLRTIKGLGAVTAPTILAAVGTPQRFHSQAAFRGWTGVVAHASQSADSDAKGLPMTKAGPRRVKLALYQAAEIARQWDPQLAKIYYDQMVHKGKPHYKAIGAVMSHLASRIHAVLSEQRDYVLRDTDGREVTPQEARAIILTRYRVPAEIRAERRTRKRRKPDVSTGSHRGGTKRSSRRSSTSSHLHSTRSQEAHQTGAVAITHDGSAVARA

SEQ ID NO: 260497 - protein, 419 aa, unidentified
MSFKIFKFNCCGLDVHKTWIYACIGITDSNNRTEYKQARFSSFTKGLNELCDWLAKYNCKDVCMESTGKYWIPVFNILEQHSFWVTLSHPKYTKPMKGNKTDRKDAKWICDLYMCGMVKPSFIPPADIRELRDLVRYRFKLTCMITGEKNRAQNCLTVSNLKLDDVFSDVFGKSSRSITEHILQHPGEKFDIAPFVDSRCKTPITEIQAAVDGAISKEQVVKLRQCLDHIDELNKHISEVEQEILRLSDKYEAALNLIRTVPGFNKNPLTAIQVLSEIGGDMSVFPTAKHLVSWAGCCPRNDQSNQKIKSTRISRAGSYFKPVLVQVANALIKSKKHSEFPSRYKRIKARRGHKKAIIAICRMILTAIWHILSDLKPYTPEGFLESRPVKEGKVLSTSQALNLLKQRGYIIKGEPLAVS

SEQ ID NO: 260498 - protein, 369 aa, unidentified
MRKHSKLDSMKKAAESAERTATRQWIGVDLGDRSSAVCVLDDHGLVRARMSVRTTQAHFEQFFTPFAGVAVALETGTHSAWASRVLTACGLTVTVANAREIRKIHQSHRKNDRSDAETLARMLRFDPQLLSPIQHRNAQMQADITVLRARDVTVRARTMQINAVRGLVKTHGHRLPSCGANGFAHRALERLPAELTPALLPLVKTIADLTRRIRTYDRLIEAITRKRYPQTALLTQVPGVGPVTSLAFVLTLGDPNRFQRSRDIGPYLGLVPRQYDSGDQRSQLPISKAGNKYLRRLLVQSAHYALGPFGPDCRLRRHGQRLMERGGKNAKKRAVVAIARKLSVLLHRLWTTGAVYEPLYGVAPQPLAA

SEQ ID NO: 260499 - protein, 312 aa, unidentified
MEHHAGIDVSLELSSVCVVDGRGKIVREAKVASEPDALVSFFKGLGLPVKLIGLEAGPLSQWLHAGLMRAGFEAVLLETRHVKAALSAMTVKTDRKDARGLAQLIRMGWFRPVHAKSIGSQEIRALLVARKQLLGRLLDVELSIRGILRGFGLKVGQVTRKTFEARIRELVTGHTMLERIAEAMLSARATLQAQYEKLHKAMLAFVREDAVCRRLMTVPGVGPVVAVTFKSGVDDPNRITKSKAVGALFGLTPKKYQSGEKDVTGGITRTGDEMVRTALYEAANVLLSRITRFSKLKRWGIDVAKRRGSKRA

SEQ ID NO: 260500 - protein, 448 aa, unidentified
MAKRNLKMDIINPNAAGIDIGSRSHFVAINQEHSDVKEFGVYAQDIKELLKWLLENDVKTVAMESTGSYWQNLYTELQNSSIEVILTNGKFTKNIKGKKTDVLDCMWIQRLHTLGLLSGSFLPDLETEHLRTLVRHRGNLIQTTSKASKRMAQNMRLMNLRLDIVVKDIVGLTGLRIINKICNGETSGKELAKLRHGNCKKSEEEIAKALQSNNRQDYLFVLKQELQKYQDTQKLIIECDIEIKNILEQFVNQNEIKKSLYIDKKVHKRINKNTPKNIDLNLISYQYFDGVDLYAIEGFSHGTVLTLMSELGEKGILKFQNAQHFTSWLRLAPNNKISGGRILSSRTPKGSNRLKIALRQAANAIGNLKDTHLSNFFNRIAYRKGRAVAVSATARKIATILWNMLYKNIQYTPPTIYEYLDQKRKRKVLELQKQIANLDARMSKIQPV

SEQ ID NO: 260501 - protein, 352 aa, unidentified
MELYAGMDLHSRNTYIGIMDDALNRVFKKRVPNDLDQILQTLTPFQDQLKGFVVESTFNWYWLVDGLVDAGYSGAHLANPAAIKQYEGLKYSDDQHDAFFLAKLLILGILPEGYIYPKEHRPVRDLARKRMFLVRHKTANILSLQSFLQRCCAIKLSANDTRKLTVETLEEWLKEEYLVLTAQASLDTITFLKEKIKCLERAIIKRVKLRKGFKQLLTIPGIGNILAMTIMLEVGDINRFRKVGNFVSYCRCVPSQRLSDGKSKGVGNRKNGNRYLSWALTEAAQLGRRYNEPFRRYYNRKVAQANTSLATKALGNKLARICYYVMRDRVPFRKELTSHYFGTAAVILLLWW

SEQ ID NO: 260502 - protein, 470 aa, unidentified
MIRHRSDSVLLGPLASVRKPVSQPVIAAVRFMQVELPLHVRLIPQEIESAMRNAGIHADSLLEVRRMYNAVGIDVSKGKSTVAVLQPGGTVIRKPFDVSHTSQNLIELAHYLGSLEGSTKIVMECTGRYHEPMLKALYEAGLFVSVVNPHLIKNFGNNSLRRVKSDPADARRIARYTLDNWAELRQYSGMDNTRTQLKTLNSQFSFFMKQKVAAKANLIALLDNTYPGVNKLFDSPPREDGSEKWVDYAYSFWHVDCVRRIGLKTFTERYRAFCRKHHYIFQPDKPEKLFHASKELVAVFPKEKTYKLLIQQSIQQLNLASGHVERLRQEMNALASTLPEYSTVMGIYGVGKTYGPQLIAEIGDVSRFTHREALTAFAGVDPGVDESGQHKSKSNRASKVGSARLRKTLFQIMTTLLQNAPEDDPVYRFLDKKRAQGKPYYVYMTAGANKFLRIYYGKVKECLRNLEQAE

SEQ ID NO: 260503 - protein, 335 aa, unidentified
MEFTYFIGIDVSKNELDFAVMQGKTLLFHRELVNNPQSITAYLKELSKLSGFTLSHAIFCMEHTGIYGNHLLGCLHKKKANICLEAASQIKNSLGNIRGKNDKVDAIRIAEYAYKNRDDLRLWQPKRGIIQQLAHLSATRSRFIAAQKLLKTPLKEAGAFIDKNLIKQNDRLCAKTLAAIQADLQKVDKDIDEVIAMDPELKRLFSLVTSVSGIGKVTATMIIISTNEFKDIKDPKKFACHAGIAPFVKESGLFKGKARVSHMANKKLKTLLHLSAMVSIQYNEELRNYYQRKTVHEKKNKMSTINAVRNKLILRVFACVSQNRPYEKNYQRLVA

SEQ ID NO: 260504 - protein, 351 aa, unidentified
MTEYIAFDSHKRYTWVDRENHLNGEHHGDRIEHAPGAVREYLRRCEPGGCVAVEATGNWYWIVAEIEEARQQPLLVHAHKAKLMMGQINKTDKLDAHGMNRLQRNGTLPTVWIPPGPLRDLRELTRTRLVLVAQRTRLKNRLSATLAKYGIPPSERSDPYGQRGRAELERRLRDLPEQTRWVSEQLLAQLDFVYQQVRQMEQRLEQLVKLSAPMQWLMSLPGVGVILSATIALEIGEVSRFPSAEQLASYAGTTPRVHASGGRVRYGPLRADVNRYLKWAFAEAANSVAVNHTRCPDRHVSRLYTRLRQRKGHAKAVGAVARHLAEAAYHVLSGQQVYRDPAGAPGRGRQA

SEQ ID NO: 260505 - protein, 343 aa, unidentified
MQTVTTIGFDIAKSVFQVHGVDAAGQVVVRRQLKRRQVIAFFQKMPPCLVGIEACASSHYWSRELQALGHSVRLMPPAYVKPYVKRQKNDMTDAEAICEAVTRANMRFVPTKTPEQQSGLMLHRTRHLFMRQQISVINAIRAHLAEFGIVAPVGRRGIEELLRFVADPSDERVPEVVRVCVAALGSQLLSLKKQILDFDRMIMAWHRSNQTSKRLNCIPGVGPLLATALVASVADPKTFRSGRNFSAWIGLVPKQHSSGGRDRLGSISKQGDRYLRGLFVAGALAVIRYAKIHGTKHRPWLTALLARRHTKVAAIALANKLARMAWAMMATGERYNYPASLKV

SEQ ID NO: 260506 - protein, 351 aa, unidentified
MRKIAYLAMDVHSKHCVLGDMGFRGNFRGTQTFPTSEQNIIKALKAIKATEKYLTLEEGNLAYWVAQVAAPYVAEVIPCDPKENALIYRGSKKNDKVDTQKLCRLLRLGELKRVYHPEDDDRAIFKAAAQHYIDLRDQQIALKQKIKAMYRHWGVIDVSGEAVYSTAKRGDYLCQIKHLEIKNQINRLYFVMDQTESMQEKALKAMKQLGRKYPEIKQFKKLPGIGDILAHFFDAFIQTPHRFANKSRVWRYCRLGVTDRSSDGKPLGFKRLDRSGVSELKSLSYRAWMSALRSDNEVKRFYLNSLQRTFSRVHARLNTQRKIIATMYGMWKRGEPYNPELFLDSPQSGVV

SEQ ID NO: 260507 - protein, 398 aa, unidentified
MTESSDYESVQVFIGVDVGKDTHHAVAINRSGKRLFDKALPNDENKLRSLISDLKQHGQILLVVDQPATIGALPVAVARSEGVLVGYLPGLAMRRIADLHAGEAKTDARDAAIIAEAARTLPHALRTLKLADEQIAELSMLCGFDDDLAAQTTQASNRIRGLLIQIHPALERVLGPRLDHPAVLDLLQRYPSPEKLASLGEKKLAAQLCKLAPRLGKRLAADIAQALAEQTVVVPGTNAAAVVLPRLALQLITLRKQRDEVALEVEQRVLAHPLYPVLTSMPGVGVRTAARLLIEVTCRAFASAAHLAAYAGLAPVTRRAGSSIRGEHPSRRGNKALKRALFLSAFAALRDPLSRAYYTRKMSQGKRHNQALIALARRRCDVLFAMMRDGTFYTPQAS

SEQ ID NO: 260508 - protein, 349 aa, unidentified
MKITTSGIDVAKSVFQVHGVDERGNVVLRRQIRRAQLLLFFSRLEPCLIGMEACASSHYWARRLTALGHTVRLMSPQFVKPYRKNDKNDGNDAEAICEAVQRPSMRFVPVKSPEQQAELAVHRIRRRLMGKRTALINQLRGLLAEHGLVLAQGANQVRSKLPALLEDGSESLPPLAVELFRDLYEELVQLEQRIAACDRRVERLYRANPLCHRLGEIEGIGALTATAFVATVAHAAQFKNGRQCAAWLGLVPKQDSTGGKTRLLGISKRGDVYLRTLLVHGARSAMRHTPKRADPKSRWVEQLRKRRGENIAAVALAAKHARILWALMVKGESFPPPAIHSDPLEQPAV

SEQ ID NO: 260509 - protein, 342 aa, unidentified
MSEATIVGIDLAKRVFQLHGARDDGSVVFRKKLSRAQFAAFLAQHPRCIIAMKACATAHGWGREFEKLGHEVRLIPPIYVKPFVKRQKNDVADAEAIVEAASRPTMRFVPLKSEAQQARAMLFRTWQMFVGQRTQLINALRGHLAEHGLVAARGPAHLKRLADALEDDGTALLQDVRELGQVYLEQIEGLNARIAELDRKMKCAAREDGLARRAQTMPGVGPITALAIETFAPELATFRRGRDFAAWLGLVPKQHSTGGKARLGKTSKMGQRDIRTLLVSGAMAVLQAVERFDTPNNDWLKRLLARKPRLVAAIALANKMARALWAMLTKQEDYRNPAAMMA

SEQ ID NO: 260510 - protein, 457 aa, unidentified
MKSFYLGSDVSKGYADFVILDSTKQQVMKNFQLDDTFEGYCRLHDILSQFLMVHPDATLFAAVESTGGYENNWYNALVKFQSTLNIQTARLNPLGVMHNSKADLKRNITDKISAQNIAEYLITHSEKVTYQQQDQMATLRKQWGFIKMLTKQSTQLLNQLESLLYTANTELLGYCKNGTPDWVLKVLLKYPTAAKLARARVPALARIPYVTSERAQELVISAKRSVASASDRITEKLVAATVKQILNLKKTIDEQAELMVKECSIPEVDILKTFTGISDSSAIGLIIEIQAIERFKTVKRLSSFFGIHPVYKISGDGSGSFRMSKKGRKEPRKILFMVTLTAIRSNPLIRNIYLERTDKGMEKMAAIGLCMHKILRILYGMLKHGKPFDPQIDLDNRQRSVKKKPAGQRDKSRRFQDYDSNAPISRRQNKKRLERKQSHSVSDTKFGINAPVPELVS

SEQ ID NO: 260511 - protein, 327 aa, unidentified
MKQHSTAVVGMDVHKESVDIAIADAKEARLFGRVGGDAIAVERAVRKIRSVHRDPLFVYEAGPCGFWLYRRLRAQGLRCMVVSPSMTPRRAGDRVKTDRRDALMLARLARAGELSAIYVPDAHDEAVRDLVRAREDAVCMQRQARQRLQALLLRNEIRYVGRSAWTQAHRRWIAHLKLPEPAQQIAFEEYVQAVEEAGRRLERLEASIQAQLEHWRWRPVIQALQALRGVSSIHAVRIVAELGDLTRFESPRRLMGYLGLTPSEDSSTGRRRQGGITKAGNSSARRAFIEAAWAYAHPARVSWVINVELTGAARLHRAASSDRRERG

SEQ ID NO: 260512 - protein, 323 aa, unidentified
MQGKVTLAPNAPLDIHVGIDVCKAWLDIYLHPVGLRFRLANDDGGLKRLKRELGGFRVVRIVMEATAKYHRLASRSLHDSGFCVAVVNPARARFYASALGTLAKTDAIDARVLALFGEAIDPRATTPRPQALEDLQELVGARQSAVADRTALANQLGAAATAFLRAEMKRRIGALERHIERLETQIAKLIEADPAMARRVAILASIPGVGRATATAMAVGLAEMGACANKKIALLAGLAPVACDSGDSVGQRHIKGGRGHVRSAIYMAAVTAARCNRDLKTFHDRLVANGKKAKVALTAVMRKLVSLANTLITENRLWTPTRP

SEQ ID NO: 260513 - protein, 343 aa, unidentified
MGEISMIGLDLAKNVFQVHGVDASGAVVVRRQLRRGQVEKFFAQLPACTVGLEACGSAHHWARVIGRYGHQVRLMPPAYVKPYVKRNKNDGRDAEAICEAVNRPTMRFVPVKSVEQQATLAVHTARALLVRQRTMLANSLRAALSELGIVAAQGIKGLRELMVKLEAPNQEIPEMMRGALLMLAQHWQALDVDERALEKQVAKAARGDGEARRLMEVPCVGPIIASVVLAKVPDARVFRSGRDFAAWIGLTGRDHGTGGKHRPGRISKQGDRMLRALLISGASAYLRHQRTRGVSDPWLRDLLGRRPYKVVMVALAAKSARILWAMLVKGEPYRDRASASAAA

SEQ ID NO: 260514 - protein, 413 aa, unidentified
MRIRMIGGVGRVTGNGGPCMLSESQCIEENTNIVVVPAERSEAGTTTTADDRSMALGSGDAETVGKQDRRRSLGRSPNSRQSRLTLATSSSYLQGRDTSKMDFACVIGIDVAKAKLDVANGQDSPIQQFDNDASGHQQLLKTLPKQKTCLVVLEATGQYEKHIVMELVNAGHLVSVVNPRQVRDFAKAIGILAKTDKIDARVISHFGQLVRPRTVAQTHEKQDELDQLVTRRRQLIATRTAEMNRQSMATSKVVRKSVQQHVDHLKKDIRKIDVEITRLVKSDEEWNGKSELLQSAPGVGPVTASTLIAELPELGKISRQKISSLVGIAPFNRDSGQFRGRRMIFGGRRTVRSVLYMAALTARRHNPVIRAFADRLEAQGKLPKVIIVACMRKLLVILNTMVKTNTSWNPQSA

SEQ ID NO: 260515 - protein, 346 aa, unidentified
MKYYAGIDVSLNSSNVCVVDASGKIVREGKVASEPVTLITWLGSLGVNLERIGLEAGPLSQWLYGALREAGLAVELLETRHVKTALSTMPVKTDRNDARGIAQLMRLGWFRPVHCKSMAAQEVRALLTARKLVQSKLYDIEMSLRGILRGFGLKVGPTTSPSFAARINHLVDGQTSLEVVAAALLSLHAVALREFKSLEKSVRQISRADARVRLLMSTPGVPLVALTYVAAIDDPARFTSSKSVGAHFGLTPKKYQSGETDVSGRISKMGDGSVRTALYEAAHVILTRPIKGGALKSWAMKLARRAGMMKAKVALARKLAVVLHRMWVDAIKFDADKASGCVRVAA

SEQ ID NO: 260516 - protein, 313 aa, unidentified
MAHFNYFVGIDVGKYECLVAFSHSSKILSIPNTAIGLQELIDGLEEIKSNTLIAMEATGGYEVAFWKVLHKAGFHVRQVPPAQVRSFARSKAQIAKTDRIDAKIICRFIQENPNSGRSLPSDNVLRLNRLMAKRHQLIKVRAALKCQSRQQQEEDLEELDKAHIQFLNNQISNLNAMITTLIHENHDLEEKDRILQSIPGVGPVLSASFLAFLPELGTASDKQIACLCGIAPIARDSGKYKGKRFMSGGRKQVRDVLYQAALVASWHNPKIKTFFARLKSAGKPHKVCVIAAARKLATIANAMVLQKSEWQTD

SEQ ID NO: 260517 - protein, 355 aa, unidentified
MSQEKYIGMDVHQATISVAVMDSKGKLIMECIIETKAAAILEFIQGVRGTLAVTFEEGTCAAWLHDLLKPHVSRLVVCDPRKNALLKDGSKSDRIDARKLAELLRGNHLSPVYHGDHGVRTLKELGRSYLTITKDLTRVMSRIKALYRSWAIPCSGTTVYAARHRSEWLAKISEPGVRLRAERFYQQLDMLRALHQEARRDFVVESHRHPAVKLLRQIPSIGPIRAALLVALLQTPQRFRTKRQLWAYSGFAVETHDSGEYRYVRGKLLRNRERISVRGLRDNYNRDLKNLFKSTAISASIRPGPLRDFYLALLAKGMRPTMARLTLARKIAAITLTIWKKGVDFDANQLDQQAA

SEQ ID NO: 260518 - protein, 418 aa, unidentified
MGDEFCWFVGLDWASTLHRVCVLDDKGVRVAERDVPHGGAALAEMCSWLRQVTGAASAKIAVAIETPRGPVVEALLEHGFAVFAINPKQLDRFRDRFSLAGAKDDSRDALVLGHSLCTDRHAFRRVALDDPLVIELREFSRMYDDLKQEQNRLTNRLRDQLWRYYPQMGAFSEDFASDWFLDLWDVVPTPAKAARASAKAIAAILKSHRIRRFDAAGVLGILRQPPLAVAPGTTEAATAHIRTLAARLRLVNAQIRQIERRLDELCAAIEASAEAAPGQICEQRDVAILRSCPGLGRINIAALLAEASEPLRRRDYHSLRTLSGVAPVTKRSGKSCVVIQRHACNTRLQTAAYHWARVAIQHDPTSRARYAALRARGHNHARALRSVADRLLYVLCTLLERQVLFDPGYGEAGATAAA

SEQ ID NO: 260519 - protein, 368 aa, unidentified
MSDIIRIGVDTSKSVFQLHGVDAAERPVLRKKLRRRDFLSFFAQLPPTKVGLEACGGSHYWARELMALEHEPKLLPAQHVRPYVRRNKNDKQDADAVCEAMSRPRMSFVRIKSAEEQAAQMLMTTRQRLIDYRTQLINTIRGHAAEFGLTAAKGPAHVEPLLARLAKDVTVPALAKELFAIHGQEYDRLKIELREIEAKLKAWHRGNEMSRRLAEVDAIGPIGGCLLVIKAADPQTFHCARNFAAWIGLTPKDHSTAGKMRLGVITRAGDEALRRTLVVGATSVIKQVRNGKAHPSPWLRDLVARKPPKLAAVALANKVARIAWKLMVSGERYDAARAGIISPTARVAPCSRRQGRCAPPAAVACGQP

SEQ ID NO: 260520 - protein, 343 aa, unidentified
MKLSRVGVDLAKNVFQLHGVDRHGKVVWRRRLTRKQWLSALMAQADPGCEIGMEACGGAHHWARELQSRGYTVKLIPPQFVKPYVKSNKNDANDAEAICEAMSRPNMRFVTVKSIAQQDIQATHRIRAELMGQRKAKANQIRGLVAEYGLIAPLTLRALRSAIPHWLEDAENGLTDYFRSLLNGLWSDLVMLDDRVLEMDREIERLANSNEVTRRLQQLRGVGPMVATALVATVGTAEQYPKGRQMAAALGLTPRQNSSGGKQRLLGISKRGDAYMRTLLIHGARAVVSQAKHREDRLSRWVTDIATRRHPNVAAVALANKTARMAWAMLRHGTDYDPDFVMN

SEQ ID NO: 260521 - protein, 327 aa, unidentified
MRQAKSLTEKAKTTVAFDVCKAALDVHIRVDGKAFQVPNTYEGFDQVALVLADYDVSLVLMESTGGYEDAAACNFQSLGYDVAVINPRHGRNFAMAMGKFAKTDRIDAAILADFAAVIDSRSDRARFIKPPTDEERKFLSQMVARRRQVVDLLSTEKQRLSHADAYAKQSINKVVAFIESQLDEINKDVSFYLKKNYSGLSKMLSEIPGIGELSVGLLVGDVPELGQIGNRQLSAVIGVAPFNHDSGKMRGKRCISGGRQNVRNVLFMGVMSATRYNPVIKAFYDRLINKGKPKRVAYIACVHKLLRIINAMVRDGTSFNPELHAVS

SEQ ID NO: 260522 - protein, 345 aa, unidentified
MNYYAAIDVSLELSSVCIVEATGKVVKEVKVETRPEALVKFFKNFGLPLTRIGLEAGPLSQWLYAGLTEAGFETVLMETRHVKAALSAMTVKTDRRDARGMAQLIRMGWFRPVHVKSPESQEVRALLVARKQLQHKLTDIELSIRGILRGFGLKVGKVTDKGFEARIRKLASGHAMLEQIAEAMLAARATLLEQFNKLHKAVLDIVRHDEVCRRFMTTPSVGAIVAITYKSALDDPNRIKKSRNAGPLFGLTPKRYQSGETDVTGGISRVGDAMVRTALYEAANVLLSRVTRFSALKRWGLQVAKRRGLKRAKVAVARKLAVILHRMWLDGTTFRWTKTKVVAHA

SEQ ID NO: 260523 - protein, 349 aa, unidentified
MSHKSAPPIVSTIGIDLGKNSFHLVGLDQRGAVVWQLKCSRAQLERRLANIPCCLIGMEACSGAHYIARQLAALGHDVRLLPAQYVKPFLKGHKNDYRDAEAIAEAVQRPTMHFVAIKTPEQMDLLALHRVRSRLVSQRTGVTNQIRGFLMERGIIVRQGVVPLRRALPDILSANTGALSPRIVNLIAELVQDWRRLDERIAAVSADIESLVEQDEACQRVMTVPGVGPIISSAVVAAIGNGAGFTQGRDFGAWLGLVPKQESTGDRTILGKISKRGNKYLRTLFVQAAHVVLARRPNAAMRSLWPWIEQASRRLHRNMLAIALANKLARIAWAVLARGRSYQPRIVAI

SEQ ID NO: 260524 - protein, 342 aa, unidentified
MEAKRYIGIDLHRDCFTACLRLENGREYLKAWKLEDMAKFTAKLRPTDEVAVEVTGNTRLFHDAVAPHVGRMVAVNPSQFKVITHSVKKTDPNDARNLALYLAKDLLPEVRMKDKTQAQIASLTQTRDTMVKLRTALKNKVNNICSAHGVNLNKESLASEKGLKAVLEMQFAMLVNLELQIIIEQIRSLNQSVAKLEETIGKEGQKLEGHKNLTSIKGIGGLGAGILLSIIGDIRDFADEGKLAAYFGIVPRVSNSNESEHSGRITKRGSKLGRTTLVQCALIAQRYSPYLKNYYEKKKSRGTGKAIIALARKFLGIIYRTLKNKWVFEDFPNFVLAEPATA

SEQ ID NO: 260525 - protein, 332 aa, unidentified
MSVYVGIDVHRKRSQVAVIDQDGEVLANRNVNNGVTPILSVIGGLPSGTPAAFEAAFGWGWLVELLEDYGFEPHLVHPLQCKAIASARLKNHKVDAATLAQLLRADLLPEAWIAPPAVRQLRALLRHRIQLVRLRTLLRNRIHAVLADHGHDRPSGYWSGPGRSWLASLDLPAVSAEVICDALALIDALESVIDRLDAEIRGHARSDPRVKVLTALPGVGPFTALVLLAEIGDITRFGSARKLAAWAGLTPTVRGSDRMVRHGHISKQGSVWVRWILCEAAQTAKRSPEFAARYQAIARRRGKKIATTAIARKLLTRAYYLLTDASSAGAPS

SEQ ID NO: 260526 - protein, 315 aa, unidentified
MTKHIPAVNVGVDVGKSQLDVYLLERGRAITIPNAEAGICILIRSLRRYRVERIVVEATGRLEQPFVRAALAAGLPVLVVSPLKIRRFAEVIGQLAKTDAIDARLIAQFAATVKPAARPASDPNAQVIKDLVVRRRQLTSLRTMEKNRRQVMPQELKSSIDRMIEMLNRELKLLEQLIDDAVDQHVVSRHKRELLTSMPGIGNSVAATLIGDLPELGSLDRREIASLTGVAPFNRDSGTLRGKRRIRGGRAQSRTALFLSAMVAIRFNPDIKRFYERLLAAGKHKKVALIACIRKIVTTLNAMLRDNSPWQPATT

SEQ ID NO: 260527 - protein, 358 aa, unidentified
MDRVTRVKVSGKRLQVVASDVVHVGLDVHKRSIHMAVWRNGRVARHWVMPADHRQVLARLEPLRAALVRVVYEAGPTGYRLARRLRSAGLPVEVVAPSKTPQRADQSAKSDRLDCVQLAEYSAARLLRPVAIPTEQQEADRQVLRLRDQVMRKVRRVKQQIKSFLLQHGIAEPAGLKHFSAAGVEALRHLALRDELQFCLDELVAELAELQARLRRVNRRIGQLAAEARHAPAVAVLKSHPAVGPITAMTFRTELHHAGRFRDGTEVGQYFGLAPRVRQSGATRRDGPISKTGRGHARAILVQAAWRWIAQDPSAKTVYDRLLHNTGIPQKAIVGVARRLALCLWRMMTRGERYRQAA

SEQ ID NO: 260528 - protein, 330 aa, unidentified
MRCHCVGVDVGAKELVVAIERNGTRESGIVFANDADGHRRLIRWATKKGASVQVVLESTGVYGLDLAFALQRAKRVAVMVANPRAIAAFAKASLQRSKTDALDAETILEFGKRMPFVPWAPPDPSILELRGLSRRIEAMGKTVTQEKNRLHANEQGEELSDFVKQDIRELVELLEGRIDRLRKQALLVIDQSPELAKAFGHLTSVKGIADAAGIQLLAELGSLPKDMTTRQWVAHAGLDPRQHQSGTSVHKPARISKTGNAHLRRALFLPAMVASRWEPNVKAFYEKLIARGKTKMQALVAVMRKLLHAIYGMLRHDRDFDGEKFFATKA

SEQ ID NO: 260529 - protein, 440 aa, unidentified
MGRAAPFTLIRPDCSGIDLGSEYHYVSVPSDRSDPDVAKFGCYTADLIAMGNWLLSLGIRDVAMEATGVYWIPVYEALASRGLRVTLVDARSAKALPGRKSDVQDCQWIRDLHMYGMLNSCVVPEAKILVLRSYWRQRDRLVRQRSEQSQLMHKALEQMNIQLHKALSDVTGVSGMAIIRAILAGERDPKVLSALLVHRARLKKDLVEKALEGRWADHHLFALEEAVSTYDFLGSRLQMCDRRLDEAMSELGGGTPGSRRPPNASKNAPNFDLKARVRDLLGTDPTVIDGIEASTAAVLVCELGTDLSKFKTKKHLSSYLGLAPQNKITGGNIKSSKTKKVKHRAANALRLAAQSLHSSASAMGAFYRRLCARIGPAKATTACARKIAEAYYELVVNGVVFQDIGEQAYNERFREQRIRSLNKQAHKYGLRLVEEPTMAT

SEQ ID NO: 260530 - protein, 433 aa, unidentified
MKMERVYPNCAGLDVHKKFVMACRLTVDEQGHTHSEMRSFSTMTDDLEALAAWLVEAGVTHVAMESTGVYWQPIYNILEDRFEIFLVNAQSIKRMPGRKTDVKDAEWIATLMQHGLLQRSFIPDRDQRELRDLTRYRQSLVQEHNRYANRLQKVLEDTNLKLSSVATDIQGVSAQAILQALLAGQEDPKALAELAKGRLRNKREELERALKGKLREHHRFLLGDLLVHLDFLDEQIAKVEERIEAKLSQMPPFQEAVRLLDTIPGVNRPLATLIVAEIGVDMSRFPSDRHLTAWAGMAPGNNETGGKQRSGKTRKGNKYLKRGLVLAAHSAARKKHNYLRSLYYRLKSRRGQQRAAVAVGRTILQMAYHMIRNGQEYRELGENYLDQVDRERTAKRLVRRLQVLGYIVNVKDQTALAEASISSTSAPPLPIAT

SEQ ID NO: 260531 - protein, 350 aa, unidentified
MNETGLYWIGLDVADRTFDAAVAKPGERADAAAFKRLPAQTFERTPEGVEALMAWLQTLMPGPAPLPTRAVMEATGNYSIQLAALLSNACPQLRPAIVNPERTCAFRNSLGLRNKTDRMDARALAFYGRDRQPEPYEPLSPEQARLREMSRCRDGLIRSRTAHENQLAQTPGCPLVRRTLKAVIARLQKAINRLERAMRELIQTRPSLQSDYELLTGIPGVGFVTAAVVLAEVGDLRRFGKARQVTAFAGVTPRQDQSGNHTAPGRMSKKGNGRIRQALYLAAMSAITYNPPLAATYRRLLADGKKPMVALGAVMRKLLVLMWAIVNSGQPFHAGGKPRGNFNRQIQKTP

SEQ ID NO: 260532 - protein, 410 aa, unidentified
MIQKAKHIYIGIDIHKETHTAVILTYLEEKLGEVTFSNTLQGFQKLYRYIQKQKQQYTPIFGLEDVTHYGRNLAIYLLEQGEIVKEVNSALSHMERMSYPSTKKNDTWDAQCISAVLMRRVDILPNANPVDYYWTMKQLVNRRNALIKATTALVRQFHDQLKNHYASYKKFFHEIDCQTSLAFFERYPSPSHLEGMTDEELGEFLRVPSNNSCSTKRANKILTLVSEDSMTEREYQFARDFTVQSIARHIRFNVEETKRIEKVQKAMLQELGYHLETIPGVDIVTASALVAHIGEIERFPNANKLAMFAGIAPVRYSSAGKGKYVQNKQGNRELYSVLYFLAIQQVHINNKGNVRNPVLRAYFERKISEGKTKIQALICIMRRLVTIIYYSMMKHKTVYKIPSLEEKEIS

SEQ ID NO: 260533 - protein, 355 aa, unidentified
MNQITTVGVELAKDVIVVCAADPAGRTVFFKQFGFQGFASWAANLPPCTIAMEACSSAHYWARTLSSLGHHAKLLAPDLVKPFRKSQAAKNDRNDAQAILITALQPDMRFVSVKSVEQQSILACHRMREGWKIERTALINRVRGLRAEFGIWLGRSPQNLARSLPRLIQDEQLPARVQGLLVQAQGHLQQLEALMEQGERDICEHARHSEAAQRLCALNGIGPITASALVVSVGDARDFRNGRQMAAWTGLVPKQSSSGGKDRLGKITKRGDTYLRGLLTQGARSALNAALTRAPDKRSRLEHWIVALRHRVGYHKSLVAIANKHARICWAMLARHESYAPQDGAAPHRHRRLSR

SEQ ID NO: 260534 - protein, 419 aa, unidentified
MKPQALEAFAAFVGLDWADAKHDICLQAAGTERREFLVLEHRPEAIDAWVQTLRTRFNGQPIAVCLELNKGPIVSALRAYDFLVLFPVNPFTLAKYREAFTPSHAKDDPTDAELQVELLLKHHDTLTPLSPQSPTMRALAQLVEHRRRLVGDKVRLTNRLTSALKNYFPHVLQWFQDKDTAIFCDFLSHWPTLKAAQLARRTTLEDFFRTHHVPSANVITTRIEAIKSARALTTDDGIITPNVLLVQVLVAQLRVTLQAIADFDTAIAQRAQDHPDFPLFAALPGAGAVFAPRLLVAFGEQRERYASAEELQKYAGIAPVTERSGKKSWVHWRLQCPKFLRQTFVEWAAESTRHSFWAQAYYQQQRAKGKAHQAAVRALAFKWIRILYRCWQDRTPYDESVYLHALNRRSAPLLHNLAH

SEQ ID NO: 260535 - protein, 386 aa, unidentified
MQVAADRTDASTAIQTDLPAIFVSLELSRSTWLITSLSPGAGEKMSKHSIRAGDVAGLLVRLAQLKEKARGRTGRDFPIIAIQEAGLDGFWIHRVLQSEGIESHVVDAASILTSRRRRRAKTDGIDGETLVRTLLAYKRGEPRVCAMVKAPTPEEEDRRRICRERKTLVGERVEHVNRIKGLLFAQGVSDYEPLKRNRRARLEELKTGDGRPLPAHLKAQISRELDRLELVLPQLKAVEAERDALLKPVSEGRPAPAAMLAQLKGMGPEFTAILWSEGLFRSFSNRRQLAAYAGLAPTPWQSGSVAHEQGVSKAGNPRLRTTMIQLAWLWLRHQPTSALSVWFQERVQSNGDKMRKTTIVARLGPGDWGDCVGASALRWSSSRRPR

SEQ ID NO: 260536 - protein, 341 aa, unidentified
MSNAGTYIGVDLHKKTCFITIMNQAGKIKKQTEISTDTDKVAKFFSKHTDASVAVESTMNWIPFYENLESLGCSVVLSNPLQTKAIAAARIKNDKVDSKILADLLRTNLLPTAYIQPREIRDLKELVRQRVNYVEIRTRIKNKIHSVLFKNNLKHDFTCLYGKAGMIWLKELELRDIYRQEMNRYLTTLNLLDKQIAEMSDQIMATAKTDYDCKLLMTIPGISYFTALVIKSEIGDIGRFASAGKLCAYAGLIPSTYASAEKIRFGRITKRGSKWLRRALVDAVTSGSKHPSRLGFFYRKLKKSKGTGKAKVATARKLCTVIFAMLSDKQPFREFVPVKQR

SEQ ID NO: 260537 - protein, 373 aa, unidentified
MPRYSTAFGMDVHLRSATVCALDAETGEAVTRRFRGNPWGEVAEWMSGFPGPSLAAYESGYLGFAPQRELSALGVDCVVAAVSKVPRSAADLSSKNDRNDAARMAKAILSHDVTPVWVPSPEIEGLRDLAAAHDDATARLAAAKQRLLAFLARRGYAYGGTTPAGNPRRYWTYGFLRWLDKVRPADDGGIRALAALRNEVEAAAETRGDLLAEYRAAVAAGPLSAEVEALQSIKGCGFALAAAFASEIGDFSRFRSGRQVTAYFGLAPKQRSSADSVRLGGISGAGNALVRRLAVEGSWSYVQANHQPKLMPKGSGVPLEIRMHGRKGSERLLRRREEMLARGMPQAKANAATAAELVRWLWALGTMCREAGE

SEQ ID NO: 260538 - protein, 458 aa, unidentified
MSRLSQPNTSLAEARPFQGMSVVNQHAAGVDIGAHEIMVCVPGPDNMQLVRSFSNYTADLHAIAKWLGEHNIWTVAMESTGVYWIPLFEILEIHKFQCLLISSRSLRRVPGRKSDVVDCQWIQTLHAYGLLTGSFRPEADLIALRTLLRHRARLLEHRAPHILHMQKALLQMNLQLSQVLADVTGETGLRIIRAIVVGERDPHKLAAMRNYRCKKDESEIAKALTGTWRQEHLFVLEQSLALYDFYTEKISACDTQVEQNYQAIRPAWACNEPIENSASPKRLAKNTPKDSSQLCTHLKRICGVDLVAVHGINVSLAQTIIAEIGTDMSKFPNEKHFCSWLGLAPKNEISGGKILVSRTLKTRNRAGQAFRLAAVSVMRADCVFGVFYRRMKSRLGPAQATVATAHFIARVVYRMLKYQVEYEPLSLSEYEKRYHDQQVKYLEKRVAKLGFQLTPICT

SEQ ID NO: 260539 - protein, 347 aa, unidentified
MDHIGMDVHKKESQICILAEGGELIERRVRTEPERFTAILGDRPRGRILLEASTESEWVARCLETLGHEVIVADPNFAPMYATRTRKIKTDRRDARALAEACLLGAYRRAHRLSDPQRHVRGRLLVRDALVHTRTCYISLIRALLRQHGYRVPSGSAEAFLRRVLALSLPGRLLSQIAPLLAVMRHVNRQLSYSDQVIEDVTAQDERVQRLRTVPSVGPVTAAAFVATIDDVRRFRRAHEVEAYLGLVPRELSSGESQRRGRITKAGHARMRWLLIQAAVSILRRRPPQAEALHAWALHIAARRGKHVAVVALARRLAGILYALLRDGSVFAPGRPRHPGAALALPA

SEQ ID NO: 260540 - protein, 416 aa, unidentified
MDNEVYYERCAGIDVHKKLIVVCLRIGRKSEVREFGTLTHELREIVAWLKVNGCQMVAMESTGSYWKPIYNIFEQEGLPAMVCNAYHIKNVPGRKTDVNDAQWLARCLSQGLLNPSFVPDREQRELRDMTRFRKSQIEERSRNINRLQKFLEGANVKLGSWLSDVEGKSATELLELVIGKPDFTVDDVAACMHGRMKSSAEELFLSLEGSITPTQREFFAHVMTVIREQTAQIEKTDTMIQNSLNSNYKAAVEALDALPGIGRVSAEQILAETSADISRFKNQQSLCKWAGVCPGNNESAGKRKSGKTPPGNKTLKSTLTQCAKSAKKNKNSFFNAQYNRLVSHRGKNRATMAVAHSMLIAIYFVLSGYEFQDLGANYYNQFNREKKINSHVKQLSKLGVTIPDEILRAAIDRPPD

SEQ ID NO: 260541 - protein, 346 aa, unidentified
MEQYIGLDVSLKLTAICVVDRTGKIEREGVVHSDPEAIAAFIKSCAPHVARIGLETGATSTWLWTELNKLGLPVICIDARHAKAALKMQINKSDRNDAVGIARIMQCGWYKEVRVKDLDSHAVKALLVSRALLVKIKRDLENQVRGLLKNLGLVIGPAKMNAFALRAAELTEDRPELAVAVTPLLTARVAIEQQIADLDRKIMKRARNNAQVRQFMTAPGIGPITALCFLATIDDPGRFRRSRSVGAYVGLTTRRYASGEIDWTGRISKCGDKMLRSYLYEAANVLLTRVAKWSALKAWGIRLAKRSGLRKAKVAVARKLAVILHRMWIDGTEFKWSSKEAANQTG

SEQ ID NO: 260542 - protein, 391 aa, unidentified
MTRISAGVDVSKNRSTVCIIDQDGKVIMRPFLVWHSTEELDFLADTLKRLNGEVRVIMESTSVYQYPIALQLKERGLFISIVNAYEMRQFANIDFRGGKTGKKDSRTIASYGISYWDKLVEWQIPKDTYFNLDLLNRTYMNAKKHRQIILQELQHYIDCAMPGMDKELHSLNLSTKKDFMLDFVEKFWHRDEIVNMTEAEFTEVFTAWAKKKGYRPVEGKAAKIYAIAKSCIPYYPANPTVKTILQCIVDKLSGVNRTLVTIVTQMIEEAKKLPEYQIVREMPGVGDPLAARFFGSAGDIRRFKNSKALVAYAGIDSPPDESGDFSSTHRHITKKGSKVFRDTGYEIMMALRAQKRTWEKVRKNPEVYDYMLRKEAEGKPPTKLNELARFN

SEQ ID NO: 260543 - protein, 407 aa, unidentified
MDLQHPKCAGLDVHQHTVVACARVFAGSTVTHERRSFGTTTADLLALSDWLTAHDCTHVAMESTGVYWKPIWQVLEGQFALVLANARHIRNIPGRKSDVNDATWIADLLAHGLIRGSFVPPAPVQELRDLTRTRKQLVREITQHTLRIQKTLETANLKLTGLLSNILGVSGRAILHALVAGETDPERLADLVQGRLKASRAALVAALHGRLTAHHRFLLQLHLTQVDALEQAVHDVEERLGHALVPFRTALDRLITMPGVSETVARVVVAEIGFDMARFPTAGHLVSWAGLCPRLDESAGKRLSTRTRPSNPWLKTTLVQAAWAAARTKNTYLRAQFLRLKSRRGPKKAILAVASSMLIAAYHMLKHDLDYRDLGADHFDRRDKTKLAHRLLQRLQELGLTVEVRAA

SEQ ID NO: 260544 - protein, 370 aa, unidentified
MQSSIIMSQDFKKRTSQITESEYLKYSVGSDMGKDQFDACISVIDREQNVKPIAQRKFNNNLTGFKEFIEWQVRKCKLSIPVVFSMEATGVYYERLAWYLYRRGLHVSVILPNKARKYLQSVGLKSKNDKIDAVGLARMAAEQKLLLWQAPNETIMELRDITRQRESLQESRTRFNNQLSSYKCGEFVNPLIVKNQQEVIALLDKQIKATEKMIKEKIDSNPELKERINNILEIKGVSTITVATTIAETGGFEMFLNQRQLVSYAGYDVVENQSGKHVGRTKISKKGNAHIRRILHMPAFNVVSYGEPIFCNLYNRVYNRTKIKMKAYVAVQRELLCMIYTLWKKNEKYVRNYNEPPALQSRSSSFRLAC

SEQ ID NO: 260545 - protein, 342 aa, unidentified
MEQIATIGLDIAKSVFQVHGIEKNGSVIVQRRLRRSQVLGFFSKLLPCVVGIEACASSHFWAREIGALGHDVRLMPAAYVKPYVKRQKNDAADAEAICEAVTRPTMRFVPVKSPEQQSIMVLHKTRQMVMRQRTRLANTIRAHMAEIGIVAPIGRKGLELLLEIIGQDEDGRLPEASRSCLRMLADQFSMVKAHILELDRAIVADVRRNESAKRLMAIPGVGPLLASAMVAAVPDPAMFRSGRNLAAWIGLVPRQNSSGGKERLGGITKQGNRYLRQLLFVGAMAVIRYAERHGTRRPWLVRLMARRQTKVAAAALANKTARMIWAIMTTGERYREPLLQAA

SEQ ID NO: 260546 - protein, 408 aa, unidentified
MKVLHAKCAGLDVHKELVVACARLQSGAKVRREQRSFDTTTKGLLELLAWLTGLECTHVAMEATGVYWKPVWHVLEGHVELVLANAAHIRNVPGRKSDMNDATWIADLLAHGLITASMIPPTPIQELRDLTRTRRQLVREIGQHTQRVQRVLEDANVKLSSVISEILGMSGRRILEAVIAGEDDPAKLAALGSERLRCSHEELCEALRGRVTAHHRFLLRQHLDTIDHLQRTVDLFDAQIAKLLEPFRAQHDLLMTIPGVRDIAAACILAEIGADMGRFPSAAHLVSWAGLCPRMDESAGKRRSTRLRKGAPWLKPVLVQCAWGAARTKRTYTQAQFLRLKARRGPMKAVVAVAATILTAAYYILRDGVSYRELGPDHFVERDRTRVAQRLARRIRELGYEVTIKQAA

SEQ ID NO: 260547 - protein, 372 aa, unidentified
MKEDSVIFIGLDTSKLKISVAIADGSRNGEVRFFGDISSEPASVASMVSKLSKRGAKLHFCYEAGPTGYGLYRQIVELGHDCVVVAPSLVPKRAGDRVKTNRRDAMSLARLHRAGELTAVWVPDEGHEAIRDLVRAREAASDALKQARQQLQSFLLRHGRIYAGREPWTRAHRRWLTCQAFDHPAHQILLAEYCQAVADASVRLDRLTKLVVETAASWSMAPVVAAYQAMRGVAFMTAVTFVVEIGDVRRFDNPRQLMAYLGLVPSESSTGERVKRGGITKAGNTRARRVLIEGAWTYRFPARVSPKIQARLDDLPRTVREIAWKAQVRLCARYRKLLAAGKPKVVAVTALAREMAAFLWAIGQEVAPTAKA

SEQ ID NO: 260548 - protein, 343 aa, unidentified
MDHFAGLDVSVKDTSVCIVDGTGEIVRELKVASEPEALLGVLRNAAYHFKRIGLEAGPLSQWRFSALGEAGLPVICVETRHMRAVLRAQINKTDRNDARGIAQMMRVGLYRPVHVKTLRSQKLRMLLTHRKLLQSKAIAIENDLRGTLRNFGLKVGMAGGTKFEARIKELVENLPDLAVLVEPLLVVRRVLREQTAVLHRRLRAIVRDDEVCRRLMTTPGVGPVVALTYRATVDVPARFRKSKAVGAVFGLTCSKYQSGEIDRNGRISRCGDEMMRVMLYEAAQSMLRSKKWSWLKAWAMQVARRRGMKKAIVALARRLAVIMHRIWVDGTEFRWTREAVTAA

SEQ ID NO: 260549 - protein, 328 aa, unidentified
MKALRKPMRDDGVVYVGVDVAKDTLAVFAEGVFEGEVENSLKGIRRLVRTIRKAVGKSADVRFAIESTGAYSLPIHLELDRLQEKACILNPAQIRHFAKSYGVLAKTDRIDARMIARFAVERSCKPTPVPSATRLALRDLVRTRSLLVKIRTMVATLRQTPLVGPTSRSILDEVDRFIGSKVKHLERELAEKMKEDSGILRVSKELQKVQGVGPVTATTIAVLVPELGTLGRRQAAALAGLAPQPRDSGPYKGQRKIGGGREELRHVLFMSALSATQWNPTIKACYSHLRDVKGKKHKVALIACMRKLFIHMDRVVAQLNKTSPETAS

SEQ ID NO: 260550 - protein, 320 aa, unidentified
MMAQNDLVVAGVDVAKDKVDVCIRSLLLRRTFASTAEGRRELASWLRRNKVGKAVMEASGGYEREWAKALRDARIEVRIVDPKRVRSFARSAGRLAKNDAIDAEMIAWFAETFDEAKGQAYDAAREKLVQIVHARQGLLDLQTSLQNRGEHTAPEVVQKMQGRLLKKIALELAGLEAAIAAMIKATAHFAELAEIIESVPGLGGITAAGLIAAMPELGQVSNKIAAALLGTAPYDDDSGRRRGERHIKGGRRRVRNLFYMACLGAATRHNPMLKAFYQRLLAKGKEKKVALVACMRKLIVILNTMIARGEKWDASRYALS

SEQ ID NO: 260551 - protein, 481 aa, unidentified
MKTKPPEKIQQATNPSTRGHWNKMNRKQRRDMMRQIQSEDLSLEVVHPHAAGVDIGNESHYVAVPPTRDSQPVRHFGCTTVELKALAEWLKQCGIRTVAMQSTGVYWIAVYDILETAGLDVYLVNARDTKNLPGRKSDVQESQWLMKLHTYGLLRNSFRPSQEIRTMRTYWRQRNDLIRAAVSHIQRIQKALTQMNVQLGNVLSDVSGVTGQAILKAILAGERDPHKLAALRDPRVKASEEQIARYLEGNWQEDLLFVLKQEQEAYEFCQQQMAECDRQLQQYLQQREDRSQGASLPQEMRKGRLLRKKGNKPMFALRTELFRITGTDLTQVDGIDVITAATILSEAGWDMSKWEDEHHFVSWLRLCPDNRISGNKVLGKGRLPTNNRASIALRMAASTLRVSNTYLGAQFRRFRTKLGAPVAIKAMAAKLARLVYRMLRYGMKYVDQGAKIYEAQHRQRQIGQLKWNAAKLGFRVVEAAA

SEQ ID NO: 260552 - protein, 460 aa, unidentified
MYVGIDCSKGYADIIAFGSNKEIAEPAFRLYDITEGYRQLQSLIARWLDIGFEHIYCGVESTGGYENNWVNYLQQMGKNDPVHIARLNPKGVKSLGEARLTRTITDSVSAENIALYLMDHPGKVHYLKPSQTSKAYSEGRKHNSFIRMLKKQRNQLGNQLEKLLYEQLPPLMCYCRHGQPLWLLLMLEKYATAASIKKAGVSKLSKIKGISEEKAKSVVAKLTGSDIQSSDHIGSIIKSTAAQILHLEGSIKKEKLNLYSRFKHTEEAVLLTSITGIGEQSAVEILVEIEDINRFETAKKLGAYFGTHPMWKQSGDGTWGNHMSKKGRSEIRGVLYMCGMSAVRHDEMFKGIYARARAKGKNHFSALGVVMNKMLRIIYGVLKNKTKYNREIDYKNQQNAQTKQKQQEQKQEELKQEKQTKLERYNLREVSEMPVSKRYAKKKRQSPKLQPEECTGSSAS

SEQ ID NO: 260553 - protein, 372 aa, unidentified
MRNDSIVYVGLDIHKESIVASYAINLGDVHDLGEVGVLHRDLDRLCTRMQSKASGVHFVYEAGPCGYSVYRYLTGKGHRCMVCAPSLIARKPGDRVKTDRRDARNLVRALRANDLSAVHVPDATDEAFRDLVRAWAGARVDLRQAKQRLKSFLLVHDTRYTGKANWGDAHRRWLSEFVFPHANSHLAFQEHLRTIEERLAQCERLEQLLRDAAKEWRFYPVIQALQTLRGVQFTVAVGLVAEIGELSRFETPPQLMAWLGLVPSEHSSGPRKRQGAITKCGNSYARRLLIEAAWAYRYTPKVSPTIQKRHEGIARPIIDRAWDAQVRLCKRFRKLSARGKPHNVVVVAIARELSGYIWDIARLATPASMLRR

SEQ ID NO: 260554 - protein, 389 aa, unidentified
MIYVGIDVAKDKHDCHIFDSNGAVLCDFFSFPNSKEGFEEFLSLATRLAKNKPEKLKFGLEDTGHYSTNLIHFLSANNLDVVRFNPLSVSRSRAALTLRKTKTDRNDARYIARLLASHTVNYCNKPSRIMHTLKSLTRARYRLVKELQPLKNRYRRLIHLLFPEIQGFFSNLYGQEPLNLLALLPGAQPIASCDIRRLTSILKSFSRGRHGKEKAENLKALAKKSIAFHGDGDAFELTLIAKRIMFYQDQIATLESEIINIMKTINSPITTIPGIGYVLGAIILAEIGDIHAFDSPSKLLAFAGCEPSTYQSGKFSATNTPMVKRGSRYLRNALYLATNMAYLHSPVFRVYIDKKRSQGKHFYTAISHGIKKLSRVIFAILSQNSVYCE

SEQ ID NO: 260555 - protein, 416 aa, unidentified
MSDTPKSSPYQRYLAIAAHKHYVVVGGLNASLEIVLPARRMDIEHYPQWAKENLSASDCLVIEASTNTWDLYDVTAEVAGRVVVAHPLAVKLIANARVKTDKQDVYKLARLLAGNLIPEVWVPPLEVRELRTLIAGRRRKIKLRTMTRNRLHSLVHRHNLTLPEGGAFADKNQSWWKALSLSAVEQLRLKQDLALLEFLDPQIEAIDAELARLSNCDPWKDATPYLMQLPGFGVILSMTVLAAIGEIQRFPTSKHLVGYAGLGASIHESGQTHYTGRITKQGRKELRYALVEAAWVAVGSHPFWREEYHKLSRRMLKGKAIVAIARRLLVAIWHVLTERAADRKADPDMVAFKLMVWSWKLNEVQRGGLTTAQFVRYGLMRLKIGQEIARIKRLRNRPIASVEEVLGRLPELNLKI

SEQ ID NO: 260556 - protein, 336 aa, unidentified
MTYIGLDVHKRVCYGTVMDEKGQIVKRGKFSNDPQGLEEFMEGADEALVAMEAGYCWQPLYDRLEETGHDVRLAHPLKVKAIAQAKVKTDKIDSETLAHLLRADLLPESYVPPRDIRELRDRVRRRAFLVGMRTMLKNRVHSELAKRGIRLGVPLFTRKGREMLRGLGLEAVDQILPVMDALDRQTALISGSLKRMCGEDPRASLLTTIPGVGYYIALLIVSEIGDVRRFPDSEKLCSYAGLVPTVRRSGGSTRHGGITKEGSKWLRWALTQAVHVHIRSETNLTRFYRRLAETKPGQVAVMATARKMLKVIYWMLRNDEPFHPGPGVVDPLAGRR

SEQ ID NO: 260557 - protein, 331 aa, unidentified
MKIKEVIGIDVSKLTLDCCIHSSGLEEVFGNTMERITDLVGWALDNSNVPKDEVLFVFEHTGLYTHHLIQYLDGNGFLFHVVPGLEIKRSLGIARGKDDKADARRIALYGYRIREEVTPYQVAGKALTSLKRLMSMRRKLVAQRAGHIATLGEQQRVLNKENEQVLFHVQQEIIKVLDRQIKTIEKELDTIMARDEKLMNLNRLLTSIKGIGKVTARYLIVYTNGFTAFKTWRKFASYCGIAPFPNRSGTSIRGRTKVNHLADKQGKVLLNLCACTAIQCSPEIKAFYNRRLEMGKNKMSTLNIVRNKLLARAFAVVGRGTPYVNTMKYAS

SEQ ID NO: 260558 - protein, 353 aa, unidentified
MRYLGMDVHVKSTVWCLLNAGGEVVEKGKTPTTAAELTGLVQRLAKDEPLVAAQECGKLSHFVHDVLSPLDVKLLTFNPYHLRVIAASRKKTDKRDAYWLARTVQSGMTPHPVYIPTGVVRQLRALLNERDCVTGQRKAWLVRASTLLQAAGLDARQHSGKGWIEKLLQQPDGIDEQLKLALERCDRMALALTGELAVIDARLHQHATSLEQVQRLQTIPAIGEKVALTIYAWVGDISRFHTARQLCAYAGLTPSVRQSADSSVTGRITKEGSKQLRRALTQAGHVLLFRCQSESSAPLKAKPARIAVQRARRKIAVVAAARHILRTAFYVLRDQTDYNPALLRSPAATTQAA

SEQ ID NO: 260559 - protein, 301 aa, unidentified
MAKARTLVGLDVHATKIVAAVLDAETGEIAFFAMTADIGRTAGFCAGLPRPVRVAYEAGPTGYGLARELIKRRVDCVVAAPSKIPRASGDRVKTDRRDAELIVRLLFAGKLHAVRIPGAEEEALRDLVRAREQVRVDLMRCRHRLSKLLLRHGVRFDDGDAWTERHREWLGEVVLEWPAAQATLLDCQGAIDALCHRRDGLEREIVSMLPSSPWREQVGVLRCLRGVDTLSAVGLCAEVGDFTRFARAGQLMSYLGLVPSENTTGHQRRLGSITKTGSAHARRLLVEAACITARDRTSANA

SEQ ID NO: 260560 - protein, 377 aa, unidentified
MKRIKFVGLDVHAETIAVAVAEQEGEIRSLGMIPNREESVRKLVKKLGPVEQLRFCYEAGPTGYVLYWQLTKMGAACTVVAPTLVPVKAGDRVKTDRRDALKLARNYRAGELTAVWVPDAEHEALRDLVRAREAAKKDQLRARHRLSKFLLRQGQRPPVGVQPWTVKYSEWVKRDVHFAVKAQEATLLDYLHEVEHMAARIVRLDSAIEEAVKVAPAKMRAVIEGLQALRGIAQISAVTIVAELGEVTRFTKARELMGYGGIVASENSSGERQRRGSITKTGNAHLRRVVVEAAWAYRHRPAIGFTLRKRQEGLSEEVKEMAWKAQHRLHARYGKLMAKGKNKGVVVTAIGRELLGFIWAIGVQVEAQQKESLRQAA

SEQ ID NO: 260561 - protein, 514 aa, unidentified
MSEGTAVPPFSRLSPRLLRKHSAWHIRHIPLTQNFHPQPLAPARKADWVHAHCARFRSPYAAQDKPLASGFTNPDQNGGDIMLKINYMSTLFVGIDVSSKANVVYAMDFEENKYISSSFGNNQPGADKLVNMIAECMQKHKNLDTLLIVLESTSVYSVHISNFLSASEALMPYRPYVFCVNPKATSNYRKSYIGMEKTDPTDAYLIADFGRVGRTKKLEPWRGGQFIALKRLTRHRMHLSECITREKTYMVSNLYLKFSELQLLEGDDKPFGSLYGATSSAVLTEFLSPQEIIDMPEEDLLAFLAQKSRNRISDISKTSELLRKAARDSYRLDKCMYEPLNISLASSFNCIHAYQKEIRLIEQAIEKCINGMNPNALIILRSIPGIGPVWASGILSEIGDITAFHSSDALAKYAGLYWPKGDSGDFTSEDNQMSKAGNPYLRYYLGEAANSVRKHIPEYADFYARKYAEVTKHQHKRALALTSRKFVRLVFGLLVKNQLYTGEKLDTEYNIESN

SEQ ID NO: 260562 - protein, 397 aa, unidentified
MYIVGIDIAKRKHEAAVIDGEGAVIIKPFSFTNNCSGYNRLLAMLAKAKLPLDEVSFAMEATGHYWLALFTRLQKEGFRVQVINPVQTNSIRSFYIRQAKTDPRDALLIAEVIRFGHFSESTLHPENIYELRELCRGRHAIVSMQADVKRKVVALLDQVFPEYETAFTNMFSDTSMAILQTCPTPKELSEMPLEELCHLIEVSSHKRFRMAKAQELQALARNSFGFAMAGDVFSTMIRLYAKHLVFLKQQVREMDRKIAEIMDTLDTPITTITGIGPTLGAYILSEIGDISRFSSAAKLAAYAGIDPTMRQSGEYNGVRNRMSKRGSPYLRHAIWLAASSAVLHDPALKLYFQKKRDEGKPYMASVGHACRKMVSIIYAVMRDNKAYTPCIPNEISA

SEQ ID NO: 260563 - protein, 402 aa, unidentified
MDQKKRYSRFVGIDIAKNRHVFCVVDRDGQTIQKPRSLANDKQGYHQLRETLKSIGQARTFLVGMEATAHYWYSLHDDLTRQGYHVVVLNPIQTCQQAKKAIRKCKTDKVDAMHIATLIKNGDYKPALVPGPLAMTCRQLTRLRMRLVQQNAKLKQLIWSRLHPIWPEYEALFSNPFCATGRKLLFTAPSPADVLAMDPHELSELFRKASRGKYGPLQAQKTCQAATHSVGMQRGLDGARIGIRTLLSQLEATQPIHEQLKQEIVQLAQRLPEYLFTLPGIDPIRAVSLFGETDPITDFKTPDQLVAFSGLDLTVFQTGQYEAPRRRISKRGSPFLRHTLWHMAYQAVYQEGDLRSYWLRKLSDGLSHKAAVTAAAIKLCRITWRILTDKRDYLIQGPPSQS

SEQ ID NO: 260564 - protein, 391 aa, unidentified
MINIGIDVGKFKHCAAVIDDKTGEVIIKPFFFNNDQEGFELFYSKVKQYIRRKHSVGMEDTGHYMISLTTFLLEKKFSVKYINPRSTSLRRKELGMSAKNDRKDALLIAEMLTEKKFWRSVSKSSLETDKLREITRLYHQLQEQQNQDMNRLQRALDIVFPEVNELSWTRYSKAYMHFLTAYSSASSIACEDIRNLRKALKTEGRGRQCKVTAEEIKELAKRSVGDDNIAVELEVKSVIAIINTRAEQIRVLDKKIEEFSRQLNSPIVSIPGISHITGMSILAEIGDIHDFPEAAKLISYAGMEPRVYQSGNYDAAHMPISKHGSRYLRKALYQAVFTVCKYDPTFQDYYTKKRDQRKSHRCAQGHCVRKLLRVIYKLLSTDILFDSAQIH

SEQ ID NO: 260565 - protein, 350 aa, unidentified
MFHSDYTIGCDAHKHFSLFAVLGGNGDPVQQTRVGHVPGAIGAFLSQFPEGTPVALETVGNWYWIVDEIEEAGCIPLLAHAAKAKVMMGNVHKTDKLDAQGLATLLYLGKLPSVWIPPAQLRDERELPRTRMTFAKHRTMVKNRIRSTLAKYALSLDTASDIFAPKWRPELEATLQQLPDETGRCVLQQLQILDALTDHIKQLEDRILDRIQTTPTIQLVQTVPGPAKVLAIVIDREVGSIARFSAAKHFSSYCGLVPKLSASAGRAHYGHMVKQCNTYLKWAFRAASRSAAEGHRSRQRHRRSPRPPQLAAQVRRTSLRQHPPAQRPFRRRRCHRSLSSGVNLLGSQEE

SEQ ID NO: 260566 - protein, 386 aa, unidentified
MLYAAIDIHKRAFQAAVLDPESGEVVEERFAADRESLARWAEQWRGRLEAVAIEATTGWRWVWRELVERGFEVRLAEPVQTRALLGRRRSAKTDRLDARWLARLLAKEMLQQSWIPPEQIQQLRDRTRLRKALAEDRRRWGQRLHAYLLHEGWPCSRSNLLRPPGLRWAAALRLPEHARLQVDSLELRRFARADERCQALQSIYGIGPILACHLLAEIGEARRFRRAEQITRLAGLDPVVDESGESRRRGHLAKAGSPHLRWALVEAAVHAHRATAPTSSSTGPPASDATRRGATDGRPQDRQARLPRPARARAHRSLTKSNSIDALPFPPEPGTRRLRFGMSRHSPSRLDNLRRKTTGAKIGMGRTPLLLPPRSPPQLANPTILR

SEQ ID NO: 260567 - protein, 329 aa, unidentified
MKRKSFIGIDISKKTIDICLYTPGSTSPKKFLKTENSLKGFKSFIRELKILKTKLKEAFVCLEYCGVYGLELGFFLEGKIEYCFCNPLHIKRSLGLTRGKSDKLDSFKIARFNYLFRDELSPMSMPSECMLRLKSLMAERSRITKSIVIDKQVLTDLQKTLGINAKQRAERRLELLQVDRKAIDKEILKLIESEDCISTNYKLLISIIGISLVNATLMILCTNNFEGITNPRSYACYCGVAPFEHTSGTSIKGRTRVSPYANKKVKANLTNAARSAVQHDPEIKIYYKRKRAEGKDHGTVMNAVKFKIITRAFAVVKRGTPYVKLRQAG

SEQ ID NO: 260568 - protein, 349 aa, unidentified
MDKMEKWEACGLEVSALELVVAVQAKKGGVAVLRFPNTAAGHQRLARNLTRGGKQVKVCMEATGIYGLDIALRLSLQEGVRLMVANPRAVHSFAKALMQRSKNDQLDAVVLREFAERMEFKEWHRPSKNTLTLWAIARRLEALTKHCAAEKNRRHAAGFSQAIPGCVKKSIARDLRFHEREIKELREEALRCISADEKLQQRYEQLRSVPGIGVVSGIAVLGEVSLLPEDRDVRQWVAYAGLDPREYSSGTSVHRRTRISKVGNRHLRSALFLPALAASRHDPHLRAFYQHLLARGKKKKQALTAVARKLLHAIYGMFRSQARYEGSRVYTLPPSAPNLIEPFLTEKTA

SEQ ID NO: 260569 - protein, 418 aa, unidentified
MESTRHIGIDLHRNCFTACVRLENGRNYLTEWRLEQLPKFVAKLRPNDEVAVEVTGNTRLFHDAVAPHVKRVVAVNPNQFQVITHSVKKTDPNDARNLALYLAKDLLPEVRMKDKTRAQIASLTQTRDTMVKLRTALKNKINNICSAHGINLSKESLASEKGLKAVLEMPFDPLVDLELKILVEQIRSLNKSIGELEETISRESQKLEGHKHLTSIKGIGGLSAGILLSIIGDIRDFADEGKLAAYFGIVPRISHSNETEHSGRITKRGTKLGRTTLVQCALIAQRYSPYLKNYYERKKKISPTLYWRRKRRHEPQTRRLRLRSAQHGFAPAPAAPWSLEPGKPRNGVQSEPRSRQNIIGDFNVSTSNSRCSGRGVCFRRCPSAGHSRGIPRRCSVFGLSPDPKRPAGRRGRLGLHYG

SEQ ID NO: 260570 - protein, 331 aa, unidentified
MKIKETIGIDVSKLTIDVTVHSNKAYCKFENTVKDFKKMVNWVFKQSPFSPENVLFVFEHTGLYSHRLAVYLTKENISFSMVPGLEIKRSLGIVRGKDDRVDSRSIARYGYRLRDEISPCKLPSKELKSLKTLLALRETKVKQRSGDKALLKEYKLVYIRKDNEIVFKILEKSIKSLSKYISEIEQEMDKVVKSDQGLKNQYELVTSIKGVGPQIALYTIVLTEGFTKFKTHRQFASYCGVAPFPNVSGTSIRGKTKVSNLANKKMKSLLDLGAKGSLQYNLEIKTFYERRLELGKSKMSTINIIRNKLIARMFAVIKRNSPYVDFMKYAA

SEQ ID NO: 260571 - protein, 338 aa, unidentified
MAILMGLDQHRAQITTEWVDTSTGEVSRARVAPADRAGVRRFLARFRGQPLEVALEATTGWRFVVEELRRVGAVVHLAEPADTAALKGSKKHAKNDRADARHLRELLMAGRLPESWIPPVHILDLRARVRLRHTLSEDRGEWQQRIQSVLYHHGCPQRGDLINRAGLAWLAALPLPACAREQVTAALAMIDALERQLTPLDKELRAYARRQPGCKALQRHYGIGPLTAVTILAELGDPGRFSSSREAVRFSGLDITVRASDRRRAPGHLSRQGPPALRWALFEAAQCARRPRSPDHAYYVQAAERLGGNRACLSVARKLLKRSYHTLRDLGEEALQPA

SEQ ID NO: 260572 - protein, 399 aa, unidentified
MAYPASLELRVGIDVGSRCHSVAIGLSDGSLLEEFEIAHTAAGFQDFFKRVEASAQRHAAPIAVAMEGYNGHVRPLDSLVKARGWQLFNVNNLKLARFKEIFPAAAKNDRIDTRKALELFQLRDHLPMAGDVLQKIEPIPEENNVLKRLSRRQRRLVDERTRLGNALQADLQAVCPGLLDITREVNNFWFLSFLTCRKGLPKLARLRPASLLKVPGIGHKYAGLIQVWQSSAFFSHDVDLVGNMIQQDAERMLELREQIKALKGQMAHVAADSVIARQLDTIPGFGLICNAELAGEIGTTDRFRKEASLAVYLGMANLDHSSGKSRRSKRPKHVNVRAKAAMMTAMDAHRKLCPQSKRYYEKKRAEGKKHNQAIRALGRHLCPVIFNMLKQDRPYWIEP

SEQ ID NO: 260573 - protein, 324 aa, unidentified
MTSKGAEKMQNDTIGVDVSKDHLDAHRLADGASRRFANDKCGHRAFMKWVAQTPVQRVVFEPTGPYHRAFERAFERALGATGASFVKVNPRQARRCAEAIGSLAKTDRLDAAMLARMGAMLELKARPPRSEALLELKELHLAREALVKDRTAAKNRGKVLGAPLLKRQNAQRLEQIKRQITAIEAAILERVQADPDLAQRFAILTTIPGVSAITAFALLIEMPELGALEPGQAASLAGLAPVARQSGRWTGRAFIRGGRASVRQAIYMPALVANRFNPDMKIRYTQLINAGKPAKVALTAVMRKLILLANALLKANRRWTPKPA

SEQ ID NO: 260574 - protein, 409 aa, unidentified
MNKLYVGIDVGSCDNAVYIMLPNGDKHSSFAVPNNIHGARTLTNRIVAALTGIELTAAVIGIEATSVYGDNLISFMREDGALGRFERKFHVLNPKTVNKFKGSYTDLPKTDPVDAFVIADNLRFGRITKAVYEDDYRYKALQTLTRARFFAVKNLTREKQRFMNYLFMKCSGLAQEDVFSDNCGATALALQEEFETPDDLENMDLAQLTAFVKEKGKGRFSNPEEVAKAIKAAANGSYRLPRTVNDSVNQVLSISISSMRAIKAQIKVLDKEIQRQFDNIPNTLTSVPGIGSVCSAGIIAEIGDIARFDSQASVAKYAGLAWTKHQSGKFVGQETRLIKSGNKFLKYYLYEAALSLVRCDTEYRRFYDLKYKEVNKYQHKRALALTARKLVRLVFRLLKDNRLYKPAQS

SEQ ID NO: 260575 - protein, 323 aa, unidentified
MRTSVGLDISKKTIDAAYMPAERQITSAVFTNDADGIQSLKQWLDEFGQSDLHICMEATGNYYEAAADALSNDYAVYVVNPLKIKCYAKKRFSRTKTDKQDAKIIAEYCFTALDAELEQRHTPSADQYRLKRFMALHGQLKQQMTAQKNRLKAAKDKFVQSIHKEQISQLQRHIDVVEKEINDAAGGDSGTKATTDKLQSIPGIGGITSAKLAYYLTALKFKGAKQFAAFAGLVPQKKESGTSVKGKEQMTNYGNRQLRGALFMPAMVAYRNGYFPELIKRLTKKKKPKKVIIGTIMRKLAIIAYYVHTTGKPYEPHRYRPQS

SEQ ID NO: 260576 - protein, 391 aa, unidentified
MTYVGIDVAKDKHDCYIVNSDGEVLADVFTIPNDQTGFNLFFQTLQSVAPDLSKVKVGLEATGHYSYNILGFLLDKGLATFVINPLHTNLFRKSTSLRRTKTDKVDARTIAAMLASDVVLTSYTAKSYHNEELKSLTRYRFDKVQERAKLKSSVARLVNILFPELEKLVPSLHIYSVYSLLSEFPGAKQIASCHLTRLTHLLSESSKGRYKRDKAIQIRETARRSIGSMMPAKSLELKHTIHLIEVLSEEIDEIETSIREIMDRNPSPILTIPGINYRMGAMILAEIGDFSRFDSPNKILAYAGLSPSTYQSGKLDNAYPHMEKRGSKYLRYALFNATKFVCNWDPTFAAYLAKKRAEGKHYNVAISHAAKKLVRVICAIQKSGKPYCPAI

SEQ ID NO: 260577 - protein, 415 aa, unidentified
MAKSMEAIFRCCAGFDVHSETVAVCVRRIDDQGEIHAEVRTFRTMTRDLLALCDWLTTEGVTHIAMESTGVFWKPIYNILEGQFQILLVNARHIKNVPGRKTDVKDSEWIAQLLQYGLLRGSFIPPRPQRELRDLTRMRAQLTREMASVANRIHKVLEDTNIKLGLVATDVLGVSGRKMITALIEGETNTVKMADMARGRLRDKIPLLEQALVGKVTEHHQFLLKALMDHLIYLESQIERFNQRIEEAARPFEQAITALIPMPGYDRVSAQSVIAEIGPDMKPFRTHAHLCSWAHICSGNNESAGKRKSGATGHGDRWLRAILVQVAWAASHKKGSYFQAQYRRLAGRRGKKRAIVAVAHSILTVTYFILSDGRAYKDLGADHFDRISRDRIRRYHIKRLETLGYKVELTEKPAA

SEQ ID NO: 260578 - protein, 405 aa, unidentified
MPVHAAPATPSTIVVAVDVGKTTASVSATDTGRHRLFGPVDIAMTRSDLRLLVDRLTQSFPPSPQVKIGIEAAGHYHRPMLDYPGWPAGWEILELNPARVGEQRRIHGRRRIKTDAIDLDAITDLLLTGQGQPVTHPDRVLGELTAWATHRMRRVATRTATKNQLLGQLDRAFPGLTRALPDVLGTRIGRLVAAEFSDPARLATLGSSRLIRFAAHRGLRVQRPLAERLITAAREALPTNDAVIARRILTADLALLTDLDTQITAAEAELAALLPRTPFATLTTTPGWGVVRVANYGAALGDPGRWPGPRQIYRASGLSPMQYESAGHRRDGGISREGSVTLRRALIDLGVGLWQAEPTAKAYAAGLRARGKHGGIIACALAHRANRIAYAMTRDHNDYDTTCWS

SEQ ID NO: 260579 - protein, 344 aa, unidentified
MQVAVKTIGLDIAKSVFQLHGVDADGQVVIRRKLKRRYVLAFFEKLPPCLIGMEACATSHHWSRELQALGHRVRLMPPAYVRPYVKRQKNDAADAEAICEAVTRANMRFVETKTAQQQSCLVLHRTRHLFIRQQTSVINAIRAHLAEFGIVAPIGRKGVEQLLTVVANSEDKRIPAVARACVAALGAQLRALKAQILDFDRQIMIWHRSHETSKRLDEIPGVGPALATALVASIADPKAFRSGRNFSAWIGLVPKQHSSGGKQKLGSISKQGDRYLRSLFTAGALAVIRYAKIYGTQNRPWLTALLARRPAKVAAIALANKLARMVWAMMTRGERYKEPAALAA

SEQ ID NO: 260580 - protein, 333 aa, unidentified
METVYFLGIDISKKTFNAALTCDGQNMPEMEVTNRAQEIRAFFSGLKTKVSLSQLIVCMEHTGIYCLPILDYLVKHNIKVCVEPGLQIKQSQGMTRGKNDKIDARRIAQYAFKNRNELAYWTPQRPILQKLKALLILRERLIKTKNQLEVPISESKSYVQEELRKSVAKRCTSSIAAINKDIKSVDQDIKTLIKVDQQVHQQMKWATSVPGVGNVTALNVILATDEFKRISIVKKFACYSGIAPFEHRSGSSIRGKTRVSKMANMRIKTLLTLGSMSVVQRDQELKLYFERKMSQGKNYWSVINAVRNKLISRIFACVQQQKVYQKNYANALA

SEQ ID NO: 260581 - protein, 348 aa, unidentified
MKVLKHVMGIDVAQKELVVCLGRLSEDLAVELYANKVFKNTENGFIVLVKWLNKQIVESEKVKFVMEATGVYHQKFAYFLDEQGFDVSIVLPNKISNYMRTLENRTITDKTCAEAIAQFGLERKLDKWKRPKLIYKKLQQLTRERDQIVDERVMVKNQLHAENAEAEPNANSLKRLKARINFLSKQEKEIKDEIEKCIEKDEAIKAEMANITSIPGVGRLTATIILAETNGFELVRNKKQLVSYAGLDVREKQSGTSVKGKPRISKKGNKYIRKAMHFPALTAVKYEQNYKDIYARLVSKNGIKMKGLVAVQRKLLELIFILFKNKTTYQNNYEIEKRAQLQKVENAL

SEQ ID NO: 260582 - protein, 408 aa, unidentified
MKLYVGIDVSSEKLDVCFLDSETNILKECVLPNNLNGAAILKADILHLVQKTAYTRVIAGMESTSVYSFHPSTFLALDPELKAIGLEVVVMNPKSIHRFKGIFEEDKTDVIDAFRIADFLRFERFNTSLLKEEKYLSLQRLTRSRYQLMQQMTECKQHFLENLYYKCNTLTKEVDTSVFGAAMMDILTDSFTLDDIAKMDLEELASILQQKGRGRFGDPLKLAESLAKAARDSYRLGKMMQESVDVVLATYALMIKTIKDQIKSLEKAIQQILGTLPESQSLLSIPGIGPVYAAGILAEVGQIERFENEAKLAKYAGLYWKRNQSGNYESERTSLTRTGNHYLRYNLVEAANSVMRNEPVYREYYLKKYNEVPKNQHKRALVLTARKLVRMVDVLLRNHQLYAPERSV

SEQ ID NO: 260583 - protein, 370 aa, unidentified
MREPTPLFVGLDVHKETISVAHAVGGTVEPPHFVGQIGTLERDLDKLVRRLQSLSPQLVFAYEAGPCGYVLHRHLTGKGLDCRVVAPSLIPKKPGDRVKNDRRDALELARLLRSGDLTSVYVPSVEDEAVRDVSRARDATRVTLKSAKLRLKSFLLRLGFNYVGRADWNAAHRRYLAQVVCPTPAQQIVFQESLRAVDEQVERLARLEQQLLELAPAWRLYPVVEALQALRGVQWLVALTVVAELGDLTRFDNPRQLAAFVGLTPSEHTSGEKRRQGGITKAGNGRARRVLIEGAWAYRYPAKISAHIQKRIENLPKVAQDIGWKAQVRLCKRYRRLIARGKHANIVTTAIARELLAFMWAIAKEVKISA

SEQ ID NO: 260584 - protein, 390 aa, unidentified
MSQSFDTSRSLTAFEQDSTLVAVIEMSQSKWLVAAVLPGVERRPLKKLDADAGALLKLLQRWRDEARKAGRTIRRIVCAYEAGRDGFWLARWLQAQAIEAYVIHAASIAVSREHRRAKSDRIDTELLMRSFLGWLRGEKRHCSMVAIPTTAEEDARRPSRERESLVGEQTRIVNRIKAVLALFGIGGFNPKLRGAAQKLETLRTVEGTPLPENAHAELRHDLERLRLVRDQIRAIESERLRRLAAAPAAATGPDAMVRLIARVFGVGIETADMLVNEALARNLRDRRAVARYAGLTGAPDESGKRRREKGLARAGNGRVRRGMIQLAWRFLIFQKDSRLVRWFRERTADGRSTTRKTMIVALARKLLIALWRLVTTGEMTEGIKLRPAGT

SEQ ID NO: 260585 - protein, 403 aa, unidentified
MEMFVGIDWGGEKHAVCVLTDKAKVLAHFEITHDAEGLSSLRKGLAKIGKPADLPIAIERPTGLLVDTLVDAGHPIVPIHPNVVKACRPRYRAAGGKNDLGDAYLLADVLRTDGHRFGRLSPQSDELKALRALVRTRDDLVAERVSLANQLRALLESYWAGAACIFSAIDSPIALSFVARFPTPKSAATLNEKRLAAFLAQERYSGRRTAAELLERLRAAAPPVCSVVEAEAKGEATKALVRVLCILQEQLATLSSRIERDVAELPAGKVVMSVPRAGKINAAQIVAELGDVHARFQTEAQLAAEAGVCPVTHASGKSHGVSFRWACNHRLRAAITTWADNSRHSSLWAADVYAKARGRGCDHPHATRILARAWIRILWRAWTNGESYAVEKHTRAAAFDKVA

SEQ ID NO: 260586 - protein, 448 aa, unidentified
MPKPPRTGSAASPAREPNPNAAAIDVGGEAHFVAVAADRDPKPVRSFGPFTSDLTAMADWLKQCRIDTVALESTGHFWIPVYDVLEAAGFKVVLVDPRTLTRHLRKKSDVIDCQWLQDLHALGLLKGCFRPDDQVRGLRALWRHRARLVVEAGTILQRIQKVLIEMNVQLHLAVADVAGATGMRIIRAIVKGQRDPAKLAKLRDKACRRSEAEIARALQGSWREEHLFELKQLVQSWDFHRDQTIRCDRQFAKLCGAFADKSQGRPLDDTAKRPQDHRNTPEFDGRALIHRMTGVDLTAVDGLGVNTVLTVLSETGTDLSRWPTAKHFASWTKLAPRRDQSGVRIRSPSFPARGASRVAQAFRLAARGLWRSQTALGQFLRRLKSRLGPASAIRATAHKLAKLYWRLLTTGQSYRPSDLATDEARHRQRRLNALQRQAKELGMTVSPA

SEQ ID NO: 260587 - protein, 447 aa, unidentified
MSESSKSVSVPVPEPEWAAFAAIDWADQKNFWRLLPAGSQRYEEEVLENTPEAVEAWAVNLQQRFDGRPVAVCLEQSRGPLVYMLSKYPHLVLFPIHPTTAARYRETFTPSGAKADPSDTASLLDLLLRHRERLRRLQPDTVETRLLHFLVEERRQTVDEKTRQNNRLTACLKLYFPQILAWFDDVTSCLVGDLLERWPDLEQLQRAHPGTLRKFFHQHNCRSQQLMEQRIQAIYQALPATRDQAVLEAGRRITRGLVALLATLRSNIAAFDQRIAELVDSHPDAALFTSLPGAGDVLVPRLIVAFGTHRDRYQSAQEMQRYSGIAPVKESSGKSQWVHFRFACPKFLRQTFHEFAGHSIGHSEWAKAYYEHLRNDEKKDHHAAVRSLAFKWIRIIFRCWQDRKPYDEEIYLQSLRRRGSLLGTTALGPTTQFGYTMVAGFNKLSKK

SEQ ID NO: 260588 - protein, 349 aa, unidentified
MVVTIGSDPHKSSHTFVAANGNGRQLAEKTVRAVPEGHLEALRWASQWPERVWALENSRHLVRRLEQDLLVAGEAAVRVPSRLMAESRKKGRQRGKSDPIDALAVARAALREPGLPVARLEGVSREVRLLVDHREDLVGERTRMQNRLRWHLQELEPGYRAGHLDRTTTLNKLEALLAGYSGRVAELARELLGRIRELTVRIKQLEAELSQLVTPLVPNLLRLQGCGVLTAAKIIGEIGEISRFRSEAAFARYNGSAPIPVWSGNNDHHRLNPGGNRQLNAALHRIAITQSRSGGQGRTYLDRRLQEGDTKKGAIRALKRRLSDEVYGRLRSDQNTHGSVAETSDAQAA

SEQ ID NO: 260589 - protein, 345 aa, unidentified
MLALHPDLDVVIGVDTHNDTHTAAAVSATGAVLEHLTVPADPAGYRQLIGFGRRHDARLWAIEGTGSFGAGLTTALLARCQRVVEVDRPQRPARRGGVKSDDIDAVRAARQALAGVGLSEPRRRGDREAIRVLLSTRGQAITFRTRAISALHALVTSAPDGLRERLRRLPLGQLLQTCAGLRDSSRRSVEESATVLAMRSTARRALACEREAAELEVQLDRLVRRLAPELLGQLGPVVAGQVITSWSHHRRIRSEAAFAKLGGAAPIEASSGTVTRHRLNRSGDRQLNRALHTIVLVRMRQDSATKDYVQRRLAQGKTIRDIKRCLKRYIARQLFRQLEALSPTT

SEQ ID NO: 260590 - protein, 425 aa, unidentified
MKVTYITCCGVDVHKSFLVATIITTTGGIEPSYQKKRFSTFNNSILEFKQWLLDNNCHDLCMESTGKYWIPVFNLLEDEINVTIANPKWVKAVKGNKDDTKDSKWIGDLFRLGLVKGSYIPCKKIRILREFTRYRYKLVSCRSSEKNRYQNALTVCNVALDSVVSDIFGKSSTSIIDYLLEQSGNSINHEEIASKLLRSLKSKEDAVIESIEGYQMTDSQKYRMHLVRAHMDYITAEINDIDREIENLISSDPDYENAIQFLMTIPGVKRDSAITIISEIGIDMSQFCNSKRLCCWAGLTPGSNESAGKKKSVRVTRAGVYLKPALVQCAHAAVKSDKSPYYKKKYESLVKRRGKKRTTIAIARMILTAIYQMLSTGEAWNPSDLYKIDMPEALLDKQKAKAIKQAMKLLQSEGLYPPPELIIAS

SEQ ID NO: 260591 - protein, 409 aa, unidentified
MENILACCAGLDVHKESVEACVRRIESNGRVHSETRHWGTMTRDLVAMANWLGAEGITNVAMESTGVFWKPIFNILETHFTVLLVNARHLKQVPGRKSDIRDCQWIAQLLQCGLLKGSFIPPRAQRDLRDLTRHRTKLVEEKTRTINRIQKVLEDANIKLASVATDVLGVSGRAMIQRLIEGETDPHKLADLAQRQLRGKIPELEKALEGKLTDHHRFLLKLLWKELAQQEEVIAELEAKIEEHTRPFAAEIDCLDAIPGVDRRVAQVLLAEVGADMKPFPDDQHLSSWAGMCPGNEESAGKRTKRRITPGNRWLKKTLAQAAWAASHTKNTYLASQYRRLAGHRGKKRALIAVGHSMLVVFYHMMKSGVTYADLGGDFFDRLEPQRLTRYYVKRLERLGHKVTLEATA

SEQ ID NO: 260592 - protein, 460 aa, unidentified
MPLGRTPRQQRLDELACVHPNAAGLDIGSEEIVVAVPPARDPQPVRLFQTCTPDLHALLAWLLECGITTVAMESTGVYWIAIYELLEQAGITCYLVNAQHVKIVPGRKSDWNDAQWLQKLHMLGLLQASFRPDAEIRSLRLLARHRAELIRHRAPHILHMQQALKLMNIQLSEVLSDITGLTGQAIVRAIVAGERDPAKLAELRHPGCKHTEAEIIKALTGTWHAAQIFILEQNLQLYDFYTAQLSACDREMERYYQAMESRHDKDAPLPDLPKAKPGSRSKNEPNFNVRAQLARIVGVDLVGVMGLSASSAQTIITEIGTDMTRFPTVKHFCAWLGLAPRNDISGGKVLRSRTLKVRSRANQAFRQAAESVARSQSSFGRYFRAMRARLGPEQAIVATAHKIARVVYHLLTTKEPYREECAEEAERKRHERELKQLARRAQKLGYTLNPLAAPPSAPSP

SEQ ID NO: 260593 - protein, 419 aa, unidentified
MSFKILKNNCCGLDVHKTWIYACIGITDSFKRTEYKQARFSSFTKGLQELCLWLAKYNCIDVCMESTGKYWIPVFNVLEKNNIFVTLSHPKYTKPQKGNKTDRKDAKWICALYMCGMVKPSFIPPADIRQLRDLVRYRFKLTCMITGEKNRAHNCLTVSNLKLDDVFSDIFGKSSRSITEQILQHPGEVFDVAPFVDSRCKTPIEEIQAAVDGAISHEQAVKLRQCLKHIDELEMHKAEIEREIFRLSQKYESVLDLIRTIPGFDKNPLTAIQVLSEIGADMSVFPTAKNLVSWAGCCPRNDQSSRKIKSTRISRAGSYFKPVLVQIANALIKSKKHPEFTTRYRRIKARRGHKKAIIAICRMILTAIWHILTDLKPYTPEGFLESRPVNKEKVLTISQALNLIKQRGYIIKDDVGPVT

SEQ ID NO: 260594 - protein, 369 aa, unidentified
MKQNNTCPKSSKRKRIRKGSLTIGMDLGDKTSHYYVVDSEGEMVRESTVATTKKGMKQRFGSLPRCRIAIEVGTHSPWVSRLLSSLGHEVIVANARQVKLISASTRKNDRLDAQTLARLARLDPELLRPIRHRSEKVQGDLMQIRVRAALVDSRTALINTARGMAKSMGERLPSCDADQMGVGKLAGMSSVVVEPLTPVMEMVEALTLRIKAGEQKLEQLARNEYPETELLRQVSGVGPLIALTFLLTVEDPNRFGKSRDVGCYLGFRPRQSESGQSRPQLGISKEGDSYVRKLLVQGAHCILSERGPDTDLKRWGLKLAGKGNKNAKKRALVAVARKLAILLHHLWVSGEVYEPLLNSNRREKSKAAA

SEQ ID NO: 260595 - protein, 352 aa, unidentified
MDRMMQTRKDIVVGVDTHRDSHVAVALDALGGRLGERSVPTTRAGYTDLERWASGLGLVRAFGVEGTGSYGAGLARQLRAGGHVVREVDRPDRQARRRLGKSDPLDAEAAARAVLAGTATTRPKGADGSVEALRLLVLTRRSAEKARSAAMIQLRAVMVTAPAELRETLTGLGPVALLERCAAFRPGAPIDPWSATRHALRALARRIRALDEELAGTVSAMDRLTLGRAPALRATFGVGPDSAAALLVAAGDGPDRLRSEAAFAALCGASPIPASSGLRTRHRLDRGGDRQADRALYVIVLTRLAHHAPTRAYVERRTAEGRTKREIIRCLKRYVAREVFPLLTVPHPVDKP

SEQ ID NO: 260596 - protein, 320 aa, unidentified
MRNAVGLDISQNTFDAAAIVNGQRKQALFDNSINGFENFKAWLDGFDCELHICMEATGNYFEDVADYISQFYTVSVINPYKISEYGKSRFHRTKTDKQDARLIAEYCHTAMLKDLPARKKISIGHYRLKRLLALYEQLKTQKTAQKNRLKVAKDEFVRRIHQAQIQELDQHIQQAEAEIQAITNGNQDLKIVSEGLQTIPAIGKLTAAILTNYLLSGDFKTSNQFTAFAGLNPQQKESGTSVKGRSSMTRYGNRRLKAALFMPAMVALNRDYFHDFVKRLKAKNKPKMLILGALMRKLLVVAYHVYKTQKPYNPERYKPA

SEQ ID NO: 260597 - protein, 343 aa, unidentified
MEYGAIDLHLRRSQIRILDEDEGVVLERRIDTTREAVTQLFGARGRMRILLESSTESEWVAQHLETLGHEVVVADPNYAPMYGSRSRKIKTDKRDAAALGIACRRGIYRAAHRASRAARTRRQQLRVRRHLVQVRTGLISLLRSTLRQEGLRLPSGSAERAVARLDRLGVPATVAAVVAPLRTTLADLTATLTAIDAAVEAQATGDATAQRLMTAPGVGPILSLTFTAVLDDPARFGGDAGRASAFLGLVPSEDSSAERHHKGHITKTGPGDLRALLVQASWVIWRGRSTAAHALRTWAHTLGARRGRRIAIVALARRLTRILYAMWRDQTPFAPPGRVAVAA

SEQ ID NO: 260598 - protein, 375 aa, unidentified
MTSMTTAAPTRQRRVRTRPNRVVFAGVDTHKELHVAAVIDSGETVLGTRSFSTTRAGYRALLAWIVEFGQLGRIGVEGTGSYGAGLTRHLVTAGVTILDVDRPDRSDRRRKGKDDDLDAINAARAALHQRRTVAPKSKDGAVEALRVLRVARAHAVRERRNTLQLLRMTIVAAPDELRDQVRNLTRMQLIRVLAAWRPDVSNAADPVTAHRVALKSMARRYLELSDEITDLDELINPLVEALAPQLLARVGIGIEVAGQLLVTAGGNPDRMRSEAAFAMLCGAAPLPASSGMTQRHRLNRGGDRQANRALHLVAISRIRLDPKTRAYVARKTAEGHSKLEIIRCLKRYLAREIFFLLNPGQPTIPRRPYRRHRAT

SEQ ID NO: 260599 - protein, 359 aa, unidentified
MDAQEGAVRRIIGGVDTHKDLHVAAVVDEQDRVLGTQSFASTRQGYRQMLAWMRSFGEVQRVGVESTGSYGAGLLRFLQQAGVTVLEVTTPDRQDRRRRGKDDDFDAQNAAHAAFAGIRTVTPKSRDGMIEALRVLSACRKTAVTARRIALQMIQNTIVCAPESLREMLRRMTRMQLVRTLAAWRPDLTAYRDVEAAYRISLKSLARRYLELHDEIADLDAMIAAIVDELAPNLVARNSIGHRGAAQLLLTAGDNPERLRSEAGFAALCGVSPVPASSGKTARHRLNRGGDRAANSALHIIAIGRLRTDARTQAYVAKRIGEGHSKLEAIRCLKRYIAREVFTLIKQRQREINQTRIAA

SEQ ID NO: 260600 - protein, 415 aa, unidentified
MDAIHYIGFDVHKRSVSFCVKQSDGAVIAEGRLPAEREALRRWAAAQSAPWCGAMEATLFSAWIYDTLKPYALQLEMGHPALMKAIGASKKKSDRLDARRIADLVRCDLLPACYVAPPAVRELRRLLRYRNLVVQQSVRMQNKIAGLLMECGATYNKARLHGSKYFQALLGQVEEVPDSVKQMLRLSRGALDMFQSVQRQLLKRLHEDAGLHARVERLCSIRGIGEVTALTWALEIADPHRFGSLSQAVSYCGLTAAFRSSADKQQRGPISKQRNAHLQTVLIEAAKLAPRWNPELATVHARELERGHRNRATLAVARKLVAYLLAVDKSGRPFLPQLPNNDQDNTALSSPAGMVALPTPPPVVAQSAERSSRSRVRSAAPKPGAPLTAPGRSAQTTLATGGSDGNATLPGEATS

SEQ ID NO: 260601 - protein, 358 aa, unidentified
MTQITTIGLDLAKNVFQVHGVDANGQVLLRKTLRRSQMLAFFEQLRPCLIGIKACATAHYWARTLQSLGHEVRLISPTYVKPYVKRQKNDVADAAAICEAVSRPSMRFAPVKSVEQQSHLMLHSARELLITQRTALINALRAHFSELGIVAAEGARNVRNLLNLLEQQKENVTETTNIRKVAITALQPLAEMLLETDKQIAKLDREILALHRDNGTSNRLATIPGIGVLTATYMTASLAAFANQFSCGREFAAYLGLVPRQYSSGGKPRLGRISKMGNRHLRKLLVVGATAALYSIRKGTSQSALAVWARQLLEKKPFRLVAVALANKMARIAWAVIVHERDYQADIKPNRLIHTQTA

SEQ ID NO: 260602 - protein, 443 aa, unidentified
MIHPDAAGIDIGHREHWCAVPAGRCPKPVQRFGTFTEDLEKLADWLLSCGIKTVAMESTGVYWIPAFQVLERRGFAVRLANARQAKNVCGRKSDVLDCQWIQRLHSYGLLNASFRPDDQMCVLRSYLRYRDDLVCARSVQCQHMQKALQQMNVQLHQVLSDVTGVSGLRIIEAILKGERDAPTLAQLADRRVRASQATIEKALKGDYRLEHLFVLQTAFDLHATYDQKIQLCDEQVIGEMAKLPTRANVQEKPLPARKPGRPRHRDLVAGKDLREELYRWTGVDLTAIEGIGVLSAQVVLSECGTDMERWRTEKHFTSWLGLCPDNRISGGKVLSSHTRHVVNPVADALRLAATTLQNSKTALGAFYRRMRGRLGAASAVTATAHKLARLIYRLLKHGEQYVREGLEVYEQKYRERLLYNVRKTAASLGFQLTPNQVVASGVS

SEQ ID NO: 260603 - protein, 418 aa, unidentified
MADVMIGVDPHKGSHTAVAIGLSEERLGELQVQACSSQAEQLLGWAAGWPERAWAVEGAAGLGHLLAQQLVAAGERVVDVPPKLAARVRLLQAGDTNKNDPNDAFSVAVAALRSPVPRPVLAEDHAVVLKIWAKRHRDLARLRNQACCRLHAVLCDLVPGGVRKEISAGQAARILEQVSPSDAVLTARCELAGEFLADIRHLDAQLRDTHKKLAAAVRASGTSMTGLFGVGPVIAGTVIGDVRQVFRFPGRDHFAAYNGTAPVEVSSGDRKKVCRLSLRGNRRLNHAIHMAAISQIRHKHSHGRAYYDKKVAEGKTHKEALRALKRRISDAIYAALIADARRAAARPKSPGGQPGNHSASRAAGSHPAHRRFGQPTPGPATTIRPSATPGTARMQPNQAPHRRAGRFPAPSKKSPTTT

SEQ ID NO: 260604 - protein, 380 aa, unidentified
MAKSITYVGLDVHAETIAVGLAEAEGEVRFYGTIPNTAEALRKLTAKLSKSGAQLEFCYEAGPCGYGVQRALAKLGFTCLVVSPSLLPRRPGDRIKTDRRDALMLSRLLRSGDLEGIWVPDEEHEAMRDLVRSRRQSYNDLREAKQKLCSFLLRHGLRFPGKSNWTKAYWRWLGEQKAFAYPHQQQVLEEYKHHIRQIEARCERIDATMEEAVRGWHLRPVVEALQALRGIGLIVATTIVAEIGDLRRFSHPRQLMAWLGLVPCEHSSGAKTRRGGITKSGNALARTMLIEAGWSYRLPARQTHYYMRRIAPLNLPEPIKERAWTAQVRLCRRYRHLALAGKPTPKVVTAIARALAGFVWDIACRVCEAMPNQKPKRTAT

SEQ ID NO: 260605 - protein, 346 aa, unidentified
MVLIGCDFHPSWQQVSWLEEATGEGGDRELVHAPGEAEKFYQQFAAPACIGIEATSNCQWFIELLARLGHQVQIGDAAKIRAADDRQQKHDKRDARLIVRLMKENRFPRIWVPSSAQRDLRQLLIHRHKLVRIRAQVKNGLQHLAMNQGLLKKRRLWSAAGQKLLCALPLPPWASRRREDLLKLRTELDEKITALDAAVAEAAAQDQGARLLMTQPGVGPITAMAFVLTIGEVSRFPRGKQVASYLGLIPREYSSGGHQRLGSISKQGNAFMRMLLVEAAQNAVRYDPQMRNEYLHRCHRMAKGVAKVAAARKLAIRLYWMLRTNTGYPEVVRVESRPRVPLVSAS

SEQ ID NO: 260606 - protein, 342 aa, unidentified
MYYSGIDQHKLFSVITTVNDDGIIIKQAELKNNDFDILNYFFSIGNEHSVTVETTGGWYWMNDLLSSHGINLKLAHAKYVKAIAYAKVKTDKVDSHILAQLLRLNFIPEAYKISDDVRPLRDTLRARLRLSQKRTSCLNFMNRMLEKFNINDSSLLSDFYKLQYQQFDNQEHLLKEQMLTLEKSLYPTLIPNDDIQRLLWIPGIGKMNAFTILLEVGDINRFADVKHFFSYCRLVPSARNSAGKIKQKTSKDGNKYLKAVFSDAAVHALQYYPTIKKYHDSKLRRKKKSRLAGLMLSLLKKLLESFSMYLRIKLTSIIILREQNYKRKNLISGRALQAPSSN

SEQ ID NO: 260607 - protein, 397 aa, unidentified
MYIVGIDIAKRKHEAAVIDGDGAVIIKPFSFTNNCSGYNRLLAMLAKAKLPLDEVSFAMEATGHYWLALFTRLQKEGFRVQVINPVQTNSIRSFYIRQAKTDPRDALLIAEVIRFGHFSESTLHPENIYELRELCRGRHAIVSMQADVKRKVVALLDQVFPEYETAFTNLFSDTSMAILQTCPTPKELSEMPLEELCHLIEVSSHKRFRMAKARELQELARNSFGFAMAGDVFSTMIRLYAKHLVFLKQQVQEMDRKIAEIMDTLDTPITTITGIGPTLGAYILSEIGDISRFSSAAKLAAYAGIDPTMRQSGEYNGVRNRMSKRGSPYLRHAIWLAASSAVLHDPALKLYFQKKRDEGKPYMASVGHACRKMVSIIYAVMRDNKAYTPCIPNEISA

SEQ ID NO: 260608 - protein, 400 aa, unidentified
MISVGIDVSKGKSTVCILKPYGEIVCSPFEIQHVEKDLEVFHSLLEKLDGEIRIVMEATGIYHLPVLTFFHEKGYFVSVINPFAMKKYAKDNSLRGAKTDKLDSKMIANYGIEKWFKLQRYEGDEETYAELKLLGRRYRYYMELHVKALQELTHILDYVMPGIKKMFNSWNEANGKDKLSDFVERFWHFDLITSMNLEKFTQEYLIWAKEKKYHRSSSKAEAVYELASSGIPTLSSNTPSTKMLVQEAISVLRAVDSSLSLILTQMQVLAKSLPEYSTVREMGGVGDVLAVKLIAEIGDVRRLHSAKALIAWAGIDPPPYESGQFIGSKRKITKRGSSTLRKVGYEVMRVLKSHPAPKDDAVYNYILKKESEGKSKKHAKIAGLNKFLRIYYARVIAVYQ

SEQ ID NO: 260609 - protein, 361 aa, unidentified
MAAHNIIGVDPHRATFTATVLDSRGGELGHAHFPNTRRGHDSGLVWAAGFGPADRWGIEGASGLGRPLAEFLVEAGCDVRDVPPHKTSARQRGRHEGKSDQLDSRRVAAEAQTNPRLARAFKHAVPAAPDPIRERMALWHNARKSLTKVRVQLLGELDALVQELPEELRARLRVSKTVSARVNSLGRLDTSGVTDPTVALRLRLIGHRVAMLRDVLEQDRAATAELATLVDEAHSTLTTLVGIAPRAAAEILVEVGDIRRFTEAGFARFNGTAPIPASSGEGGDAPVRHRLSRGGNRRLNAAIYRIAMIQLRFEPRARQIHDQARGRGHTRREAMRILKRNLSDAIYRTMLRDVRRSEGLT

SEQ ID NO: 260610 - protein, 316 aa, unidentified
MSELVYVGIDIAKNSFEVAVTGELQTLNLANDEAGHAQLCQWLAPLAPRLILMEATGGYEQDLALALAGAGLRVSVVNPRQARDFARCVGKLAKTDRIDAQALRSFASMLDAQGHQPRALADDERRELTALVVRRRQLLTMLVSERQRLGVAHRKAKPSILAIMDAIAAQLHDVDDELKAHVQTHHADLAKLLTSVKGVGPTTACTLLAQLPELGQLNRKQITALVGLAPMNRDSGTLRGQRHIFGGRADVRRVLYVAALVGTRFNPVLKAFYAKLLAAGKAKKVALVACMHKLLVILNAIARTRSPWRDDFAERL

SEQ ID NO: 260611 - protein, 343 aa, unidentified
MDHFAGLDVSVKETSLCIVDDTGKIVREVKVASEPEALLHVLMNPAYHFKRIGLEAGPLSQWLFGALAEAGLPVICVETRHMRAVLKAQINKTDRNDARGMAQMMRVGLYRPVHVKTLRSQKLRMLLTHRKLLQSKAIAIDNDLRATLRNFGLKVGVVGTVKFEARIKELVEDLPDLVVLVEPLLIVRRVLREQVGILHRRLLAIVRDDDVCRRLMTVPGVGPVVALTYRATVDVPARFRNSKAVGAVFGLTPCKHQSGEVERTGAISRCGDEMMRMMLYEAAQIVLVRSTKWSWVKAWAMKIARHRGMKKAIVALARRLAVIMHRIWVDGTEFRWTRDVAAA

SEQ ID NO: 260612 - protein, 346 aa, unidentified
MTHSTTVGVDLAKNVIQVSVVSARGKELLNRSFTRRKFAEFLGKQKLALVAFEACATSHYWARAAQRHGHEVRIIPAKFVAPFRQGHKTDSNDALAVAEAARRPNIKEAPMKTVEQQGLQAIHRSRQLLVQESTALSNHLRGLLMEFGVVIPQGFASLLRAVPEILEDGENELPDLYRPTLHRMYSRLLELREDIQVMTKEVDRLAKNHPVCKKLMALEGVGPIGALLLYATMGSGAAFSGSREFAAYLGLAPRQYSSGGKTNIVGLSKKIGNSRLRSVLILGARSYVYKLKEPKSSKDKWLKANIERNGESRAAVALANKNVRTAWAMVTQGTEYQRRPQLEIAA

SEQ ID NO: 260613 - protein, 354 aa, unidentified
MSEKLNTAIAVIGIDIGKNSFHVVGHDQRGAIVLHQKWSRGQVAARFANMPPCLIGMEACVGAHHLSRKLKAFGHDARLMPAKYVRPYSKGQKNDFRDAEAIAEAVQRPTMKFVATKTADQLDLQALHRVRERFVSQRTGIINQIRAFLLERGIAVRQGQRFLRAELPRILATPSDVLSPRMVHLIENLAGDWRRLDERIESLSSEIEAIARQDAGCERLMSVPGIGPIISSAMVAAIGSGEVFTKGRDFAAWLGLVPRQMSTGGRTILGRISKRGNRYLRVLFVQAAWVVLIKPKSWERHGLKSWIEAAKKRLHPNVLAIALANKLARIAWGVLAHGRDFEARTNTNATAQAA

SEQ ID NO: 260614 - protein, 342 aa, unidentified
MRTIQQTNTLNLNTATFIGIDAHPSEHTALAINRFEEEKGVLRFDNTKAGMEAFLHWLPTLEPHADKVVIGVEGSGGNGHALVSYLLPLYEHVYEVNPLYTKQRRTLGTRGRKSDPIDAKLVAEVLTRKVWELPKLTLRGLSSQLVSLKKIIWFYEEKTQHGTRLKNQMQRLKREHGLCVNPDEKRILALTIGEKHRELQSVKRVQTKLMKEMAMLLQGHGENLTTMPGIGSILAAKLVARINGIERFGTVSQFLQYAGIAPKEKSSGKVKRHVQNNKGNRHLNSVFYLIALTQTQWNPKAKVYYQKKIAEGKTKKHALRCVMKRVACIVYGMLKSGEAYRV

SEQ ID NO: 260615 - protein, 332 aa, unidentified
MSFTNFVGIDVSKLTIDVHLQGSNAFKTFANNIKGSTALLLWTKKLLPGVNQDSIILCFEHTGMYSIGLAIHLQKANVSFAMISPLEIKKSLGMHRGKSDFIDAKRIANYAWLHRDDIKPSVLPAKVILKLQTLLTLRDRLVRSRGGLEATCKEQRLLLGIADNVEMFEVYQSMIGHLTTQIKNLDAQISSVIDSDVALKNTYDLLTSMKGIGPVIAANMITSTHNFSRFTNWRKFACYIGTAPFEHTSGTSGRGKTQVSHLANKQLKKFLHLAAISAIIHNKELRAYYLRRVSEGKSKMSTINVLRNKILARMFALINRQSGYVELAKYAA

SEQ ID NO: 260616 - protein, 315 aa, unidentified
MEGEVMVGIDVSKARLDVAVLPGEEIFREEHDSRGIAALIERLKKIAPALVVLEASGGLETGLVAELVAAGLPAAVVNPRQVRDFARATGQLAKTDKLDARTLARFGDRMRPQLRKLPDQQELALKALVVRRRQLVEMMVAEQNRLDRAPKVLHRQLRRHIDWLRKQIHSLDRDLDHELRNSPVWREKETLLRSVPGVGPVVCSTLIAGLPELGTLSRRQIAALVGVAPLNRDSGTLRGRRMVWGGRGQIRTALYMSTLVAVRFNPALKSFYLRLRAAGKPPKPALIACMRKLLTILNAILKNRKPWSPQCLNLT

SEQ ID NO: 260617 - protein, 451 aa, unidentified
MSTHKKSVTIEAVDEAGHVLATGRFDTTSTGYRLMLKYVRDQWPRRRWAVEGANGMGRPLAQRLLSQGETVLDVPAKLAARVRVFDTGNARKTDATDAHAVAMVALRTPRLNELTYDEELIALRLLTDRRDELSHLRVQTVNRLQRLLTELIPGGAKRDLSALQAKKLLATVKPRTLVGKTMRRMAAEQITDLVAVDAKLKGINKELRATVSSRGSHLMDLFGIGPAGAARILSDVGDVARFPDRNHFASWTGTAPLDASSGDQIRHRLSRAGNRRLNHVLHIAAIVQIRHDTQGRAYYRRKLAESKTPMEALRCLKRRLSDAVYRQLVADTQATSVPAPIADETGPGGHSGATSHSSAADLSTPVIGSSDQPQPGPADPRLPRRRPASNPPRGLGSQPSATTRRSRQGAAPHRTNDLDGDKRRRTLQGHESTLLTQRGTRSGRCRLGLVS

SEQ ID NO: 260618 - protein, 331 aa, unidentified
MVIVGVDVSKDSLDVAVEGSNAKRCYERRLNNDVGGFKRLLSWVEERTGASAHELTVMMEATGVYHEAAALALHEAGCRVFVANPKRVRDYASGLGLLNKTDRVDARALVRYGREKVSELAAWEPPAPEIRALRALYARLSAVMTDLRRELNRQEQAQLSGQPEAVLESMRQSVEHLREDCERLKRAIEDHFDQHPNLKNQRDLLQSIPGVGPVSADRMLCLLLRHSFASARQAAAFAGLVPRMHESGSSVRKRARMTKQGDASLKATLYMAAVVGARHNPQLRHVYESLLKAGKSKMSALGALMRRMIHIAYGMLKHNTAYNPNFFTAMA

SEQ ID NO: 260619 - protein, 342 aa, unidentified
MEQYVALDVSLKEISVCIVDRNGEVVFEGKTATEPATLVALIRSKAPQVKRVGLETGATSPWLFHALAAAGLPVVCMDARHAHAALSMRPTKSDRSDARGLADMLRMGWYREVHAKSVTSHERRTILGARHQLVTMRTELDAQIRGILKTFGLILGTGNKDTLIQRAEKLAAGHPVMSGLVAKLAEVRRHVTSQIAAIDRDIRHLVHTEPTLKRLISVPGVGPITALAFLSAVDDPSRFKHARDVGPYLGLTPTRYQSGETDRQGRISKCGDTFTRTCLYEAAHVLLTRVQRFSPLKAWGMRLAKRIGARKARIAVARKLAVILHCIWTDGTEFWWTREKAA

SEQ ID NO: 260620 - protein, 430 aa, unidentified
MNCVDDSRLEQFQQLKTEIRGSEQHLIVGIDAAKEKHRAFFGTAQGKTLLKNLVFDNTVEGFEKMDATVERIKVQYGLSKPVFGIEPTGNYHKPLAEHLIKCGRMVVLVGGVAVKNNRQLLNGRWDKNDDKDSANVADLIAQGKCLFYEYPLMTLRDVRVLLALKRRLKKREHGISTCIRNNIIAQYFPELDKHYGPAETLAVVRECLDPSVIAGMEYDEFCRTVAPGRMTLAKERRVGTIWRTAVNSIGCTMGEAASYEAQVMVDSLRQIRQSIKSVEEKLEDACLQFPEYTYLLSIPGFGPDVSAKVLGAIGNPYRFTSAKQVLKMAGLDLCAKRSGKTSNTATPVISKQGKSDLRNALYQAAFIASLKNTDFITYFTNKLQGRATEKGIGTKMRIKLSAKLLIIAWTLMKKKEMFDPACLTMEARPK

SEQ ID NO: 260621 - protein, 361 aa, unidentified
MARSMSLVGLDVHASQTHAAILDMSSGELRGVKLRMAPSEVVEFLATLPGPVRAVYEAGPTGFGLARAGGERGIDVRVVAAGKVPRASGDRVKTDKRDAERLARLLAAGELRFAFVPSVADEQFRDVIRAIEDCRGDLMRARHRLGKLLLRRDLRWAGPGSTWTQAHLRWLRSLRFEDVCSQAVLVDYLSGVEMLVARRAALIAALEQVIPDSRHVVTIARLRCFRGIDTLSAAGLCAEVGDWHRFRPKQLSGFLGIVPTEHTSDQKRRQGSITKAGSIHARRLLVEAAHHYRHQPAVGEGLARRQAGQDPRVIEISWRAQRRLHQRSQVLRMQRRKPAGVVAIACARELAAFCWEAATLN

SEQ ID NO: 260622 - protein, 487 aa, unidentified
MAKRRKSTFERLSTGQMNRSQRRELGRRVAAGDAGLAIVQANAGGIDVGKESHFVAVPPDRDTNPVREFGCWTAALNEMAEWLKSCRIDTVAMQATGVYWIALYDVLEQHGVRVVLVNAQHTKNVPGRKTDVQECQWLMKLHTYGLVRDSFRLQQDMEYVRTIWRVRDRHVKEAGREVQHMQKALTKMNVQLANVISDVSGVSGQAIVTAVLKGERDPYKLADLADYRVKASREEVARSLEGNWRADVLFELQQAVDSYHFAHRQMRECDEKLTFYLVSLPTRMLEIPVPSKGAPETPESPAQKRKKARKPRDNEPRMDMKGELKRICGVDLTSIDGINVMTAFTVLSEVGTDMARFKDEDHFSSWMGLAPSKDISSGKIVGRGKKKVKNRVAVVLRTAATTLLESDTHLGARYRHLRRQLPTHKAAVKAMARYLAVLIYRLLTKGEAWVDRGARQFEQRRTQREMVSLQTKAKAKGFTLVPLAEAR

SEQ ID NO: 260623 - protein, 343 aa, unidentified
MNITTLGIDLAKNTFSIVGMNQHGKVVCRKTLSRNKLIPFIAQCPPCLIGMEACSGAHYWAREFQQMGHRVGIIAAKFVEPYRIGGKNDNNDAEAICEAVKRPNIWFVPVKSPDQQATLCIHRVRQGLVKDRTALLNQLRGLLAEFGIVIPKGRYPAQAMIPNILQNTNNGLPMLARNIIADLWERIQQANKQILSYDRDLAKLVREDDTAKRLMTIPGVGEQVASGVVASVPDPRLFKNSRQFCAWLGLVPRQYSTGGKTRLGRITKHGDKYLRMCLVHGARAVVASLKEKKQDHVSCWLRDLITRRGYLRAVVALAARNARLIWTLMIKCEDYKAMPVMAA

SEQ ID NO: 260624 - protein, 306 aa, unidentified
MIIASDFIGIDVGKYTLEIFAGRELSIANTEAALADWLAGLSRPELVLFEATGRYDGKLRRALEQAGIAFCRVNPAQARAFARATGQLAKTDKVDAQMLARMAQALRPHPQAAADERRRLLGELARRRDQLVDMRRGELTRQQEMAEPEILTDICAHIELLTSRIAVFDSRIAALIAATDELAQAQRLLRSIPGIGLVTATTLLAFLPEAGHRSPKTIAALAGLAPFNNDSGLFRGKRSIRGGRPRVRVALYMAALTACRSTGLLGQFFRTLTAAGKPKKLALIAIARKILVIANAVLRDQTPFKT

SEQ ID NO: 260625 - protein, 348 aa, unidentified
MPNYNQPHQFYAGVDLHARSMFVHVLSAKGKTVFERDLPAEPDAFLDAVKPFRKNLVVGCECMFAWYWLADLCEDQRIPFVLGHALAMKHIHGGKAKSDKIDAGKLAAMLRGGMFPLAYVYPRAKRQTRDLLRRRSFFVRQRAQLITHIVNTNSQFNLPPFAKKLSYAANRSAEIAERFADPSTRLMIGADLRLIDAYDAQIAAVELHLVRSAKVDDPITFGFLRTIPGIGPILGLILLYEIDRIGRFPEAGNFLSYSRLVRCAHESAGKVKGFGGKKIGNAHLKWAFSEAACLMLRSCVPVKSWMQRQEKKRGKRKALSVLEAKIGRTVYHLWRKQQAFDVKKFLHS

SEQ ID NO: 260626 - protein, 461 aa, unidentified
MKKRSYRSVNVKKVDAERLAEAVRGERVVLGVDVAKERVFGSVMVARGEEVKLNIGWRNPTEARELVDLVTSLPAADLEVALEPSGTYGDPLRWLFLERGVKVFRVSPKRSHDAAEVYDGVASWHDVKSAGLIAKLHLHGASEEWPLRSEDERDLAAELRTMVMYDKQEHSNLNRLEAQLARHWPELTGGLGLASATLVELVKEYGSPDAVANDEAGARRLMRRIGGHFLKRDKVERVLEGAASSIGVPVIDRERAAIKELAAEILRCRVNGRAAEARVVALVDGQETTSRVGKVVGKPTAAVLVSGVGDLGRHESPSSLLKAFGLNLKERSSGKHQGQLKITKRGPGDCRFYLYLAALRLLTRDPVVGRWYERKVARDGGKVKNKAVIAVMRKLVKALWHVARGAEFDSRLLFDVGKLGFEVPTQAGTSPPLTTAAGPSERCSTSGLKHVGEGLQEAGLI

SEQ ID NO: 260627 - protein, 388 aa, unidentified
MYRIIKIGMDVHSTNFTLCAMEPTIGSEDRIFAEIQVAPDYKEVVSFINKLKLKLGPDDSYFIECGYEAGCLGYTLYHQLTKAGIKCVILAPTTMLTQQGQRVKTDKRDAHLIAQCLCYGGYHPVYIPTGEDDAVKEYVRMRDDHKLAQKKLKQQINAFVLRHGHQYTGTKWTIRHITWLKKLELEPMYRETLNEYMASYEEQNAKIERYDKRIEEIASESRYQEKAKKLGCFLGIRTHTALSLIVETGDFNRFAKGNTYAAFLGLAPGEHSSSKSVNRLGITKAGNTHLRCLLIEAAKGICKGAIGHKSKELRSRQNGQSSEIIAYADKANTRLRSKYYKMIRHGKKQNVAVAAVARELACFVWGMMTGNISTASGAGTSVPVASQG

SEQ ID NO: 260628 - protein, 326 aa, unidentified
MSNIILGIDISKLTFDLALLNDNKVKTKKFNNTTKGFAELKQWLKNKGIDTAHACMEATGGYEAKLAEYLYDNNFKVSVINPARIKGFSMSKLSRVKTDKADCELIAYFCQAMQPDLWQPTSLHIQELQQWVRRLDSLIANKNQENNRLEGVSNVVAVNIGIHIEFLDKQIKEVEEIISNHIKGHKDLNDKSKLLDSIPGVGEKTIGVILAFLSVEKFDSAKQVAAFVGLNPKPRQSGSSVLGVGRISKTGDADLRKAFYMPAVVSIRFNPIIKGFAERLSGTGKSKMVIVIAAMRKLLHIIYGVLKNEAPFNANIKTKLMILDEK

SEQ ID NO: 260629 - protein, 345 aa, unidentified
MDHIGIDLHKRESQICLLAEGGEVIERRIRTEPQRFAEALGARAPAQVLLESSTESEWVARCLETLGHHVVVADPNFAPMYATRTRKVKTDRRDARALAEACRLGAYRPAHRLSDAQRHVRARLTVRDALVRTRTRYISLLRALLRQHGWRVPSGSAEGFPRRVLALPLPGRLRSEVAPLLAVMRHLQPPLAYSDERIAAVTATDERVRRLQSVPNIGPVTAAAFVAAIDEASRFRHAHEVEAYLGLVPRELSSGETQRRGRITKAGSSRVRWLLIQAAVSLLRLRDPRPAALRAWAGRLAARRGKGIAVVALARRLAGILFALLRDGTVYEPRRRPAGHQAVPA

SEQ ID NO: 260630 - protein, 496 aa, unidentified
MKPKPSRKSASTSVYRNQNAHVRAVFERAGEARKVLCVALDYAKRKHLALICDGNGDILKAAFPVENNAAGIEFLIKQILATAGRRKIPKNQIFLGGEDEPSYVANFTAALREKGYLVVRVNAFEAKESRENLLASTDNLDLIGIAKTLLARRARLTGDTGTADPVYHHLRELTRCRRNLVRQQTAAANRIHALVDQLFPGFLNESKSGLSQFGEASLELMKERFSAPEVARRKPAALANLLRRHRVHQPDQTAAKIIALARETLPPAPHRVVTLQRTLAATVDLHQCLERNASQLRAEAALSLATTPYVMLTSIQGIGFVLAAGIAGELGDPKQLGPVDSLCAFAGIVPRTSQTGGPDSPAIQGRVSPRCNRILKDWTIQSAQKIHLFGQPELKDRITRWNANGQHGIFAGARHYLRLARSLVQNEIPYLDPVGRARHATPGDLATAAFSTWQTLLRKWQSVAGGVALITDEANPLGFWRRVIMETHGIDLPARP

SEQ ID NO: 260631 - protein, 421 aa, unidentified
MARTGFTHNTARMEDTVKVFCGIDWSEHHHDVALVDDTGTPLAQCRITDDATGYTQLLSLLTEYGDSPAHPIPIAIETSRGLLVAALHNGHRQVFAINPLAVARYRDRHTVSRTKSDRADALALAHILRTDMHRHRPLPNDSDQAKAITVLARAQQDAVWNRQQIANQARSLLREYYPAALEAFQSRKGGLTRPDARQVLTMAPTPAQAARLTLAQLRRALTRAGRSRNIDTDAHQLHALFRTGRPRQPTPVEHAMGRQLLALLTQLDAACQATDDLTTAVDEQLRTHPDAQILLSFPGLGPQLAARILAEMGDDHTRFSNARGLKAYAGSAPITRSSGKKRYVGRRYIKNDRLCHAGHLWAFASLSASPGAKAHYQRRRDHGDWHAAAQRHLFNRFLGQLYHCLQTRQPYNEEQAFGPTP

SEQ ID NO: 260632 - protein, 371 aa, unidentified
MTETVKYVGLDVHKETIAVAVADGERGGEVRFVGTVANEDDAIRKLVKRLTGPGVTLNVCYEAGPCGYGLHRLLTKLGQNCIVIAPSMMPRRPGDHVKTDRRDAMTLARLLRAGELTAIWIPDEAHEAVRDLIRARRSAQDDAIGAKQTVRSFLLRHDRRFGGKAAWTKMYWRWLSEQRFDFPHQQLAFEEMQKRVLEAQARVGRLEAALTEAVDAWCFAPLVRNLQVLRGIRLVSAATLVAEVGDLTRFDNPKQLMAYVGLVPSEHSSGARTKRGRITRAGNAQARTMLIEAGWSYRLPAREERRYRERVIDLPEDIQAIGWKAQVRLCQRYRRLAATGKPQPKVTTAIARELVGYAWDIARRVSPAIAG

SEQ ID NO: 260633 - protein, 351 aa, unidentified
MSSKSSSAITTMGIDIGKNSFHAIGLDGRGAIVLRQKWSRGQLEARLANTPPCLIGMEACVGSHHLSRKLQAQGHDARLMPAKYVRPYSKGQKNDFRDAEAIAEAVQRPTMKFVATKTVEQLDLQALHRVRERLVSQRTGIINQIRAFLLERGIAVRPGLRFLRAELPGILAARTNLLTPRMAYLIEGLAGDWRLLDERIDRISEEIHTLAHQDAGCDRLMSVPGIGPIISSAMVAAIGTGDAFSKGRDFAAWLGLVPRQISTGDRTVLGKISKRGNRYLRTLFVQAAWVALLKVKPNRWEGHGLKHWIEAAKKRLHHNVLAVAMANKLARIAWSVLARGRTFEASKIQVA

SEQ ID NO: 260634 - protein, 412 aa, unidentified
MNPVVGLDVSKGESQVQAFLDKGKPYRKSFSIKHTLDGLDRLLEFLREIEKLADGKQPSVILESTGQYHMPVIQFLEEQQYVYIIVNPLISHRARSTNLRKVKTDAIDAYQLCELYYKEELEPYKKRGIHLLNLRNLTRQQETVSSTAVQTKLQLQSILDQIFPEYRGVFGDLYSKISLQILSIFPTSKEVLSVSESDLTNKIAELCTTRSEKWAKEKAIKLREAALRNPFQNNLYQSHIFNLRMFINIVLQYQEHLSKLAAEIDALAKEIEEYEIIQSISGVGEKIAATIISEIGEIERFNHPKKLVAFAGIDPSVYSSGRFTASINRITKRGSSRLRQALFMAVQCGIRDARKQKSSEEIIPRNKKLRKFYDKKREEGKPFRVAIIACANKLLHWIYALLKRKEAFQNAV

SEQ ID NO: 260635 - protein, 345 aa, unidentified
MEQVSRIGMDTSKHFFQLHGVNAAEKVVLRKKLRRKDMVAFFEALAPTVIGIEACGAAHYLARLLGSFGHEVKLIAPQLVKPYVKRGKNDGADSEALCEAMSRPTMRFVPVKTTEQQAALMMVGLRDRLIRNRTQLSNSIRGYAAEFGFTATKGKAHLVTLLERIQADESVPALARELFAAQAAEYARLQAQIDEVDAKLMAWHKANECSRRLAKIPSVGPIGAVLLMMKTPTPELFRSGREFAAWIGLTPKDHSTAGKVRLGGITRAGDEALRSVLVVGATSIIQHVRRGGRGSPWIVDLLKRKPPKLAAVALANKMARIAWKLMITGESYVAKSALATLASAA

SEQ ID NO: 260636 - protein, 344 aa, unidentified
MQTMYYIGLDVHKRTISYCVKDGSGTIHAEGTIAATRFDLDRWMKTLPQPWTAAMEATVFTGWIYDHLQPHATALKVAHPLMLRAIAAAKKKNDRIDANKICDCLRCDFLPECYMASTAIRERRRTLRYRNLLVRQMVQVKNKISGLLMEAGVNYNKQRLHKARYFRELLATNPDIDEGLCSLLRLCRETVVRLGKTESALVRSLERDSLLMERVERLMTIPAVGPITALTWALEVGDVKRFPSIKKAISYCGLCGAEKSSANTVQRTPLSKQRNKHLQTTLIEAAKMAPRNNPELAMLYDQEKQKGNANRATLAVARKLVAYLMAVDRGQRNFQVVETNCIAA

SEQ ID NO: 260637 - protein, 323 aa, unidentified
MQGKVSFEEDAMPVVYAGVDVSKEWLDVHLHPLGESRRFSNDKTGIRQLKRLLARHQPKSIVMEATGKFHRPAHRSLWLDGFAVAVVDPLRARMFARACGYLAKTDRLDARFLALLAESLRPPADTPPSPHVEALQELVNARSAAKCDITALQNRSKTATTALLRGELNRLVSRLEQHVERLDKEIERRVGEDPQLSRRAEILTSIPGIGRVTALALMAGMGELGSCSGKQAAMLAGLAPIANDSGARTGRRSIRAGRPAPRRALYMAALSACRYNPALARFADTLKAAGKPAKVILVAVMRKLLVLANCLLSHDRLWTPNPP

SEQ ID NO: 260638 - protein, 355 aa, unidentified
MVTIGVDAHKQQHMAVALDDAGRELGRWQGPNNADGWSGMLVWAEGLGEERVWGIEGAWNYGRGLSQHLVGAGERVYEVNPRWTAQERRKARKPDKSDPLDARAVAQYVLRKDAALPVVVAEDETVVLDLLVTEREGATAEATRLRNQIHQLLLQLDPEYKSHLPDLKSNAGLDALLAYTAPEGSSVVRQQRAASVRRLAERLKLATQQAEELAKQISSLAGERFSPLTRLTGVQLLTAGALAGILGPCTDRFATEAQFAAYAGVAPLEASSAGKVRHRLNRGGNRRLNSILYRIAVTQSRSSPEAKAYIQRRISEGKTAREALRALKRYIARAIWRLWRECYVGGSAVTETLAA

SEQ ID NO: 260639 - protein, 485 aa, unidentified
MNRNAHTSKKQTSKTAASEGRRGKEEQAEFIKKCEEIVKGLQAHSWKDLEVGHKFRHNEKLGLITADSLIVGCDIGSIKHFIRAIDAQGRALTNKPFPFENDEEGFKAAHDWMVKVAAQNDKTQIVLALEPTGHYWFCFAAWCTSHGITVVQVNPYAVKATKEIQDNSQLKSDRKDPGVIAELAKNGNYSIPYIAEGTYASLRELELFRERVSEDRIRDINRLCQEMDKYFPEYRRIYKEVDKVFSLAVLAKAPLPEDIVRIGEDGVRALWHSEKLRGGGYSKAAELLQKAKHSVGLREGQAQARMSIQYLAGSIRDKDARLDEIDAEIAKLAKSIQYVEKLTAIPGLGERIISGILSEIGDLIRFDSVKEIQKYSGLGLVSESSGKHNGETHISHRGRKRLRYWLYMGARSVVAHSSEFAKLHTYYTTREENPLKKMQSLMAIACKLLRVIYVILTKGVDYDPQKLLGDIVRPENAKNKTKAFL

SEQ ID NO: 260640 - protein, 388 aa, unidentified
MPAAETPVACLGIDVGKSSHSACALDAEGGIAFRAELANRPDDIDRLLERAGSGALVVVDQKRNIGALVLARAHAHGNPCAYLPGYAEKQARGMFPGIAKTDAIDAEVIARTALGAPRALRPAPEEPEGTASLRILSSQREFASSARTRAKNRLRATLLEADPALERAVDPSSRWQVSMLAEFGGAAGCSAAGWRRFSNAARRAGAPAAGARRLWEALLASSRSGRRLPAGEDVAVRILAREIASLDADIEELDSLVADSLAGDEVYECLLTVPGIGPKTAAALVTSIDISAFRGHDELASYCGVAPSDRRSGSSIRSTSPQHGGNRQLKNLLIFSCNSLIGTDNRFGRYYGECRARGMRHSKALKAVARKRLKVIYAIMRDAVPYAA

SEQ ID NO: 260641 - protein, 350 aa, unidentified
MRYIGVDVGKNRCQACIMDEDGGILDEFPFANNGEGIKSLLECVSDIQCKAVVKSTGNLWLRIYEALEGHGVEVKLANPYKTKAIASAKIKTDKLSARILAHLLRAELIAECYVAPREVRQVRALLRQRASLVKMRTMVKNRVHSHLDRYGLSSPWSDAFGAGGVEWLHGLELEPVDRCILDTHLRHLECLNSEIGFLDSEIASQALESVDALLLMTLTGVDYNSATLLACEIGDIRRFPSPKHLVSWIGLCPSLYQSGNSLVMGRMKKDSNGRARWVLVQAARTASRTDPRMRELYQRVSSRKGTGKAAVRVANKMVVIIWHMLTEGKPYMQVKEGLYRSKLKMKRIAS

SEQ ID NO: 260642 - protein, 362 aa, unidentified
MSTNLTNTATTATGLILAIDLGKFKSVACTYDRAAAQAHFDTLTTCRHELTKLFDRHRPAVVVIEACTLAGWVHDLCAERGVACKVANTASEAWKFKHTKRKTDKDDALRLAQLEALGQLPIVTIPPHQTRQWRSLIAYRQTLVGRRVAVQNRLRALLVGQGLPAPRGHRAWTELGLQGIAEHARPLADCGPDELWRGLLDLALTELRQARELLDQAEAKLDALAKEDAAVQLLETIPGVGPRTAEAVAAYLPDPQRFASGKQVSAYAGLVPRQYQSGETDRRGRITKRGPALLRKLLVECAWVMLRYNSWARAVYQRLSRGRARKKQAIVALARKLLVRCWAMLRDGTPWRAEAAPAEVGA

SEQ ID NO: 260643 - protein, 405 aa, unidentified
MLFVGVDWAEDHHDVCVLDEGGGVVSKGRVPDGVAGLSRVHELIAAGIGDEGDPVVVIGIETDRGVFVRALIASGYEVVAVNPLSVDRYRDRHRVSGAKSDPGDARVLADMVRTDRHLHRRVAGDSDQVEAIKLVARAHQNAIWSRRRLQNQLRSALREFYPAAVEAFDHIGDRDSVAVLSIAPTPALGRTVSKAKIAAALRRAGRQRNVEVRTAAIYTALRSEQLGQPPVVEDAYGSITSSLARLITAHSAEIAALEEALGEGFPKHPAAEIYLSQPGLGVVTASRVLGEFGDDSDRFDTAKHRKNYAGTSPLTIASGGRRVVRARFARNDRLGDAVNWWAFNAMATSPGAKAFYDEHRAKGDRHNQALRALGNRLVGILHGCLHHGTLYDEHTAWGHRAQLAA

SEQ ID NO: 260644 - protein, 413 aa, unidentified
MDVLHPRCAGLDVHKKTVVAAVRLVEHGKVKVEVRTFETTTAGLIALAEWLASHGVTSVAMEATGVYWKPVWHILSEAGDFELVLANAQHVKAVPGRKRDVSDAVWLSDLQAHGLIQGSFVPPQEVGELRSLMRTRKQLVRERTSHVQRIQKTLEEANIKLDSAISDILGQSGRAMLEAIIAGQRNPKRLAALAHARIQASPETLAKALDGRPTKVHRLLLRVHLDQIDHIDHSIAVIDQSVDAHLGSFRTAIELVATVPGMGPISTPAVLGETGIDMSRFPSEGQFLSWACMVPRNDESAGKRRSSRMRKGGTWLKTTMVQCAWAAVRKGNSRFAALFARLKPKSGARRAICAVAAEMLRIIYHMLKDGTCYEEHHVEQRQATRQEEANRLLRRLARLGFTAEIKPVPSPVG

SEQ ID NO: 260645 - protein, 320 aa, unidentified
MTRIICGVDISSTSLEARIGPDGAGASFPNRTEGISALAAFCGTHQVELVAMEATGGYEQQAWAQLAEQGLGVAILNPRAVRKFAESMGRLEKTDSIDAGMIAWYADVKQSQPQCLAPHTQQHLRALVTRLRQLTDIRTAQLNQQRLITESVVQSSFRELLAFLASQIRDLEQRIAGLIETDPLWRELNQAFRTIKGVADRTVARLMAEMPEIGTLSNKTISKLAGVAPIARDSGKHQGKRAVRGGRAAVREILFIVASVVGRYEPDFNAFQQRLRSAGKPPKVVRIALAHKLLVRLNAKAREVRQRLAQPSSTLSPCPR

SEQ ID NO: 260646 - protein, 453 aa, unidentified
MARKNKVEMAIVNPNAAGIDIGSRSHFVAVGTTKDDVKEFGVYAEDLTELCEWLKEHGITSVAMESTGDYWQNLYTEILKYNMEVTLCNGKFTKHPKGKKTDVLDCIHIQKLHSLGLLTSSFLPEETTEKLRTYCRQRGNLIQQSAGASRKMQKYLKFLNFRLDVVVKDVCGLTGLKIIDDICKGNLDPFSLAEHKHYNCKKSKEEIAKALHGNNREDYLFGLKQEYEIYKFYQKQIKLCDKQIDKFIKEILKQFPQRKKLKTTDKPYKRHNKNAPGIKNFNQVAFQYFDGIDLMAIEGISHSTVLSIMSEIGTEGFMKFETSKQFASWLRLAPNNKISGGKTLSNRIPKGSNRLKIALRQAANAIGNLKDTHLSDFFRRVAFRKGRQAAISATARKLAVIIWTMVTKKVQYRPPKEYLFLDQKRKLKMVTRMKKNIAKFAIEPEEIGFFLTP

SEQ ID NO: 260647 - protein, 338 aa, unidentified
MNKFSGIDLHSNNSVVVVSDEADRVVYQRRLPNDPVQIRAALAPHRQDLVGVVIEATFNWYWLVDQLMNDGYRVHLANPAAIRQYEGLKYSGDFTDAAHLAQLLRLGLLPEGYIYPAEERPVRDLSRKRMQLVQCRTAQILAIENLFSRHTGGQMRGERVKRLDQTQVSRFGFAPDVALAMQANLAVMQTLQEQIGILEKRLMDRVKLQPDYVLLNSVPGIGPVLATTIMLETGTISRFTEVGNFSSYCRCVDSRRESNSRKKGEGNTKNGNKYLAWAFVEAANFAIRSCPEAKRFYERKKRARNGIVAIKALAHKLARACYHMLREHKPFDVTRCFG

SEQ ID NO: 260648 - protein, 352 aa, unidentified
MDIIAMDCHKRYSLANVQTSDGQCVREQRIEHRRGNIRTFLSAYPAGSPVAIETLGNWYWIVDEIEAAGMVPRLVHARKAKLMLGSINKTDKLDVRGLNMLQRIGTLPTVWIPPAVLRDRRELPRTRMVLGAWRTRLKNRLHSVVDKYGLQDRFEGISDIFGRKGREVLDEVVAQLPAYTASMTKLLIERLDQVQEAIGRIEKQMAEVFAPTPEMALLASLPGVGSILSVVIGLEVGDIRRFKWANRLASYAGTVPRIHASGGKTRYGRTRPDVNHYLKWAYAEAANSMAVNHKRFPDRHVSQLYQRVRSRRGHATAVGAVARHLAEATYWVLSRNEPYRDPGLKSVSSTGR

SEQ ID NO: 260649 - protein, 360 aa, unidentified
MTTTMTYVGLDVHARSTHAAAIDVHSGELRRSRFGLGSDEVLAWLQALPQPLRGCYEAGPTGFALYRAAADAGVQLDVVAPSKTPRAPGDRIKSDRKDAELLARLLLAGQLKPISVPSPALEAARHLCRAREQVRSDLMRCRHRVSKLLLLHGRVYAEPTTWNERHRRWLARQRFEETETELAYLDTLAAVDGLVARKAALDERLSRLALEGEWAPTVARLRCFRGIDTLSALVLALEVGDFSRFARPAQLASWLGLVPTLDQSGESRRQGAITKTGSSYARRLLVEAAWQYLREPRIGVTLRNRQQGQPAQVLQIAWRAQHRLYRLQKRLRARGKPGNVATVAVAGELACFLWAAAVAE

SEQ ID NO: 260650 - protein, 314 aa, unidentified
MNTNTLQNINVGVDTGKTQLDIYIRPLDIYFNVTNDEKGIKQAVRTIAKYHPERIVIEATGRLEMPFILACEKANLPYVIANPLHIKKFSGALGNKAKNDRLDAALIAHYAEAIKPKLTQLKSENIRLMSDLVTRRNQLLSMQTMEKNRHQILPQSLASSIKPILTALKNQIAKVENRIEKLIETCPDYQAKNEILQSVPGIGKIAAASLISNVPELGYITNKQAASLIGVAPITRESGSFKGKRMIKGGRMQVRTVLYMAMMSAMQCNPVFKETYQRLLAAGKPKKVALIACVRKMVVILNSMLRDGCMWNGR

SEQ ID NO: 260651 - protein, 338 aa, unidentified
MAILYVGIDLAKNVFAVHGVDEGGKPALVRPAVPRARLHELIASLAPCTVAMEACTGAHHWARLFAARGHAVRLIAPKFVTPYRMSGARGKTDAADAAAICEAVQRPNMRFVPIKSVQQQSQLMVHRARQGFVQARTACINRIRGLLAEFGHVLPLKANTVRRQAGALLEDLPGWANTVIGDLLSELHRLDERIAQYDRHIAQIAREDERAQRLMALPGIGSTTATAVVAMIGSGHEFNCGRQFAAWLGLTPGQYSSGGKTRLGRITKAGDGYLRSLLILGARAVLARAKASSDDISSWALALQQRRGYWRAVVAVAAKNARLAWAVLRRGEAFKMPA

SEQ ID NO: 260652 - protein, 346 aa, unidentified
MNETTTIGLDIAKQVFQVHGVAIDGTVTVKRQLRRSEVIRFFDRLPRCRVGLEACGGAHFWARELTVLGHDVRLIPASYVKPYVKRGKTDAIDAEAICEAVSRPTMRFVPIKTVDCQAGVMLLKTRHLLVKQRTQSINSLRGHLSELGIIAARGTGKVETLIAIIRDKTDERIPAVARRALEMLAEQVEALVRRIATLENEIVSEVRRDDTMRRLATIPGVGPITAATIVALVPDPGAFNSGRHFAAWIGLTPKMHSTGGKERLGRISKMGNPVLRSLLVVGATAVSRHARRGATVSPWLTGLLARRPAKVAAIALANKMARVIWALLTKGGVFTRRPATAAQHAA

SEQ ID NO: 260653 - protein, 355 aa, unidentified
MIYVGIDIAKETHVAAAVDSDGVIIIEPFSFTNNHEGFKLLKSKLDTLDRSNLLIGLESTAHYAENVIFFLHSCGFDLAVINPVQTAAMRKTGIRKTKTDKVDSLLICKTLMVNSFRRYSENDIKTLKLKSLCRFRQNLKKSKARLKIQLTSYVDVIFPELQSFFKSGLHIRTCYELLKAYSSPDDIAALHLTKLSNILSKASRGRFGKQDAQSLKSLAMSSVGVKNTYISIQITQTIAQIELIESQLAELETVIEAAVDELDSVIMTVPGIGKLNGAMILGEIGDIKRFSDSSKLLAYAGLDPVINQSGKFNAKRTRMSKRGSKLLRYALMNAAWNVSLNNDTFKHYYDSKIAQ

SEQ ID NO: 260654 - protein, 356 aa, unidentified
MAAGDTAIVVGGVDCHAEVHHAAALDGTGRRLGEQAFPATRPGYERLLAWLRGFGSVTAVGVESTGSYGAGLTRFLLQAGVRVVEINQPHPHLRHRRGKTDAIDAEAAARKVLSGEATVVPKETTGAVEAIRQLRLTRRSAVKARAVALRQLGDLIVTAPADLRERLACKTLPGQAAICARFRPDRQRLTDPAQAAKLALRTLARRIAALDAEIAQLDEHLEQLVRATVPRTIALFGIGPQHAGQLLVTAGQNITRLQGEAAFAHLCGVDPIPASSGKTTRHRLNPGGDRAANSALHMIAVVRLRYCARTQNYAKRRIAEGRSKREILRCLKRYIAREVYRTLCADLAHLDVAPAA

SEQ ID NO: 260655 - protein, 424 aa, unidentified
MKNTLARKLKQVPEGYLSIGVDPHKKRHAAVAITRDFTARDKFKFDNTREGLEIMLRRARTEMVKSDCRGVMFAIETGGHYWRNIAYFLDEQGVPFRFINQFTLKRRREGKDLNRRKNDYRDSEVAAQLLYTGEFTESTIPQGVYAELRAAHNAYRRLVKERTRITNLVKGLLDALFPEFTLVFKDPCGLTALSVLSTCAIPGVIAGMTEDEFVATIEAKHHGRRIMRKKLRELHHMARASIGIAAGARPVSAEISFLIEKLELIRGHICIIERTLVSLVDETEEGKYLLSIRGLNYIAVAGLLAELGCFKAYRSAKQMIKMAGSNPTESESAGKRGSHTPMSKQGRPVLRYCAWTSVIPMLRFNPDFRAWAKQRRERPAHANPLNGREIVGAALNRLLRLAFAMVKNQTYYQVSKPELTLVAV

SEQ ID NO: 260656 - protein, 386 aa, unidentified
MIFIGIDIAKSTHFASAVNSDGEVLVKPFKFTNNNVGFNLFMDTFKNYDLANCLVGLESTGIYGDNLTTFLFEKGFKIGRINPIQTDSLRSSNIRKTKNDKIDTFLIAQCLMLGHYTLITEKDIQLIKLKTLCRFKFDVKKSQSKAKVQLVTCQDIAFPELANFFNDNLHIKSSYALLSKYPTAKIIANTRIDALTNLLYSASRGHFKTNKAIALKELAKNSIAMDNPAIGVQIKMLIEQIQMLEKQIDLLDIEISNIMEQLDSPISSIPGIGTWLGAIIISEIGDITRFSTSTKLLAFAGLDPSVRQSGNFNATNTKISKRGSKHLRYAINRAAQLIIWNDDTFYQYYTTKLAQGKSYLNAIGHVSHKLTRVIFKLLTTNTTFKK

SEQ ID NO: 260657 - protein, 344 aa, unidentified
MKSLAWQLVFVGLDYHQSGVQVCVMDGAGRVLCNKKVANSWGEIGTLVSRFGGRVQAGIEACGGAANLARELTERAGWSISLAHPGYVARMKQNPDKTDYSDARMLADLVRVGYLPKVWLAPEAIKELRRLVRYRQQLADARRSVKLRIRGLLRDERLLLSREEAGNAWTKPWLKLLRDYPKLQDISRWVMNCLLNDLERLVTNLRVAEARLAEVVANDVVVTRLLQQPGIGLITAATLRAEIAQFERFRTGKQLARFCGLSPRNVSSGTKQADAGLIQAGNSGLRTVLIEAAHRLVRLDDRWAALAARLGTKGKPRSVIVAAVANRWVRWLFHQMQPELSTVA

SEQ ID NO: 260658 - protein, 314 aa, unidentified
MQKLNIGVDVAKDEVVVGCDEQVFAAHSVPNQRTALMAWLASLPCGSRIGMEATGCYHELLADLAHQSGHAVFVLNPKDTRHYAQAVGLRAKTDRVDALLIARLIAHEHARLHPYHPATCAQRQLGRLLRRRAQLVKLKGALKQSMKGMTGLARDTSALVAQMDALIAKLEQGMDTLIASMPGTQEDRRKLETINGVGAVVSAALIEPLTRLPFRSSDAFVAFTGLDPRPRDSGRKVGKRRLSKRGPAELRRLLFNAAMAATRTDVWKPIYEHYRAHGLPTTAALVVIARKIARIAWSIHRYHTSFDPQRLKTP

SEQ ID NO: 260659 - protein, 404 aa, unidentified
MRLFVAIDVSSEKLDVCFLDSHDTVLKEICLSNDVNGANAIKEDVLHFHQLYNYEKIVIGMESTSVYSFHPSMFLTEDKDLRALDVEVVVQNPKAIHRYKKLFEEDKTDKIDAFRIADFLRIGRYNKFLIKEEKYVALQRLTRSRYQLVHQQTECTQHFLENLYYKCNTLSKELNTSVFGATMMEILSDSLSLDEIAEMDLEALATLLQKKGKGRFSDPEDLAKTIKKAIRDSYRLGKVVQDSVDVVLATYARLIQTLKKQIKEIEKSITALFEAIPEARYLTSVPGIGVVYAAGIIAEVGQIERFENEAQLAKYTGLYWKKSQSENFESERTPMTRTGNQYLRYYMVEAANSVQLREATYRAYYLKKYDEVPKYKHKRALVLTARKLVRLVDVLLRNHQLYMP

SEQ ID NO: 260660 - protein, 462 aa, unidentified
MHKREKKGRANSTKPSRRSLPVIRPKVAGIDIGSREHWVCGPALPGGEANVRVFFTTTPALNELADWLIEQGVESVAMESTYLYWIPVYELLESRGLEVVLVNARQLHNVPGRKTDMQDCQWLQLLHSCGLLRGSFRPGESICRLRSLHRQRCNLIEQRSRTVQWIQKSLDQMNVQVHRAVADITGKTGMRIVRAIVDGERDPLKLAALRNHRCKKSEEEIAEHLTGTWRDEHLFNLASALRLHDTLQAEVERFDQRILEVLIELQPPQRRDLNVPAHPNPQKRYDMKLRGEQAQRNELWRFAGCDLTQIDGISPSTAAIILTEIGIDLSDFPSEKHFVSWLRLVPRRPISGGKQLPKRRNTTGSNRIAGALRMAAVSLSRSKTALGAYYRRLARRKDGKTAVFATARKLAQLVFRLLRYGHTYIDIGERVFEERFRQNHLNGLRRAAEALGYSLAPRASGV

SEQ ID NO: 260661 - protein, 334 aa, unidentified
MENIALIGIDLGKNSFHIHCQDHRGKAVYRKKFTRPKLIEFLATCPATTIAMEACGGSHFMARKLAELGHFPKLISPQFVRPFVKSNKNDFVDAEAICEAASRPSMRFVQPRTESQQAMRALHRVRESLVQDKVKTTNQMHAFLLEFGISVPRGAAVISRLSTLLEDSSLTLYLSQLLLKLQQHYHYLVEQIKDLESQLKRKLDEDEVGQRLLSIPCVGTLTASTISTEIGDGKQYASSRDFAAATGLVPRQYSTGGRTTLLGISKRGNKKIRTLLVQCARVFIQKLEHQSGKLADWVRELLCRKSNFVVTCALANKLARIAWALTARQQTYEA

SEQ ID NO: 260662 - protein, 344 aa, unidentified
MEYFVGLDVSLRSCALCIIDGRGKVCMERELPCEVDDIAICLEGFPYPIERIGFEAGALSQHLYFGLQDKGFDIVCMEARQVSAALSAMRNKTDKTDAKGIAQILRTGWFSPVHMKSREAHGVRALLSTRKALLKKTMDLANEVRGLLKIFGVRLPRTVKHGSFDALVRPMIEMDEVLAHAIIPLLDARAVLFQHYLELDRRVKRAASQDVVCMRMMTVPGVGPIAALTFKAAVDDPHRFKRSRTVAAHFGLTPRRYQSGEHDNPGRISKAGDRDVRATLYAAANALLMRTMAGSQIKSWGMRLMRTKGRRRAVVAVARKLAVLLHRMWIDGSEFRQEHIGGAT

SEQ ID NO: 260663 - protein, 398 aa, unidentified
MLMIKITVWALPHTKWRHYMKIITRNEKILYIGIDVHKDIYSLCCFDFHKNELSDEMTIKATTKAVIKYLEAIRKKHKEEILFACGYETGPTGYGLCRGLQKAGYGCVVMAPTTMSNPDGKRRVKTDRIDARAIARILAYKSYSQVHLPSEEMEALKEYTRARDAKKRMFKKAKQELLSFLLRNGKTYPESGNYWTEKFFKWIKTVQFSEKWMQEAFNEYLAEVYSLKHKIELMDAKIKEIAGLEIIKDKVDKLVCFSGIDVTTAVETVVEIHDFTRFATAAQFVSYLGLCPGEDSSGKTKNMLPLTKAGNKRVRALFCESAKAIKRTNPYGQKSKRILERQKNASPEIVAYADKATKRIRTKMKHLEERGKNYNVSSAAGARELACFVWGMMNGKIA

SEQ ID NO: 260664 - protein, 389 aa, unidentified
MLEPFNPSKSLAALEQDSTVIAVIEMSQSRWLVAAVIPGIERQPLKKIDPDEELLLKLLHRWQNEAGRAGREIKRIVAAYEAGRDGFWLARWLRARGIEAYVIHPTSVAVSREHRRAKTDRLDTELLKRAFLGWLRGEKRHCSMAAIPTLEEEDTRRPNRERENLVTERTRLINQMKAILVRFGIRTFKPTLRKAEEKLEGLRTAEGTPLPQNTRAEMRRQLARLRVVREQISAIERERLRKLAAAPAEERGPHAMVRLLARVLGVGVETADMLVNEILLRHLRDRKAVARYAGLTGSPDESGRRRRERGLARAGSARVRCGMIQLAWRFLRFQKDSALAQWFRARTTDGRSATRKIMIVALARKLLIALWRLVTMGEVPRGIILRAAS

SEQ ID NO: 260665 - protein, 340 aa, unidentified
MNIKRIGLDLAKNIFQIHAVDHHEHVVLRKTLRRDRMIAFFTQLTPCLIGIEACGSSHYWARELTRLGHTVRIIPPQRVKPYLKGQKNDANDADAICEAISRPGMRFVAVKTERQQTLQAEHRVRARLIRARTALSNEIRGLLAEFGLILPTGIRQLRKALPEILSQQEQWDDRFMRLLCELSEELKILDERVARHDGRLQQAARDDIRIKRLLAIEGMGPVVASALVAAVGDGRQFKSGREMAAYLGLVPRQHSSGGKERLGHISKRGDSYLRTLLIHGARAVLNACKNKTDRRSQWLQALSERRNRNIATVALANKNARIAWAILSREEDYHGLQAAG

SEQ ID NO: 260666 - protein, 462 aa, unidentified
MAEWREDESRSEEARQIEGLPVVRAQVGGIDLGSQRHWVCAPGLGGRGREIADFGATTPELQRMLEWLKVRQVESVAMESTGVYWIAPQEVLEAGGLEVLLVDTRQLARVPGRNKKTDPSDCEWIQRLHSCGLLTGAFRPPEQVGMLRTLVRDKANLVAEAGDWVRRMQKSLDQMNVRVHRAVSDLDGVTGLAIVRAIVAGERDARKLAQLRDRRCQKSEAEIAEQLSGHWREDHLFSLRQSLKMYEATQERIAAYEQEILRKLRGMTPEERAGQTAPAVKNPHKANAIRKRGEEPRRQAWYRMSGVDATQIDAIGVGTIEVVLSEYGPDLSCFPTEKQFISHATLAPHVPRSGGKVVKKKKRYSASTRVAAALRMAALALRHSPTALGAYYRSLARRIGGDVAVFATARKLATLIYRLLRWGQPYVDEGAQAFEERYQQQRIRSLTARAKELGYQLLPATT

SEQ ID NO: 260667 - protein, 366 aa, unidentified
MEKSITPIGTPVGIDVHKRRCKVVELDPGETKVRKPIANTREEWLEMLTELPPDAEIGLEVSTAGYFAMSVLEEAGWRERTHWVHTAGIDSNRRQKNDRLDAARLARKLAAHHLDPLPEAWFPPPQIRALRLRARARCWLALLRTQGKNHLQSLLQMHGLRAPGSDPFGAAGQKWLAQQTLPLPLPESLPQIQRLLKLLEEEIAISEKYLQAVQAQFPELALLRTIPGIGTILAPVIWSEIGTIERFRSAKALANNTGLVASYYDSGDVQVSGPLTRQGSRWLRWAFVTAANVAIQYPHPFARRYHRLRRGKKPNVAKAAIAHSLARCVYGVLKHGCPDREDRWGRKVGALEQEARRSARSTKTAV

SEQ ID NO: 260668 - protein, 317 aa, unidentified
MPIVLNVGVDVAKDTVVVASAEQRWPVQQVRNQRRALRAWLKTLPAGSRIGLESTGSYHELLADLAHAHGHIVYLLNPMETRHYAKALGARAKTDRVDALLLARMIAQEHAGLRAYTPPTAQQRQIDRLIRRRAKIVRLKSALKLTMANLKGVTSEVQAVVRKLDALLAKLDATMATMAAQSPSHQQAQQRLETIVGVGPLVGMSLTNTLERVPFRNADAFVAFAGLDPRAKDSGQKTGRRRLSKRGPAELRRLLFNAAMSAVKTKVWKPIYDSYRLHGWSSTATLVIIARKIARAAWSIHRYQTTFNPDRLIRGLT

SEQ ID NO: 260669 - protein, 340 aa, unidentified
MNIKRIGLDLAKNVFQIHAVDHHEHVVVRKSIRRAHMHAYFSQLAPCTIGIEACASSHYWSRELTRMGHTVRIIPPKFVKPYLKGNKNDANDAEAICEAISRPAMRFVAVKTERQQTLQAEHRVRARVIKSRTALCNEIRGFLGEFGVVLPVGISQLRKALPEILSQQEQWDDRFMRLLCELAEELRMLDDRVAGHDRRLAEAAREDIHIQRLMKIEGIGVITASAMVALLGDATQFKNGREMAAYVGLVPRQHSSGGKQQLGHISKRGDSYLRTLVIHGARSVLKTCAGKEDRRSQWLQSVAERRNRNIATVALANKNVRIAWAVLSRGEDYHGSRVAG

SEQ ID NO: 260670 - protein, 412 aa, unidentified
MDTMYRCCAGLDVHKETVAACVRRVDSAGRVDKRIRTFGTMTGELLKLLDWLTAEGVQAVAMESTGVFWKPVWNILEGSLGLILANARHIKNVPGRKTDVKDCEWIAQLLQYGLLRASFVPDRPQRELRDLTRHRSQLVAEQTRAANRIHKTLEDANIKLGSVATDILGVSGKEMIRALIAGRSEPNTLAELARGRLREKLPALREALRGHLTPHHRFMLGRLMDHLDYLGRQIAQFDERIEQWMVPFRAAVQRVITIPGAGLRTAQNILAEIGTDMSRFPTDQHLASWAAVCPGNRQSAGKRQSGRTNHGNRWLRAALTQAAWAASHSKKTYLSAQYRRLAGRRGRKRAIVALSHTLLVMIYHMLRDAVDYRELGHDYLDKLHPQRLTNYLVKRLESLGHTVTLTPNQQAA

SEQ ID NO: 260671 - protein, 378 aa, unidentified
MNRIIKIGMDVHTTNYTLCIFEPSFEHDGTVHCITQVKPEVKNIIHVIETFKKKHENEELNIVCGYEVGCLGYSLYHELKEKGVECVILAPTTMKTEKGGRKLKNDYRDAKMIAECLAYGGYSAVHVPTELDNSVKEFIRMRDDIKEKLKSIKQQIIAFLTRNSKQFEGKSFWTRKHIDWINTVSFSEPLLQDTLKEYMIEYNHLCDRVETLDKQIEEISLKEEYVEKVQQLQCLIGIKTHTALSLIVETSAFNRFKKGNMYSAYLGLIPGDDSSAGHENKLGITKAGNSHLRKLLVEAAQGYTRGKVGFKSKDLKSRQEKCSSEVVAYADRANERSRRKYYRMTLRGKRYNVAKTAIARELACFVWGIMTDHIDLCN

SEQ ID NO: 260672 - protein, 392 aa, unidentified
MLYLGIDIAKHNHVASLLDENAKPLFKAFSFSNTIDGANSLIEKLSNFITTTADVEVGMEATGHYWLSVYSFLVEKGYTVHVVNPIQTDGWRKGTEIRKRKTDIIDSVLIADLIRYGDFVETSLSDEDTMSLRNLSRFRNYIVSSIGDLKRKVICVLDQVFPEYQSVFSDIFGKTSRELLSHFQTADDFENITAEQLKTVLENVTLKGFLKNKISHISELAANSFGLKFCRDSFSLQLKLLIEQITFIEAQVSDVETEINIILDKINSPITTIPGIGSVTAAVILGEIGDISRFSNASKLAAYAGIDASVSQFGEYQSSSSKMSKRGSPYLRKALFNAALIAAFHDPVFSAFYQKKRNEGKHHLTAIGAVARKLCNTIFAVLKYNTPYEVQQ

SEQ ID NO: 260673 - protein, 319 aa, unidentified
MRQVIEAICRCSAGLDVHKATVTCTILREDEAGRIKKDTREYSTFKKELRGLAEWLKSREVELAVMESTGVYWKTVYEVLEEYELKVFVVNARHVKSVPGRKTDVLDSEWLSELARCGLLRASFIPPRDLRQLRLLSRYRMKLSGYLSGEKNRLHKVLEDCGIKLGCVVSDINGVSAQRMIEALIEGRLKPDEMAKLAVRRLRKKEAELELALEGNVSDRHRFLLRQIISHINWLERQIAEIDSQVVRAMRPYTKEWGLLQTIPGIDEISAAMLLTEIGVDMSRFGSSGKLSSWAGMCPGNNESAGKKRADAPPRGTGT

SEQ ID NO: 260674 - protein, 330 aa, unidentified
MKKWEFTLGVDVSKNTLDISCSELNEHVKIKNGTEGFTVFLKWCKHFKIDLKQSFLVMEFTGGYEYKLIQFCESRGILYTRIPGLAIKNSLGITRGKNDKVDSSRIAQYGEEKHKSLTPSKPLNPALVSLKELLSFRKRLVRENAGYQATIKERIHMYGGNKKDIIVKKLEQKLKGNIKNIAAIEAEMLNIVAQDEKISINYSLITSIKGIGKINGLMTIAFTENFTSFTNPRSYAVYVGVVPFDHSSGISIKGRKRVSHIANKELKQELNQAARSAMEWDKEMRSYGEEKLKTKCYKIVLNNIKFKLILRMFAVVKRGEIYVENYRNVA

SEQ ID NO: 260675 - protein, 354 aa, unidentified
MEYGAIDLHKRESQVRIVTADGEAIDRRILTTRDRLTAIFWGRARMRMLIEASTESEWVARHLESLGHDVIVADPNYGAMYARRSRRVKTDRRDAAALADACLDGNYRPAHRRSAQQRIVQAMLNVRRELTDSRTRAILIARAITRAEGVRIRSGRTETFLDRLAALELPASMRSTLLPLRSVIEVLDDELAAADDQFAKLVAEDPVAKRLMTVPSIGPITASAFVAALDDAARFDGAAQVTSYLGLVPREYSSGEHQRRGRILRSAHPHVQSLLIQAAWRMSRSSDKRTAGLRAWADAITHRRGKKVAMVALARRLARILFAMWRDNAEYQAKHIRVITGTAPAIVEGETAVV

SEQ ID NO: 260676 - protein, 339 aa, unidentified
MQLYAGLDLHSRNTYIGIMDKEFKRIFNKRVVNKLPVILDTLKPFQDQLKGIVVESTFNWYWLIDGLMDAGYDCLHLANPAAMKQYEGIKHTDDQHDSFFLAQMLILGILPQGYIYPKEERPVRDLARKRLFLVRHKTSHILSLQSLIARCSGQRVSANEIRKFTVEDLQRLLQQEYIVLSAQANLDTIVFLKQQIRQLEKAIQKKVKLSKSFQQLMTVPGIGLILAMTIMLEVGDIGRFPQVGNFASYSRCVSSQRLSDGKSKGHGNRKNGNRYLSWAFTEAAHLSRRYNERFRSYYNRKVAQANTSLATKALSNKLARICYYIMRDQVPFQDNLLSQ

SEQ ID NO: 260677 - protein, 373 aa, unidentified
MNKIAYSGNDVHKEKIMIAVYLEKGNLPEIEKRIENDKAKVQKFYKRLKQKYPNIKACYEASSSGYVFYRWLKEIGVECEVIAPGLIPKKSSDRIKTDRRDAQKLGRLYRAGELTAVHVPEEEEEAVRSISRLREQLVRESGRSKQYILKFLRARGFIYRESNNWTQKHWSYLKGIRFDKEQEQYTLDSHIRLLEYKQIELEEATKKIEEIARSEKYKEPVQKLRNYRGIDTVTAMGVMSEIIDFKRFANAKSIMSYVGLIPGERSSGEVRKQGAITKCGNSRVRRLLIEAAWHYRHKPGITKPLQKRLKGQPVEEKQKSLKCQKRLHARMFHLLAKGKNKNKVTTAIARELIGFIWATMTNSEKNEKELVTV

SEQ ID NO: 260678 - protein, 349 aa, unidentified
MRCFQPPAETRFYAGVDLHARSLYLVVLDRDGQTRFGRNLPAQPEPFLRAVEPFRDGLLVACECVHPWYWLADTCRDHQIAFVLGHAWAMKAVHGSKTQCDRQDAFAIARLLKGGNFPPAYAYPRERRGLRDLLRARLRLVRQRAELYGHVHTARRQANLPPVSSDVKYKGKRAAITADIADPFVRRRVETDLALLEPLDTAIRRLEAEIEEAAQEHYPAELAVLQSTPGVGPVLSLTILLEIDTIGRFATRQQFCSYARLCGAAQESAGQRTGTGNRKAGNAWLKWAFSEAAVLSAQKDERIGRLLERLASRLGKAKALSALAHKLGRAFYHMLHTKEVFDVNRFVRH

SEQ ID NO: 260679 - protein, 358 aa, unidentified
MVDKVTEAAVVGGVDTHKDLHVAAVVDQNNKVLGTQYFSTTRQGYRQMLAWMTSFGTLKRIGVECTGTYGSGLLRYFQNAGLEVLEVTAPDRMERRKRGKSDTIDAECAAHAAFSGIRTVTPKTRDGMIESLRVLKTCRKTAISARRVALQIIHSNIISAPDELREQLRNMTRMQLIRTLGSWRPDASEYRNVTNVYRISLKSLARRYLELHDEIADLDVMIAAIVDELAPELIKRNAIGYESASQLLITAGDNPQRLRSESGFAALCGVSPVPVSSGKTNRYRLNRGGDRAANIALHIIAIGRLRTDAKTKEYVARRVAEGHTKMEAIRCLKRYISREVYTLLRNQNRRINSIPITA

SEQ ID NO: 260680 - protein, 365 aa, unidentified
MKKTSTVRVNGKMIFKGHKLTIGLDLGDRWSNYCVLDDAGEVLLEQKLATTAEAMKQAFERISRSLIALETGTHSPWVSRVLRELGHEVLVAHAQKVQLITKSNRKDDRHDARTLARLARIDPELLGPVRHRSAKAQIHLTVIRARAELVSARTALVNAARGLTKSYGERLPKCSTEHVRELAAKLSAELREVLEPLLKEIESLNERIKEYDARMEEIARESYPQVALLKQVKGVGTQIALTYVLTLDDPHRFAKSREVGCFLGLKPGRRDSGESQPQMHISKEGDRYLRTMLVQGAHYILGPFGEDSDLRRWGLRLAERGGKNAKKRAVVAVARKLAVLLHRLWVSGEVYEPLRNNRKAMRAVA

SEQ ID NO: 260681 - protein, 337 aa, unidentified
MNYSGIDLHSNNSVVSVIDETDRVVAEKRLPNELAKVLTFLAPWQAELAGVVIESTYNWYWLVDGLQAAGFVVHLANTTAIKKYDGLKHSGDETDARYLAHLLRLGILPTGTILPPQRRAVRDLARKRMQLVRSRTSHILAVENITARQFGKRITSNQVIRLDEETIKQMRLPEDVALALRANVAVITTLSAQIAIVEKRLQQKVAPDADYTLLTTVPGIGQTLATVILLEVGTIERFASAGNFASYARCVDSQRISNGKKKGEGNTKNGNPYLSWAFIEAANFALRYCAEAKRFYERKKGKTNTILARKALAHKLARACFHMLKEHKPFDMTRCFA

SEQ ID NO: 260682 - protein, 332 aa, unidentified
MTSSIIHIGLDISKRFLDLDLPNSSASLPYDPKGCKTLIARLRALKASVEVICEATGGWEHQIVAALHEANIPVSVVNPRQVRDYARSMGKLAKTDKIDKQILTAFGKVVLPRPTPPPTALQAEISAWVTRRQQLRGMLAAEQCRMMPGLPKAVAKSITASIAQLTKELEAITAQLAKLIEEDAQLAAGKERLCCFQGVGFVTAAVILGHLPELGKVDNNQIAALAGLAPFNNDSGPRRGLRHISGGRHSVRSAIYMAAFNASRCNPVLKPFYDRLRAKGKAFKVAIIAVARKLLIALNTAFANPRFTPLITTPECSPRTPAAASGAGFGGA

SEQ ID NO: 260683 - protein, 388 aa, unidentified
MNVGADKSELLTAIHTDLGAIFVSLELSRSSWLITSLSPGGGEKMSKHSVRGGDFAGLMERFAQLQEKARLRTGQSFRIIVIQEAGLDGFWIHRALQNEGIESHVVDAASIATSRRRRRAKTDKIDGETLVRALLAYKRGEPRVCAMIKVPTPSEEDRRHLCRERKALTAERVRHVNRIKGFLFSQGISGYQPLRRDRRQRLEELQTGDGRAFPQHLKALVNRELDRLELLLKQIKTVEAARDALLAAEQTAKPASAAMLLDIRGIGPEFAAILWSEGLFRHFENRRQIAAYAGLAPTPWQSGAVDREQGVSKAGNPRLRTTLIQLAWLWLRNQPRSALSVWFHERVSRNGGRLRKTTIVALARKLLVALWKYVTAGVVIEGVTMKVA

SEQ ID NO: 260684 - protein, 382 aa, unidentified
MVLSGCRINSSLTKMINYKLKAAPTAVSKEGNSQKGPKANRILIGVDVHLKSYQAAHKIDNGAVGVAQTFGSREALLLYAQKQQELAKEVVVLYEAGPLGYKLYRDLKASDIECLVCAPRSGEQKRKRRKNNSIDARTLTSDLFNYLHGNEHALQRVRVPSEAQEQARVQSRQQDALVEERKRIGAIGNSLLLSQGYGSWSNWWRPKAFERLSKEVAGWIVKHLQRWVGVLRELDQQIQQAKVELSQKWHGPRPKGMGALSLVQLLAEVLDWNLYSTRRKIGCLAGMVPSEWSTGEGQRLGSITKVGLPALRRIITEMVWRMILFQPEYKAVQKWREVLEGSNRGLKKKAVVAIGRQLMVDIWRLQTGRITAQELGLIMIEG

SEQ ID NO: 260685 - protein, 460 aa, unidentified
MPDGGENSSTRRKKQIEGLPVVLHNVAGIDLGSEQHWVCAPVAGGISREVADFGATTAELIRMTKWLQACGVKSVAMESTGVYWIAPHEVLEAAGLEVLLVDTRQLARVPGRDKKTDPTDCEWIQRLHSCGLLRGSFRPREEVCMLRTLVRDKANLVAECGDWLRRMQKSLDQMNVRVHRAVSNIDGVTGMAILRAIVEGERDARKLAKLRDTRCHKSEEEIAEQLSGHWREDHLFSLRQSLKMYDAIQQRLADYDREILQRLAAMQREEFRQQPPPPVKNPQKAKNMKKRGEEPMREALFRMSGVDLTVIDAIGVETVQVVLSEYGPDLSRFPTEKQFVSHVTLVPHKPMSGGKPVRKKRRSSASTRVAAALRMAAVTLRNSATALGAYYRKMARRLGGDVAVFATARKLATLIYRLLRWGQPYVDEGVEAFERRYQETRLKNLKAKVKELGYELVASN

SEQ ID NO: 260686 - protein, 343 aa, unidentified
MQEPYHYVGLDIHKRTISFCEKRADGQTVAAGAFGAKRESMQQWAEARPTPWVGGMEATLFTGFVYDVLTPYAVDLQVGHPLQLKAISCAKHKSDTIDAETLANLLRADLFPACYMASPLVRELRRVLRYRNFLVRQAVAMKNRTTGILMEVGVQYDPRRIHRQGYFNELVDSLEQTPRSVRELLRTTRAGLELFQGAQSRLLKALKQHRHLRQRITRLMSIGGVGEITALTWALEIDDPTRFSNLKKAHSYCGLCSGRNESAGKSKRAPLSKQRNPHLQSILIEAAKLAPHHNAQLAQMHSAALERGYNRNRATCAVARKLVAYLMAVDKSGQDYEARSAAI

SEQ ID NO: 260687 - protein, 351 aa, unidentified
MTEYIAFDSHKRYTWVDREDHSTRKNSGHRLEHAPGAVRDYLSGCEPGTAVAVEATGNWYWIIDEIEQAGLKPRLVHPRKAKLMMGLTNKTDKLDAQGLNRLQRNGTLPTVWIPPGPLRDLRELTRTRLVLVAQRTRLKNRLSATLAKYGAPASEASDPYGKRGRAELEKHLERLPEQTRWVSGQLLAQLDFVSAQVRQLEQRLNELVEVTPEMQWLLTMPGVGVILAATIALEIGEVQRFPSAMHLASYAGTTPRVHASGGKVRYGPLRADVNRYLKWAFAEAANSVAVNHGRCPERHVSQLYRRLRQRKGHPKAIGAVARHLAEAAFHVLRQKQLYQDPSLGRGRTSQA

SEQ ID NO: 260688 - protein, 347 aa, unidentified
MRFYTETHQYYCGIDLHTKNLYVCLIDQEGEILVHKNIKARPQALMKLIKPYLDNLVMGVECMFSWYWVADFCEDNGIDFVLGHALYMKAIHGGKAKNDRIDSLKLATLLRGGMFPMAYVYPRAMRSTRDLMRRRMHMMRKRAELLAHIQNTNSQYNLPEIGKNLRYAFNREGIAERFEHPSTQKSIDLDLNLIGFYDEQLSKVEWHIKKSAKEVDYQSLMILQSVPGIGQILSLVMLYEIHHIERFPRVQEFLSYCRLVKCKKESAGKSYGTSGAKIGNAYLKWAFSEAAVLFLRQNPSAQAWLEKLANRHNKAKALSILAQKLARAVYFMLKRNTVFNQKRFLSA

SEQ ID NO: 260689 - protein, 342 aa, unidentified
MYYIGLDVHKKTISYCVKDASGQVHQEGKVGATRRELDSWIKTLPQPRTMAMEATIFTGWIYDHLLPHAQQVKVAHPLMLRAIAAAKKKNDRIDAGKIADCLRCDFLPECHMASTQIRDRRRTLRYRHLLVRQMVQMKNRISGLLMETGVSYNKQRLHKVGYFRELLSTNEDVHESIRPLLKLSRDTVVRLQKTEYALVSSLQRDPLLADRVKRLRTVPGVGPITALAWALEIGDVARFRSIRQAISYCGLCGEEKSSADKVMRTPLSKQRNKHIQRVLVEAAKLAPRQDHDLALVYETERQKGNANRATLAVARKMVAYLLAVDREERDFVPAENYQRAAA

SEQ ID NO: 260690 - protein, 339 aa, unidentified
MNPIPVGVDIGKNVFQIHYIAPGNGEIINKPLKRANFLEYFANLEPCLIGMEACGGSQHWARSLSKLGHKVRLMAPRFAKAFNIGNKNDAADARAIWLAVQQPGNKVAVKSEAQQAVLALHRLRQQLVKFRTSQINCIRGLLGEYGEVMPASRRAFDANISAVLDRASEHVAAPLIDTLREQWSALTHLDEQISRIEQRLKQWMSTDSSAQAIGAIPGVGLLTATAAVATIGDASAYKSGREFAASIGLVPRQVGSGGRTTLLGISKRGDAYLRTMLVHCARVISVQLRSKHPWIEQLLKRRPYNVAIVALANKLARVIWAVLARGRPYQQDFVSTKPA

SEQ ID NO: 260691 - protein, 302 aa, unidentified
MVSGESRRKMIQLGVDVGKSKIDVCLLPEGPGGRKKTKVLSNGPDVARQLLDWLAVREVILSELQVILEPTGTYHEHLAYGLHEKGLRVVVASPVRVRSFATGMGILTKNDHVDAHVLALYGALRQPEAWVPPPPAIRELKALLKRRDALREDLQREQNRLEKLHVTRFSTRVEASVTKMIAALDAELLSVQQQIDDHIDNHPDLKQDMKYLTSVKGIGKQVGSNMLAVLRGNAFSSPEQAAAWLGLVPREKRSGSSVNGRSRLTKTGPADLRAKLYLSAMTAIKHNPMLRIPCSGFSTSAC

SEQ ID NO: 260692 - protein, 314 aa, unidentified
MSGKHVIGIDVGKSWLDVAVEGCERVRRHGNDAASIAALIEQFDPAEDIVVFERTGGWERNLEAALADKMIPWAVVHSQRVKAFRQVRGIKAKTDRIDARLLRDYGRDRLGELRLGRREDVTLDCLMARQRQLKAMRHAEACRLATAPLDAVRSSIEDVIVHLDKALAAIAVELARHEDEHPDLAFKEEVLCHQIGVAEQTARGLLALLPELGGLGCKEITSLGGLAPRVHESGSIRKRRGLAPGRTSIKVVLFNPARTAMRFDPQIKEFCSRLRARGKPGKVIMVAVMRKMLVRLNAQLRDAIAKAPAAAAAR

SEQ ID NO: 260693 - protein, 354 aa, unidentified
MDKTKYIGMDVHKEAISIAVLNSSGKLVMECVIETKVSTILQFFQGLSGSLHVTLEEGTWAPWLYDPLTPHVTELAVCNPRKNALLKQGSESDRIDARKLAELLRNRALSVVYHGENGLRLLQELSSSYLTIRKDLGRVMNRLKALYRSWAIPCAGTQVYAPRHRAAWLTKISEAGVRRRAELYYQLLDAPRPLHRQARKELLAEGRKHSATKLLSQIPGIGPLRAAQLVALLQTPHRFRSKRQLWKYSGLALEIHDSAQYRYAQGQLQRSKKPQPLRGLNTNHNHDLKNIFKGAAMRASTCQGPLHDFYQVLLARGMRTTMARLTLARKIAAITLILGKKGVGFDAPYLKQAA

SEQ ID NO: 260694 - protein, 346 aa, unidentified
MDHFAGLDVSVKETSVCIVDDSGKIVREVKVASEPEALLAVLKNPAYHFKRIGLEAGPLSQWLYSGLAGADLPVVCVETRHMRAVLKAQINKTDRNDARGMAQMMRVGLYRPVHVKSLRSQKLRMLLTHRKLLQSKAIAIDNDLRGTLRNFGLKVGMVGTVKFEARIRELVENLPDLAVLVEPLLIVRRVLREQISVLHRRLLAIVRDDEVCRRLMTVPGVGPVVALTYRTTVDVPARFKNSKAVGAVFGLTPSRHQSGESDRPGAISRCGDEMMRMMLYEAAQVMLVRSAKWSWLKAWAMKIARHRGMKKAIVALARRLAVIMHRIWVDGTEFRWTREQGAAAAA

SEQ ID NO: 260695 - protein, 395 aa, unidentified
MRKPRPRNRSQRKPNDLSRSLAALDMDRTLIAVIEMSASRWLVAAIVPGVERQPLKKLEPDEHALLALLQRWRSEAERSGRTITSIAVAYEAGRDGFWLARWLLAQGIEAHVIHASSVAVSREHRRAKTDRLDTQMLKRAFLGWLRGERDHCKMAAIPTLAQEDARRPGRERESLAGEATRIVNRLKSAFARLGVRKFNPKLKKASERLNDLRTPEGEPIPPNTLDEMKRDMERRQLICEQIRKIEQERLKHLARAPDTGPHAMVRLLARVIGVGIETADTLVQEMLSRHLRDRRAVARYGGLTGAPDSSGSINREKGLSRSGNARVRRCMIQLAWRFLRFQKDSALAQWFFHRTGSARGMRKTMIVALARKLLIALWRLVHEGAIPEGIVMRPA

SEQ ID NO: 260696 - protein, 324 aa, unidentified
MNIVTVGIDHAKNVFALHGVDQYGKAVFIKPKVARSQLLEMVAHLPPCLIGMEACSGAHHWARDFSRFGHTVKLMAPKFVAPYRMSGKRGKNDAADAAAICEAVTRPNMRFVPIKDVDQQAILCLHRTRQGFVEERTALYNRLRGLISEFGIVLPQKVERLRREIGAHLEALPGWANRCVGDLLAHADRLNERIEEYDKAIAQAARQDARSRQLMQLPGIGPTTASALVASLGGGHDFKNGRQLAAWAGLAPGQYSSGGKARLGRITKAGDAYLRSLLVMGARAVLAGLGDKQDRFSRWARSLVERRGYWKAAVAIAAKNLRLA

SEQ ID NO: 260697 - protein, 409 aa, unidentified
MEILYPRCGGLDVHKDSVVACARIQAGKEVHREVATFATTWQGLLALSDFLRQFGCTHVAMESTGVYWKPVWHVLEGSFELILANAKDIRNVPGRKTDVKDAVWIADLLAHGLIRGSFVPPTPIRELRDLTRTRTQLVREIARHTLRIQKTLEDANIKLASVLTDVLGASGRAMLEALIAGETDLEALASLRRGRVKASGEELVQALRGSVRDHHRFLFQLHLGQIKASETAVADVEARIGKILEPFRQRVELLKTIPGVSETTARVILAEIGLDMSRFPTSGHLVSWAGLCPRNDESAGKRHSTRLRQGGAWLKSALVQAAWPASRKKDSYTRSQYLRLKVRRGPKKAVVAVAASILTTAYFILLRAVPYADLGPSFLDQRDRERTAKRLIRRLQDLGIQVEIKNVAA

SEQ ID NO: 260698 - protein, 344 aa, unidentified
MKVTTVGIDLAKNVFQLHGVNEFGKTVIKKQIRRDQMAEFFVNLPACLIGMEACGSAHHWARKLQGLGHTVKLMAPQFVKPYVKTNKNDAADAEAICEAVARPNMRFVPTKNIEQQAVLALHRVRQGFVKARTAQANQIRGLLGEFGLIVPQGIGYIASRVPELIEDASNELPGSFRLLVQRLLDHLKELDRQVDELESQIVKWHRQSDASSKLAQVPGIGPITASALVASLGDAKNFDGGRQVAAWLGLVPKQHSSGGKQNLLGISKRGDTYLRTLLIHGARSVIYRAQQKPESCSWINGVVNRRNKNVAAVALANKNARIVWALLAHDREFRSDYAAAKAAP

SEQ ID NO: 260699 - protein, 322 aa, unidentified
MSDSVTVGIDVSKLTLDVHVSPAQLCQTVSNSDAGFAELKTLLSMQQVSLVLLESTGGYEGAVVCFLQSLGYDVSVINPRQARDFARSMGRLAKTDRIDAELLAQLASVIDSRPDRERFVKKITDDRRRKLACMVARRRQVVNLISTEQQRKSAASQYSIESINKVLSFLRAELKSIDADISLHVRSHFADISGLLASFKGVGPATIGVLLGEVPELGRLNRRQISALIGVAPFNRDSGFMRGRRTVWGGRTMVRNALYMPTLSAVRFNPVIRDFYTRLISQGKPRKLAQVAAMRKLLCIINAMLSSGTVFNPALHRKQEAQ

SEQ ID NO: 260700 - protein, 391 aa, unidentified
MVCVGIDVAKDKHDCCILNSDGTIRADCITIPNNMDGFKQLLQTIRDCTKKSDKIKVGLEATGHYSYNILGFLLDNDLAVYVMNPLHTNLYRKSLSLRKTKTDRVDARTIATMLLSDVDLKSYTDTAYHNEELKSLTRYRFDKVRERAKLKQSVSRLVTILFPELEKLVPSLHIASVYALLSEYPGAKQISEIHLTKLTNLLATASKGRYGKDKAIQIRDAARTSIGSVMPAKFLELKHTIKLIRELTSEIDEIEVSIQKIMDELNPPILSIPGVGIQSAAMILAEIGDFSNFESPDKILAYAGCSPSTYQSGKLTNCYAHMEKRGSRYLRYALYNATKYVCHWNPVFAEYLAKKRAEGKHYNVALSHATKKLVRLIYALQKSGKAYLVAA

SEQ ID NO: 260701 - protein, 329 aa, unidentified
MDYLCIGIDVSAKKLQVASDDAEFEVENTPEDHHKLIQRLRRAGRRARVCLESTGVYGLDFALALDRAAGIEVMVLNPRAARNFARALMQRSKTDPIDARVLREYTRRMDFVPWHPPTIEKLELRALARRIASLTQMRTQEKNRLHAATRCAELKVICNDIEVNIRHLDRRIEQLENQATKLIEKHPHLHVPIARIVSVKGIGLHSAILIWGELCVLPHDLTARQWVAHTGLDPRHVESGAFKGQTRISKAGNKYLRAALYMPAHNSIQWEPHIGAFADHLLENGKTKMQAKVAVMRKLLHAIHGMLKNNAAFDGAKFYAGIPCARVAK

SEQ ID NO: 260702 - protein, 369 aa, unidentified
MKKIVTYVGLDVHKDSITIAFADEGREGEVRVYGKISNDMGQIDKVMRKLISKNCELHCVYEAGPCGYPIYRHLTNKGIDCVVVAPALIPKKSGDRVKNDRRDAVKLATLHRAGELAAVYVPDQEDEALRDLVRARSDIQKALRKVKQQTNAFLLRHGINFPGKTKWSKAHLNWLATIKMPHPAQQIAFTEYLDALANSEARIGRINTQIVSFCQTWRLQPVVEALQSLRGISLISAVTVVAELGDVTRFDHPAQLMAYLGLVPSEHSSGDKTKKGGITKTGNTHARRALIESAQAYRLPARKSPTIRKRQEGLSQDVLDIAWNAQLRLCHRYRRLIAKGKKHNVVITAIARELAGFIWAIVRVVPLAV

SEQ ID NO: 260703 - protein, 441 aa, unidentified
MAVRKRVLEVAYPNAAGIDVGAKSHFVAVPADRAETSVREFTSFTDDLNRLADWLQACGVDVVAMESTGVYWIPLYELLSSRGFVVHLVNARHVKNVSGRKSDVLDCQWLQQLMSYGLLSGAFRPEDAICHLRALSRQQQMLTRYQSRHVQHIQKALAQMNVQLHNVISDITGETGLRIVRAVLAGERNATKLAALRHRGILASEEDIVRSLQGNWRDEHLFALRQAVTLYDAYTQALQDCEVAIAQQLDKLSRVTVDEPAAPKRGRKPSSQSHRLRLALHRAVGVDLTRIDGIDVSTALKVLAEVGFDLSRFKSAKHFASWLGLCPGTKISGGKVLSGASKRTANRLAQALRMAAMTLRRSQSALGAYHRRMLGRLDKAKAITATAHKLARLIYTMLTKGTAYVDQGQTYYEERYRERVVNHLHKKAASMGFALVPITAA

SEQ ID NO: 260704 - protein, 347 aa, unidentified
MNFYGTEHKHYCGVDLHARTMYVCIVSQQGVVLLHRNLPCDKLKFLAAIKPYRDDLVVGVECIYTWYWLADLCAKEGIAFVLGHALYMRAIHGAKAKNDRIDSHKTAALLRGGLMPQAYVYPPEMRATRDLMRRRLHFVRERSSLLAHIQMTHHQYNLAAPGKRISYRTNREGLGEGFEDQSVRDSIAADLVLVDQYEKVIGELELTVLKQGRVHDPNAFRLLTTLPGIGRVLGLTILYEIHDIRRFPSVGDFASYSRLVKCEKSSAGKKLGTSGAKIGNVHLKWAFSEAAVLFVAKCEFGKKLLARYERKYGKPKALSILAHKLGRAVYFMLARNQAFDLERFSKS

SEQ ID NO: 260705 - protein, 338 aa, unidentified
MEHFVGIDLHSNNSYIAIIDNDNKRVFKKKVKNDLQNVMHVLEPYREQIKGIVVESTYNWYWLVDGLMDAGYKVHLANPSAIKQYEGLKHADDVTDAFHLANLLRLGILPEGYIYPKEERPVRDLLRKRLQLVQQRTALILSFENLLSRNLGRRINVDEINKLTEEDVEDIFQQEYLVLSGKASIATINFLGTRIQQIEKAVHKVAKLRREYKPLMTVPGIGKILALTIMYEAGPMERFAKVGNYASYCRCVGSKRISNGKQKGKGNRKNGNKHLSRAYVEAANYALWNYEYVKRYHQRKMAKTNNVVARKAIAHKLARACYYIIRDQKEFDPGKLFV

SEQ ID NO: 260706 - protein, 453 aa, unidentified
MKKLSMEIVNPNAAGIDIGSRFHMVAVNQNVDDVKEFGVYTEDHEAMIIWLKENSITTIAMESTGSYWQTLFSALQRAGFEVILVNGQHTKNLKGRKTDVQDCMWIQKLHCLGLLNGSFLPGKYVEQLRTYYNHRQHLIEHCSKYINKMQKSLRLMNIRLDVVINDITGKSGRAILNAILSGEREPTVLASFANVWVKKSKEEIAKSLHGNWREDLLFELQECLSLYDIYCGKLAFCDEEFDKVLQFAKSIDMRLPIAIPSGRVVRDRSKHAPVFNVRKLAYMHLGVDLFDIKGVSHNTVLCIMSNMSREEMKKFPTVKNFTSWLRLAPNNKKTGGKIISSRTPKGKNQIALALRQASNSIGNQKDHPLTHFFKRVAYKKGRVAAITATARKLAVIIYHMITKQQAYEPINSEQVIARIKKHQISNIKQRLNRLNLTPNEFNDIVKSVSLSAN

SEQ ID NO: 260707 - protein, 391 aa, unidentified
MIYIGIDVAKDKHDCFITNSDGEVLFPVFTIQNNRNGFDDLFSKIQSISSDVSNIKVGLEATGHYSYNLLGYLIDKGLPTFVINPLHTNLYRKSLSLRKTKTDKVDARTIAMMLMSDVNLKSYSDTSYHNEELKSLTRYRFDKVQERAQLKQSVSRLVTILFPELEKLVPSLHLASVYALLSELPSAREIASCHLTHLTKLLENASKGRYSRERAIEIREAARVSIGSNMPAKSLELRHTLRLIGELDSEITEIESEIKRIMDQIPSPILTIPGIGYRMGAMILAEIGDFSRFDSPDKILAYAGASPSTYQSGQMESSYSHMEKRGSRYLRYALINAAKYVCHWDETFGAYLQKKISEGKHYNVAITHATKKLVRLIYAMEKSGKPYIKMA

SEQ ID NO: 260708 - protein, 418 aa, unidentified
MKVVFPTCCGVDIHKSFLVATIIKTPQDSLQPIYQKKRFSMFNSDLNRFADWLHENDCMDVCIESTGKYWIPAFNILEKRGVRVIIANPKWVKAVKGNKDDTKDSKRIGDLFRIGLVKSSFIPDKDIRILRELTRYRYKLISMRSSEKNRFQNAFTVCNVALDSVVSDMFGKSAAAITDYLTSDEDFDPQHCVSLLQRSLKKKADDVLESIEGDEITQEQKTRIGIVRDHLHYIGSLVERVDTCIDTMVNRYEGYIILLCTIPGVDRSSAITILSEIGIDMTQFGSSKRLCCWAGLTPGNNESAGKKKSVRISRAGVYLKPALVQVAHAAVKDKASPYYALKYERIAKRRGKKRAIIAIARMILTAVYVMLSNLEEWNPVDLYKVDMPEHLKEKQLAKAVKQAVRFLEAQGLTVLDSA

SEQ ID NO: 260709 - protein, 423 aa, unidentified
MNRSTLCVGADVHLDEIVLCVVDKAEGHEVCERFHVTNNLPGAQAAATAIAAIAVSLDYARIEIGWEATGMLWIPFHRYLSTEPRLQPFELELICFNPKLVAKFKDGLVLRSPKNDDRDAFDIAARIRFGELPDTYVPGDFLQGLRRLTRYRYRLSKALSQEKMRFQSYAFLKASDWKRVKPFSNVLGATSAALLTQFTVAELQEMTHDQLVDLIARRGRGKFADPTATARLVRQALRTSYPIDPRMDEMVTASLAAMWDHIRYLNRAMKRLDQQIARYIDLIPNPIITIKGLGAVITAGILAEIVDVLRFQEHKHLAQFCGLTWRKRSSAGFVSQNTRLTKVGNVYLRYYFILGANLLRQHNLEYKAYYWRKYQEVSKYQHKRALVLTARKLVRLVHALLTKNVPYVRPRTTDTDQEDDELQ

SEQ ID NO: 260710 - protein, 360 aa, unidentified
MAKARSLVGLDVHATKIVAAVLDAETGQLQVFAMTGENAKAAAFCAGLPRPVRVAYEAGPTGYGLARELIKRGVECVVAAPSKIPRASGDRVKTDRRDAEHLVRLLLAGKLHAVRVPGDEEEALRDLVRARDAVRMDLMRCRHRLSKLLLRHGIRFEDGAAWTQRHRDWLATVTLQWAAAQATLLDARGAVDALAHRRDSLEREIVAMLPSSPWVVQVGRLRCLRGVDTLSAVGLCAEIGDFERFARPGKLMSYVGLVPCESTTGQQRRLGAITKTGSGHASRLLVEASWHYRSRPSVGRALTDRQQSQPPEAIAVSWSAQQRLYRTWTRLEARAKRRTIIAVAAARELAGFCWAITQIE

SEQ ID NO: 260711 - protein, 347 aa, unidentified
MKFYTTLHKYYCGIDLHAKILYVCILDQQGNKLVHQKIGADPLALLRLLEPYIGDVVVGVECMHCWYWVSDFCQTHEVDFVLGHALYMKAIHGGKAKNDKIDSYKIATLLKGGNFPLAYNYPKEMRATRDLLRRRTGVVRHGASLKAHVVNTDSQYNLPAQSLNLKNVSAREHLRHHYDDEVVQRTIELDMVLLDCYAKELAKVEYFIEKQAKQHHGTYLYIIRSFPGIGQILGLTILYEIGHITRFKSVQNFASYSRLVKCKAESAGKTYGTSGNKIGNGHLKWAFSEAAVLYLRGNDKAKNYLNKLQRRMSKGKALSALAHKIGRCIYFMLRDKTAFDEKKFLKG

SEQ ID NO: 260712 - protein, 388 aa, unidentified
MTQASSSLSPPITLDYENTLVLAIELSKTKWVLSAQVPGLLRVKAKQTIEPKAEALLAAIDGYRNRSRAVGRTIERVVAIYEASWSGFWLARWLGRHGVETHVVQPSSVPVDRRARRAKSDGIDAELLLRTLLAWLRGEPRVCSMVPIPTEADEDERRRVREREDLMAERVSLVNRIGAVLATLGVGDYNSLRRDRRTRLESLRTALGDPLPPHARARIRRMLDRLDLVCAQITELEQERDAVLDKEAPDRAEKMIQQLVELRGIGVQSATVLVREAFVREFANGKALGSYAGLTPTPFSSGATEREQGIDKAGNRRLRTVMIELAWLWQRYQPGSAQVSWFRERVGGTGRRMRKVMVVAMARRLLIALWRFATQGVVPEGAIVNPAG

SEQ ID NO: 260713 - protein, 335 aa, unidentified
MKDVAAFCGIDIAKHLISVHLENEDRKVISQKNMRRDSVLTFFSNMPPCLIGIESCGGSQHWARELRKFGHDVRLMNAKYIIPYRRKGKNDLNDAEAICEAVSRPSMKFVAVKTEQQQSILMVHRLRQQCISHRTSLSNQVHAYLLEFGISLPKGAKAIHKNLSAIFENCELHPLVVEMLHELLAAIAREEEREAYFNKRIADWVKHDERAKALLKLDGIGPLSASAIVATAGDPSSFKNGRQFAAWLGLVPRQYSSGGKSKLGGITKAGDRYLRTLLIHGARSVLLMASRGKGQQREWVNQLRMRRPENVVAVAMAAKQARMTWAIMAGKVVLN

SEQ ID NO: 260714 - protein, 337 aa, unidentified
MIYVGVDLHQRFCYMTAMDASGAILDHRQVPNDQASFLQYFQQWSKPLQVAVEACSFWQAFVDRVEPLVTRLTLVHPQRVKAIASAKLKNDRVDSETLAHLLRANLLPESWIADRKTRELRQQTRLRVSLGQARAQWKNKVQAVLHQQGLRPPVSDLFGRKGRLWLGEQRLPVAARQSVDTYLELIDHLDQKISWEEQQLRARAETDSAVRHLTSIPGIGAYSAAVLLAEIGDVHRFSNKRQLFSYAGLAPRVRESAEHKRSGHITREGSRNLRWILVEAAQVAPRCSPGARHYFERLARRKPRKVARIALARKLLGAVYALLRDGVCFDEQVFAAV

SEQ ID NO: 260715 - protein, 370 aa, unidentified
MGNRSMFVGLDVHKETIDVSIAEGQREGEVRHYGVIASDLEPLDKVVRALRAPDRRLHFVYEAGPCGFGIYRHLTKRGEDCVVVSPSMMPKRSGDRVKTDRRDSQMLARLHRAGELHAIYVPDDADEAMRDLVRAREDAVVVGTQAKYRLKAFLLRQGRRYPGRDGWTLPYRRWLTDLSFPTAAQHITLQESRDTIDETERRIERVTEQLRQLTPTWRWAPLVRALQALRGVSFITAVALVAELGDLTRFGHPRELMAYLGLVPSEYSSGPSVRRGGITKAGNPHVRRLLAEAAWAYQGIPRIGRQHAYRQEALPKIVCDIAWKAQLRLTARFRRLVARGKAKPKVATAIARELTGFMWAIAQEVSPASS

SEQ ID NO: 260716 - protein, 460 aa, unidentified
MASSNKSARAVPVKSAASLPVVNPHAAGIDIGSKGTFVCVPSDSCEEPVARFEMFTEDLLDLSKWLKDCGVRTVAMESTGVYWIPLYQILEDQGFAVTLVNPYYPKKPTKSDVHDCQWLQYLHAVGLLNPSFRPPAQICAIRSIIRHRSNLVREASAHTLRMQKAMTEMNLLLHNVISDIAGVTGLAIIDAILAGERDPSRLALLRDYRIKAPPERIEKSLQGDYREEHLFTLRQCLGAYRFIQSQMMQCDAQIATMLARFDSAVEVEKRPIPQSTRPRLKSGANAVVLPNGDLRFELYRILGVDLTQIPGVQASLAHALYCEIGDDMSRFPSEHHFASWLGLCPNNRITGGKVLFTRTKKVKSRSAQLLRTAAQATAQSHSYLGDYYRRMRARLGPMMANVATAHKIARIIYHLLTTKEPYDESAFAAISERLQQKRLKNLRKQATALGFVLAPVNAVS

SEQ ID NO: 260717 - protein, 347 aa, unidentified
MDHIAIDLGSRESQVCVRRADGEILEERRVGTRSLGKYLRGRPKSRVVLEACAEAFAVADASLATGHETVVVPASLAPSMGVGDRGIKTDVRDARNLSEASCRMSKLPMVHVPTKASRDRKAMCGMREGMVQARTKLINTVRGWTRPQGLGVVRSGAPTTFPARVMEHVAERGGTIPPYVEQVLKAIEALSVQIDEAEQAVEETAASDPTCQLLMTAPGVGPTTAVRFAAAIDSVGRFANAHKLEAYLGLTPGERSSSQRKRRTGVTKAGPSKLRWVLVQAAWAARRYYKDHSMVLWSQEVEKRRGKQVAVMALARKLAGVLYAMWRDGSQYNKEHNQSPRAASVAV

SEQ ID NO: 260718 - protein, 454 aa, unidentified
MCLADRPVLEANAAGIDIGAREIFVAVPAGRDAQPVRACATFTEDLQQLADWLVTCGITTVAMESTGVYWIPLYDTLESRGIKVCLVNARHMKNVPGRRTDWHECQWLQYLHSVGLLRGGFRPEVDVTGVRTVMRHRHELVQMSSQHVLHIHKALTQMNLQIHHVIDDITGLTGLAIVDAILAGQRDPVELAKLRNWRIKADEETIRKSLVGNWREEHLFTLRQSRELYRTYQQQIVKCDQEIERLIGGFEPRVDPEKKPLPADRKRYRSEKKRAKKNGRLETEFNLRTEAYKIFGVDVTQIPGLETMALPLFGEVGRDMSKWPTAHHFASWQGLCPDNDISGGRVLWKGTRRVHNRAGQMFRQAAYSLHHSLTPMGDYLRRMKTRLGPAAATTATAHKIAVIFYTMVKNQVEYDETIWATRDVKRQHRIEAKLKRQAQQLGYQLVPMQKKPAA

SEQ ID NO: 260719 - protein, 387 aa, unidentified
MPQPNDLSRSLVALDQDSTLIAVIEMGQASWLVAGIVPGVNRHPLKKITPDQEQLLQVLQRWAKEAETTGRMIKRIAVAYEAGRDGFWLARWLRARGVEAYVIHPSSVPVSREHRRAKTDRLDTELLKRAFLGWLRGEPDHCSMAAIPTLTEEDAKRPGRERESLVGERTRIINRIKGALARLGIREFKPMSRSAPQLLEALRTPEGAALPPNTLAELRRDMARLSFVKQQINEVERARLERLQRAPGERGNAMVHLLTQVVGVGVETADMLVQEIFSRNLRDRKAVARYAGLTGAPDESGKKRRERGLAKSGNARVRRGMLQLAWGFLVHQPDSVLAKWYRARTADARGVTRKTMIVALARKLLIALWRLATIGEVPEGLALRAAA

SEQ ID NO: 260720 - protein, 454 aa, unidentified
MAPRNRSLSMKSAKGRPAPLTITHPNAAGIDIGSASHFVAVPPDRDDQPVREFPSFTVDLNALADWLKACAVDTVAMESTGVYWIPVFELLTSRGFTVLLVNARHVKNVSGRKSDVLDCQWLQQLMTYGLLSGAFRPAEQICVLRALWRQRGTLLKGQAREVQHMQKALTQMNVQLANVIADIVGETGQKILRAIVAGERDGQVLGSMKNVRVHASVNEIAMSLQGNWRAEHLFALKQALAAFDFWGTQLAECDREIEQQLHRLQTYEGEPAKGKKRSRARNAPKFDLRTQLFRMCGVDLTRIDGIDVTTALAVVAEIGVDLSRFPTVKHFTSWLGLCPGTKITGGKVMSGKTKRCANRAAQALRLAGAALRSSKSALGAYFRRLCSRMDKPKAVAAAAHKLARLIYMMLTKGEEYTDQGQDYYEERYRERVLRALAQRAEKLGMKMVAIDCPA

SEQ ID NO: 260721 - protein, 482 aa, unidentified
MKPKQVESNKKASCRATPNHWQRMNHKQRREMLRKIQSADLSLEVVHPDAAGIDIGNESHYVAVPSARDRQPVRRFGCTTAEVKAMADWLKQCKIQTIAMQSTGVYWVSVYDILEEAGFEVYLVNANETRNLPGRKSDVQESQWLMKLHTYGLLRNSFRPSREIRTMRTYWRQRNDLVRAAGRHIQRMQKALTQMNIQLANVLSDVSGMTGQAIVKAILAGERHPYQLAALRNWRGKASQEEIARSLEGNWQEDLLFVLQQEQDGYEFCQKQMAECDQRLQQYLQQLEDRSQGAGLPEEKRKERLRKKKKGNAPQFDLRAELFRMTGTDLTQIDGIDVTTTMTILSEAGWDMSKWKTEHHFVSWLRLCPDNRISGDKIIGKGRLPTNNRVTNALRMAASTLRLSNTYLGAQFRRLRTKLGAPVAIKAMAAKLARLVYRMLRYGMPFIDRGAQFYDAQHRKLQINYLKRKAANLGFQVIEAPA

SEQ ID NO: 260722 - protein, 360 aa, unidentified
MKKVITKGSKGKAPVISRKDRVYVGLDVHKRSIYAAVRINGVEHSTAVLPPQSKAVIAFLAPYHLGLQKVVYEAGPTGFALARALKNAKMKIAVVPPSKIPRPAVRGAKSDKIDCRMLAEFAEKDLLKEVAIPTVEEESDRDIQRLRDSLVDRRRKAKQRIRSFLLLHNLPEPANLHSNWSLASIKGLQIMPMNPQQRFCMEMMLEDLMHILDQVDRVKAKLREMASEERYAMAARRLRTHPGVGETTSMQVLTEIFQPDRFDNQRQVAAYVGLAPLISSSGESRTEGPLMRGGRGALRCTLLEAAWVWIRQEKRADKLYKRLVRNTGSAQKAIVAMARRMLVNLWFMLVRKQEYRPFAA

SEQ ID NO: 260723 - protein, 406 aa, unidentified
MQVTRGYTDTKKEPHSFLLFEFEQNVRNAANAAYSEYPNQETKRREFFTFIFSFFKTISMRKIVKQVAAIDVDQKLLVTTLGRMYDDWSPELYAQKTFANTQKGFEAFLVWVKNNTVNEVSVRFVMEATGVYHEGLAYYLDDQGEEVTIVLPNKISNYMRTLETKTITDKTASEAIARFGLERKLELWKRPKDIFKKLRQLSRERDQLITERTMVKNQLHAEQAEAEPNKSSITRIKARIKMLVKQEQEIKAELSALVSSNDEIKKIVVLLCSLTGVGILTATSVLGETNGFELIRNRRQLASYAGFDVKEKQSGTSVKGKPKISKKGNKYLRKAMHLPALSAIRHDERFKAVFRRIVSRHGIKMKAAVAVQRKLLEMMFTLYKTNTPYNKEYLINKEMPTEALSA

SEQ ID NO: 260724 - protein, 345 aa, unidentified
MEIHTIGIDLGKTVFHLVGVNARGEVVVRKKCSRTQLLRFTSNLRECLIGMEACGGSHFLGRALREQGHDVRLMPAQYVKPYVKTNKNDYIDAEACAEAVTRPTMRFVPIKSDDQLDLQSLHRVRERWVVRRTAVINQIRGLLLERGITIRKGRAHIETALPGILEDPDNKLSGALRVLLTQLRLEMQYLHGQIEESDKPIVRIAGELEPCRRLVAIPGIGPITATATVAAIGNGAAFKKGRGFAAWLGVVPGEHSTGGKQKLTGTSRRGNKYLRKLFVQGAHSVLLQRTKQTSALSLWLAHLASRKRPQVATVALANKMARMAWVVLYKGEAYRPPSLPQVIAA

SEQ ID NO: 260725 - protein, 380 aa, unidentified
MKKLITAKTKRSAQAAKGNQKSELVLPAGKLTIGVDLGDRESHYCILDEAGEVVRHGKVATTKAGIGALLEKMPCSRVALEVGTHSPWVSRLVSGMGHEVIVANPHKVKLIAQSTRKNDRVDAEQLARLARVDPKLLSPIRHRGETAQADLAVIKARAGLVKARTMLINEARGLVKAMGERLKPCDVDQVKASLVESVAEELRRALKPLLKIVEEISEQIREYEREIEQMQTRYPEVELRTQVYGVGVLIALTFLLTLDDPGRFVHSRDVGPYLGLVPKQRDSGERQPQLGISKAGDRLLRSLLVQGAHCILREGSPESDLQAWGRARMGEGGKRGKKRTVVAVARKLAVLLHHLWVSGEVYDPQYNRKAREQARGQAAA

SEQ ID NO: 260726 - protein, 341 aa, unidentified
MMHVGLDLSRKRLDVQILNEQGERVRRLAAIPTADGLQDLVCLVGPYQQPARAAIESMTGARFVHDQLELAGWDVAIADGVKVKGLAPLACKTDRIDAWVLAELSRRDLIPAVWLPDPGVRAERERARWRLHLVHHRTALKNRIHQTLITFGHPCPVSDLFSVGGRKLLAGFALPQPWLGSVSAALRLIDDLNQQIADRERELRELGADHPYIPLLRTVPGIGWVLAYTIAAEIGNIHRFASPSNLVGYTGLCPSVRQSGEHDHRGPLTKHGPRFLRWALIEAAQHAARLPAYQTRYQTMKRRLGRQRGAKVATVDVARQLTKAIWHMLIRNQTFAPGGAS

SEQ ID NO: 260727 - protein, 347 aa, unidentified
MNLYNNMHPYYCGIDLHARLLYVCIIDHEGNVCVHKEISADPNKLAILLEPYIGNIVVGVECMHCWYWVADFCEDMGVDFILGHALYMKAIHGGKAKNDRIDSFKIANLIRGGNFPLAYVYPKEMRATRDLLRRRMKIVRHGADLKAHVVNTTSQYNLPPNKVNLKNARAREQLKSTFTELSVQKNIDLDMVILDCYAEQLSKVEWYIETQARQHKPIHLHLLKSINGIGRILSLTIIYEIGNINRFNSVQNFASYARLVKCKAESAGKSYGTQGNKIGNAHLKWAFSEAAVLYLRGNDKAKNYLIKLQKRMTKAKALSVLAHKLGRCVYFMLKNETVFNENRFLKG

SEQ ID NO: 260728 - protein, 345 aa, unidentified
MELSTVGIDLAKTVFHLVGLNLLGEVVVRKKVSRAQLLRFTANLSVKLIGMEACGGAHFLGRALRDQGHEVRLMPAQYVKPYVKTNKNDYIDAEAIAEAVSRPRMRFVPIKTDDQLDMQSLHRVRERWVVRRTAIVNQVRGLLLERGITLQKGRSHVDALLPRILEDADLKLSGALRNLLAQLKLELDQMAMRINEPDMMLNRTARENASCRRLVAIPGIGPVTATALIAAIGNGAAFRKGREFAAWMGVVPGEYSTGGKQKLLGISKRGNSYLRRLFIQGARAVLQQSTKQTSGLSAWLANLKARTHTNVAAVALANKLARMAWAVLAKDEPYRPPMLANLVTV

SEQ ID NO: 260729 - protein, 345 aa, unidentified
MIHRPAGEFAAIAERLAKNIFQVHGIARDEEVVFNRPLRRAQLLPFFTKLEPCLIGMEACSSAHHWAREFTALGHIVRLIPPIYVKPYVKRGKSDAIDAEAICEAVTRPTMRFVAIKTVEQQALLSLHRARALLVRQRTQLINGLRGMVAEFGVYIAKGLARVIGFAEDILVGEVLDLPEIANEVIHNLCEHLVALHARIRWYEERLKLVAKEDARVRLLRTIPGVGVVTASAIIASIGDGHQFRNGREFAAWLGLTPANKSSGGKEKLGRITKMGDQYLRCLLVVGMTSLVRQTKSHPERASKWLTSLLERKPARVATVAMANKTARIVWAVLTRNEPYTPHTV

SEQ ID NO: 260730 - protein, 356 aa, unidentified
MSEGSWVGLDVHARSVVAGVIDVGSGEVRSLRVPPGSGETVAWLQTLPGPVRVVYEAGPTGYGLARACADAGISCLVAAPSKIRAAADRVKTDRRDAERLARLLRLGEVVPVRVPGPEEEAARDLVRAREDARGDLMRARHRLSKLLLRHGAVYDATAWTREHDAWLRRQRFQGGALAIVFDECYGRMLDAKSRRDALDKAITELAATPLYVDVVERLVCLRGVSTLTAFALTVELGDWNRFRPESLGAFLGLTPSENSSGERRRQGAITKAGNTHARRLLIEAAWHQRSPSRRSITLERRRNGKPLAVQAQAERSGRRLHARWQALEARGKPRTIVVVAVARELAGHCWALATME

SEQ ID NO: 260731 - protein, 409 aa, unidentified
MQVVHEVCCGLDVHKKGVTACVLWASGRRRQTRAFGTFTRELLELGDWLRACGVTHVAMESTGVYWKPVWNLLEGLFEVLLVNAQHIKAVPGRKTDQKDSEWIADLLQHGLLRASFVPATPIRELRDLTRYRASLAQEINRIANRIQKVLEDANIKLASVATDTLGASGRAMLEAMIQGEQDSQRLAEMAQGKLRNKIPELQEALQGRVSRHHRFLLRELLDHLYFVESKMQRVEQEVAERLGPFQSEVARLCTIPGVDRVTAWGLLAEIGLSMKQFPDAQHLASWAGLCPGSHESAGKRKSGKIRKGSLWLRRCLCQGAWAVSTKKNNYLSALYRRLAARRGSKRATIAVAHKLLVIAYHILRDGTCYSDLGADYFDRLNPEGLRRRLTKRLEGLGFKVTLEPLAQVA

SEQ ID NO: 260732 - protein, 351 aa, unidentified
MRYIGLDVHKEFCQACVIDEHGRVLSNEKFSSTKDELDRFLAGFKDAKFVLESTGIWEFIYEGIEKRGFEVQLAHPLRVRAIAEAKVKTDKVDAETLAQLLRTDLIPRSWIPSKDMRDLRQLVRQRAYLVQQSTSLKNRIHAELLRRGVRRPLNFVMPFSKKSIDWMRSLEIPTVISCLNCLESVQAQIEEMNIKLLDEYNRRPDAQLIATVPGIGFYGALLIHAEIDDIRRFSHPEKLCAYAGLVPTVRQSASSVHYGAISKDGSSYLRWMLTEAVHTHTHCEPGSRLSKFHAKIARRRGKQKAVTATSRKLLLIIYWMLVRHEPYHSQGLDPGFPPARNECDIGIGAGP

SEQ ID NO: 260733 - protein, 464 aa, unidentified
MPLRLGIDIACRAAHQVSLADEQGRFIWSGRRFRTTPQDLDRLWAMLPEGTELADLLVVMEPTRNAWVPLAAWFRRRGASVVLVPPERSADLRRYYAKHTKSDRLDSQLLARLPMLHPDGLYAEQGLGPGDALKRAAKLHSTLTHRRSQSLARLDALLEILGPAWHAAIGADLANRTPLKFLAAGYADPHVVKRLGRTRLARFCYRHSRGAWGEPHADALLAAASETLELWSGGELDYPDLAEDIAIEARLALQLTEELKDLDERTTLLLREADPSGILTSAPGVATITAAAILGRLGDPNRFTSLAGARAFTGLVPSLDASGLNGRHGGPTKRGDAVLREALFMAAGQARRIDPTLAAKYHRLMIEAGKHHNSALCHIATTLLTRIIACWRAGQPYQLRDVDGTAVTIDQARAIIAERYTIPKDVRARRRTTDPAGTDRRNKRSPSAPSTGPFTTHARQAGAA

SEQ ID NO: 260734 - protein, 405 aa, unidentified
MIFVGIDWSEEQHEVEVMAAAGQRLRSLRIGHGVEGLAKLQETISEFASDPSEVVVGVESDHGLLVNALVGSGYQVYPINPLTAARYRDRHSLAGNKSDRRDAQMLANVVRTDRHQLRPLAGDSEPALEIRARARAHLRAIRLQGQLRNQLRSLLLEFYPAVVPLLAEDDIRDALAVLAVAPTPALGRGLSLSKLAATLRRHGRQRNLAPRAQEIQGRLRAPQLDLQRPRLIAAHGDEVASLTRVLLQVRQELAQLEAQMAAAFRGHPDAQILLSFTGLADILGARVLGESGDDPTRYADATARRNYSGPAPVTRASGKKREVTRRVARNRRLADATFCWAESAVRHSPGAREFYRRLRRRGQPHNQAIRVIAYKLVGKLHACLRDRTLYDEHRAWSTDLTQCAA

SEQ ID NO: 260735 - protein, 371 aa, unidentified
MEKSIMYVGLDVHKNSIEIAFAEAGRDGEVRSYGSVDGSLAALDKVIRKLVSKNYDLHFVYEAGPCGYDIYRHLAAQGFDCVIVAPSKIPKQSGNRIKNDRRDAQMLARLHRAGELTSVYIPSVEDEAMRDLTRSREDVKASERKAKQRILAFLLRHGHRYSGKSSWSRAHFRWISDIKMPHPAQQIVLQESLEALAECTCRVERLTEQIQLLSPQWRMFPVAQALQALRGVSLIVATTTVAEIGDLTRFDGPTELMSYLGLVPSEHSSGQTTKRGSITKTGNGHVRRVLVEAAWAYRLPARVSRKLLIRQEGLSQEICAISWKAQLRLCARYTRFLIKGKSKQLIVTAIARELCAFMWAIANEVQNPSKA

SEQ ID NO: 260736 - protein, 451 aa, unidentified
MSKMKPQVIEDEEHERVHERVAAVDVAKDSGMVCTRTPHPSRPGARRATMWTVKARMGAVRQLGRQLKADGIEIVTLESTSDYWRIWFFVLEACGLAVQLVHAAQAKNLPGRPKTDKLDAMWLARLTELGLLRASFVPPKAIRDLRDYTRARTRLVQERTRCWQRLEKLLEAALVKVSSVASTLTTVSAQDMIKALIGGQRDPRELAALARGRMRAKHDDLVEALDGMFDDHHGELAALLLDQIASLDAKIAQLGGRAAELAAAMPDGWGINADGTTGPGAGAAADAPVRNAVARLAEIPGLSPDLARTIIAETGLDMSRFPTAGHLVSWAGLCPATRQSGPRTRAGKKGQGDTWLRGALGQAATNAARTATFLGERYARIARRRGKAKAQVAVARSILVIIWHLLADPAARFTDLGPGYYQARTDTDRKLRNHIQQIQALGFTVTLTKAA

SEQ ID NO: 260737 - protein, 317 aa, unidentified
MYYLGIDVSKKTLDCCLLSDGFFYACKHPNTEKGFAALLEQLSEYVGEHQVHVCCEATGIYYEAVAEYLNNAGCKVSVENPRKIKGFGVAVLQRSKTDRQDAELIAKYCKAVEPPSWQPQTPEQKQLRELIRYIVRLKKQRASEKVKLAEASEYIRPHIEDGIACLERKIAVLREELRKFYREYPEMDKTHKRLCTITGIGEHSATLLQTALHKNHCFKTAHQFVAYLGLDPKQHQSGTSIRGKARISKVGNSELRTALYMPAIVAYNHNAFPRLVHNMTESGKKPMQIIVAIMRKLAVIAFTLIRDGCDFDKSKHH

SEQ ID NO: 260738 - protein, 410 aa, unidentified
MEAIIERVGGVDVGQATVVATVLVGGAHERAKKETRTFRTVTRELLEMHEWFSAKGVTHVAMESTGIYWRPVYGLLEDTFEILLGNAQHIKNVPGRKTDVKDSEWLADLARHGLIAKSFVPPKPLRPLRDLLRYRRKLMESRTAERNRLLKLLETANVKLASVVTDVFGVSGRLMLHALIDGTATPAEMAALARGVLRKKVRDLEQALDGRVEEHHRFLLRLQLQRLDHADSDLAGLDARIDEALVPYQEQCQLLQKIPGVSRVVAAVVVAELGTDMTVFRSAQHAAAWAGVCPGNNESAGKQRRAGARKGNRHLRTALVEAAVSASHKKGSYLRDKFYRLRARRGTKRAAMAIAHKILIAAYHMLSTRSPYRDLGPTYLDGIEKRRTTRNLVRRLERLGYEVTLGPKAA

SEQ ID NO: 260739 - protein, 426 aa, unidentified
MSYEKKMRLASPVQKGSNILSDVFALDVSKGHSYGVWYRDDQCLREFECVHNKIGFAQLGQMIKQADDPVVYFEATGIYSEPLVRFCQDHQLRYGRLNPLELHLHSESLRRVKTDQKDAHRIALSVLHHQYRLTTPWKPEYEQLRQLNRFYQQVIVDVKRTRLKLYTALQQTFPEVENLFSSRVSKLALNVILLFPHPDFVRGISRTCLKNKLMNQTDKKLSKAKGLKYAEKLITFAKDSYPAANSDSIQVQEVQYYCRQLIELTMQEDSLRKQMTTAAEALPQFQIYQSMPGIGALSAAQLIGELGDIRRFDNANQVNAYVGIDLNRYQSGKYTRQDHINKRGNPHARALLYVIVRNMISQKAAAPNHIVDYYYKLKKQPFPKRDKVAVVACMNKTLKCLYAMVMAGTKYRYRYTDSKSTISTES

SEQ ID NO: 260740 - protein, 415 aa, unidentified
MEKVLERCAALDVHKRQVTACAHVPDRLGERAELRAEFQTMTPDLLALRDWLKGLGVTHVAMEATGVYWKPVYYLLEDDFELLLVNASHVKNVPGRKTDVADAQWLCQLLEHGLLRASFVPPKPIRELRDLTRYRKSLVWERQREANRLQKLLEDANIKLASVATRVLGASGRAMLAELCEGRNDPEALAELARGKLRRKLPELRRALTGRFSSHHALLVSQLLSHIDYLDEAIDALSAEIEERLRPLEHKLELLTTIPGVAERTAEVIMAELGADMQRFPDHRHLASWAAICPGNEESAGKRKTGKTRKGDSWLRTALIEAANSAAGRTRDTYLNAQYVRIKRRHGHSKAIVAVAHSILVSAYYILRDGKPYEDLGGDYFLTRETQERLTQRLVSQLERLGQRVTLEPLAQPAR

SEQ ID NO: 260741 - protein, 375 aa, unidentified
MKGKVRFLGLDVHAETISVAVAEPDGEVRSLGTIANREESIRQLIKKLGPVEQLRACYEAGPTGYVLYWQLTQLGVECTVVAPTLVPTKAGDRVKTDRRDALKLARSHRSNDLTGVWVPDGESEALRDLVRTREAAKQDQLRARHRLSKFLLRMGRRPAVGIKAWTEPYMAWVRQVRFERPAQQAALEDYLHEVDHMAARVKGLEQAITEVVKLASPGVQEVVKGLQALRGIAEISAVTRVAELGQISRFDTARQLMGYSGAVPSEDSSGKRKRQGSITKTGNAHLRRIVVEAAWSYRHRPAIGPGLRKRQQGVSEPIKEIAWKAQVRLSRRYARLAAAGKDQRKIVTAVARELLGFIWAIGVKAERSVTQQIAA

SEQ ID NO: 260742 - protein, 355 aa, unidentified
MSMLTGQIEAVIGVDTHKQQHTAALLDALGGLRGLLRIVSDGGGYRQLLEWARRLEPGRRVWAVEGTGSFGAGLTSYLLEVGEWVCEVDRPDKPARKRGAKSDEIDAVRAARQALQEEHLAQPRRRGQREAIRVLKLGRQQAVDVHSQAVVQLKSLVVSAPEGLRAQLRDLNAEQLVKTCARLRQNSRQSLEWTATVAALRALARRAESAAKDVEELSQSLAELVAAAAPQLLTEKGVGTVVAAQLLCAWSHPGRLRSEAAFAMLAGVAPIPTSSGQKERYRLNRRGDREVNCALRTVVITRMACDARTQAYFERRRAQGKSDREIQRCLKRYVARRLFQVMDGHPSASQTNVRS

SEQ ID NO: 260743 - protein, 412 aa, unidentified
MKVVHEICCGIDVHARMLVACLILANGEKEIRTFSTMTDDLLRLRDWLVAAQCTHVAIESTGVYWKPVFNILEDALTVILINPEHAHALRGRKTDVKDAEWLADLLRHGLLKPSFIPPPEIRELRELTRYRESLVREQTAVANRIQKVIESANLKLAQVATDALGASGRAILWALARGETDPVKLASLAHGKLKAKRPQLERALHGRLTPNQRFVLRELLQRWEELEAADRRVTKEIDRYLQDHPKLARARDHLDTIPGLGPRAAEIIVAEIGVEMKVNFGSDAHLASWAGICPGNKSTGGKRLSGRTRKGNTYLRSGLVQAAWGATMKKNCYLSSQYFRLVKRLGRKKALVAVAHSLLVIIYHVLQCDQSYTELGGDYFDRHHTGQQREYFIRRLQMLGLKVSVEELPKAA

SEQ ID NO: 260744 - protein, 339 aa, unidentified
MGRFVGVDLHRNSFLVCFFDAEKGEKKFRNYYLCCIRKFLMDLEEDDLVAVEATVNARFFKKEVEKKVGKVIVVDPYKFKVINESVKKTDKRDAELIAFYLSKGMLPEVRMKKEEIAEVESLAHTRDKLVKLRTALKNKVHNILRMYGIETNREFLSSEKGLEQALSYEIGDTAKVELKVCIDQIRSLTKSIEEIEETLVNKGKNMKGFKNITSIKGIGEKSGTILLSVIGDINDFKSRKQLDAYFGIVPRVNNSNETIRHGKITKRGSKLGRTTLVQCTLIAIKYSKYLAKYYNKLKAKKGSGKAIIATARKLLGIIYDTLKYELEFEDFSNFVFKTA

SEQ ID NO: 260745 - protein, 396 aa, unidentified
MPEIWAGVDIGKEHHHCVVINSDGERLLSRRVLNDETELLQLIGDVLAISTDVLWAVDLNHGGAALLIGLLLSHDQPMAYLTGLAVYRASATYRGEGKTDAKDAFVIADQARMRKDLGLLRPGDEIAVDLRTLTTRRLDVVFDRTRQINRLRAQLLEIFPALERSLELVNKGPVMLLTGYQTPAAIRRAGARRIETWLKNRKVRGAAALAKTAVEAAQAQQTALPGEKLAAAMVARLAKGVMALDEEIAELDALIEARFREHPHAEVIRSLPGMGPRLGAEFIAATGGDMDAFGSADRLAGFAGLAPRPRDSGRVNGNLRRPKRYHRGLLRSMYLSAMVSTSTCPASKAYYQRKRNEGKGHKQALLALARRRLNVLWAMIRDGQCHQDSPPVTVAA

SEQ ID NO: 260746 - protein, 460 aa, unidentified
MKVKAVSALRSERGLRPVGRVAEPQVVGLAPQTTMNDRRANTMKTYILRDPKTVEPQTSPRPLRPEPGLTALVNVICGPPVPPPPLLAGLVLFIGLDVHNDSIAVSIAPSDSTEVRRYGIIGGEHDDVLKLVKKLQASHPGATLKFCYEAGPRGFALCRCLRLHGLECILVCPSKVPRKPGERVKTDRRDADQLARLYRAGELTGIYVPEPVDEAMRDLIRARFQVGKAQHRARQQLKMYLLRHNLRYGGQTPWNAAHLRYLAKIKMPFAVQQIVFQEMLEVISEATARLERYDQEIERAVPGWRWEPVVRALMSLRGMALLHAATLVAELGDFNRFDHPGQLMSYLGLVPSEHTTGTDRQQGGITKMGNGPARRALVEAAWQYRAPARISPHLKKRQEGLPKAITDIAWEAQRRLHHRYNHLTRVGKKKSQVAVTAVARELSGFVWAIARQVKPHPAKP

SEQ ID NO: 260747 - protein, 335 aa, unidentified
MKKEFKNIVGIDVSKKTIDAGLLVNEADATILKKKFSNNIKGYKALNSWMKENNAGLKDTLFCLENTGIYHRLLTGWLLQQQAFVCAEKPVQIKCSMGIHRGKSDPVDAGRICTYAFRNQDKAVLYSQTNKTVQKIADLLALRKRLLDNIKTLKVPVKELKDTGLKEAAKLVEASCKKSIVTMEKEVQKVEEKIQQLIDADPELAKKYKYASSVRCVGFTAVVTLIVYTNGFQRFDNAKQLASYCGIAPFEYSSGTSIKGKTKVHPMANKTLKTAMHMCSVSAVRHNEEMKTYFIRKVAEGKNKMSVLNAVRNKLIHRVFACIRDEKEYSLKKAA

SEQ ID NO: 260748 - protein, 426 aa, unidentified
MSRVVIGMDPHKRTATIEIMASDETVAGRGRYTTDAAGYRSMLAEARRWPERMWAIEGCQGIGRHIANRLLADGEQVVDVPPKLSARTRVFATGQGRKTDVTDAHSVALAATRMQGLRPVVDDAQLAVLRILADRRRSLGEDHTRMVCQLHQLLLELIPGGAKKALSAAQAKALLARVRPRDAAGKARRRVAAELISDLERIYQRKKDANKELNALLKATATTLTDLNGIGPSGAARLLVEVADVTRFPGKAHFASWNGTAPIDASSGDQVRHRLSRAGNRQINRVLHIMAVVQLRHRDSEGRAYYDRKVAAGKTPMEAMRALKRRLSDIVYRQMITDAQAVVTGPGGHVGAATGSSAAGSNPSTGASEKSLPGPAIHEPMPASRPILQVAPGASGPRRTAAVVKRRLLDDGEDRRTLARREQPPS

SEQ ID NO: 260749 - protein, 329 aa, unidentified
MNYKWFVGIDIAKKTLDVVLYKKELPKKSPYCQILNNSDGFNILTKWLKEQNVVFKHTLFCMESTGIYGMALVNFITEKANYCLESPLHIKRSLGLTRGKSDKIDAFQIARFCYLHRDELVPSKTPSKIMLTLRSLINERERLVRTRTIDKTIVKELNYKENRSCIDRAKNRINILTEDITQIEKEIKAVIRENLDIERNYHLAKSVTGIGLVNAVMFILFTNNFNSITDARKYACFSGIAPFEHTSGTSVMGKTRVSKLSNRRIKVNLTNGARSAIINDPELKLYYKRKTDEGKEHGTVMNAVKFKLITRVFATVKRGTPYVKLRQAG

SEQ ID NO: 260750 - protein, 330 aa, unidentified
MTLVRCDLHARKQQVAVLDTITGELREEQLSHDGDAVERFYSTLPPPVTVAVESTGYAVWFHALIRQLGHTLLVGDASRIRAMVVRKRKTDRRDALHLLELLRHERLPLIWVPDPETRDLRALLAHRMRFVRLRTTVINGLQAIALSHRLVAGSRRLTRGRVAQLTRLPLSPHLARRRDESLELVSWLDQRIRGLDTLVDEAVEAEPAARRLLTHPGVGPVTALTTVVVLGPVSRFPGSKEVTSYVDALPTLHASADKHHLGQITKQGSPLLRLVLVQAASIAARYDDDLKQVYVALLHRRGHAKAKVAVARIAALVRGAPSAGLRSGAE

SEQ ID NO: 260751 - protein, 356 aa, unidentified
MISRGVLHIPRIIVGVDTHKDEHVAVVIDKLGTRIGQRNLPTTNTGYVDLEHWASGLGEIEAFGVEGTGSYGAGLARFLRDQGHSVIEVNRPDRSTRRRLGKSDPTDAEMAARAVLAGVARDQPKSGVDEVEMIRMLKSTKDSAMKGRTQAINQMKALIVTAPVELRAVLSGLTTSQLVARCTGWRNGQLETPTTAAKYALQSLARRYSQLAEEIEGLNKELARLIVAFAPMLMEALGVGPDTAAALLVTSGSNPERLKSEAAFAALCGVSPIPASSGKTNRHRLNRGGDRQANAALYRVVLVRLRYDVRTRTYLQRRTEEGKTKTEVIRCLKRYVAREVFGILHDIGIRHTVQNA

SEQ ID NO: 260752 - protein, 330 aa, unidentified
MDVSKLWIDITLMSVMDHHKQPLISERFDNTEEGLKLMGKWLKRHKVTFDANSLLVIENTGVYHRLVWEYCSMHGLPLHIGNATHIKYSFGIARGKNDKIDSQRLCIYAFKNADELKATPLLNPVFIRLKDLMTSRSRLLAQLSSIKVYLKELKLSNSKATQQIIEQAHQAALEGIKQSLKAIENQIKQMISEDEAIKRNYELLLSVPGIGHLTAVYIICCTNNFICKITGKQLASYAGVAPFGNKSGSSIKGRDKVHKMANKDLKKLLHMGAISAITHYPEFKDYYQRKVREGKHELSVINAVRSKIALRAVAVINNQQKYVNNYKNAA

SEQ ID NO: 260753 - protein, 349 aa, unidentified
MAEARISYTGERIDVGIDVHKETYTVTCLRQRQIVKTATVPADPARLAESLPRWFPGARLFSAYEAGFSGFVLHRVLTTAGITNIVVNPASVAVAANDKVKTDRRDAKKLARELADGRLRGIYVPTAAEELARLLPRTRAQLVAHRATITRQIKAKLHQFGLITPGSRRLMSSRYLREIAAWELPPELHVSLTLLADQWRFATRQLLEVRRLLREQAQAQATLETVYRSVPGIGEVVARTLATELGDMSRFTNERALFSYTGLTPSEYSSGASIRRGHISRQGVSRLRHVLVETAWRALPGDPILQAMFDRIAATRGKQRAIVAIARRLIGRIRACFRHGTTYAVGTVG

SEQ ID NO: 260754 - protein, 492 aa, unidentified
MNNCAASQNRAGGRPASARSRSRIGYPKRITGRLPEEPEASAPTSNRKRPLEGRHISSVDGRAKRRKNQKQHNQGMNDPQQWQQHRAFGALDWARQKHSVIVLHPTGKVIEEFEIEHSALGWKKFREKLQSYGSIPFAIETSQGAAVEQLVEADMIVYPLNPKSAQAYRDRKAPSGVKDDWLDAWSFADALRVDGHGWKALRLEEALIKEMRLLCRDEVGLIEQRTAFIQQLRDALAEYYPAALEAFDDWSSVSSWMFLERFPTPDALAKAGKRKWQNFLHSRRLWGSEQGTRRMGIFARATEFVGSPPTVKAKALLALSLVQMLFAIEKQLAIYRQRIEELFASHPDHDLFGSLPGAGSKIAPRLLSEIGEDRERFGGDAQNLQCLGGTAPVTKRSGKRRYCYIRWACNKHLRHAIHLFAEQSLSRCVWAERYYQHHRQKGQSHANALRRLGHRWLKIIHKMWIDRCPYDAELHHRNQLSHGSWIFQLKAL

SEQ ID NO: 260755 - protein, 342 aa, unidentified
MNKVAIAAIDLGKNSFHLHAQDDRGHELYRKKFTRTALVQHLANLEPCTVVMEACGGAHFMAQQAAKFGHTAKLIAPHLVRPYVKSNKNDFADAEAICEAATRPTMRFVPVKTQAQQPLAMLNSTRDSFIKDRTATVNRIHAALLEFGISLPAGFKSINELTALLEASSLSDPIKKLLTRMHDHFDYLYEQIKSLDKELESQVAEDDLAARLMTIPCVGPITSSALAAELGDGKQFKCGRGYSASIGLVPKQHSTGGKTVLLGISKRGDRNQRRLLIQCARVYLMHLDRQKGVLAQWVRHLIATHHHSNHVVCALANKLARIAWAIAAYHTEFDAGPSAMSA

SEQ ID NO: 260756 - protein, 387 aa, unidentified
MYFVGIDISKFKHDCAIVDEFGDVITPSWSFQNDREGFSLLKELLDALDGEKKIGLEATGHYGQNLKLFLENNDFSFMEFNPLLINRFVHSKSLRKTKTDSIDALMIAQYLMTVEYKPYPPSFYTFEKLKSLTRFRDSLIRQRSRQLVELTNILDKVFPEFKPFFKGRFSATALYILSHYASPEKISNMNSKSYEPLRRLSRGRFSMVDFVELKTLARNTVGSTSDYLLQEMEITIDIYNQLQSKVEEIELQIHDCVLALAPPILTIPGIGAASAAVILSEFGDLSKFNNPSKLLSFAGMEPGYFQSGTSESTGKMVKHGSSHLRYAMMNCAQTVINNEPTFAAYYAKKRAEGKEHCVALTHVAKKLLRVIYTLQTKELSYNPDLVR

SEQ ID NO: 260757 - protein, 425 aa, unidentified
MEQREQVQEQDSEQLIERVAALDIGKAMLVCCTRVPGENGRRLQQVSEHSTMTRALGLLADRLLELGVTRVVMEATSDYWKPPFYVLEAHGLDVWLVNARDVKHLPGRPKTDRLDSVWLCKVAERQMIRSSFVPPPPIRRLRDLTRYRVSLVAERTREKNRVEKRLEDAQIKLSAVVSDLFGVSGRAMLAALIDGERDPRVLSELARGSMRGKISLLTEALIGHVTDHHVFLLERMLRHVDGLSADIAGLEDRIEAEVAPFADAVARLDEIPGIGVTAAQIIIAEIGLDMSRFPTPGHLASWAKFAPGVKESAGRNKGNGSTGHGDPYLARVLGEAAVGASRPHTFLGERYRRIARRRGKKKAIVAVGRSILVIVWHLLSEEQAHFQDLGADFYDKRRGTEVIKRNHVRQLEALGFTVTLQPTAA

SEQ ID NO: 260758 - protein, 337 aa, unidentified
MGSYVGIDLHRHRSVVVVLNEDGDRVWWSRIDNTPANLACEITAAGPDAEVAMEATWGWYWAADVIAECGVRLHLAHPLGIAGYANRRVKNDVADATLLADLLRMGRLPEAWVAPPAVRELREEVRYRAKLCRLRSGLKAQVHQVLGKEGVIPETKGIWWSGGQRWLDELQLTDVYTNRIESLRDLIELYDREIVQSDTRIHRRLKGDPGYEAIQQIAGVGRVLAAVFVAEIGDVHRFPDARRLCSWAGLTPRLRESDTHTRRGHITKMACGGARLTRRFCVPLGGDRDDLGRSRHPSSPADLRLRGPGHWRGPHRPGHAGQSRQPACLVAAVRRCG

SEQ ID NO: 260759 - protein, 359 aa, unidentified
MASVSIAHDPAAGVTVGVDTHGEVHVAAAFTSDLGRPLGHLEIPTTPAGHGRLLRWAQAFGDATPRFGVEGTGAYGAGLAGHLRGAGCTVIEINRPNRQTRHARGKSDPIDAEAAALAVLSGEASPVPKSDEDRVGMIRTLRVARRSAVQSTTQISNQVKGLIVTAPAELREQLRLFSGHDLIETLAGMRPGSITTPTAATKMTLRSLARRHQFLSEEIATLNAELERLTQEAAPQLCAIKGVGPDVAGALLVAAGDNPERLRSEASFAHLCGVAPLPASSGKTTGRHRLNRGGNRQANNALWRIVIGRLRWHQPTRDYMARRTKEGLSKKEIIRCLKPYVAREVFRALVARPHLVMAA

SEQ ID NO: 260760 - protein, 387 aa, unidentified
MKKIYSNVACAGMDVHYKFSNVTFRDPSGKVVRRQRLDHRHRQELQERLNLWPTGIPVVMEASFGWGWLSDLLEEAGQEVQLSNCYKVEQMRKARGWVKTNKKDADLISLLPFEQSDWWKVWRAPPEVRNRREQMRFRGDLVGLQTMAKNRIHAIFHRHGIFHEFSDLFGGQGRKFLAELCLHNPTDLSYQALLALRGQIKLLDHLRRQLADVARILHKQLVKTPLTIRLKTIDGIGLILAHVMAAEIGMIERFRNQKALASYSLLAPRSNDTGQDDPRHSPLGRHLGVRGNRILKWAFIEAAHGAVRSGGKWRAIFDRVTNGGKKDRNRGYIKVARELVKVVYAVWSKGVDYQPVPPARPGSNKNKKKSRSETGQLLHPMVHALTA

SEQ ID NO: 260761 - protein, 342 aa, unidentified
MTIRQIGIDIGKSTFHVIGLGAESGIELRKLFSRSQLLRFFEGKSGEALNVAFEACSGAHWLAHRLTAMGHTVKLLTPESVRPFAKAQKNDWNDALAIAEAARRPDRHAVGIKSEEQLDLQALHRVRQRLMTARTAIINQLRGLLRERGLVIPGGRARFERYVRQELIEGGVDLSPVSRALFATLIAEYNSVSTRLADIDHDLEVFAKSNPVCRALLPIPGVGVIVATALYSAVANISDFKTGRDLAAFLGLVPRQRSTGGKTVLLGISKRGNTYLRTLMIHGMRSAFYNRHKRTNRMTAFMDRLAGRGMHTNKIVVASANKAARIAWAVLSKNVPFQPTAA

SEQ ID NO: 260762 - protein, 388 aa, unidentified
MQTVADRPEAPTAIRTDLGAIFVSLELSRSTWLITSLSPGGGEKMSKQVVRGGDVAGLLERFARLREKARARTGKVFPFVVIQEAGLDGFWIDRALQNEGIESHVVDPASIATSRRRRRAKTDGIDGEVLVRALLAYKRGEPRVCAMIKAPTPEEEDRRRLCRERKVLIVERVRHVNRVKGLLFSQGISGYEPLRRDRRERLDTLQTGDGRLLPDHLKAQVCRELDRLELLLEQIKAVEAERDVLLAAQQVAAPAPAAMLLDIKGIGPEFAAILWSEGLFRHFDNRRQVASYAGLAPTPWQSGSVDREQGVSKAGNPRLRTTLIQLAWLWLRHQPHSALALWFEERVRRNGGRLKKTTIVALARKLLVALWKYATAGVVIEGAVMKRT

SEQ ID NO: 260763 - protein, 352 aa, unidentified
MNKGNKLDFTGQHIYVGMDIHKKSWSVSIYTDHFEHKTFTQPPEVKKLVNYLQRNFPGATYHSVYEAGFSGFWIHDRLKEEGIHCMVVNPADVPTKHKEKAGKADKVDCRKLARNLRSGDIKGIYIPSRVQAEDRHLIRTRQSMVRKQTRCKNQIKAILFFYGIPIPEESHWSRRFINWIETISMEKASGDLTLKAHLEELKHLRQIIAGLNKAMLALSRTDTYRDQVLLLRSVPGISTLTAMTLLTELYDISRFPSLDKLASYAGLVPDMKSSGETEHTAGITYRRNATLRTVLIEASWVAARKDPVLIMAFNKFCLRMKKTKAIVHIARKLLNRIRFILMKQERYALAVV

SEQ ID NO: 260764 - protein, 356 aa, unidentified
MIVIGVDPHKGTHTAVAVDGASARPRAERTARARHDGFGELVGWARELDLERVWALEDCRHVSGGLERFLLAHGETVIRISPQLMGDARRGQARERGKSDPIDALAVARIAVRDGIDAFPSARLAGPELELRLLHDHRARLVADRTGLINDLRWHVFDLWPDYEIAPRSLGLLVHQQRLARRLAAAGQSARVRVARDELRRIRELTRAINALERELAGLVARTAPALAADRGSGPILTAAFVGEIAGITRFATPAKLARAAGAAPVPVWSGHNNGRLRLDIGGNRRLNHALHLYALSRIRHDPATAAYITKQRARGKTNKEAIRLLKRHLVNRVWRLLQADAQPQPRTITCGPNLT

SEQ ID NO: 260765 - protein, 365 aa, unidentified
MQKISTMRTRRKNIFQGQLTVGLDLGDRSSAYCVLNEAGEIVLEHKVTTTPETMRQAFGSLPRCRIAMETGTHSPWVSRLLTTLGHEVIVGHAQKVRLITKSRRKDDRLDARTLARLARIDPELLSPVKHRSAQAQLHLTEIRARAVLVNARTALVNAVRGLVKSYGERLRKCDTQQVRREASSGLSAELRKALEPLLQEIESLNERIKEYDRRIEEMAKETYPETALLKQVKGVGDLIATAYVLTLEDPHRFRKSRDAGCFVGLQPGRRNSGESEPQMHISKEGDEYLRKLLVQGAHYILGPFGEDSDLRRWGQKLSARGGKNGKKRAVVAVARKLAVLLHRLWVSGEVYEPLCNSHKVMSAVA

SEQ ID NO: 260766 - protein, 365 aa, unidentified
MKIMHWVGIDDHADKWTIAHYTGNEEKPTREFELVPDSKGYRSLLSYLKGLKGEVRVVYEAGPCGFEQYRRLKSAGVNCQVAAPTLTPRKPGEKVKTNRRDAAKLGRELRSGGLTMITVPEPEQESLRDLIRARQTIQKDVGRLRKQIIQLLLRYGHRFRDGQSWTKRFWVWLKAIKLTGSYSSFVLADKIVELEHRIDQLARYDDEIERAAQKPEYQTYVAAMRTLRGVETLSAMTILSEMGDLRRFATAPQLMAAVGLVPSESSTGDKTKRYGITKTGNAHMRHIAVQAAWQYQRQATASAKIKARRKDQLPEVVAIAEKCEARLNRRFHRLTSRHKKSTVAVVAVARELIGFIWAIGQIVHP

SEQ ID NO: 260767 - protein, 412 aa, unidentified
MQDILTCAMGLDIHRDVIVACLAKGELGTDPEIEIRSFSTLIPEMRKLRDWVLEAECHHVAMESTGIYWQPIYEMLEPCFDGQISILVVNARHMKNVPGRKTDMRDAQWIATLLRAGLLKGSFIPDKTFRELRHLTRYRKSIVHDITAQKNRIDKFLQSSGFRFTAFLSDAFGASGRNIIRHLMEYGSISREALDRCLKTQTRKRIDEILIALNGSLSEHQRNFLRMIFGHLEALEQHRHTVEDAITEEITKHEEALRLLCSIPGIDVTAAAAIIAEIGTDMSAFPDSQHICSWAGLSPGNNESAGKRKSAHINKGNPYLKSMLCEVGWVISGKRSLYLSGWYWRIKQRKGAKRATIALARKLLALIYTMLKTGSPYSEECFETRRKQSERKRAYRMVNELQKLGYFVVAPG

SEQ ID NO: 260768 - protein, 343 aa, unidentified
MQTVTTIGLDIAKSVFQVHGIDAEGKVVIRRQLKRRYVLAFFQKLAPCLVGIEAWASSHHWSRELRALGHKVRLMPPAYVRPYVKRQKNDAADAEAICEAVTRANMRFVETKTPEQQSCLMLHRTRHLFIRQQTAVINAIRAHLAEFGIVAPVGRNGVEELLGVVADASDKRLPEIARACLAALGAQLRMLKAQILEFDRMINAWHRSNETSKRLDEIPGVGPALATALVASVADPRAFRSGRDFSAWIGLVPKQHSSGGKDKLGGISKQGDRYLRSLFTAGALAVIRYAKIHGAKHRPWLTALLARRPTKVAAVALANKIARMAWAMMARGERYKEPVALAA

SEQ ID NO: 260769 - protein, 318 aa, unidentified
MSDLTFIGIDVSSQTLEIASSRERATWQVSNDGEGIERLVKELPSLAPELIVLEATGGYEFEAACALQASGLMVAVVNPRAARDFARAMGALAKTDAIDARMLAAFARVLHQHPERDRFIKPLADAELQQLQALVLRRRQLVQMLTSERQRWRLAHAVAKPSLERHIEFLKSELGDSDGEVAAHVEKHHAQLAKALASVPGIGTASVAVLLAELPELGKLDRRRIAALVGVAPLNRDSGQMRGQRSIWGGRADVRRTLYMATLTAVRHNPPIKAFYDKLVAAGKRKKVALVAAMRKLLGMLNAIAKHGSTWDPSLHSA

SEQ ID NO: 260770 - protein, 342 aa, unidentified
MGEVSTIGLDIAKSIFQIHGVDVDGAVVIRKRISRAKLLEFFATLPACRIGIEACPSAHYWSRRLEALGHAVRLMPPSYVKAYLKRSKNDANDAAAICEAVTRPSMRFVARKSEQQQCGLMLHRSRQLLVCQRTMLSNAIRGHMAELGVIASKGRNGTAELLKIIADEHDDRIPAAARLSLDVLARQYAAVRAEIVAIEKRIHAWHRSSEESRRLEEIPGVGPIVATALVAEVGDWKEFTSGRSLAAWIGLVPRQHSTGGKQRLGGISKQGNRHLRWLLVAGAMAVIRYARQRGTKRPWLARLMERRPIKVAAVALANKIARMAWAMMVRGERFKEPRLLPA

SEQ ID NO: 260771 - protein, 315 aa, unidentified
MSDMPCFVGIDVATAQLDIALRPSGERWAVPNDASGVMTLVDRVQALHPTLIVLEATGGLERAVTSALATAGLPVVVVHPRQVRDVARATGQLATTDALDARALAHCADVIRPTPRPRPDAQTQELRALLGRRQPLIGMRTAAQNRLAGTNARLTKDIAAHMTWLNAAIATLDDDLETILRASPLWRENDDLLQSAKGIGPVCARTLLLELPELGTLTRQQIAALVGVAPLHCDRGTLRGRRMIWGGRAHVRTVLYMGTLVATRFNPQIKVFYERLLAAGKVKKVALTACMHKLLTILNAMLKHRTPWQPQEVQS

SEQ ID NO: 260772 - protein, 424 aa, unidentified
MRNDDIDVWLGLDVGKQSHHACALDRHGKRIVDKPLGQDEAQIRELLACLGGHGNVLLVVDQPNTIGSLPLAVARDMGVAVGYLPGSAMRKAAQLLPGDAKTDARDAYVVAFTALHMPDTLRDAGSDDETMARLKVLAGFDDDLAFECNRQTDRLRSLPPRIHPAFERALKGDRITRDTTLALLEHYGGPTGMRRSGRTRVGKWAKSAGLRRCGGIIDDLLDAIGQQNVIVAGTQAVEEIVPVLASRIRQLREQREQLAAKVETLLEDHPLLAVLTSIPGIAVRTASQILLAISGDITRFKSAAHLAAYAGIAPVTRRSGTSIRGEHPARGGNKRLKNALWQTAFIAGFHNPENHAYYQRKRNKGKRHNAAIICLARRRCNVIHGMLKNATPTSPCASQPNPLAATGRAKHARNPTHNQANTTR

SEQ ID NO: 260773 - protein, 325 aa, unidentified
MTEPILQATSLFVGIDVAKDQLDLARSDSNALLTVDNSVDGICRIVALLRTSGVKLIVVEATGGLERPLLDALLQADLPVARVNPGHVRYFARGLGILAKTDKIDAHVLVKFAQLASPRLAAKLSANQNELKALVICRRQLTHVATEQTNRRHSTSSKPAVKAIDAVLKAVEKQVEELDRQIRKLIDSDDDFNSIDKLLQSVPGVGSVLSSTLLAELDELGTTDRRRIGALVGVAPFNHDSGKLKGKRTIRGGRASVRSVLYMAALAAMRFNPLIRVFAERLKKTGKLNKVVIVACMRKLLALLNAMIRDNLSWSQLNLVKALAF

SEQ ID NO: 260774 - protein, 482 aa, unidentified
MKKNNIYQNQSQQLLSLFEQAANNAKVMCVPIDYAKKDHVVMFCNGYGDILRKPFSVKNSPEGIDYLTDQVIRSCHQRSISEKHVFFGGEEVGSFADNFVSTLRSQGWLVAGVNAHEAKTQRENLQASTDRLDLMGIAKSLLNRRANCSPAQSGIYLNMRTVVRHRRKLVGITTEVKNRIHAVVDRLFPGFLNESKSGITPFSNSSLWLMKERFSAPQIRRRRRSTLIESLRRLGTKKSECTADTLQQYAAQVLKPPQDYVHMLQLSLAQHVKHFCCLQESIGQLEKEIALNLAQTQGAFLTSVRGVGIVLAAGVSAEIGNPFEQKTINNLVSYCGIIPRVKQTGGPQGETRTGKVAKRCNRILKDYAVQSASHLGLHGPADLMSDYKRRDAAGQHADFGMARRYLRMAMCLMRTSQIYLPSRLRKAQAQVKQRADYYLMTWPYLRDKWQKLGTLETAFKADHPLGQWRTIVQQFYGIKLTL

SEQ ID NO: 260775 - protein, 398 aa, unidentified
MKVSGLDVHKDSIFCAIYNGKEYSEVNEYDTTTAKIHQMGEYLRSEGVKKVAMESTSTYWVPVWDILLEMGFELMLVNPFLIKQMPGRKSDVKDAQWIACLLHKGMLRGSVIPSPVIQQLRVYSRKYTKLQEQKSRTLQKMDRIMVMCGFRIGSCMSNLGTKSVMSVIQALIMKETNPEVLERLVYGNTANKKSGKLREALTGNLKEHYRQQLEWEKEEYDLFEKQTQQCLEQMRQICEKHYEEEMRLLKTIPGVSEISAMIIIAETGDDMSVFENSGKIAGWAGLRPRNDESAGKRKSTATTKGNKYLRSILVQVAWAASRIKNGWFKEKFNRLAMRKSRKKALIAIARKLLTVTWNLLYYKVPYNPKSVHIYNPVKVEAKKNYHMREMERMQKLLN

SEQ ID NO: 260776 - protein, 365 aa, unidentified
MASLPSGPGVVHVGMDTSVREIVCGVLRPGMEVPAVDRVPNDEESVRRLIGRLGDRRLLAVCYEAGPSGYELHRLITSMGVACEVIAPSLVPKGASDRVKTDRRDAVRLTLALRAGMLTAVRVPSPSEEAVRDLVRARGDLLDDRRRAQQRPGAFLLRHGRVWGAAKWTCAHRAWVDRQEFAEPAMQETLDAYRGALEAREAELRAAEARLGAWAGREPLAAAVARLGAYRGIAGLTALTLAAEVVDWRRFATARAFMGFTGLVPAEYSSGARTRRGSITKAGPEGVRTALAESAWAYRHRPAVGALLRRRQAGADPATLARSWKAQQRLHATWRKMAARGKPPGVTATAVARELAGFVWAEMTS

SEQ ID NO: 260777 - protein, 401 aa, unidentified
MVSDFKKGRYNLMKIFVGIDIAKLNHFAAAISSDGEILIEPFKFTNDADGFQLLVSKLESFDKNSIIIGLESTAHYGDNLVRYLVAEFYQVCVLNPIKTCQMRKNNVRKTKTDKVDTFVIAKTLMMQDDLRFITFFDLDMMDLKALGRFRQKTIKQRTRLKIQLTTYVDQVFPEIQYFFKSGLHQNAVYALLKEAPSPKEIASMHMTHLANLLKVNSHGHFTKELAKELRVLAQKSVGANDSAISIQITQTIQQIELLDSQLEKIEAEMTDIMKFNDSVIMTIPGIGYINGGMILGEIGDIHRFSNPNKLLAFAGLDPSVYQSGNFQAKTTRMSKRGSRVLRYALVNAAWNVVRNNATFKAYYDAKRAEGRSHYNALGHCAGKLVRVIWKMLTDEVEFNLE

SEQ ID NO: 260778 - protein, 398 aa, unidentified
MLSIGIDVSKGKSTVCGMKPGGEIVYTPFEVQHTREGMSELVSLLRGSGEEVRVVLESTGSYHCPVVAALLENGIFVSVVNSLRMKRFCSQSIRRVKTDQIDAMQIALYGLAYWPELQPTRLPENTYRELQLLARQYYQMTSLLIKAKVDFNALCDQVLPGMQELMNDHAGRHKLSDFVLRYRHTTHILEMGETRFRKDYCKWAEKKGYRNHERMAALIFATAQNGIPVLPDAPSTQIVITEAIRVLHTVEASRDAILTQMQALAKTLPEYSLVREMPCIGDTLAPRLIAEIGDVRRFHSKRALIAYAGIDAPPYQSGKFSANNRHISKRGNRYLRKTGYEVMQSYVMHKPANDPIFTFIEKKRSEGKSGKLAMVAGLNKFLRVYYGKVTELYRSLPQ

SEQ ID NO: 260779 - protein, 309 aa, unidentified
MDIVVGIDVSKDRLDVAVAPSGLVFQVANTQAGIDDLVSRLEPIGAEVIALEATGGFETAAVAGLSAAGFAVVVVNPAQVRAYAHALGRRAKTDAIDAAVIAAFVAATNPELRPLKDAETQALSALVARRRQIVQMIVAEENRAKMVLAKEAQKSIKRLLAALRRELESLDRDLDDHIRKSPVWRVLMALLTSVPGVGPATARTLLAEMPELGSLDRRQIASLAGLAPFTRQSGTWKGKSFIGGGRGKVRAVLFMAALVASRHNPVLKAFRDRLVAAGKPKIVAVVATMRKLLTILNAIIRDEKPWQNA

SEQ ID NO: 260780 - protein, 340 aa, unidentified
MDEYIGLDVSLKETAVSIRRDGKRIWRGKCASDPQLLAALIRKHAPAAKRVVFETGPLSVWFFHALTAEGMPAICIDARHAKAALDMAANKTDANDADGLAHLAEVGFYKEVRVKSFDSMLTRTLVAARTRLVRVCTELSNQIRGLMKTFGLVVPQAMGSKFARHVEALLADNADLGRIIRPLLEAWHAVRLRAAELGRKLLADARRSEACQLLMSIPGVGVVTATSFVTAIEDPANFKHSRSVGAFVGLTTRRYQSGEIDYDGHISRRGDSHLRGLLYEAATVLLTRSLSECDLRKWGLQLRERLGFKRAAVAVARKLAVIMHSMLITGEPFREKSPAV

SEQ ID NO: 260781 - protein, 370 aa, unidentified
MENRSMFVGLDVHKETIDVSIAEGARHGEVRHYGIIASDVEPLDKVVRALRAPDRRLHFVYEAGPCGFGIYRHLTGCGEDCIVVSPSMIPKRSGDRVKTDRRDSQMLARLHRAGELRAIYVPDDTDEAMRDLVRAREDAVGVGAQAKYRLKAFLLRQGRRYPGREGWTLPYRRWLTDLSFPSPAQHIALQEYRDAIAETEQRIDRLTEQLRQLAPTWRWAPVVAALQALRGVSFLTAVALVAELGDLTRFRHPRELMAYLGLVPSEHSSGPSVRRGAITKAGNPHVRRLLAESAWSYQGIPRIGRQHAYRQEALPKVVCDIAWKAQLRLTTRFRRLVARGKAKPKVATAIARELSGFVWAIAREVSPAPQ

SEQ ID NO: 260782 - protein, 359 aa, unidentified
MAKARTLVGLDVHAAKVVAAVLDAETGELRFQRLGGESERVVRLCGSLEGPVRASYEAGPTGYGLARALEGAGVECVVAAPGKIPRGATEKVKTDRRDAEHLVRLLLAGKLHPVRVPGPAEEALRDLVRAREDIRGDLMRARHRLSKLLLRHGVRFDGRAWTERHRAWLGKVELGEQPARATFVDYLGAVEALLHRKSELERQITAAIPSSPWAREVGRLRCLRGVDTLTAVGLCAEIGDFARFARAGQLMSYLGLVPSEHSSGESRRLGAITRSGSRHARRLLVEAAWHYRNPVRLGRELEARQQDQPAAAVAISWSAQARLHRVWSRMQRRGKRRTLIAVAVARELAGFCWSISQIE

SEQ ID NO: 260783 - protein, 402 aa, unidentified
MNSVGIDISKGRSTIAVMRPFGEIVISPFEVRHTDSELSELARRLKSLNGETRVVMEATGNYHAPVAKLLHDAGLYVSVVNAKLVHGYGNNDLRRVKTDRKDAVKLANYGLDRWLTLPRYVPEENTRLLLKNCYRQYRQYSKVQTVLKNNLISLLDMTFPNANRLFNSPARADGSEKWVDFVAEFWHCECVSERSLKSFVNKYWRWCRKHGYNFSEEKAHAIYDEASGHIGVMPKSETTKLLVEQAVSQLSATSAALAALKQEMQSLSSQLPEYPVVMGMFGVGPILGPQLIAEIGDVRRFYSKKALVAYAGIDAPPNDSGDVIGRHKSMSKVGASSLRRTLFLIMSAYLQNSPPNEPVYQFMDRKRSEGKPYRVYMMASANKFLRIYYATVKAYLETLEQF

SEQ ID NO: 260784 - protein, 403 aa, unidentified
MSTVFAGLDWASRTHAVCVIDERGAVCKQWEVAHDADGLRELLRQLRALRVVRIAIERPSGLLVDALVEAGFDVVPIHPNAVKASRPRYRSHGGKSDASDAYLLADLLRTDGHRFKPLASQPDEIRALRALVRGRDDLVSTRVQLANQLRALLESYWAGAAEVFADVDSPIALAFIQRYPTPEAASRLGPKRMAAFCAQHAYCGRRSADELLQRLRQAPSAAVGELEMDAKGELAISLARTLTTLVDQIRLLSSRIEHHIAASDDGRILMSFPRAGRICAAQILAELGSVRERFDSDEHLAAEAGVAPVTYASGKHKAVVFRWACNHRLRRALTTLADNSRHASAWAAAVYTKARARGCDHPHAVRILSRAWLRVIWRAWIDRNPYDPALHGGLQTMPKTAQG

SEQ ID NO: 260785 - protein, 403 aa, unidentified
MNAVGIDVSKGKSMVTILRPFGEIVSSPFEIKHTSSDIHSLIKLIHSIEGESLVVMEHTGRYYEALAHQLSAADLFVSAVNPKLVKDFNNDSLRKIKSDKADPVKIARYALDKWQSLEPYSITDELRAQLKVMNRQFHFYVKQKTAMKNNLIGLIDQTYPNANTYFNSPTRSDGSQKWVDFVSTYWHVDCIRKMSLNAFVEHYQNWCKRKKYAFNKSKAEEIYTKTKELVPVFPKNEITKHIIRQAIDQLNSTSVTVETIRTLMNETASKLPEYSIVMQFKGIGPSLGPQLMAEIGDVTRFTHKGALTAFAGVDPGVNESGSYAQKSVPTSKRGSSNLRKTLFQVMDVLIKTMPQDDPVYQFMDRKRTQGKPYYVYMTTGANKFLRIYYGRVKEYLSVLPDPS

SEQ ID NO: 260786 - protein, 412 aa, unidentified
MQTLVERGCGLDVHQATVVACLLHVRKDGRVQKQIRTFGSTTRELVCLCEWLRSEGCTHVAMESTGVYWKPVYAILEGAFQIVVANAQQVKKVPGRKTDVKDAEWIADLLCHGLLRSSFVPPKSIRELRDLTRYRRKLVESQAAERNRLLKLLESANIKLSSVATDVFGVSGRLMLKALVEGKASLAEMAELAKGKLRNKIPQLRLALEGKLEEHHRFLLQLQQDRLDAAGRDLATLEQRIQQKLEPYAPQVALLQEIPGVDWTLAAVIIAELGIDMSVFQSVPQLASWAGVCPGNNESAGKRKSSCIPKGNVYLKTALVEAANAAARTKGTYLRDKFYRLKARRGYKRAVVAIAHKILVSIYYMFSQQVSYNDLGDLYLDKLNKNHLTRHLVHRLERLGYSVTLTLQQIAA

SEQ ID NO: 260787 - protein, 342 aa, unidentified
MKVLKQVLGIDVAQKELVVTLGRLNDDLSIELCAYSVFKNTDKGFLKLSQWIDKLTDKTTKVRYVMEATGVYHEKFAHYLDEKKEDLSIVLPNKISNYIRTLEIKTITDKTCSEAIARFGLERKLDNWKKPKAIYRTLKQLTRERRQITDERTIVKNQLHAEEAEAMPHISSIERSNRRIHFLNTLEKEIKNEIESSIKENKELSKDISNICTIPGISILTAATVIGETNGFELIRSKKQLTSYAGLDVKEKLSGTSVKGKPSISKRGNRYLRSCLHLPALSSIKWDGNFHDQYSRIVAKHGIKMKGCVAVQRKLLELIYILYKNKAVYDKDFESKKNSVPA

SEQ ID NO: 260788 - protein, 403 aa, unidentified
MIFVGNDWAEDHHDVHVMDEAGRRLDARRLPEGLAGIRELHELIAAHAEEPDQVVIGIETDRGLWVDALSAAGYQLFAINPLAVSRYRDRHHVSGAKSDASDAKLLADLVRTDRHNHRRAAGDSVQSEAIKVLARAHQTLIWARSRHTLALRSALREYYPAALKAFEDLDDRDALAVLGRAPTPEQGVRLTLPAIQSALKRGGRQRNIAARAREIQARLRTEQLAAPAALSAAFAATTRATVAILVELNRQIGDLETSLANHFETHPDADIYLSLPGLGVILGARVLGEFGDDPNRYTDAKSRKNYAGTSPLTIASGRKRAVLARHVRNNRLYDAIDHWAFCALLASPGARTYYDQHRAAGNTHHQALRTLGNRLVGILHGCLRHHSRYNEHTAWAHRNPAAA

SEQ ID NO: 260789 - protein, 400 aa, unidentified
MDETQRFRWFLGIDVSKETFDGCCINMKGERLFRLSTSMNREGFEELTKQLSGLSVSQESALVGMESTACYHVNLYSFLISLGYTVMVMNPLLISNFVKLQLRKTKTDRKDAYVIAQFLLLNRDSLCQTILSSDISDLRDLSRQRESLVDQMSSTKSEIKRLLTMTFPELEHIAGIFSKSMLRLLCHYPSAASIKQAKRSKVAKILIPGSYGKQTDVSVNRIVKAAQVSIGTSSATKEIILRQKASLLIQLEQHLQELTDILIELSEGKIQGDRDILTSMKGIGEKSAVNFLIEIGGDIKQFESHKKVIAMAGIDPALYQSGKIDRKGKISKRGNRHLRRVIWIMATKVIQFNERFKQYYLKRIEDGLPYKMAVMATAHKLVRVMFAMLKNKTLFDPRMN

SEQ ID NO: 260790 - protein, 378 aa, unidentified
MTFGNTVYIAVELSVSSWLVAARLPGVERQRQQRLEGGDTVALLALIAELRSLASSKLGGAAEVACCFEAGRDGFWLHRLLTAHGIAAYVLEPTSILVNRRARRAKTDRLDAEGMLRVLAAWLGGDRHVCSVVRVPTPEEEDAKRPHREREHLVQEKLRIENRIQALLFTQGIRGRPSLRSWERDLAELRTGDGRMLPPLLRAELDRLRRRLVLVLHLIRELEAERAKALEAAADEAIVQKIAALLCIRGIGANFAAVLVREVFYRVFANRRQLASYVGITPMPYQSGRMDRGRSINRTGNPRARTTLIQLAWLWLRYQPGSALATWFRERVGTLRGRTRRIAIVAMARKLLIALWRYVEAGVMPDGVIIREQTAVTA

SEQ ID NO: 260791 - protein, 327 aa, unidentified
MRNILIGIDISAKTLDICIDQNGNKQFSQIKNDKEDIKNLLKPFVKGQKRVIIGMENTGKYNNILYSILTDYDFKVFVIHPYHLKKSIGLARGKNDKVDAERIVSFIEKNHKELDPWQPASETIMQLKILFTERKAAVKDRTRLKQKKKELDYIQNKALRASLLKMNEKRLKESTKVIKELEKMIQEVIATDIELKKQMKLLQSIPGIGFIVAIALIVKTEGFRIYTDPRKLACCAGVVPFHYQSGTSIFSRAKLSNMADKSLKTLLNMAALAAVKTDNDLKKYYDRKVDEGKNKMSVLNAVGNKIIHIAYAVINSEKMFENRLQIS

SEQ ID NO: 260792 - protein, 417 aa, unidentified
MNNENYAALVALDWGDTEHAFVTQVGDSSAEKGTIPATAESLHGWLEQLHKRTEGGQVALALEGGKSAVLHALLEHPWLVIYPVHPSTSERFRTAFTPSGAKDDVPDAVVLLDILAHHRDQLRPLKLDSPQTRKLAALVTARRRAIDHKTKLTNELTSALKSYYPQALDLCGRDLATALALDFLTRWPELRSLKAARPATVQAFYTAHNSRRLIVIEERLALIAAARALTQDRAVIDPTVLQVKLLVEMLRALQKNVALIEEEIAVAFDAHPEAELYRELPGAGPATAPRLLVAFGTDRSRYPDASSIQKFAGIAPVKVKSGRQLWIHWRWNAPKFLRQTFVEWAGQSVPKCAWAKAYYSQLRAAGKQHQAALRALAFKWIRVLWRCWQDRIPYNEARYIASLHQRKSPLAARLAAA

SEQ ID NO: 260793 - protein, 444 aa, unidentified
MKSKGYQKHMEKKKMLAGKRIAGIDPAKEKHQAAVLNEEGIQMGRSFSFPVSHEGYSEKLWKEIGKILGDYGTEDLAFAVETSCALWKTLTDYLSQRGYTMLMVNPLTTYHSRPLMNHDFSKTDPKDALLIATNARNGNYTVYQNFTPEINKLHRLSITYDKLTKDRQKAIARLRAFMEEVFPEFLNCIPVDIETSLYLLDQYFLPEHFRSLSVHEEELNVRRISNGNHGTETLKKLKEYAQKSIGSSVHGEEDALRLTLDIWIMQVRQSGSGLAAIAKAIIELARKTEYFEILTSLKGISDISDARFIGECRDLSLYAHYKQIEKHAWANLRLMDSGKYHGARRISGIGNKRLLKLIYLMTTQTARFIPEVRIKFIKRQLKKKCYRKNIIASSSQLLKLLMALIKERRPYAFREEAAQELEKLEMKYSEIQNTQKKEAVRKAA

SEQ ID NO: 260794 - protein, 344 aa, unidentified
MVTTIGIDPHKATHTAVAIDESETVLGELTVSADRYQTARLMDWAHKLNGNGRIWAVEAAGGLGYLLSQQLVARDEEVIDVPPVLASRIRVLSSGKSDKNDPNDARSVAIAALRQPGLARVRREDHVQVLRMLAKRHLELTSLRTQAVCRLHSVLVQLRPGGIPPRLSANRASQLLRNMRTLDYVGEQRRASARTHLADIRRLDRDIDANKTLIKRAVTTSNTTVTDVFGVGPVLAAFLVGYTGDAARFPSPNHYAAYNGTAPIEYSSGGKTRHRLSLRGNRKLNHAIHMTAVTQIRFETPGRRYFDKKVAEGKTKKEALRALKRRISDAVFQRLITDQQRATS

SEQ ID NO: 260795 - protein, 350 aa, unidentified
MLIVGCDFHPGWQQIAVFDSDTGEVNEYKLSHGNGEAEQFYRKLPAPARIGLEACGNSQWFVDLLQKLGHEVWIGDAAQIRASYVRKQKTDKRDAMHILKLLLEKRFPRLWTPTPEIRNQRQLLVHRHKLVRLRAQVKNELQHLAMNQGVQKKARLWSQAGQKLLRDLPLAGWAASRRANLLELMKLLDRQIAELDGALQQAAEANPQARLLMTQPGVGPVTALGFVLTIGDVSRFPRGKQVASYLGLIPREHSSGGRQRLGAISKQGNRFLRQMLVEAAHSGVRPDEGFRKQYQHRCHRKPKGVAKVAAARKLAVRLYWMLRTNIGYPEIVHIESSPMVPLVDKIRPKP

SEQ ID NO: 260796 - protein, 452 aa, unidentified
MVFVRGADQAEFVSRLRGVSLDRVLLVPIDVGKRSAMALVANQLGELVVEPFEFPLDRAGVDQLLDQVAGAEGDTDAVMVRFGIEAAGHYHRTVSETLQAEAIEVVELHPGTVHKARAEMGQRRLKSDQRDLAAMVEVMARGGGRPSRWQQGPIAVQAVWSAHRRRKVKARVTIGMQIVSQLDLVFPGFGDCFKDVLGAKGGHVILRYCPDPVRIKRMGPEGLRVFVKEKGVRMTRAKAALIVEVAHRALLVPEAERKARMRVLRADLSVYDKICAEITHAEAELAAVIDHTPAAVLTSLPGVGIPRASAYGAALGDPWQFTSANSAWRYSGLVPVEHDSAGKRRPGLRISREGSTPLREAILELGKGLSDHHPEFKAYKQRKITQGKKKSVAAVAVAHRAHRLAFAMMRHQTGFDPELWQESVKAGGSVTVASSDRHDVTRPPAVTMTAAG

SEQ ID NO: 260797 - protein, 482 aa, unidentified
MKKKNIYSNQSQELLTLFEEAGNGAKVMCVPIDYAKKDHVAMLCNGNGHILRKPFSVKNSPEGIVYLTEQVTRSCSHRQIDLKHVFFGGEDVGSYAENFVNTLRSGGWIVAGVNAHDAKEQRANMQASTDRLDLMGIASMLLNRRGNCSPAQSGIYRNLRTVVRHRKKLVAMSTEVKNRMHTVVDRLFPGFLDEKKSGILSFSKSSLYLMEDRFSPRQIRRRKQPKLIEILHRYGTKKAEDTAKKLKGYADCVLGTPNEYISTFQLSLTQHVNHFRCLRGSIEQLEHEIAVWLAQTEGAFLTSIRGIGIVLAAGTAGEIGNPHEQEPLNNLVSYSGIIPRVKQTGGSEGKTYTGKVAKRCNRILKDYVVQSGNHMGLHGPEELMADYKRREAAGQHADFGIGRRYLRTAMCLMRTSQIYMPEQLRNTKVQPEERAGYYLSIWPYLRKKWKKAGALDAAFEKDRPLGQWRCMVQELYEIKLKL

SEQ ID NO: 260798 - protein, 366 aa, unidentified
MPRVHQSRDVVHVAFDTSKQTLVAGVLRPGEETPTTERIFNDEPSVRRFVKGFAEAGALRTCYEAGPCGYELYRLLASLRVPCQVIAPALIPLAPGARIKTDRRDARRLVRQFRAGELVAIRVPSREEEAVRDLCRARGDALEDLTRARNRLGHFLLRHGRIWRGGSTWTFKHRYWLAAQSFDHPALSATFERYRATVECREVELAALEADLARYADEEPFAGPVRRLAAYRGVERLGALVLQAEVCDWRRFSGVAEAGAFCGLVPSEYSSGANVWRGSLTHAGNAHLRRQLVEAAWAYRTGPSLGPALRRRQEGVPAETVARAWATQLDLCRRFRSLDARKSVRGVVVAAIARRLVGHLHAEMVA

SEQ ID NO: 260799 - protein, 346 aa, unidentified
MNRMNYVGLDIHKKSISCCVRRADGTIIQEITITATRQALDEWMQQLPQPWMAGMEATLFTGWIYDHLESCGATVKVAHPAMLQAIAAGKKKNDRVDARKIADLLRCDYFPECHMAPREIRDRRRVLRYRNLLVRQAVQMKNKVSGLLMEAGVPYNQQKVHQKKYFAELLQKQKKEMPPSMPELLRLSRSTVEALTGMQRQLIRALERDALLAARVERLASMPGVGRVVALTWALEMGDIRRFASVKKAVSYCGLCGAEKSSGGKTERTPISKQRNKHLQTILVEAAKLAPRWNAELALVYEREKQKGNRNRATLAVARKMVAYLMAVDREQRPFDTQLRVAGNAA

SEQ ID NO: 260800 - protein, 357 aa, unidentified
MKHYIGCDAHKKYSVFTMIDETGKFGLTRRVEHDREGYRSFLQTLPPCSPIAVESTGNWYWMIDEIEKAGHIPALVNAGKAKLMMGGINKTDKLDARGLAILSLNGTLPAIWIPPGELRDQRELARMRIVLVHMRTSLKNRIHATFAKYAITFEEVSDLFGIRGRQLVEKRLEELPPETRHSVEEQLKLLDQLQQQIGQAEQRIRQVIKITPEIQLLMSLPGIGPILAVLIGFEIGDVARFGDAAHLASYAGTVPRVKSSGGKTYYGKTRPDVNHYLKWAFTEAANAIVLNQHRMAGRHVARLYQRLSQSKGHAKAVGALRRHLAEAAYVILKNRQPYHEPAPTKPFAAKGVCAILA

SEQ ID NO: 260801 - protein, 376 aa, unidentified
MENDSTLYVGLDVHKDSITVAYALGAGEVQLLGKIGTTQTDIDHLCKRLQSKARRIRIVYEAGPCGYGLYRRLVQKGFDCMVCAPSLIPRKPGERVKTDRRDAIKLVRSLRAGDLSAVYVPSVEDEAFRDLSRAWVSAKDDLKRARQRLKAFLLSHGVRYTGRADWGPAHRRWLSTLAFDSAWQQLAFDELRRTIEDRLAQCARLEAALREAVLDWRFYPAVLGLQTMRGVQFTTAVGMLAELGDLSRFAHPRQLMAWLGVTPSEHSSGDKRRQGSITKNGNSYARKLLVEAAWSYQHPARVSPDIQRRHEGIPKPIVDRAWDAQVRLCRRYRKLVARGKQKNIAVVAVARELAGFIWDISQLAMSLAVPREVFTT

SEQ ID NO: 260802 - protein, 370 aa, unidentified
MRKTEEMPRICVGVDLHKLQFTVSAVNEGTGELVLNGVFKTNSEGYEEFCEKIHEIEETTESIVEIAVEATGNARYFKNKMEAEGFGVVVVNTSKFKVITMSTKKTDANDAATLAYYLSKDMLPESHLCDQTSEEVRRMLKTRSILVSSTVKIKNQIHGMLLGYGIETKSAQFQSKKKRQELLKDLADQGYSQFTASSLEVTLNILDDIYAKVKMIEEQIKEMVKENENVELLMTMPGIGFVGATTIASYLSNIERFDGDFKRFSSYLGIVPRVHNSADSVHMGHITKRGPQDLRTAFVQVAMGIIRQPQNTAEWKLMKDYQLMKVNKGSGRAIIALTRKVARIVFAMLNNHEAFNPDLMKKSEKDCLIA

SEQ ID NO: 260803 - protein, 410 aa, unidentified
MGLFCGIDWATEHHDVAVIDDDGHVVARGRVSNDAPGFAALLTLLAQAGDSAADPIPVGIETDRGLWVAALRETGRTIYPINPLAASRYRARYGVSGAKSDATDAVLLANIVRTDPGAHRPLPADTELAQAIRVLARAQQDAVWARQQIGNQIRDLLKDFYPAALTAFADLPEGRLARRDARTVLAAAPTPAQAAKLTPARLRRLLIKAGRKRYLDRDIARLCEVFTDTYLHQPPVVENAMGIHLAALLGQFEAACTAADALAEAAVAHFEQHPDAEIITSFPGLGMLVGARVLAEIGDDRSRFADARGLKAFAGSAPITRASGKKTVVLHRYIKNRRLAAVGPIWALGSLRASPGARRHYDARRAAGDWHQQAQRHLFNKFLGQLHHCLHTGLRYDEHLAFQSPLQIAA

SEQ ID NO: 260804 - protein, 354 aa, unidentified
MTLTKYIGMDVHKESISIAVMNSTGKFVMECVIETKASMLLQFIDGLRGDVRITFEEGTWAAWLYDLLKPHVSEVVVCNPRKNALLKDGSKSDRIDARKLAELLRGNHLKPVYHGEQGLRTLKELARSYLTISKDVTRVMNRLKALYRSWGIACAGIQVYAPRHRSEWLGRISEAGVRRRAEHCYEQLDVLRLLRQQVRRDLLLESKKHQAWRLLGLIPGIGPIRAALLIALIQTPHRFRTKRQLWTYSGLGLETHDSAQYRVVEGQLRSKKSVTLRGLNQNHNHDLKDIFKGAATRASSSSGPLHDFYEHLLAQGRKPTMARLTLARKIAAITLIVWKKEVRFDASYLKSQAA

SEQ ID NO: 260805 - protein, 424 aa, unidentified
MSVNNIHPSRPALLSNPGPGDLAREGVTAGVDWASTEHAVAVVDQQGVELRRATVPHTKAGLSQLLGMLNRAGVREIGIERGDGPMVDALLEAGFVVFVIAPNQVRNLRRRYGAAGNKDDHFDAYVLADTVRTDRHRLTPLAPDTPPTVTLRMSVRARQDLVAARVAMANQLRAHLTIVLPGAIGLFRDIDSAITLAFLTRFPTQAKVNWLTPRRLENWLRSQRYPNPRRAELLHAHLAGAARGTTDPQADTRAHITAALVAGLQSLRMQITTLEDDIGQQLLVHPDAQIFTSLPKAGTMRAARLLAEIGDCRSRFPTPQALTSLAGATPSTRKSGKVTVVGFRWAVDKQLRGAVMDFAGDSHHANPWAADLYWKARHRGKDHSHATRILARAWLLVIWRCWQNHEAYDPVRHRAYQALQNTVA

SEQ ID NO: 260806 - protein, 385 aa, unidentified
MRPFGEVVISPFEVRHTDSELSELARRLKSLNGETRVVMEATGNYHAPVAKLLHDAGLYVSVVNAKLVHGYGNNDLRRVKTDRKDAIKLANYGLDRWLTLPRYIPEENTRLLLKNCYRQYRQYSKVQTVLKNNLISLLDMTFPNANRLFNSPARADGSEKWVDFVAEFWHCECVSERPIKSFVNKYWRWCRKHGYNFSEEKAHAIYDEASGHIGVMPKSETTKLLVEQAVSQLSATSAALAALKQEMQSLSSQLPEYPVVMDMFGVGPTLGPQLIAEIGDVRRFYSKKALVAYAGIDAPPNDSGDVIGRHKSMSKVGASSLRRTLFLVMSVYLQNSPPNEPIYQFMNRKRAEGKPYRVYMMASANKFLRIYYATVKAYLETLEQI

SEQ ID NO: 260807 - protein, 387 aa, unidentified
MAQVDDLSRSLVPFEQNDTLVAVLEMSQSSWMAAGVVPGIERRPLKKLDPDPAALLQLLERWRDQAAKASRAIPRMVLAFEAGRDGFWLARWLRARGIEAHVVHSTSVAVSREHRRAKTDRLDTEMLIRVFLGWLRGEPRHCKMVAIPTIEEEDARRPSRERENLVGERTRIINRMKAALIRLGIRGFKPELLKAPQRLETLRTPEGVSIPFNMLAEMRRDMARLAWVREQIDTIERARLDHLEHAPADGPHGMVRLLARVVGVGVETADMLVQEVLSRNLRDRRAVARYAGVTGSPDESGAKRRERGLAKAGNARVRRGLMQLAWRFLRFQKESALAKWYRDRTEGAGKRKTTMIVALARKLLIALWRMVTIGEIPAGVTLREAAV

SEQ ID NO: 260808 - protein, 435 aa, unidentified
MEEVSDEPLYRDRVCGIDIGKAGLVATIRVPSEKDPARRAAGTRSFGTTKREVLALADWLRSWQVPAVVMEATGDYWKGPFYRLEAEGFECVLADAKQVKNLPGRPKRDPADSRWLAACFERGAVTACFVATPEFRVIRLHTRYRRDLTEERTREKQRAEKLLESAAIKLSSVLTDLHGVTGRDIMDHLIGGEWNPKVLAQLARAAARRKISQLEQALEGAEFFTPAHAALLAKVLERIDRLTADIGDLSQVIERLLAPHEEQLAQAESMPGWGRRAAQDTLAETGPDMSRFPSGAHLASWAGRTPLDHQSGKRAGRSTAKKGNRYLGAVTGETAVAAGRTQTREGARHRRLARRRGKAKACVATGNTQLKVYHKLLSSPGMRYQDLGPDYYERQRDARRQVAHHVGKLGALGFEVTLCRILEPEPDPTGPAQAA

SEQ ID NO: 260809 - protein, 354 aa, unidentified
MKDQAIQYVGLDVHQATVVACVRDERGAIVMKATVPTDAKAIVTLVRGVGPRVEVAFEEGTQAQWLHDLLEPHAERVVVCNVRGKSELTNKSDRIDASDLSEHLRTGSLKPVYHRATDMLTLKELVRNYNNLVEDATRVMLRIKALFRARAIRTSGTSVYRAAQRQAWLDQLPPGARLRAKTLLEQLDLLLELRPKVKAAMIAEAKKHPGWKPLHSMPFLGPVRVAQLMAIMGTPHRFRTKRNIWPYAGLAVVTRSSADQQFADGKLRSRTRAPRTRGLNRNHNPMLKSIFKGASTAAATKPGPLKDIYDACVAHGTKPELARVTLARKIASIALRLWKKGELWDPKKLTLQTT

SEQ ID NO: 260810 - protein, 363 aa, unidentified
MKIMVGIDLHSNNALCGLMDESGRRLVHQKLPCGLTAILQLLEPYKDRIATIAVESTFNWYWLVDGLQDHGYHVVLANPAGMQPYSGMKYTDDVSDAYFLAELLRLNLLPTGHIHDRKTRPGRDLLRRRLLLVRQRTMLILSFKSLNERTLGQRVSLARVKTMKAEEAQARFTAPADQLLSGTEIELMGHLTAAITKIEQHLLGVAGKWPTYQRLQELPGIGKILGLTIALEMGDAQRFADAGNFASYCRCVKSLRTSNGKKKGENNRKCGNKYLAWAFVEAAHFACRYDDQCRRFYDRKKQQTNPVIATKSLACKLAKAAWHVMKEDVPCDPTRVFGPAKKSDFGETGREPANGSGPPSQTD

SEQ ID NO: 260811 - protein, 338 aa, unidentified
MDRQYVGIDFHRRRSVIVRLDGNGERLGLHRIVNDPGELMAVMALCGEGPEVVIEATYGWYWAVQLLQDLGARVHLANPNALNWGDRRVKNDERDAHDLADMLRLNRLGEAWIAPPALRELRELVRYRAKLVHLRSGLKAQVHAVMAKEGVLPKHTDMFCIGGNRQLDAMELGAPFAHRVRSLRELIAVYDREIVQLERDIHQHLKHDRGYQAIQAINGVGKISAAVLVAEIGDVTRFPTPQHLSSWCGLTPKHRESDLKTRRGRISKQGSRLVRATLIEGISRYHGGSILDAQYRKLAKRRGRNKARIALARKVLTLVYYGLRDGEIRCLAKAETAA

SEQ ID NO: 260812 - protein, 410 aa, unidentified
MEVMFERVAGIDVGKASLTVCVRTPGARRGRHSETRTFKTTTGSLAVMRDWLVEHRVTIAAMESTSTYWKAPFYCLEDVMAVWLLNAAHMKAVPGRKTDVRDAEWIAQLLEFGLLQPSMVPPPPIRQLRMLTRYRVQLMGDRTREAIRLEMMLEDASIKLSSVASSLTTLSARVMLEAMIEGERDPLVLAEMAKGKMRRKIPDLAQALDGHFDEHHARMAKTILGRLDMVEESLTELDQVIAAKCAPWAHQIELLQTIPGVGEKVAQVIVAETGADMSRFPSAAHLAAWAGVAPAIYESAGKRTPSGKRHGNKWLTAMLVEAAGSVGRMHGSNYLSAQHARLAKRRGTGRAQVAVAHSILVSAWHMLTKDEPYQDLGADWLARRNDEAHTRRLVAQLERLGHTVQLDSVA

SEQ ID NO: 260813 - protein, 454 aa, unidentified
MHNNANPTAAENPPVCRRTLVGIDAAITARHHIAILDDPGGKPTRFSVDPTLAGLRTLTGRLRGYDDVHATVEPTSMTWLPLTIAVENAGGTMHMVGARHSARLRGAIVGKSKSDVIDADVLTRAGQVFDLEPLVLSTPAQLALRRAVIRRGAAVIDANRSWRRLMSLARWAFPDVWTAFAGSLATATAVLQRWPDLRALASARRATLTAVVAAHTRGVGDTPARAEAIKTAAAGWAAFWEGHLDLDALTVDVIEHLTDLADGQARVARFTDHSTRWWEHLYGDDELLLSVPGMGPVTAATVRAFLGDGSRFSSAKKAASYVGITPSTWSSGTMSQPRRAISKEGPAPLRLALFQAAGAARRTDPQLAAFYHRMMTTQGHCHTQASIAVARKLTERIWVTITTGRRYQLRDTNGDPITSRAAKEIINTHCHVDASTRARTRAHTSVARKSKLPH

SEQ ID NO: 260814 - protein, 431 aa, unidentified
MEKIREKAAGIDIGAQKVFVAVEGQEVKSFYTFTEDFEKLCGYLVKCGIETVAMEATGVYWNILYEMLEESGIDAWLVDGRQTKQVPGRKTDVKDCQWIQQLHSYGLLKRCFVAEADIKELRIYQRLREDHIRSASMHINHMQKALTEMNIRLKEVLSQVHGASGLAIIKAILNGERDKDALLKLCHQSVIKTKKEEILKALNGRYTKSGLFALKQAFDSYCFYQQQIEQCDQMLQETLKRISGGKEQKVKSRRKPIRHNKPDIDNLGGMMMKIFDGKDATTLSGITDYSWMQLLSETGTDLSRWPTEQHYTSWLGLAPCKDTSGKMYRRKRKMGRPKAGQIFRQIAHSLLNSKRIALGAFGRRLNARKGPYIAIKAVARKLAETYWRIMVKGMEYVELGVKKYEEQILQQKQRSLQRLAKELKVQIIYNE

SEQ ID NO: 260815 - protein, 402 aa, unidentified
MNAVGIDVSKGKSMVAIMRPFGEIVSAPFEIKHTASGINSLVELINSVEGESRIVMEHTGRYYEVLAHQLSEANLFVSAINPKLIKDFDNDSLRKVKSDKADAVKIARYTLDKWQNLKQYNVMDELRNQLKTMNRQFGFYIKHKTAMKNNLIGILDQTYPGVNTYFDSPARSDGSQKWVDFASTYWHVDCVRKMSLNSFIDHYQNWCKRKKYNFSQSKAEEIYGKAKELVPVLPKDDITKLIIKQAVDQLNSASTTVESLRTLMNETASKLPEYPVVMAMKGVGTSLGPQLIAEIGDVSRFTHKSAITAFAGVDPGVNESGSYEQKSVPTSKRGSSDLRKTLFQVMDVLIKTHPQDDPVYQFLDKKRAQGKPYYVYMTAGANKFLRIYYGRVKEYLSSLPES

SEQ ID NO: 260816 - protein, 338 aa, unidentified
MSIVGGLDLHRKQITFDVLDTDTGQLLRGRIAPANRELFRGWLGQFAGREADLAVEGCTGWRFVVEECQAAGVRAHLAEPADVAGLKGRRQHAKTDRADAQHLRELLEAGKLPESWIPPTLVREMRAKVRLYKDLLDDRGGWQQRIAAVLYHHGAPPRPDLLHGERQWLDTEQALSPSGRQAITVAWRIIDALDTELLRLRAELTGFARRQTGCRALQHEYGIGPLTSVVVWSELGDTRRFHSSRNAVRHTGLDISVYSSDGKRSRGHLTRQGPALLRWALYEAAFCASRSGSPDHAYYQQIADRLGSRRAMMSVARKLARRCHHRLRALGDEAFTTA

SEQ ID NO: 260817 - protein, 343 aa, unidentified
MYYIGLDVHKKTISYCVKDAAGQVHREGKIGSTRRELDAWVMTLPQPRTIAMEATIFTGWIYDHLLPHAEKVKVAHPLMLPAIAAAKKKNDKIDARKIADCLRCDFLPECHMASTEIRDRRRVLRYRGLVIKQMVQMKNRVSGLLMETGVDYNKRRLHKVGYFEDMLKTNKEVNQSIRPLLKLSRETIERSQKLDYALVSSLERDPLLAERLRRLRTVPGVGPITALTWALEIGDFTRFPSVKEAISYCGLCGDESSSADKVLRMPLSKQRNKYIQRTLIEASKLAIRYNHELAEVYEKERERGNANRATLAVARKLVAYLLAVDRRKQDFVPAEVFRAMTAA

SEQ ID NO: 260818 - protein, 398 aa, unidentified
MFVGWDWASTTHDVTVIDNHGRTLDRWAAEHTETGLDQTLARLAGHGRPEELPVAIERPSGLVVDRLLAAGHPVIPIHPNAFYATRPRWGAARAKSDPGDSYKLADYLRTDGHRLRPLRPLDAATRQLQALARVRDDHVAAKTAASNQLGALLDAHWPGAKQVFSRLGSQIALAFLDAYPTPESAARLGQARLAAFCRRHSYRGGRSPAELLQRLRAAPTAPVGLPPEVLTELVGAQVRLLRTLLATIADLDRALAAGLLGHPKARLLETLPRIGEVNLAQVVAEVGPILDRAGDVEHASAECGATPVTRASGKTKAVAFRWAANAKARQALTTFASNSRHSSPWAAKLYADARRRGKHHPHAVRILARAWLRVIWACWHHNTVYDPAKHGAEKRLAA

SEQ ID NO: 260819 - protein, 365 aa, unidentified
MITDNYTTIGMDVSDRKIQVCVMTKSGVNPKIVKETTIPTTKVGLQKFLSKQDKNSPVAFETGTHCRWMHEVAKEMGFKVYVANPCRLRMITESKTKNDINDARMLARIALSDPGLLHPVKLRDAEHQKMLNLHEMRNLLVKQRTANIVQMRAIAKSMGFRIPKTSTNYFHKLDRSSWPKDFSDIVWPMLKNLEQLDITIKTYEKLIKELAETPTFKAQVDRLREIHYVGLYVATGFVAVTGGDMDRFEKPRDIGPWLGLSPKQDQSGDIDKQCHITKAGSPLVRRLLVESAQMILRDGSIQTNLKMKGMRICARGAKIAKRKAITAVARSLAVLMVAMLKKMDTPYVPLSEANEKELAAMLVSA

SEQ ID NO: 260820 - protein, 406 aa, unidentified
MRYVGIDIAKKDHQIAAVDEFGNVILKSFSAGNNESGFAKIAEKLEAARIESDECLVGMEATGHYWISLWEFLDANDYEVVVINPNQTDAFRKVDSLRKTKTDAIDSVLIAEYLRFANPESSKMANPDVEQLRELARFRSFLVEQATQLKNKALRVLDQAFPEYGKLFSNTFGEASKALLKQCPTPEEVLATDIRTLTRILKENSGGNCGRAKAEAVKDAARSSIGAKFGARALSFEIKLLVKRLSFTQVQIEELEDEISELLHRSDGHWLTTIPGIGDSLAASIAGEIGDPDRFETPKKLIAYAGMDASKYQSGANQDTNGHMSKRGSSELRRALMLAADKVRIYDPYFGEYYDSMKARGKHHYVALSGVARKLAGVCLSLMREQRPYESEPPEHHLPGHLQRQA

SEQ ID NO: 260821 - protein, 470 aa, unidentified
MSRSQSPDPFAQGEIRSTEGLPVVNPHAAGADIGAESIYVCIPGPGQTQIVRSFGTYTADLHAIADWLVENGIQTIAMESTGVYWIPLFEVLEGGGIHCCLISGNMARRLPARHKTDVLDCQWIQTLHSLGLLTESFRPDADLIALRSLLRHRAQLIEHRSPHVLHMQKALIHMNIRLDQAVSDVTGQTGLAIIRAIVAGERDPHKLAALRNPRCKKTEDEIAQALTGTWREEHLFVLKQSLEFYDFYTRQIEACDLEIERTYSAIRPDWPDPAPDDREPLPPNKRGSHSKNLPKETPIRVRQHLRRLTGVDITAVDGLSLDLAQKIVSEIGTDMSQFPTVKHFTSWLRLCPNNQVTGGKTIRSSTGKSHNRARQAFLQAAASVACSDCAFGAFYRRLKARVGPAQAQVATAHKIARVVYHMLKFKVEYLPTSAQEYEQQFREREIRHLQRKAARLGFTLSPQPASGAVS

SEQ ID NO: 260822 - protein, 339 aa, unidentified
MYYGAIDLHKNNSVLGIINADGQRLYVRKIPNDLDLIKKALGPFAENLEGIVVESTYNWYWLVDGLQDAGYRMHLANPTAIQQYSGIKHTDDVTDAWWLAELLRTKQLKEGFVYPRAERAVRDLLRKRAHLVKQRTQNILSIQNLTSRNTGGRLNANQAKQLTEEAVLKFYDQEEERALAINCSLRVIQTLKREITLIEKQVKSKLKLSQPYQVLQSVPGIGELLAMVIMLEAGDMSRFPSVGDFSSYCRCVNSVRLSNGKKKGSGNRKNGNKYLSWAFMEAAHYAIRYYPVIRKFYQRKSAQKGMIVAQMAVAHKLARASYYVLRDQVPFEESKSFVH

SEQ ID NO: 260823 - protein, 427 aa, unidentified
MPYRIAGIDVHKRMLAVVVSDVEIDGEYVFERRQFGGNPAQLRLLADWLLEQQVEEVVMESTAQYWRPVWGTLERYWKPVCQKRDGARPTSGTLHLAQAQSNRARRGRKKDFADAERLVKRLVANELTLSFVPDPQQRLWRTVARAKYQQRRNRVQLQGRLEALLEEAHIKLSSLVSDLLGASARRMLKALAEGETDPGALAALADYRLRATPEQLRDALGACQELHPVYRRLLKAVLEELELIEKQIGQLDQEMADLLRPHQDQVERLAEVPGLGVDSAQQIIAQVGATAATFPSEGDLSSWVGACPGDYESAGVSYSHRSPKGNRPLRRILNQAANAAVKQKGSIFELLYRRYVPRLGHNQTIGLIAHRLCRLIWKILHQGVRYKEFGPAVSGKSKHRRAARMIRELRSLGYRIELANPQSAVPA

SEQ ID NO: 260824 - protein, 422 aa, unidentified
MLQEDEQNEEIIARVAALDIGKAELVCCVRIPHEGRPGRRLQEVATYSTMTRSLLRMADRLAELEVTRVVMEATSDYWKPVYYLLEAHGFEAWLVNARDVKHLPGRPKTDKLDAVWLCKVAERQMIRPSFVPPPEIRRLRGLTRYRCDLVEARTAEKQRVEKLLEDAQIKLSVVASDIFGVSGRQMMAALIAGQRDPKVLAQLARGRMRPKISQLEEAFTGYFTDHHSYLLVKMLARIDALNADIAELEDHIEEMVAPFATAVERLDEIPGLGPVAACAALAEVGPDMTRFPTAGHLVSWAKFAPAVKESAGKKKGHGSTGHGNRYLAKVIGEAAVAAGKTDTFLGERYRRIARRRGAKKAIVAVGRSILVIIWHLLSDPEARYHDLGSDFYDKRINPERKKRAHIHQLEALGYKVTLEPAA

SEQ ID NO: 260825 - protein, 359 aa, unidentified
MINVGIDVHKRICQACLKDGQGTIIEEFRFPNNHEGASRLAMILKKHGEARVALESTGNLWVKLYDRLDEEEGIDVILTNPKKTRIIAEAKIKTDKIDARILSDLVRADLVARSYVPPKEIRLQRALLRERISLVESRTMIKNRIHALLDKYDLQPHYTDIFGKHGREWLRTLQLPSIDQTILEVNMQRLEELEAHIDAFTSKIAQEAYDKPEVKLLMGFTGVDYYSALLLASEIGDVTRFPSAKKLVRYAGLAAGTRQSADKTVQGHIVKEGNKRIRWILVEAAQHASRHDPRLRGFYLRVMKRRGYQRAIVAVARKMLVSIYHVLSKNEVYYGERTELLERKLKRLEWKATHSLQAI

SEQ ID NO: 260826 - protein, 351 aa, unidentified
MPHKLNSGIAVIGVDIGKNSFHVVGHDKRGAIVLRQKWSRGQVEARLANLRPCLIGMEACVGAHHLSRKLQMLGHDARLMPAKYVRPYSKGQKNDFRDAEAIAEAVQRPTMKFVATKTAEQLDLQALHRVRERLVSQRTGIINQVRAFLLERGIAVRQGLRFLRAELPRILAASCDALSPRMLRVIEDLAGDWRLLDQRIEGLSSEIEALARKDKDCERLMTVPGIGPIISSAMVAAVGTGDAFSKGRDFGAWLGLVPKQISTGDRTILGSISKRGNRYLRTLFVQAAWVVLVRIGPKHWDRYGLKSWIEAAKKRLHHNVLAIALANKLARIAWSVLAHGRAFEATKIQAA

SEQ ID NO: 260827 - protein, 342 aa, unidentified
MEEGGTVYQLYVGIDVAAETFVAAWLAPGGKPVTGEQTPAGCAALQRRLRATAVAPIATLVVLEATGNYWVALAVALHEAGYRVAVVNPRQAHHFAKAQLRRAKTDALDARDLARRAAALRPAPWSPPPAVDHEVRQRLVARDGLLAMRTQARNQRHALPQWPVVVAAVRQHLDELVADLDRRVVTLEAEIAAILKESVWAESLACLTSAPGIGLVTASWLLVGTLNFALCPGPESLTAYAGLAPMPRESGHTIRGRRAIGHDGNGRLRTAFYMATLSAARYNPAIEAFYQRLRAAGKPKKVARCAAARKLLHQAWALGSKLQRFDPDHQQQQHDPLPQLAA

SEQ ID NO: 260828 - protein, 404 aa, unidentified
MYYVGIDVAKEKHYVCILDDTNEFAVKPFWIYSDVLGLRELLKQMADISLNNDDFIIGVESTGAFSENLYEYITDADYNVILLNSYQTAKYRDFSTMRKIKNDAIDAYVIAELLSSNKYKESHISSDDYHSLKVLGRLKRSLDDKIKTIKREISTVMATVNPEITLVFKNIFTKSALAIIKDYPTAVDIQKATPKKLTRLFRHIQGNNFNDEKAKYLIELAKSSIYGGRAHESRALMIKTNIRILELLSQEKLEIEVKINALIESGISKKLDAPIENLKSIPGVADKTIAAILGECGDLRRFSSAKALIGYLGLYPTQYQSGNSLSVGRLAKRGIPIAKHALYMAAVSSVLHNDELRKIFRDKVSAGKSKKEALIIISKKLATIMYSIFKYNTPYNSKRVLISK

SEQ ID NO: 260829 - protein, 422 aa, unidentified
MNEVHGKRQEEQRCWAGLDWGSETHAVSVVNDAREEVGRFKVEASLKGLEQLVQRLGGFGTVAGIAVEATRNPVVNYLASAGFTVYPINPKLSKNWRACNSVAGVKNDERDGLVLAVELAGRHASLRALEREDPAVAELAGLCEKLRDLVDERTSLLQRLKATLGQYYPGVLGFFTDWTSPVAWRFLQQFPGPEALAHARKDTLIRFLKANRIGIRPLWLERIEGRGEVTHWPRPGDQVALEAMALAIIAQLQALQPHIDKMDRLIAEGARHLPHAYLLKSLPGAGKRLVPVLAAITAPVASGEVEIEAIRCVSGVAPVEDQSGRRHRVGIRRRCNKHWRDIMHLFAYSSTHWCNWAKAFYDMHREKGDHHASALRKLADKWLKIIKRMLETGEPYDDQRYVEALRRNGSPLYLRLAEKTCG

SEQ ID NO: 260830 - protein, 352 aa, unidentified
MQHFIGNDIHTRYQVVAWIDEQTGEICKRRLEHTGEEVEKFYAQFSRGTIVGIEATLPAYWFERLLEKLGHELWVGDAARIRAYEVRDQKYDPRDAGNILDLLYAGRFPRIWVPTLEERDLRQLLVHRMKQVQARTQVKNQLHYLAMSQGLCRKRKLWSAQGRAELESLALLPWAARRRKELLEELDRLDEQIRELDRAVEEAGRERAEVALLRTHPGVGMVVALAFVLSVGPIERFPQSRKLVSYWGLNPREHSSGGHQRLGSISKQGNTLMRWLLIEAAQTAARYDPELRRTYQRLKSRRNSGVAKVAVARRLVVRLYWMLRTRHNYAQLVHMSGRPSSAVVPSEAGSRV

SEQ ID NO: 260831 - protein, 425 aa, unidentified
MKKKHQPKMDDQEVIYERCAGIDVHKKVITVCLRIGRKTQVREYGTITRELREMVAWLKENGCEMAAMESTGSYWKPLYNVFELEGIPAMVVNAGHMKAVPGRKTDVKDAEWISKLLSQGLLKASFIPNREQRELRELTRFRKSQIEERARNLNRLQKMLEGANIKLSSWLSDISGKSATELLELIIGKEDFTMEDIEECRHGNMKATTEELFNSLEGVVTPVQRELFKHVMKVLKEQSAQIVETEHLISSYMGEAYKAASEAIDAIPGIGRISAQQIIAEIGYDMERFPSAAHLCNWAGVCPGNNESGGKRKSGKTNYANKTLKSTLTQCAQSVKKKKNSFFNAQYQRLVVRRGKNRATLAVAHSMLIAIYHVLKGAEFRDLGDDYYTRFNKEKKIYSYVNQLKKLGVNIPDSVIRPAVMPEVA

SEQ ID NO: 260832 - protein, 343 aa, unidentified
MQAVTTIGLDIAKSVFQVHGVDAEGKVVIRRQLKRRYVLAFFQKLSPCLVGIEACATSHHWSRELKALGHTVRLMPPAYVKPYVKRQKNDATDAEAICEAVTRANMRFVETKTPEQQSCLMLHRTRQLFIRQQTSVINAIRAHLAEFGIVAPVGRKGVEQLLAVVTDASDQRVPELARACVAALGAHLGRLKAQILEFDRRILAWHRSNETSRRLDAIPGIGPALATALVASVADPKAFRSGRNFSAWLGLVPRQHSSGGKHRLGSISKQGDRYLRSLFTAGALAVIRYAKIHGTKHRPWLTALLARRPTKVAAIALANKIARMAWAMMARGERYREPVALAA

SEQ ID NO: 260833 - protein, 324 aa, unidentified
MTHDSPHVISSLFVGIDVAKDKLDLARSDAGEMLTFSNDDRGIRCLVEGFTMHRPQCIVVESTGGLERRLLDALLDAGLPVALVNPGRVRHFAIGMGILAKTDPIDASVLMTFARLAEPRLTQKRTHNQAELDDLITCRRQLTLARTAQANTRLTTRSAAAQQSIDAILKALDRQIELLDQKIRKLIDSDDDFKHLDRLLRSVPGVGPVLSSTLVAELRELGTTDRRQIGALVGVAPFNHDSGKFTGKRSIRGGRVQVRCVLYMATLAAIRFNPVLRRFADRLRKKGKGAKVIIVACMRKLLSLLNAMIRDNLTWSELQVVKAL

SEQ ID NO: 260834 - protein, 339 aa, unidentified
MKYIPVGVDIAKHLMQVHFVDEHTGEIIDKQVKHEKFLEYFSNREPCLIGMEACGGSHHWARELQKLGHKVRLLKGRFVKAFVMGNKNDVMDARAIWLAVQQPVKSVAVKSEEQQATLGLHRMRQQLVKFRTAQINALHSLLLEFGETTHKGRAALAKEVPEALERLKERLPLYLINMLDEQYQRITELDEHLDHIEKQLQAIARQNETCQRLLNIPGVGPLIATAAVATMGDASAFKSGREFAAFIGLVPRQTGSGGKIRLLGISKRGDKYLRTLFIHGARAAALLTKEPGPWITELKKRRPASVAIVAMANKLARTVWAIAAHGRKYDKNHVSIRPD

SEQ ID NO: 260835 - protein, 472 aa, unidentified
MTEQKTLCVGIDVSSRHLELACCDGWGVPVGRTHSFPNSPAGIEALCDAVVASGQKLGSDLQIIAGLESTSDFHRPAAKALAGETRLQIQVHVLNPRKVKWFRHLELKDTKTDRVDAELIARFVAKIRPQPQAVVSEGCVQLQDATRTRRRCMEDRSRLKNRLHRLLRSYWPGWREAMSKHFGGRTLVALKACPSPHDALRRGAGRIAQLRNSDGKRIGRIFSDKFVAVAKVGPTPQLPIMVCISIQDAAARILQLNSFLKRLDAAIAEELERVFPDNVLLSIPGLGPVSVASILAEIGDIRRFPNKEVFIGYCGLYPIAWESGNTKLRFCMTRKGNRMLKLSLLLASGSARQCNPFLRHFYTRLRERGKSAKAAGGAVARKLAEIVWVTLTRNEPWSEEIALRGIAKSELMTQTQQGERRLTGDAAGQTPVAQPIKAATRSRAPQPDSTRLAPAGQAPNHKHRRARLPVAP

SEQ ID NO: 260836 - protein, 344 aa, unidentified
MDHFAGLDVSVKETSICIVDDAGKIVREVKVASEPEALLAVLKNPAYHFKRIGLEAGPLSQWLFSALADAGLPVICVETRHMQAVLKAQINKTDRNDARGIAQMMRAGLYRPVHVKTIRSQKLRMLLTHRKLLQSKAIAIENDLRGTLRNFGLKVGMVGKVKFEARIKELVENLPDLAALVEPMLIVRRTLREQIVILHRRLLAIVRDDEVCRRLMTTPGVGPVVALTYRATVDVPARFRKSKAVGAVFGLTCAKYQSGEVDRNGRISRCGDEMMRVMLYEAAQSMLRSKKWSWLKAWAMQIARRRGMKKAIVALARRLAVIMHRIWVDGTEFRWTREQATAAA

SEQ ID NO: 260837 - protein, 351 aa, unidentified
MAASTRFIIGGVDTHTATHHAAVIDRNGRLIDDAEFRATPAGYAAMLTWMRGKGTLTQVGVEGTGAYGAGLARHLHDQGIEVLEVPRPDRRLRRQRGKSDPIDAEAAARTVLAGTASGAPKLADGPIEAIRMLRVARTGAVKACTAARNTLRSIVITAPEPLRSQLRAMSSAQLVAAAARLRPDLENLADPVQAAKHALRSIALRVQHLNAESRSLRTQLDALTKRAAPSASAVFGLGPDTVAALLIALGDNPDRLRSEAAFAHLCGVAPIPASSGKTNRHRLHRGGDRAGNSALHIAAVVRLRYDPRSRAYADRRTAEGMSMPEIIRCQKRYLAREVFRALRADYDELNT

SEQ ID NO: 260838 - protein, 344 aa, unidentified
MTYYDGLDVSLRSTNICVVDDQGELVAEGKKDAEVADIVSFLDELHVETTQVGLEAGTLTQYLSYGLQFAGFEVVCMEARQVKSALSAMRNKTDKHDARGIAQLLRSGWYSRVHIKSMQSHRVRALLTSRRAVLAKCIDLENEIRGIFKVFGIKLPPRLGHGSFDPHVRPLIEADQVLSQSLLPMLDARLVLYRTFRELDNRTRKLAHNDVICQRLMTAPGVDFITALTFKAGVDDPTRFRHSRTVAAHFGLTPRRFQSGELDLEGHISRCGDADVRSTLYTAANAMPTRSSKWSPLKAWGMKLAKTRGHRRAVIAVARKLAVILHRMWIDDTQFRWSTEAVRS

SEQ ID NO: 260839 - protein, 424 aa, unidentified
MNLTQNDRLNQVTADTLVVGVDIGSATHFARGFDWRGYEFSKRAFRFNNTKVGFLTFIRWVEEMMKKTEKTKVIVGCEPTGCYWLTFQKFLRDRDILLVTVNPYSVKKCKELDDNSPEKSDLKDPKTIAGLVREGRYSTPYLPEGVYAEIREAQVCRDQIMKQHVRLSNQIQGWLQKYFPEYLECYKDFDTASGMMVLEHAPLPEDIIKLGAGGINGLWRNAKLRGAGIKRAKTLVEAARGSVGLSGGEASRLEIWFLINDYQTKTKQLERLDEFLAKEILKVPHVEKLLAIKGVGLSTVIGFVADVGDIGRFTDPKQVQKLAGLEITKASSGKKKGRPCISKRGRRRLRRTMYESARSLISWNEAFSEVFMYYRYRTRNPLGGMQAKIAVACKAIRIFYTILKTGCEFDAEKLRRDIIRPEAA

SEQ ID NO: 260840 - protein, 304 aa, unidentified
MAKAQLDIALRPSGERWAVPNDASGVMTLVDRVQALHPTLIVLEATGGLERAVTSALATAGLPVVVVHPRQVRDVARATGQLAKTDALDARALAHFADVIRPTPRPLPDAQTQELRALLGRRQPLIGMRTAEQNRLAGTNARLTQAIAAHMTWLNAAIATLDDDLETILRASPLWRENDDLLQSAKGIGPVCARTLLLELPELGTLTRQQIAALVGVAPLHCDSGTLRGRRMIWGGRAHVRTVLYMGTLVATRFNPQIKVFYERLLAAGKVKKVALTACMHKLLTILNAMLKHRTPWQPQEVQS

SEQ ID NO: 260841 - protein, 343 aa, unidentified
MYFIGLDVHKKTISYCVKDAAGRVHQEGKIGSTRRELDGWIRTMPQPRTIAMEATIFTGWIYDHLLPHAERVKVAHPLMLRAIAASKKKNDRIDAGKIADCVRCDFLPECHMASTEIRDRRRTLRYRNLVIKQMVQMKNRVSGLLMETGVSYNKQRLHKVGYFAELMTTNKEVHESIRPLLKLSRDMISRSQKLDYALVSSLQRDPLLKERLRRLRTVPGVGPITALTWALEIGDYTRFPSIKQAISYCGLCGDEKSSAEKVMRMPISKQRNKHIQRVLIEAAKLAPSESPELALTHARELEKGNRNRATLAVARKMVSYMLAVERRQQYFVPAEEFRRSIAV

SEQ ID NO: 260842 - protein, 427 aa, unidentified
MSVTQNEKIRQVTDTTMVIGVDIASELHWARAFDWRGLELGKAVKFENSAEGFNFFLRWVSELTVEQKKDSVMVGLEPTGHYWFTLAAHLQGGDFKLVLVNPYHVKRSKELDDGHPSKSDKKDPKTIAKLVLEGRYVYPYIPQGLYAELRVAMNCRWRIRKELASIQNQIQRWLKIYFPEHSKVFGRFTGAGSMALLHSAPFPSDLISLGVEGISGIWKQMKLRGIGRKRAQRIYEAAQTSIGCTTGMEASRMELQILLEDYDAKLQQYERVMQVVENLCSQIPAVAELLKIQGLGRVTVAGLFAEIGDIRRFESPRQIQKLAGLAITENSSGKHKGPTEISRRGRSRLRAILFRAAIPLLAKNREFQLLHRYYTTRQNNPLQKIQSVIAICCKLLRVFYALATKDCAYSPEKMLADIQRNQPLKAA

SEQ ID NO: 260843 - protein, 343 aa, unidentified
MQTITTIGLDIAKSVFQVHGVDADGRVVVRRQLKRRYVLAFFQKLPPCLVGIEACASAHHWSRELQALGHTAKLMPPAYVKPYVKRHKNDAADAEAICEAVARANMRFVATKTPEQQSCLTLHRTRHLLMRQQTSVINAIRSHLAEFGIVAPVGRNGVEQLLGVVADSNDKRLPEVARACVAALGAQLRVLKVQILEFDRMIRAWHRSSEASMRLDQVPGVGPVLATALIASVADPKAFRSGRDFSAWIGLVPNQNSSGGKERLGNISKRGDRYLRSLFTTGALAVIRYAKIHGTRHRPWLTALLARRPTKVAAIALANKLARMAWAMMAKGERYKEPAALAA

SEQ ID NO: 260844 - protein, 421 aa, unidentified
MRGPRRKRMKAVKESTLLVTVDIGVASNTSYCATGDGRDIKPFKFENTREGFEKFWHMVVASKNRFGCDEIIAGYESTGPYAEPLAQYLMGKPVTMVQVNPMHTKKMKEVNDNSPLKTDDKDPRVIADIIRLGRTLAVVVPEGDAAYLRRLNNARERHVGEQTALLNQLQQLIFVIFPEFKTVVKNMKGKTARYLLTRYTTPEEISTVSRETLGEEMRKRSRGKYGRRDAELLIDLARNTIGIKEGVLGIVLDIRHILMQLEAEARFIAEIEAEMVMTLQRIPCSGRLLSIKGLGVVSVAGLIGEVGDFSKFRTKSEIMKLAGLDLYEVSSGKRKGERRISKRGRSLLRKILYYAAIQMVRTNGIMYDYYTRLTNRGMLKMKALIAVARKLLGIIHAIVRDNRDYVGAYQAPRRRMIKKAA

SEQ ID NO: 260845 - protein, 372 aa, unidentified
MKSVLSVDVAKGKSMVMLSTEYGEVLIEPKEVKHNSKDFDNIKNQINNFKLEDLTIFMESTGIYHLPVERYFKENGFNTLVINSLTTKNNYDTLRKTKTDTKDCIRLAKLFFVNEVKYHDLSKKDLYANLKAMTRQYFYLTQLNVSCKNRYKRLINICFPEFEEIFKGSRIYEETALNFIKTFPHAYIVKEKRIDALYNNLYKTNSRHDYYYKRLANKIKEVSIDSYPGVDKDHSDVKNLSDMASILQENIKTINDLKEKMIETAKKSPYFDIINSFYGIGETLTTELLGELGDITRFDNHKQLIAFCGLDPTVIQSGKSINVRGTISKRGNKYARWILFNISQMVVKLGHQCPNHPVYNYCLLYTSDAADE

SEQ ID NO: 260846 - protein, 354 aa, unidentified
MAVASIVQAHDPVRIIVGVDTHKHSHVGHAKDELGRDLGHLEVPTTGRGYATLLAWARDLGEVAAFGVEGTSSYGIGLARYLQSEGHLVLEVIRPGRQDRRFRGKSDTIDAEAAAAAVLSGKARNLPRASADKVEMIRALRIARGSATKAKTQAINAIKALVVMAPEEVREQLRELPSAKLVGTCARFRASRIVDPTSAVKASLKSLAVRHRALDVEIRELEDQLDELTSATDPLLRTRFGVGPDTAAALLLAAGDNPARLRSEASFSMLCGSSPVPASSGQTKRHRLNRGGDRQANSALHRIVMVRLRWHETTQAYMRKRLAEGKSKREVVRCLKRYVAREIYGVLMVRSERP

SEQ ID NO: 260847 - protein, 332 aa, unidentified
MVHFVGLDVSVKTTWVCVVDDAGKVILEQKAPTDPADIIAILSSLGVSFGRIGIEAGPLSQWLVNALTVANLPVICVETRHMKALLTAQQISKTDRSDARGIAQMMRVGLFKPVHVKTLVAQEQRMLLTSRKLLQRKLLDVESDLRGTLRNFGLKVGVVSGGRYEARIRELVAGFPRLAVIVEPLLSVRRVMRQQFAVLHKMLLDMVRADPVCRRLMTAPGVGAVVALTYRATVDQPQRFVHSRAVGAHVGLTPKCYQSGEIDYEGGVSKCGDALLRTMLYEAAHSLLTCNRKWSWLKAWGVRVAQRRGMRRAIVAVARRLAVVLHRMWVDW

SEQ ID NO: 260848 - protein, 341 aa, unidentified
MGHVSTIGLDIAKTSFQAHGADASGAVVFRKKLSRGRLLAFFAAQPPCVVAMESCSGAHHWGRELTQLGHTIRLIPPAYVKPFVKRQKNDEADAEAICEAAQRPTMRFVPVKSAEQQAVGVVFRARDLLVRQRTQIINAIRGHVAEYGKVAPKGVCYVERLVAEIEDPASELPHAARASLKILADVLAKLGDEIAVLDRDIAKRVKEDPTARRLMTIPGVGPITAAALVALAPAPQTFRRGRDFSAWLGLTPLQKSTGGKQKLGQITKMGERTLRRLLVIGASAVIRQALLKGAPPGSWLAQMLARKPRMLVAVALANKTGRIVWALLARGGIYRAPAMAG

SEQ ID NO: 260849 - protein, 338 aa, unidentified
MDMRVVGLDVAKNVFQVHGVDRRSETVVRKRLRRSQVAEFFRHQTPCVIGIEATQGAHYWARVLRALGHEVRLVAPQFVKPYLKSQKNDANDAEAICEAVSRPNMRFVASKSIEQQDLQALHRVRSRMIGSRTQLGNQIRGLLAEYGIVLPLHLSQVRAALPRLIEDDNPLLSGFGRQLLAALYEELCALDERIERMEEQVQQIHRSNPLCQKIAAVEGIGPVTATAVVAAIADGRSFHNGRQFAAWVGLVPRQHSSGDKQRHFGITKRGDPYLRMLLVHGARSVVYRAPNKTDSRSQWIAEKQRKLGTAKTCVAVANKNARVIWALLARDETYRRTA

SEQ ID NO: 260850 - protein, 319 aa, unidentified
MAQNDLVVVGIDVSKDKVDACIRTLALRQSCPTSAQGHRQLVAWLRKHQVNKAVMEASGGYERDWAKALRQAGIEVRIVDPKRVRSFALSAGRLAKNDAIDAQMIAWFAETFSEAPGQTHDAAHEELLALAKARISLVDLKARLESQSEHAGPRLVQSARGRLLKNLVSEIAKLEAIIAATIKATPHLAERAEIIESIPGFAKTTSANLVAGMPELGQVSNKIAAALLGAAPYDDDSGNRRGERHIKGGRRWVRKAIYMPCVGAATLNNPVLKAYYDRLIAKGKKPKVALVACMRKLIAILNTMIARRQKWDPSRYALT

SEQ ID NO: 260851 - protein, 369 aa, unidentified
MKKHSKKANEKGRRSANQGQPEVTIGIDVGDRYSHFCWLDANGEIVKRGRVSSTQQALEKEFGKIPAGRIALETGTHCHWMSEVLSQLGHEVIVADARELKSISGSRRKNDPRDAEQLARLARVDVRLLHPVMMRKRKTQQDRSVLRARDLLVASRTQLICAIRGMVKADGSRLADCSAESFPEQVGQSIPEGMRRALAPLLETLDVLNEKIRYYDELVTHIAEEEYPETCLLKQVPGVGPVTALYFRLVIEEAQRFQHSRDVGSYLGLVPKQQDSGESTPELRISKAGDEGARRLLVNCAHYVLGPFGPDTDVRRWGLRLAARGGKNAKKRAIVAVARKLAVLLHRLLVTGEVYEPLRNSQAAERAAA

SEQ ID NO: 260852 - protein, 340 aa, unidentified
MEWTVAIGVDTHKRTHTAVALDRVGVQLASCEVEATSAGYAQLLAWASELGEPAFALEGTGSYGAGLASLLVAVGLPVCEVERPRRERRRGKNDLIDAARAAERLLSGQGLNALRGGGPAREDLRLLLLERRSAVRARTAALNQVHAVLLTAPARLRERLDALKGDKLAQRCARLRPRDESERVLVSVLNRLAARARLLTRELAQLESELERIVSTLVPDLLGECGVGPICAAQLVVSSGDPKRMRNEASFAALAGTSPVEASSGPSRRHRLNRGGDRQLNAALHVIAHTRLRCHPETRAYRDRLLARGKSKREAMRCIKRQLARHYYRLLITNAALTST

SEQ ID NO: 260853 - protein, 317 aa, unidentified
MKRGKTSTKSAGIDVSKARLDVALAEDDARLEAANGPEGFAKVIAWLEGHEVVRVGLEASGGYERAAATRLREAGFEVVVHQPAEVRAFARFKRIRAKNDRIDAKVIALATAQTEAVKAANDPRLVELAERMTAYEQAADRLAQMKTCLEQVCLEDMKVGMLAQIRLATAWKAQLLRDILVRIKAWPDLARRYALLQSLPGYGTVVAACLVIRMPELGALPRGKASSLIGVAPWDRDTGQSNGKRHISGGRSRPRRMLYIAALAASRCDPGWAAFVQRLRAAGKSPKVSLVALMRKLIEAANLVLARGKAWVPNAAL

SEQ ID NO: 260854 - protein, 349 aa, unidentified
MDATTVAIDLAKDVFQVAVANRAGRILDRQRLTRRQFERFVDTLVEHTDVVMESCGTSHYWGRRMQARGLRVRLLPVQYVRPYVRRNKTDRADTDALLEAARCGDMRPVPVKTVEQQTLQAIHRVRTQWQTARVARINAIRGLLAEHGHAIPVGARTVLRRVTAILSDPDAAVPEVLRQTIALVVDEVHGLEEKIAGLDRQLAQIASAHPVATRLQTIPGVGVLTATALVGSVGHIHAFRRGREFASWLGLTPRESSTGARRYLGRISKRGDVHLRCLLTHGARSVLRVALQLAERAADRLTRLQQWAVSIAAHRGRHKATVAVANKLARIVWAVWHYDVTFVAQPRVA

SEQ ID NO: 260855 - protein, 343 aa, unidentified
MDYFAGLDVSVKETSVCIVDDAGRIVREVRVASEPEALLQVLANNSYRFKRIGLEAGPLSQWLYSVLAEAGLPVICVETRHMRAVLKAQINKTDRNDARGIAQMMRVGLYRPVHVKTLRSQKLRVLLTHRKLLQSKAIAIENDLRASLRNFGLKVGMIGSVKYEMRIRELVENFPDLAVLVEPLLIVRRVIREQLGILHRRLLVIVRDDDVCRRLMTIPGVGPVVALTYRVTVDVPARFRNSKALGAVFGLTPAKYQSGENDRTGAISRCGDEMMRMMLYEAAQSMLVRSTKWSWLKAWAMKVARHRGMKKAIVALARRLAVIMHRVWVDGTEFRWTREVAAA

SEQ ID NO: 260856 - protein, 418 aa, unidentified
MQVTIKRCAGLDVHQATVVACVLIQVRGKRPKKELRSFGTMTHELEALRDWLKQEGVTHVGMESTGVYWRPVHAVLEDHFTLIVGNARHIRNVPGRKTDVKDAEWIATLVSYGLIQPSFVPPKPLRELRELLRYRRKLAEAAGTECNRLQRLLETAGIKLGIVATDVLGVSGRAILRQLIEGTASPQDMAELARGRLRSKRAELAHALKGRVEAYHRMLLAMQLRRVEAIEQDIDQLDQYIAGKLAPYDIEMALLMQIPGVDWIVAAVLIAEIGGDMSVFVSVHHLAAWAGVCPGSHESAGKKKSVKARKGNRHLRTILVGAAIGASRTKGSYLKDKYYRLKARRGAKRAALAIAHKILAAAYHMLSRHVGYHELGEAYLDQIDQTRTTANLKRRLERLGYVVSLQPRVAAVTTPPAA

SEQ ID NO: 260857 - protein, 397 aa, unidentified
MLAVGIDISKSKSVAAILNQDGSMHTSPFEFHHTQPEPNAFIKYILNSNQSATILMENTGHYHYPVLKAFREAGLPVCMVNAYQIKKFGDMDLRKAKTDKKDAVRIARYALEKSYSLVPYTSMEQKYEDLKFLARQYNQRMLTLKNNKVFLLNLLDETMPGITNILPLTTRTPETSLSVLFINRFKSYDRIKKMGKSRFLDAFEKIARKSRNRQTKTHGLAIYEAALRNITTRGENEYTLAAQDQCLELVCESQKAADSIILKMQTLAETLPEYAVLRSMAGVGDRLDPLILAEIGDIRRFHSGKALNAYAGNDAPPYQSGTFESHNRHISKRGNAALRKYCFEVMQALKLTRPQNDPVYLFLLKKEQEGKPYNVAKMAGVNKFLRIYYARAMETLK

SEQ ID NO: 260858 - protein, 371 aa, unidentified
MHESSKTLFVGLDVHKEAIAVAYAPEERGAEVVSLGSVGTRQCDIDTLIRKLQAKGATLVFVYEAGPCGYWLYRYLTGKGLSCHVVAPSLIPRKPGDRVKTDRRDAITLARLMRSGDLSSIYVPGIEDEALRDLSRGREAAMEDLKRSKRRLKSFLLRQDIRYEGRANWNAAHLRGLSEVVCPTPPQQIVFQEYVRAVTEQQERLQRLERELHEAVTGWRLYPVVEAIQALRGVELTGAVILMTELGDLTRFETPRQLMSYLGLTPSEYSSGARRRQGGITKAGNSHARRALVEGAWAYRYPAKVSRHLQLRLEKLPAEVQAIGWKAQVRLCKRYRQLTARGKHVNQVVVAIAREMAAFAWAIARLVPVAA

SEQ ID NO: 260859 - protein, 344 aa, unidentified
MTKISTIGLDLAKNVFQVHGVDASGAVVLGRQLRRAAVEKFFAQLPPCLVGMEACGGAHQWARVISRYGHEVRLMPPAYVKPYVKRNKNDGRDAEAICEAVSRPTMRFVPVKSVEQQATLAVHGTRALLVRQRTMIANALRAALSELGIVAAQGYEGLGELMARLQEASDEIPETMRGALLLLAQHWQALDTDERVLERQIAKAARCDGEARRLMEVPGVGPIIASTVLAKVPDAKVFRSGRDFAAWIGLTGRDHGTGGKHRPGRISKQGDRMLRALLISGASAHLRQQKRRGISDPWLRELLARRPYKVAMVAFAAKTARIIWAMLVKGEHYRDRATAPAAAC

SEQ ID NO: 260860 - protein, 485 aa, unidentified
MKNKSIFTRQNQTLINLFHDAQHPEKVLCIPLDYAKATHVALCCNGSGTVLKKAFPVENNPEGMAFLIEVAEGICRKHHMGREHVFFGGEDCGTFSLNFIYGLRERGFLVVGVNATDAKGQRDNMQASSDELDLLGIAKLLINRRGSTAGGEPGAERALRSLTRHRKSQVRLRTATSNRIHQIVDQLLPGFLDEKLSGIPPFSEASLYVMEDRFSPAQVASRQDKALLRQLKAKGLRNAETAVGKLKAHARQVLAHPPELTGLLQTSLASEIQLYRCLGANIDQVGREVAQQLARTPGAMLTTVRGIGITLAAGVAAEIGPPDSQPSVRRLGSYAGIVPRTKQTGGPEKGAKTGKVSRRCNHILKDYIVQCGNHLGQHGPADLKEDHRRRGANKQHADFGMARRFLRMGMRLMKNGEAYVPPGLREGATLGELQAYYLGMWPKLLDKWVKAGAVHAAFDKENPLGQWRERIEAIYGIELPLPRKK

SEQ ID NO: 260861 - protein, 340 aa, unidentified
MDCIGLDLHKRESQLCILTEAGEVIEQRIVTSRERFAAVLGVRSPARILLEASTESEWVARHLEGLGHEVIVADPTYAPMYATRSRRVKTDRRDARTLADSCRLGAFRAAHRASDAQRHVRAQLAVRDALIRTRSRYVAVVKALLRRDGWRLPRGVPAHLGERIAALPIGPTAATELKPLLALLAPLQGEIDAADRQLAALAAHDPVVGRLTGIPGVGPVTAVGFVAALDEVGRFASARQVAGYLGLAPSERSSGEQQRRGRISKTGNPRARVLLVEAGWRLLRSRQPDAAPLRAWAERIAARRGRAIAAVALARRLARILYAVWRDGEEYQVERVAEAA

SEQ ID NO: 260862 - protein, 318 aa, unidentified
MDQASVIVGCDVGKLWVDACVVEASGKRTSRLSNGPESLKRWACALPGACQVGMESTGPYHLALAKAPIEAGHTVYVINPRWVHAYARSTGQRGKTDRSDAALIARYVQSEAANLHAFELPSAEQARLRYLLLRRQELVKLRGATRQSFGEEAGDVITQFNRLLRSVERQIHQLIQAQAVWREHAQRLRQIPGVGPMVSAHLVQVLTRIPFARADAFIAHTGTDPRANDSGQKRGRRRISHHGDSALRQMLFMAAMAAIKRPEWRTLYERFRARGLPTTGALIACARKIARIAWHMFKNPEGYDASKVAGPFATGLAS

SEQ ID NO: 260863 - protein, 339 aa, unidentified
MNSEKYIGLDVHQATISVAVLDHTGKLVMECILETKAATILEFFAGLRGTLSVTFEEGTSAAWLYDLLRPHVARLLVCNPRKNALLKQGNKSDQIDARKLAELLRGNYLKSVYHGETGVRTLRELARSYLTTTKDLTRVMSRLKALYRSWAIPCAGRDVYYTRHRNQWLGKIPHLGVRRRAEHLYQQLDMMKHLRQQARRELLAESRKYMATRKLRQIPYVGPIRSALLVALIQTPHRFRTKRQLWAYSGLALETGISAEYCYGKGQLRRSKKLLSIRGLNKDHNHDLKGLFKAVATRAVPLLTAFRLLMAYTWTSTFCPFSRTAKQNWPTRLAISPNI

SEQ ID NO: 260864 - protein, 366 aa, unidentified
MTTIARNTNINTADPIEIAGGVDTHQDTHTAAVVDGTGRLLGHRTFTATGAGYRALLAWLRSWGTVLVVGVEGTGAYGAGLAEHLRTQGVELVEVDRPDRKTRRSAGKSDPIDAEAAARAALGRVRTGVPKVRDGKVEALRNIRVARRSAVDQRADCQRQIKTLIVTAEDHLRTQLRGLPKRQLLNTCAALRPDTEHVADPTQATKVALRALARRHAALTQEINELDALIEPLVAALNPALLDLNGVGPDTAGQLLVTAGENTDRLRSEAAFAMLCGTAPIPASSGKTHRHRLNRGGDRQANAALYRIVLCRLRWDPRTQAYMRRRTTQGLSKKDIIRCLKRLIAREIYYVLTSTPTTPNTLATTA

SEQ ID NO: 260865 - protein, 409 aa, unidentified
MYFVGIDIAKKTHQAAIICSDGKLIGKPFKFPNTVDGFNLFLEKLTAVNTDLSQFEIGMEATGHYWLNLYTWLSDKSFRLHVINPLQSDALRNLYIRKTKTDSVDAKIIADVIRIGQYSETQLADENIIALRDLNRQRFYLVDMAADLKRKIIAMMDRIFPEYQDFFSDMFSKTSVQIMKEYTSPEQILQIPTERLTQLLKKASRGRFTETKAKELKALAANSFAALLSSEMTTLLIRQMLEQLDLLEKQIADIEHIIAAQFAQFNTKLTTIPGIGTTLGATIFSEIGDINRFDKPKQLIAYAGMDPSVKQSGAFVGTQSHMSKRGSPYLRRALWLAAVVAVSHDDLFKYLFQQKMNAGKTYAQAMGYICHKLLNTVFAILKTGEEYKPVYPPQIDLSKLTDQPIHSLL

SEQ ID NO: 260866 - protein, 397 aa, unidentified
MIAVGIDIPKAKSTVAVIDSDGTVLASPFTMAHTQPEMEAFVSYLKGLGEPTTILMEYTGHYHYPVLKKLQDEGFPVCIVNPYQMKKYGDVEIHKAKTDKKDALRIAAYALEKSYKLVPYSSMEQKYEDLKFLSRQYNQRISYVAKLKVQLIALLDQTMPGITRILPLNSRNPEKCALLLFIKRFKSFDEIQRIGKARFLASYDVLAKKASERNASSKGLSIYELAVDSITTRGEDPYIWLSQNQCVDLLSATQNAADEIISQMRNIAETIPEYKVLRAMHGVGDRLGPIILAEIGDVHRFHSGKALNSYAGNDAPPYQSGQFESRNRHISKRGSSALRKACYEVMQALKLIKPQDDPVYLFMLKKEQEGKPFNVAKMAGVNKFLRIYYARAMELYK

SEQ ID NO: 260867 - protein, 346 aa, unidentified
MREIIRIGVDTSKHIFQLHGVDAAEQPVLRKRIGRKQMLEFFAKQPPTQVGMEACGAAHYWARELTRLGHDVKLMAPQHVKPYVKRNKNDGRDAEGLCEAMSRPTMRFVPVKTAEQQAALMLTGLREQMVARRTQLGNMVRGYAAEFGITAAKGLDKIEPLLAEIAQDESVPAPARDLFALQGRQYVQLQTELKAIEARLRVWHRANPDSRRLAQIPGIGPVGAPELVMKTPDPSAFASARHFAAWIGLTPKDHSTAGKTRLGKITRAGDERLRSILVAGAFAVIKQAMHGRGHPSPWLVALLKRKPPKLAAVALANKNARTAWKLMMTGERYDGARMQAASAAAA

SEQ ID NO: 260868 - protein, 347 aa, unidentified
MRFYNRQHRHYCGIDLHVRTMYVCILDSAGQVRVHRNVKSTPEALLETIAPYRDDLVVAAECMFTWYWLADVCADEGIEFVLCHALAMKAIHGGKAKNDTIDSHKIASLLRGGLLPQAYVYPAAMRSTRDLLRRRLHLVRKRGQLLAHIQNTRAQYQIPEFKRRLAYPANRAGVSEHFPDPSVRKSIDVDLALLDRYDSLITDLELTIVREAKRHDGDAFHRMRSVPGIGKVLALTILYEIHDIARFDRVQEFASYARLVKCAHQSAGKTYGTGGAKMGNVHLTWAFSEAAVLFLRHAPGGKTLLAEIERKHGKGKALSILAHKIGRAVLYMLSRRAVFSMDRFRAA

SEQ ID NO: 260869 - protein, 338 aa, unidentified
MELYAAIDLHSTNSVLVVTDAEDHMVFAKRLRNDLELIVTALRSCPGDIRAVVVESTYNWYWLVDGLRSAGFDVRLANTAAVKQYDGLKHGDDFSDARHLAQLLRLGILPQGYICPPELRALRDLMRKRAQLVRQRTTQILSIHNLLARNLAKSVKGDAIKRLEDGEIDALALLEDQKRALRANVAVMRCLEEQIRLLERAILAKGRLRKEFHGLKTVSGIGDVLALTIALETGDVHRFASAGKFASYARMVDSRRESNGKTKGVGNRKCGNKHLSWAFIEAAHYAVRYDPSVRRFYQRKCAKGLSVVAIKAVAHKLARACYHIMREGVPYDGTRAFA

SEQ ID NO: 260870 - protein, 402 aa, unidentified
MQTLVERGCGMDVHQATVVACLLVVLKNGKVQKQIRTFGTTTRELLSLREWLLSEGCTHVAMESTGVYWKPIYAILEGAFEIVVANAQHVKKVPGRKTDVKDAEWIADLLCHGLLRSSFVPPQPIRELRELTRYRRKLVESRSAERNRLLKLLETANIKLASVATDVFGVSGRLMLQALVQATATSQQMADLAKGLLRKKIPELELALEGKVEEHHRFLLSVQLRRLQAVEEDLGLLEQRLQEKLKPYAMQLALLQEIPGVDWTLGAVIISELGVDMSVFGNVSQLASWAGICPGNNESAGKRRSSRIPKGNVYLKTALVEAANAAAKAKGTYLRDKFYRLKARRGYKRAAVAVAHKILVAIYHMFSHQVCYNELGDLYLDTLNKHHLTRNLVHCVICTTAR

SEQ ID NO: 260871 - protein, 381 aa, unidentified
MYTAARDQQCSSEPVLFMAMELSATKWKLGFTVGLGQKPRERTVDAGDLEALSEAVVRAKRRFHLGEGARVVSCYEAGRDGFWIDRYLRGNGVENVVIDPASVEGNRRRKKRKTDRLDLGKLVRCLIRWHGGEEKVWSVVQPPSEEAEDARQFHRELEALKAERTRHVARIKSLLALQGIRVTRVGGDFVTELEGARMWDGSSLPPQLRARLVRERERLQVLRQQICELEGQRREAIRTSRDRRMEQVRHLMRLRGIGENGAWLLVMELFGWREFRNRREVGSIAGLTPTPFASGQEDREQGIDKAGNRRVRALMIELAWCWLRFQPHSELSMWFERRFAAGSKRSRRIGIVALARRLLVALWRFLVDGLVPKGAVLMAPS

SEQ ID NO: 260872 - protein, 412 aa, unidentified
MEVIYPCCCGLDVHKKSITACVLWAEAKGKSRKQKKRFGTFTHDLLQLADWLGQCGVTHVAMESTGVYWKPVWNILAEQFEALLVNAQHIKAVPGRKTDQKDSEWIADLLQHGLLRGSFVPPQPTRELRDLTRYRVSLVQEINRIANRIQKVLEDANIKLASVATDALGASGRAILEAMLAGEEDAARLAEMAQGKLRNKIPELKLALEGRVTKHHRFLLRQLFEHLRFTESKMQQIEEEIERRMCPFEDKVIRLCTIPGVDRVTAWGLLAEIGLNMDQFPSSAHLASWACLCPGSFESAGKRLSGKMRKGNVSLRRCLSQAAWAISMMKNNYLSALYRRIAARRGAKRAVMAVAHALLVIAFHMLKRKENYHELGADHFDRIDIGRVRRSLVRRLERLGHKVTLEPLAQTV

SEQ ID NO: 260873 - protein, 417 aa, unidentified
MINAVLERCAGIDIGKRFLMACVMVGAADQDPSQEIRRFGTTVPELENLRAWLQTEGCTHVAMESTGSYWKPVFNVLEGTVVVILANAQQVKARKGHKTDPHDSVWLAHLLRHAMIRPSFIPPRAIRELRELTRRRRQLMNAGTAERNRLHKILEQANVKIGSVLSDVFGMTGQTILEALLEGKATPEEMAKLARGVAKRKIPQLVEALKGHRLTDAQRFLIEHCLQHMAFLEQSLEQLEARILQQIEEAGLTRPFELLQTMPAIKQAAAAAVLAEIGSSMEPFPTPGQLASWAGVCPGNNRSADKSRGTHCTKGNQWLRSVLAQCAWAASLQNGSIFQARFQRLAPRLGRRGAIVAVAHAILIAVYQVLQSGQAYSKDTARATPNQKHRLVRHHFRCLQKLGVKVKIEPTDSGGQI

SEQ ID NO: 260874 - protein, 478 aa, unidentified
MNSKISQEKNQVINNNPIVKAISREEISRRIAEIQDSLKASTWKELETKGKFTKDDKLTFITDDMLIIGCDVGSETHYARAIDLRGRELSRNPFSFSNDSDGFQSAKKWALDLAARHQKKQIVLGLEPTGHYWFCLAAWMVSNGISVVQVNPYAVKQTKELEDNSQLKDDRKDPKLIANLVKDGNYGMPYLPEDVYAELRRLSRFKDQLSEDRIRAINRLHREMSIYFPEYKDAFGKIESAFALEVLKEAPFPEDILAIGADGLRDIWRRAGLKGRGYGRAGKIVDLASGSVGLVHGTQGGRKAVRWSAAELERLNGEIADTEEMLHTRCREIPCASNVLEIRGIGENILCGILSEMGDISRFDDAKEIQKMSGLSLVSSSSGKHKGDTRISRRGRKRLRYWLFQAARSSVVYADEFRALHIYYTTRKENPLKKMQSLIVIACKLLRIIYMLLRTGRSYDPSRMLGDIHRPAEKTSVA

SEQ ID NO: 260875 - protein, 344 aa, unidentified
MERYAGIDVSLEFSSVCVVDAAGKIIREARVVSEPSSLIAWFAALGVVVARIGLEAGPLSQWLYAEMKTAGLAVELLETRHVRDAFKAMPVKTDRKDARGIAQLMRLGWFRPVHCKSLPAQEVRALLTTRKLLQGKRHDVEMSIRGVLRGFGLKVGPTTPKTFEHRIRELVENHGTLSLIADALLKARAALGLEFRAIEKRLLTIARADKRVRRLMTTPGVGALVALTFSAAIDDPDRFRSSRMVGAHFGLTPKKYQSGETDVTGRISKIGDHEVRVVLYEAANVMLTRPVKGSTLKSWALAVAKRAGMRKAKVALARKLAVVLHQMMRSGAAFSLTGQPAAAA

SEQ ID NO: 260876 - protein, 430 aa, unidentified
MDYNTQNKKIEAVTEKTLVIGIDVGSETHFARAFDHRGIEYSKKPFKFSNDEAGFAELKTWILEHMKVHDKDKVMPGMEPTGHYWFNLGKFLQDNDMKPVLVNPHHVKKSKELDDNTQNKNDRKDPKVIAGLVREGRYMIPYLPDGVYADLRTASNMRFQVQSELTRILNRISRWFSIYFPEYKTVYGNLDAASGMLVLKKAPLPEDILALGVDGINKIWRDAKMRAVGKKRAQTLVDAAEHSIGSKEGAISARMEMRMLIEDYESRKARLQEIMILVEELVAKIPMAEKLMEIKGVGLKTVSGFLAEVGDISRFKNPKELQKLAGLALVENSSGKHKGETTISRRGRKRLRYLLFEVAMSLVAKNYEFAELHHYYTTRKQNPLKKMQSLMVVAEKLIRVFYVILTKGVDYDPKKMTEDIKRPQGSSQAA

SEQ ID NO: 260877 - protein, 349 aa, unidentified
MRILAIDLGKFKSVACLFDTETNQSQYETIPTVVFAIEQLLQAMQPNKVVIETCTISGWVHDLCKGHGFEVIVANPSSEAWQWRNVKRKTDKDDALKLAKLEALGQIVPVYMPTPVMRQYRRLVKYRKVLVGRINQVKNSIRSLLDAQGKHLGSRAKAWTIEGMQVLEEWRKPFGECELEELWRGELDVELTLLDKLWQQQDRVEKHLETIAKQEKRVQLLMTIPGVGRRTAEVIVTIIDDPHRFDNGRQVSAYVGLIPEQRQSGQTNRLGAITKRGSRLLRGALVEIAWMLLRFNPWALEVYNRIYAGQKTRKKTAIVAVARKLLVCCWAMLKHNQPWNPPGVQPTNA

SEQ ID NO: 260878 - protein, 338 aa, unidentified
MFNLPIFVGIDYHTQTIQVCVMVSQRKILVNQSVANDPVAVFRVVAPFGSNVHAAIEASTGVANFAEKLITKYHWQVELAHPGYVARMKQTPDKSDWTDAKLLADLTRAGYIPRVWLAPQYIRDLRELVRYRHGLVGQRQQVKLRLRANLRNHRIVCPYSPWTIQGKKWLLDKENITSPTLLFLLQDHYDLIEHLNEKIVAVTERMTAYVADDLVVKQLLLQPGVGIITAITLRAMIGHFDRFRSSKQLAHFCAVCPRNHSSAGKTTTGGLIPSGDDLLRLVLIEAAHRLIRYNAEWKLMADRLQANGKKKCVIVAAVANRWIRKLFHQMREPMVGSA

SEQ ID NO: 260879 - protein, 319 aa, unidentified
MFVGIDVAKAELVISVLPTMERFTVANDERGVRTLVERLRPIAPQLIVLEATGGYELLAAAALAAAVLPVIVVNPRQVRDFARATGQLAKTDRIDADILARFADVVRPAVRPIADADAQELDALLARRRQLLEMLQAERNRVGQVFGKGKRLVRKSLKTHIAFLERELRMTDTDLGEMVKNSPVWRERDELVQSVPGVGPVLSRTLLADLPELGRLSRREIAKLVGVAPLSRDSGTMRGRRFVQGGRATVRAVLYMAALVATRRNVVIRAFYQRLVAAGKPKKLALVACMRKLLTILNTMVRTGTRWNAEAGAEVLTTA

SEQ ID NO: 260880 - protein, 421 aa, unidentified
MKIVHEICCGIDVHKTFLVATIVTATDTRHLTCKKERFSTFNKELRRLKNWLIQNNCLDVCMESTGKYWIPVLNVLEPELRVMVVNPKWVAAIKGNKDDNKDSKWIAELFCFGIPYGSFIPEKPIRILREFTRYRYKLTNKKSSEKHRFQNGFTVCNIALDSVVSDMFGKSASAITDYLLKTPKPDPEHCRDLLHRTLKKKADAVVDSIEGFQLTEEQSWRMLQVRKHLEYLENDIAEVDAKIDEFVRPYEPAIKFLCTIPGMNRESAITIISEIGMDMTQFGSSKRLCSWAGLAPGNNQSAGKKKSVRITRAGVYIKPILVQVAHAAVKCTSQPYYKIKYERIMRRRGKKRAIVAIARMIITAIYHMFLTGEMFNPTDLSQIDMPEKLKEQQQKRAVTNAIALLQKEGLLPSSFSAESCA

SEQ ID NO: 260881 - protein, 393 aa, unidentified
MALYVGIDVSKEKFDACAIGDEGTKLFSLSCPMNREGFDKLVTRLAAVSTASLLLGMESTASYHIALFSYLTAKGYRVAIINPLLIANFAQLSLRKTKTDKKAAFTIAQFVQQQKETLATRIDSPRVAELKDLSRRRERLVDQMTALKNDMKRILSVTFPELETIAGVFTKSTLRLLTAFPSAHALVKAGYDAVAPIVISRSKGRKPSASVQALMDAATASVGVASPAKDLILKQEASLLLELQEQAEEIMNLITNLSGEKIKRDAEILTSMRGIGDKTALNFLIELGGDIRAFENDRKLIAAAGLDPTTHESGKYKGKSKISKRGNRHLRRVIWLMTTKVIISNEVFRTYYFKRRKEGLIYKMAVLATAHKLIRVMFSMLVNQKCFDAERRK

SEQ ID NO: 260882 - protein, 331 aa, unidentified
MSTQNYAGIDIAKRHFVIGIHGRDKTKTETNNPKGFTHTIDYLHKHNVGLVVMESTGGLEIPLAKTLHRAGFQVVIANPRCTKNYANGFSLAKTDHLDAKMLADYAQALEIKGLVANMLYIPPSEAEEKLEALVKRRSQLVDIRAAEKNRLEQIHESQQQSVKDLIAHLDKLIAELDKDIDSNADAFGGKGQVLTAIKGIGSTTSATLLSMLPELGTVPHKRIAMLAGVVPPPNQSGDTDNKTGCIGGRMAVRNMLYMAALTASRFEPNIKAFYERLRAKGKPFKVAINACMHKLLRILNARMRDYLASLQTESERQNEQQNEQQPAPQCA

SEQ ID NO: 260883 - protein, 408 aa, unidentified
MQVEHPVCCGIDVHKDMLTACLRRVEGNGQVSKEVREFATTYQALLALADWLAEQHCPVVAMESTGVYWKPVYHVLVGTVEVFIGNAHELRSRPGKKTDKRDAAWIAELLAHGLIRPSFVPPPDICALRDVTRTRVALVQTRSQSKNRVHKLLEDTNLKLGSVVSDLFGVTGRRMLAALVAGERDPQVLASLALGSLKRKRPQLELALTGQFTAHHGTLLAVLLELIEVLDRQIATLDQQIGALVAPLQAQIAQLDSIPGVDIIAARDILAEIGTDMSRFGDAARLASWAGVCPGNHESAGKRYHGKTRKGNRYLRRVLVQCAWGARKTPTFLGRTFRRLEVRIGKKKAALAIAHKILVIVYHLLALGTCYEETRYDQWNPRQEARERQRAIKALERLGYTVTVERAA

SEQ ID NO: 260884 - protein, 340 aa, unidentified
MTITTIGLDLAKNIFQVHGVSDEGDIVFNKPLRRARVLPFFAKLEPCLIGIEACSSAHYWGRELTALGHEVKLMPPSYVKPYVKRGKSDAADAEAICEAVTRPTMRFVGIKSAEQQALLCQHRAREVMVGQRTQLSNTTRGLLGEFGVIIPKGLEYIRRFAEDVQKDIHPDLPDIALEVIRSLCQQLLSLNLRIAEMGKAIADVAKADGRIKLLQTIPGIGPINASAIVATIGSAHQFKSGRDLAAWIGLTPLNKSSGGKERLGKISRMGDRYLRQLLVVGMSSRVRTARSHPERVDPWTLSILERKPTRLATVAMANKTARIIWAVLTKNEPYAPRTAA

SEQ ID NO: 260885 - protein, 505 aa, unidentified
MNHRRLVGIDLGVASAHTVRVLDGEGTTVAKRKARPTVESLTEVETAALAGCPEGTRLEVVMEPPGPVWLPIAVFFSRRGHRVHRVSSAKAHDLRRFLSRHTKTNGIDAETLARLPLFDPTGLQPLVLAGVERAALDRRVRATDRLTQQGGLHKRRIKDLTRQLLPMTPLTGELGVADLAVLERYADPNALRRLGLKRLTMLIAKHSQNHQGVERARQSIAAAEALIELYAGHPAVAFSDLAAEIATEVRLLRAVQAELDAHATEREHVYREVDPAQLARSLPGVANIGGPALVAAIGDPARFAKTKHFSSYTGLVPKASETGDTDHKGQPMSKAGSSLLRTTLVRAADNARKQDPQLARLYYVQMVERGEDHLGALCVVAAHLAERFLTVMQRGMPYVICDTDGRPVEPDEAKAIIAQHWTVPPEVRARRRSKKMGKAPQQVFTAQVKSRPRRADRRGDLPHQPSGPSTNEPLDHRSPIGNQDSQSDAAAAAPRENLRYPSSLR

SEQ ID NO: 260886 - protein, 354 aa, unidentified
MTSTKYIGMDVHKESISIAVMNAAGKIVMECVIETKASMILQCIDGLRGDLHVTFEEGTSAAWLYDLLRPHVTELIVCDPRKNASMREDSQNDKIDARRLAELLRIDHLTPVYHGEHGLRTLKELVRSYLTVTKDLARVKTRVKAIYRSWAIPYNGKEVYAARHRAEWLEKINELGVRRRAEFYYQQLDALRVLRQGVRRELLAESKKQKAWKRLCQIPAIGPIRAAVLLGILQTPHRFRAKRPLWKYSGLAIETCSSADHRSINGQLQRSKKDSVRGLNRNCNHDLKNLFKGAAVVASSKPGPFQEFYAALLAKGMRPEMARLTLARKIATIVLIVWKKGVCFDAQHLKPQTA

SEQ ID NO: 260887 - protein, 355 aa, unidentified
MQSNKISFKGQNIYVGIDVHLKTWHVTPLTETGCKYSFAQHADAKELFDRLNKKFPEAHFMSAYEAGFCGFSAHYALTEQGIENIVVHAADIPTTGKEKAMKTDAVDSEKIAWALKRNELTGIYIKDKRYMDDTNLMRLRQRFIMDLSRQKNRTKHLLYTQGVTYPERFRNCRTHWSRNFMKWLREEVEFLSEQKLSLLLLCEQVENTRKAILKVTREIRRLSTTDRYKENYDLLITVPGLGLITSMSMLTELDNDIVRFPNERRFVSMLGLIPTCHDSGEKKVSGEKINRGNKHLGPLIVEASWVAIQRDYQLGAYYSSCCQIMKPHKAIIKVARKLACRAYAVLKTKTKYELS

SEQ ID NO: 260888 - protein, 355 aa, unidentified
MHDITPDAVVIGIDTHKDVHVAVAINGLGARLATASFPVTSKGYRQVAAWATEHGTVHAFGIEGTGSYGAGLARALAAKGLRVIEVGRINRQLRRRYGKTDTVDAESAARAVLAGDADGEPKVGDGTVEMIRHLKIARDTALKARTQAMVTLKTMLVNAPQALRERFIGITGKMTLIRAIAALRPGALVSTTASAKMALRALANRWLMLDAEIKEHEAALEQLVRAHAPALMDAPGVSTGTIADMLIVLGDNPQRIRSEAAFAKLCGVCPVPASSGKTNRHRLNRGGNRRANAALYRVALVRMRHHPPTREYIQRRTAEGKSPREIRRCLKRYIAREIYQHLCTEKPLPAAAKGS

SEQ ID NO: 260889 - protein, 331 aa, unidentified
MNQIYGIDLSKEKFDVNFITSSAKESTKVIKNSFTAINKFFVSLPKDALLCIENTGIYGELLLFLANCFNIRISVISGYEIKHSLGLIKGKSDKIDARKIREYGERFSDKLRLAVFESEQLHELRELYSLRAMLVKKRKMLTTHYHEKKQSPYNSLKANKIIQEQLENLDKAIKETEEQVLYIIENTKPFNENYKLITSIVGIGPVTASELIIKTNNFVKINTARKAASFAGICPFPNASGKMVKKSKTSPMADKSLKTLLYLCASSAVLYNKEYKLYYNKKKMEGKHHYLIMNNVSSKLLRTVYSIIHSRARYDPNYICLDPRQKEKKIA

SEQ ID NO: 260890 - protein, 346 aa, unidentified
MTIVEERTAVTAGVDTHSEVHVAAALDSVGGLLGTREFPATAAGYASLLGWLGKFGDVALVGVEGTGSYGAGLARYLAAHGVRVVEVDRADRQERHRNGKSDPLDAVSAARAAQSGRASGMPKGRDGAVEAIRTLMVAKRSARHERTQAINQARALILTGPDELRARFAGLRAAALAEAIAALRPRPGDAAGYSLRVALRELGRRVEFLDDQVARLDELIIPLVAARAPGLLSLYGVGPDTAALLLIAAGDQPERLRSEAAWAHMCAVAPIPASSGKTRRHRLNRGGNREANHALWRIVITRMSAHPETRAYVRRRTAEGLSKKEIIRCLKRYVAREVYPYLRPGA

SEQ ID NO: 260891 - protein, 396 aa, unidentified
MRLDEGGGIDVHKETFKVAACHENEAPQERTFGTFTKDIYAMRDFLLEQKIKHVVAESTGVYWKPMYRILSAAGIEVSIVNPTRVKQMPMEKTDKKDARWLAKLLMNDMIKKSFVPDEQQEQLREFSRMHTKYIRQMTRVKNQVVRLLESCNFKIRSIVSDISTQTAQKLINAISNGQTDTDLLIALCHHSVRKRQGDERLKLALEGRFTKYMQQQLRMLLDDLHYFEKQKMQTENVLKELFTNEQMEKIKKLDEVEGVSQQQAEIIMAEIGAGIDSFSQADQAAKYAGLTAGQRETADQQKPVRAVPGNKHLRVVMVQIAWSAVKVKNGYWKAEYQHLKKRIGAKKAILAIARKMFKAIYKVLTTEHRYEKWDAKKFYDNRIKTIEFKKRLSIAG

SEQ ID NO: 260892 - protein, 436 aa, unidentified
MRGCRCSMIMGFTKPIEHFNLQRKKVITMNTLYVGIDVSSKSNVVYFMLPDGSKHCNFSVANSHEGSTQLVKRILSALTSHSLDTVLIGLEATSVYGDNLVYFLREDATLAPFNRKIHVLNPKQVKKFHDAYNDLPKNDYVDSFVIADCLRFGRINKEVYMGDYRYKALQNLTRARFFAVQNLVKEKQRFMNVLFKKYSTMTQEKVFSDAFSTTALAVYDEFESAEALANMDLHELTDFIIEKGKNRFPDPDAVAKAIQKAARSSYRLPKTVNDSVNQVLSISITSMKALESQIKEFDKAIKAQMELLPNVLISIPGIGPVYSAGIMAEIGDINRFNSQAALAKYAGLAWKQHQSGGFESEVTRLIPSGNRFLKYYLCEAAFSLVRCDKEYSDFYRLKYKEVNRCQHKRALALTARKFMRLVFRLLKDNRLYTSAE

SEQ ID NO: 260893 - protein, 344 aa, unidentified
MSEVITIGLDIAKHVFHAHGADERGRAVFSKRISRGKLLDFFADQPACIVALEACGGAHHWARELAALGHEVRLIPPSYVKPFVKRHKNDALDAEAICEAAQRPNMRFVAVKSEEQQAAGLVFRTRDLLVRQRTQLINAIRGHLTEYGWVAPKGPSHVAMLADLLEEEEMASSLPDAARAMFRLMLDLLGELDGKIAELDKEIARRAREDEVSRRLMTIPGIGPIGATAIAALAPPAETFAKGRDFAAWLGLTPLQKSTGGKHRLGATSKMGERTLRRLLIIGSSAVVLQASKRGAPKGSWLEQMLARKPRMLVTVALANKMARIVWALLVKREDYQAPVTAAA

SEQ ID NO: 260894 - protein, 349 aa, unidentified
MQHYAGIDVSLELLSVCIVDAKGKIVKEAKVGSDPDTLVPFLRGLDLAIERIGLEAGPLSQWLHAGLTSAGFEAVLLETRHVKAALSAMTVKTDRKDARGIAQLIRMGWFRAVHCKSAGSQEVRALLVARKLLLSKLLDVEFSIRGILRGFGLKMGMVTRKRFEARVRELYADHAMLEQICSAMLTARSALQTEYAKLHKALLVIVREDEVCRRLMTTPGVGPLVAITFKTGVDDPSRIHKSKAVGALFGLTPKKYQSGEADVTGGITRAGDEMVRTALYEAASVLLSRVTRFSALKRWGMDVAKRRGTKRAKVALARKIGVILHRMWVDMTSFRWTKGAPTTMRLARV

SEQ ID NO: 260895 - protein, 349 aa, unidentified
MEHYVGIDVSLELSSVCVIDVGGKIVAEAKIESHPDAIVNLLRRLGLSIERIGLEAGPLSQWLHAGLTKGSFETVLLETRHVKAALSAMTVKTDRRDARGIAQLLRMGWFRPVHCKSPGSQEVRALLVARKQLLGKLLDVEFSIRGILRGFGLKMGVVTRTSFEGRVRELCAGQAMLEQIAEAMLAARAALRKEYSKLHKAMLALVRRDAICRRLMSAPGVGPLVAITFKTAIDDPARIRKSKAVGALLGLTPRKYQSGETDVTGHVSCVGDTMARTALYEAANAILSRVTRFSALKRWGMDVAKRRGMKRAKVALARKLGVILHRMWMEGTSFRWTKEASQAPQIARA

SEQ ID NO: 260896 - protein, 334 aa, unidentified
MEHCAIDLGGRKSQICIRAGDGTVLFEGQHDTSSLPHYLRELPHKCRVIVETAAEAFRIADAAMAAGHEVRVVPATLVRTLGVGARRTKTDRRDARTLSEVSCRIDLPSVHIPSAQSREWKTICGMHDALIASRTKLINNLRGWLRGQGLRLRVGQAPTFARRIRALLHSPPDYVTMQVEALAGLDEKIQLSEHRIAALAGSDELCTRLMSVPGVGPSTAVRFVAAIDDLTRFESAHKVEAYLGLTPGESSSSERQQRLSITKAGPATVRWVLVQAAWVLQRRCRSAQARPLQLWAIEVAKRRGRHAATVALARKLAGILYALWRDGTRYQPRS

SEQ ID NO: 260897 - protein, 315 aa, unidentified
MDERAGRIVGIDISKDRLDVHVLPEGEHFTLGRDEAGLKALTKRLAKQALQVVAMEATGGLEAPVAAELHAAGLPVRVVNPRQVRDVARGLGILAKTDAIDAAMIARFAEAAKLTGAPVPDAQAQHLGALVARRRQLIGMRTAERTRLQQTTDKRIRRSIERLLRSIEAELEGVDRDTDGAIKGSPLWCALAELLDEQPGLGNTTARVLVAELPELGRVSGKKITSLVGLAPYPRDSGVLRGKRAIWGGRASVRTALYMATLSAVRCDAVLKEFHQRLIARGKLPKVALVACMRKLLVHLNALVAKYYAKIEQTA

SEQ ID NO: 260898 - protein, 429 aa, unidentified
MKALSYTHPIHTIPQAMATPNKVLLVGIDVSSDIHVARAVTGTMVKVGRGCSFNSSAEGLQSFLAWLAETQATVDATSTFIGMESTGIYWRILYEHLRDTLPDCGVYLVFTTAVYYARKMRGTNCSKTDPQDAFLIAELLAYGKCCRPIQRTAAIMRMREGLHLYRDAAKRLHQAWQQLHAIMSRVFPEALKDRSADGVSGLFTILHDSPVPADITAIPEDQWVIAHVKQGRGRAYLRKIYRLAQSAEHTHPDLVCDPEMWRLQYKTWHCEQQRKEKLVEMLKEYLMDLPAAELVLSVPSLGVLAASAFLSTIGDITQFHSARQVEKCFGLDFLRNQSGNFDAPPRITKRGNAYARYLLFGAALRWYNSDPYACAWCQRRFPVGAEGPGKKITIALAAKLIRVLFSIVRSGMPYVPALAFSTDEHGLTA

SEQ ID NO: 260899 - protein, 412 aa, unidentified
MTHPKMQYTYVGVDSHKDTHTAVFLDCFFEKLGEISFENLPSKFGAFLSEADKLKMEGTTLLFGLEDVSAYGRTLTVFLKNNGQAAKHVNSLLVARERRNQNITQKTDSVDAECAARVLLSKFSTLPDAQPEDKYWVLRTLVARRDFVVKNNIALKNHLHSLLMQHYPNYRSFFQNIDGQTSLAFFMRYPSPSTLEGTTLEELAEFLLVASDKHIGLNRAREILGNLQDTTVAFQELRDTAVQSTIRQIQFCMQEIDSLEAILTDVMEWFDTTLTSMAGIDTISAAQFISCIGDINRFPSPAKLARYAGIAPVLYSSGKKDMSFANKRGNRELNSLFYLLAVRLIATSQANKVRNAFFHEYYHRKLSEGKTKTQALKCVQRRLVNIVWTMLTNGEEYINPPLIDAPEKSKKA

SEQ ID NO: 260900 - protein, 386 aa, unidentified
MHDGTNLPVPERTGIRRDCATLFVSLELSRSTWVATALAPGSSKMSKHTLAGGDGRKLLDLLARLKARAEQRIAAPVKVVAIHEVGLDGFWVHRLLDANGVESYVVDPASIAVPRRHRRAKTDAIDGETLLRTLMAWQRGEPRVCAMTVPPSPSEEDCRRVSRERATLLRERIRHTNRIRGLLFGQGITNYNPLHKNRRTGLEELRTGDGRALPAHLKAEILREIDRLELVLRQISEVEAERDEMLRPAQASSPAALLMRLKGIGAEFAGVLYLEGLFRHFENRRQLAAYAGLAPSPWKSGSVDHEQGISKAGNPRLRTTMIELAWMWVRYQPASALSCWFRQRVGSERGRIRRISIVALARKLLIALSRYINHGEIPAGAVVKPV

SEQ ID NO: 260901 - protein, 351 aa, unidentified
MTELSVMPTAQTIGLDIGDRFSHYCVLGFDGEIAEEGRVRTTPEAIDRWFSSRSPGRVAVEVGTQANWIADLASNAGHYVIVANARKVRAIYENTDKCDRVDAQMLARLARSDPRLLCPVTPRDSQTRATRSLLRSRDVLVRSRTKLINHVRGTLKIFGARVPKCSSGAMAKNAREQIPFQLRGSILPILDMIAELSRHIRFYDRRIEALARERYPQSQLLQQVAGVGALTAVCYIVTICDPKRFPSSRTVGSFVGLRPGRSQSGQSDPQLRITKAGDRMLRRLLVTSAHYILGPFGPDTDLRRYGMRIASHGGKAAKKRAAVAVARKLAVLLHRLWLNAEVYQPLRAQTR

SEQ ID NO: 260902 - protein, 346 aa, unidentified
MKILALDLGKYKTVGCEYESESGAHRFQRRLTTPAALQKMVQEVKPDRVVIEVCSIAGWVCDLMGELGVEIQVANTSDEAWRWRKVKQKDDRRDALKAARLSAVNQVREVYIPRREVRQWRALITYRQQLVRRRTQIKNHIRDLLLREGQILARGHQCWNQWGLELLTSLARPLSEVGMRELWRGELHTELQQLKLLQEELTTVAEKLNAIGRADGRVQLLQTTPGVGPRLAEAIVALLDEPQRFRKASQVSAYIGMVPKAFDSGESARRGHITRQGSRLVRALLVEVAWAGLRHNAWVRQTYQRLHGGKKVRRKIAIVAVGRKLLVRCWAMLRDQRAWDWQPQIT

SEQ ID NO: 260903 - protein, 416 aa, unidentified
MNAAGIDVSSRKSTVAILRPFGEVVKLPFEVCHSAEDLSALAQQLISIEGETRVVMEHTGRYYESIAKVLHEAGLYVSVVNPLLIKEYGANSLRRVKTDKADAMKIARYALDNWADLRDYTPMDTIRYNLKTLNRQFQLASKQRTASSNNLIALLEQSFPGVRKCFDSPVRSDGTQKWVDFAHAFWHVDCVRKQSLNAFSERYRKWCKRHGYFFKQANAEEVYTLAKNAVVLAPKSDVTKVLIQEAANQLTSISRSVETYRTEMERLASMLPEYPVVMQMYGVGKSFGPQLMAEIGDVRRFERKQALVAFAGIDPMPNQSGEKNIRSNKSSKRGSPYLRKTLFNIMSIYLKCAPQEEPIFQFLDRKRTEGKPYYVYMTAAGNKFLRRYYAQVRDYLATLENLPPVDMDSTGLQHTT

SEQ ID NO: 260904 - protein, 402 aa, unidentified
MNPVVGLDISKEESHGQAFLARGKPFRGKFHFEHTRDGLANLHQVLKDVETASKLRPLLILEATGHYQSPVVQFLEEHHYICIIINPLISNRLRKSQLRKVKTDAADAYLLGELYYKEEFEPFKKRGVQLLNLRYLTRQYESLSKMCVQTKLQFQAVLDQVFPAYKGVFGAMYSRISLWFSSKFPTSYSVLQTDEITLKAKMKELLSSKRGRSEGWINQRVQRLLDAAKQNPFQQTMYASHLINLKVLITLILQYQEHLAELEQNIDALAEEIEEYELIQSIPGIGHKIAATILSEIGEIDRFDHPKKLVAFAGIDPSVFASGKFTATRNRITKRGSRQLRYALVMAVQCGLIRSRNMRLKAFYDRKRAEGKPHKVALIACANKLIHWLYAILKNKKEFRPI

SEQ ID NO: 260905 - protein, 403 aa, unidentified
MNNVAGIDVSKGKSMVSVLRPFGEVVAKPFSIGHTGSELKELADYLKSLDGETRVVMEHTGRYYEPVARFLHDEGVFVSAVNPKLIKDYGNNTLRKVKTDKADSRKIARYGIDNWAELRQHTPMDTIRMQLKTLNRQQSLYTKTKTMMKNNLIALLDQTYPGVNALFDSPVREDGSQKWVDFATTFWHVDCVRNMSLTAFAERYRKWCKRHGYNFSQSKAVEVHAGAQDLIAMLPRDALTKTMVRQAIDALNAISASLERLKAEMQALAAQLPEYPVVMAMHGVGDSLGPQLMAELGDVTRFTHRNAITAFAGVDPGADQSGTHEAKSTRVSKSGAPELRRALFLVMDCLLKTQPQDDPVYRFMDKKRAEGKPYLVYMTAGANKFLRIYYGRVKEYLASLEEN

SEQ ID NO: 260906 - protein, 370 aa, unidentified
MQKNNRNSKSPTRNTRQKPRKSDQVTIGMDLGDKTSRFCALNAEGEVLAEGACPTTKKGMAQFFGALAHSRIAIEVGTHSPWVSRELKKYGHEVIVANARQVKLISQSSRKNDKLDAQMLARLARMDPALLRPIRHRSEEAQKDLLTIRIRAGLVEARSGLINTARGLTKATGERLRSCDADQMDKEKLEELPADLRETFQPLLEEVASLTEKIKECDRKIEQIARDRYPETQLLRQVSGVGPLIALTFVLTIEDKERFSKSRDVGCYVGLRPRQSESGERQPELRITKEGDVYLRKLLVQGAHCVLAKRAPDTDLKRWGTNLAGRGGKNTKKRAIVAVARKLAILLHHLWVTGEVYEPLRNSKAMAKAA

SEQ ID NO: 260907 - protein, 369 aa, unidentified
MTDLTLFVGLDVHKKTISVAMVEATAGAEVRFYGTIANTPDAIRGLCKKLTKDGQQLHFCYEAGPCGYGVQRQLSRLGHRCDVVAPALIPRKVGDKVKTDRRDAMMLAQTLRAGQLTAVWVPDEAHEAMRDLVRLRAQAMRDLRKTRQQLLSFLLRHSLVSPYGHWTKMHRRWLGELIFAHPAQHLAHEEMLQRIERAEALCDRLKRAILELVPQWSLAPVVQAIQALRGVSLIVASVIVAEVGCFSRFDSPRQLMAYLGLNPSEHSSGAMIRRGAITKTGNALARTCLVEAAWTYRFPARVTQIIRDRLNGLPEPIRNVAWKAQVRLSARYRKLIAAGKPAPKVVVAIARELVGFIWAIARMVEPKSA

SEQ ID NO: 260908 - protein, 360 aa, unidentified
MAATMTYVGLDVHARSTHAAAIEVATGELRRARFGGSSGEVVAWLAALPQPLRGCYEAGPTGFSLYRAAQKAGLDLRVIAPSKTPRAPGDRVKTDRKDAELLARLLLAGQLKEVSVPSVSVEAARHLSRAREQVRGDLMRCRHRVSKLLLLHGRVYPEPSTWTQRHRQWLAGQQFEQPAAELAYLDGLAAVDGLVARKAALEERLSHLAVEGEWSSTVARLRCFRGIDTLSAFALCLEVGDFARFQRPAQLAAWLGLVPALNQSGESSSQGPITKTGSGYARRLLVEAAWHYLREPRIGVTLQNRQQGQPAHVLQIAWRAQHRFHRLQHRLRGRGKPGNLATVAVARELACFLWAAAVAS

SEQ ID NO: 260909 - protein, 338 aa, unidentified
MTIETLGVDIAKNVFQLHGVNCNGRVVLKRRVMRDQLLEVLAQIDRCAVVVEACTGAFYWARKFEALGHQVKVISPQYVKPFVRRQKNDGNDAEAICTAARQPHIPFVPKKTVEQQDIQALHRARQRMVNHRTAVVSQIRGLLLDRGFAIAKSITRARRLVPDILANFDNELTPMARDAISELYDLFRDLDRRIASFDKKIEQVFRNSETCQRIAKIKGVGPKTATAIVAAIGDGAEFKNGRHFAAWVGLVPRQFSSGDRKVLMGISKRGNQHLRSLLVHGARAVVRTAPNKTDRNNQWVNQLRERRGFNRATVAVANKNTRIIWAVLRTGEPYRATF

SEQ ID NO: 260910 - protein, 347 aa, unidentified
MKKVVKQVLGIDVAQDELVCCFGKMHDDFTPELISHKTFVNSSKGFDSLLTWVGKLSDASVSVRYVMEATGIYHETFAYFLHDQNLNVSIILPNKISNYARTLDVKTVTDKTASEAIALFGLERKLENWEPPKGIYKKLQQLSRERSQLMDEQTVIKNQLHAERKEAKPHKNSIERSNKRLALIKKQIQDIKEELEDLINTNDEVKDIVILLCSIPGIGKITAATVLGETNGFNLIRNKRQLTSYAGLDVKEKQSGTSVKGKATISKKGNRQLRKAMHLPALSAIRSDERFKAIFIRLVSKHGVKMKAVVAVQRKLLEMTFTMFKSKTKFDKNYYKCAEEIVEQGAE

SEQ ID NO: 260911 - protein, 407 aa, unidentified
MFAGIDWAADEHAVCVIDTGGRVADRFTIDHTADGFERLIRRLARHGDPAELAVAIERPDGRLVDRLLDAGHPVVPVKTTAIKAWREAEVASGAKSDPGDAQVIADYLRLRRPDLRELRPFSEETRALRAVVRTRGDLVDARVAAGNQLAALLAAFWPGASELFADVWSEIALAFLERYPAPIAAAHLGEVRMAAFLRKHGYSGRRSPAELLERLRSGPAGLADGPESEARRDTVLAMVRLLRALNRSIKDLDRSVVAHLDEHRDAVVFRSLPRAGQVNAAQMLAEWGDCRAAYDGPEAVAALSGMAPVTRRSGKHLAVGFRWACNTRFRNALATFADNSRHASPWAASVYGDAIGRGADHPHAVRILARAWIRVIYRCWVNGVAYDPARHGATRRLEDMGSVVVAA

SEQ ID NO: 260912 - protein, 430 aa, unidentified
MNSTQNKKIRQVTEKTMVVGIDVGSEKHYFRAFDWRGIELTKKPFPFTNSMEGFNSFSNEIYSLMERFHLSETLVGIEPTGHYWFNLGQYMSGKSIKFVMVNPHHVHKSKELDDNSPSKNDCKDPRVIAGLVREGRYYYTYMPQGIYAELRNASNRRFTLVEEQTRIKNRLYRWISVYFPEYKGIYTQINAKGGLLILKEAPMPEDIIKLGIDGIIEIWKKAKLRANGRKKAMVIYNAALKSIGYREGLVEARMEIRDLLEDHEQNEKRLKQINDLIENLALKIKNVEKLLEIKGIGIITIAGFIAEVGDIMRFDNAKELQKLAGLELVADSSGKRNGMTRISKRGRKHLRYLLIQAAISVVGKCEEFKEIHNYYTTRNSNPLKKMQSIIAVACKLIRVFYAILAKGIDYDASKMLEDIKHPGETPNLAA

SEQ ID NO: 260913 - protein, 418 aa, unidentified
MQVVYERCCGLDVHKKTVVACVLMALASGEVQRHIRTFSTMTVGLLALSDWLESLNVTVIAMESTGVYWRPVFNLLEEGRTVILVNAQHMKAIPGRKTDIKDSEWLADLLRHGLLKASFIPPAPIRELRDLTRYRKTLVQERADEVNRLHKVLETANVKLTAVATDVLGKSGRAMLDALVKGTTDPETLAELARGRLRQKLPQLQEALDGRVEAHHRLLLKHILAHVAFLEQTLEALQQDIEERLEPYEDAMGLLMSIPAIAELAAATILGEIGDDMSRFPSAKHLASWAGVSPGNKQSGGKRLNGKTTKGNNTLRAILAEVVWVLSHMKDNYLSAQYHRLARRLGKKKAAMAVAHSLLVIIYHILSTKKPYHDLGADYFEQRDSTRLTHRSVRQLEALGYTVTLVPKEVAEQVQSGF

SEQ ID NO: 260914 - protein, 360 aa, unidentified
MAKARTLVGLDVHATKIVAAVLDAETGQLQTFAMSGEIARAVQFCAALPRPVRVAYEAGPTGYGLARELARRGVQCVVAAPSKIPRASGDRVKTDRRDAEHLVRLLLAGKLHAVRVPGDEEEALRDLVRARESVRMDLMRCRHRLSKLLLRHGIRFDDGHAWTGRHQRWLTGVELEWPAAQTTLLDIRGAIDALVIRRDSLEREILAILPACPWTVQVGRLRCLRGVDTLTAVGLCSEIGDFERFARAQQLSSYIGMVPSEATTGQQRRLGSITKTGSGHARRLLVESAWHYRPRPNLGKTLAERQDGQPQAAVAIAWKAQLRLHRTWTRLEARAKPRTLIAVAVARELAGFCRAITQIE

SEQ ID NO: 260915 - protein, 350 aa, unidentified
MIVLGADMHKRSHTLAAVAAGTGELVGDMTVPVGDRGFTAALDWASGQGDDRVWALEDCRHVSGAFERFLLVHGERVVRVATRLMAGERRAGRDRGKSDRIDALAVARAALREGVERLPVAELAGVELDIRLLVDHRERLVRMRTALYNDLLWHLHDLWPEQTFPGCALLSKKWISTIGRRLARAEQTARVRIARDELRHLRDLSQTVDTLEAEIAELVAQVAPQLLAEPGFGPLTAGKLIGEIAGAQRFATDAKLARAGGIAPIPVSSGNTNRHRLDRGGNRQINTAIHRVAITRARCHPETKTYIARKRAEGKTSTEAIRCLKRHLARRIWHLLQTPPPEPIKINLLT

SEQ ID NO: 260916 - protein, 387 aa, unidentified
MKKNSIARLQGTKGHIRRMAARQRLTVGLDLGDRSSRYCILDEAGERASEDKLPTTKTGLSSVFGKMAPSRIALEVGTHSPWVSRHLAGMGHEVIVANPRKVRLITQSVKKNDRIDAEQLARLARVDPKLLSPIRHRGPEAQADLAVIRARAELVDARTALINCARGMAKPMGERLKKCDADQVKESMAEGLGEALQTVIGPLLKSVEEISRQIGVYDERIEGIGKRYPEMQLLTQVWGVGTLIALTYILTIEDAQRFEHSRDVGPYLGLTRKRRDSGDSEPELGISKAGDELLRRLLVQGAHCILRKDAPDSDLKAWGMARLQNRDPKGGKKGQKGSKKTRKKTVIAIARRLAVLLHRLWVTGEVYDPHYNRKATEAAKRQAKPAA

SEQ ID NO: 260917 - protein, 421 aa, unidentified
MSYTIAAIDIHKKVLMVVAASVAEEVADATGAAVQFECRKFGAGARERNHLVSWLQQHQVREVVMESTAQYWKPVWLDLEAHFGKLHLAQAQSNRAPKGRKDDFPDAKRLARRLQAGELMLSFVPEPEQRTWRLMTRGRLQLVRERVRLHNQVESLLEEARIKLSSVISDLLGVSGRRILKALSQGETDAAKLAELGDDRLQCTKEQLADALAGPTEAGHLQLLKLHMERLQLLDEQIDQLSQMSATALHKHQDGVVRLAKVPGFGVESAQQMIAEVGVDAEAFPSAGEFASWVGVCPGSDVSAEENHSSRCPKENRYVRRLLTEAAQAAVKKKGSHFQNVLRRFLPKLGYKGAIWVVAHRLARLVWKVLHDGITYIEHGQETNPRAKKRRAQKLAQALRKLGYSVTLTEINSAPVAEANA

SEQ ID NO: 260918 - protein, 353 aa, unidentified
MKRYYVGMDVHRASIMIVVLNGAGKVVMQSVIETGAERVRGYLKQLRGKVSVTFEEGTQASWLHEVVRPLVTEVVVCDPRHNKLVQSGNKSDRVDAQKLAELLRVGSLKAVYHGDHGVRALKELVRSYDCLVSDTTRVMNRLKAIYRGRAIGCAGHDIYRQDRRAQWLEKLTERGAKQRASFLYQQLAALKPLRHEAKRMMVKEARRQPAYPWLMSVPQFGSVSVAQLLAIVNTPHRFRSKRQFWTYIGLAVVTRTTADHEVVSGVLRRSQRPVSTRGLNRNHNHLLKRVFKNAAKGACHSGPFKAAYELRVTRGMEPSLARLTIARQLAAITLAMWKRGEQFNPERMKQQAA

SEQ ID NO: 260919 - protein, 360 aa, unidentified
MSFQRTSVGLDVHARSVVAAALDGATGEIRRERLTPAHEDLWRWLRELEGPVAVAYEAGPTGFGLARFLLDRGIECKVAAPSRLQRPVADRVKTDARDALHLARLLHLGEIVEVTVPSVAQEAARDLVRAREDCRGDLMSARHRVSKLLLRQGIVYCGGKAWTGRHGVWLRGQRFEQRALQLAYDAAYETMELTVARRDRLDAAIAEMAADSEFTAVTDRLGCLRGVSTLTAFGLAVEIGDWHRLGGRTIGAYLGLVPTEHSSGTRRVQGGLTKTGNAHARRLLVEAAWHHRKPYRGPGLDLRRRWDRAPAAAAARGHAANRRLAARWAAYDARKKPAVVANAAIARELAGWCWSLAVLE

SEQ ID NO: 260920 - protein, 350 aa, unidentified
MEIYTIGIDLGKTVFHMVGLNVRGEAVVRKKFSRTQLLRFTAKLRVELIGMEACGGAHFLGRALREQGHEVRLIPAQYVKPYVKTNKSDYIDAEAIAEAVGRPTMRFVPIKTDDQLDLQSLHRVRERWVMRRTAVINQIRGLLFERGITLRKGRCHLETALPDILEDAHSKLSSAVRLLLVQLKMELAQLAMRLEEADALIQKTAQESEVCRRLDAIPGIGPVTATALLAAIGNGGAFRKGREFAAWVGLVPREHSTGGKQKLLGISKRGNGYLRRLFVQGARAVLQFREKQSPGLRAWLAQLTSRTHYNVAGVALANKLARIAWAVLAKGEVYRPPLLVSSASADLACR

SEQ ID NO: 260921 - protein, 339 aa, unidentified
MKKIITIGLDLAKSVFEVHGVDECGETVVRRSLRRGQVLNWFGKHAPCLVGMEACATAYYWARELGRLGHTVKLIPPSYAKAYVRRNKNDAADAAAICEAVSRPSMRFVDIKSEAQQAAAGVHKVRELLMKQRTMTMNALRGQMAEFGIVVPEGTRHIAELAAVLDDPQDERIPALLRDALRKLSEGLRGLEARIAAIDKQLVAWGRENANCRHLITIPGYGPILSSAMAAMVVNPQAFRSARDFAASLGLVPRQDGTGGKVKLGPISKRGNGYLRRLLVNGAMAVLCGKRAKQDPWLAKLLAAKKRKLVAVALANKMARIGWALMTRQEDFRAMPLAA

SEQ ID NO: 260922 - protein, 342 aa, unidentified
MNKQKVTKQIVATDIGMENFYACYKIQYDDNSTVIKGTKSFANSLSGINEFYSWSKRRNKTPEVEPIFVMEATGVYYEELAYFLHHKKEKVSVQLAQKIKYFAKSCNLKTKTDKVDSKMIAEFGIEKNLTGTDLWTPPSKDFKIIRDLAREHTSLKKAQTASKLQLHALKHAHSAYGNVIELKEQQIDFYEKQIESVDKEIKTLVKLDKSLHSKIEKIKTVKGLGFITIIKVLTETNGFLLFNSIRQLVSYAGLDVIEKESGKYKGKTKISKKGNARIRSALYMPAMSAARNNKTLKVFYNRINEGRTIKKQGLIAVMRKLLILIYTLWKKEEEYIENYQIN

SEQ ID NO: 260923 - protein, 404 aa, unidentified
MEATPVFAGIDWSWQRHAVCVVDENGDRIEEFSVAHSRPGLAKITTVLGRLGAVGVAIERGDGPVVEHLLRTGFEVVVISARQVKSLRARYTASGAKDDRFDAFVLADALRTDAGRWHPVRPDSPETVALRMKVRARQDLVGHRIAVHNQLLAVLQHNFPGAIGLFSQLDIPISLVFLRRFPTQAKAAWLSERRMAHWLEANGYCGRNTPHQLIEHLTRAADGRQTGPAADASEHIVLTLVALLHQLRVQIAELETSIREALLAHPNGPILTSLPRAGTIRAASLLAEIGDCRARFPDDTALAAAAGVAPCTRQSGKYLNVGYRRGCNKNLRAALIDWAQDTPRANAWAHNTYRQARDRGCRHPHAARILARAWTRVLWRCWHDRTTYDPTQHGQLTKLEKTAA

SEQ ID NO: 260924 - protein, 414 aa, unidentified
MTPTAPHAFADLTHFAALDWAWEHHDVVVVDRVGAVVEKFRFDESGEGWASFRERMRRLGGGIGVAVETRSGWVVEQLLASGVTVYPVNPRTAKEYRMRKAPSGVKNDELDAWSMADALRTDGHGWKPLSPEDPAIQELRLLCRDEIALIQKRTGLVTELTAALREYYHEALEAFEDLTVQASWAFIERFPTPQALAQAGKRRWEKFLGAHRLTHPETYKKRLEVFAKAGKLRVPEGVTRAKSFLAVSLAQQLRQLEQQLSAYRRRIEELFAAHEDAGIFSSLPGAGSKLAPRLLAEFGADRSRFGTPEAIQCHAGTAPVTMQSGKRSRVSIRRACCKQFRATVHQWADHSRELCGWAQAYYESKINKGKSHAAALRCLGQRWLDILWTMWQRRTTYNEALHLQHQRDFGPRPA

SEQ ID NO: 260925 - protein, 318 aa, unidentified
MHLDDSVECSVGIDVSKARLDVHRLPDGLSMRAPNSPEGHRDLLARLPEPGTCRVVLEATGDLQRRLVAALAEAGHYVSVVNPRQVRGYAKALGILAETDAVDAEVIARFGRDVKPRCAAEVPARQAELDQLVARRRQLVQARVAESNRLDDDAPTLVRQSVRRQMSSIAKDLDRLERAILDLVRSEDDWRQRFDLLKGVPGVGDATAAALVAELPELGRLDRQAIAALVGVAPFADDSGRRRGRRSTRGGRRPLRSTLYMAALAAMRFNPAIRAFSERLRGQGKPGKVVVVACMRKLLIILNTMVKHNSPWRGMTPA

SEQ ID NO: 260926 - protein, 355 aa, unidentified
MKQQAIQYLALDVHKATVVASLRDASGRIVMKATVATEAQAILRLVQSAGPRVHVAFEEGTQAQWLHDLLIDHAERVVVCNVRGQSETENKSDRIDADELSDRLRVGRLKSVYHGAPEVLTLKELVRSYTGLVSDSTRVMLRIKAIFRGRAIGTSGVSVYRESQRKEWLAQLEQGGARVRAAALLTQLDLLLELRSKAKTAMIAAARRLPGWKVLRSIPFLGPVRVAQILAIMRTPYRFRTKRNLWPYAGLAVVTRSSADQEFKNGKLQRSKRAPLTRGLNRNHNPILKSVFKGAAVSATTRPGPLREYYEASLARGVKDDLAKVTLARKIAAVVLRLWKRGERWDPKKLTMQAT

SEQ ID NO: 260927 - protein, 385 aa, unidentified
MPHTLIAHSTLDYHRTLVLAIELSNKSWVLAAQVPGLPHAKAKQTIEPTSEALMAAIDGYRSRANAAGCFVERVIATYEAGWSGFWLVRWLARRGVETHVIQPSSVPVDRRARRAKSDGIDAELLLRTLLAWLRGEPRVCSMVPIPSEADEDARRSIRERSELVAERVGLVNRIGAVLATLGASNYDPLRRDRRQRLEELRTALGDPLPVNAHAKIVRMLDRLELLLEQIAELNRLRDAVLNDDVPDKAGEMIQQLAALRGIGVQSATVLVREAFVRHFANGKALASYAGLAATPYSSGSSNREQGIGKAGNRRLRTVMVELAWLWQRYQPGSAHVRWYRERAGATGARMRKVMVVALARKLLVALWRFVTQGVVPEGAAMKPVS

SEQ ID NO: 260928 - protein, 344 aa, unidentified
MDYYAGIDVSLKDSSVCVVDATGRILREAKVASEPEALVAWFRGLGLEVTRIGLEAGPLSQWLHAGLSEAGLEAVLLETRHVKAALSAMVVKTDRKDARGIAQLLRMGWFRPVHRKTVDAQEVRALLVGRKLLQSKLRDVELSIRGILRGFGLKVGEVSKAKFAARVRELAAGQTMLETVTEAMLTAREGLLAEFMTLHRRMLALARADEVCRRLMSAPGVGALVAITFRTAVDDPGRFQSSKAVGAHFGLTPKRYQSGETDVAGGISKVGDAMVRTALYEAANAVLSRPVRSSGLKRWALEVAKRRGLKRAKVALARKLACILHRMWLDGTEFCWGKETTAAA

SEQ ID NO: 260929 - protein, 340 aa, unidentified
MGQVITIGLDLAKSVFQVHGVDATGEVVVRRQIRRSQLLPFFSKQPACLVGIEACASSHHWARELVALGHEVKLMPAQYVKPYVKRSKNDAADAEAICEAVTRPTMRFVAIKTPDQQSAMMLHRVRLILSRQRTQLSNALRAHLAEFGIVAPIGRLGLEQLLEVVADAEDHRLPTGARTCLKMLVAQLTVVKAQILENDRRILADARSTDLGRRLMTIPGVGPLLASALVATVADPGIFRSGRDLAAWIGLVPRQNSSGGKERLGSISKAGHRYLRQMLVVGAMSVIRYAKQSTRGRPWLEQLLARRKPKIAAVALANKTARTVWAMMMTGERYHEPLAA

SEQ ID NO: 260930 - protein, 333 aa, unidentified
MGIDVSKKKLDLCLRKSGKDIRIGIIPNEMHAIMEWIQDEAEKNAFSLEKLIVCAEHTGQYTYQLVCASKILQVRLCLEDAARIKYANGLSRGKSDKADAHKIAAYAERYCDVLNMYKQPVEEIKQLKQLYADRSLLVADRAKYKAQLKDQKDCMNTSIFKNKVSIFKNLIKQFDGCIEKLEQQMRASICHSSLMYRQYISLTDIDGVGQYMAIKMIIETEAFTQFDFNPRKFCCHAGVAPFSYTSGSSQCTKARVSNRADKSIKYMLHMCALVNIRIKGSPLKAYYDRKVAEGKNKMIVLNAIRAKLVFIMFAVIKNDSVYSRSYQNNLVIS

SEQ ID NO: 260931 - protein, 424 aa, unidentified
MKVTYQTCCGVDVHKSFLVATIITTTGGIEPSYQKKRYSTFNNSILEFKQWLLDNDCHDLCMESTGKYWIPVFNLLEDEINVTIANPKWVKAVKGNKDDTKDSKWIGDLFRLGLVKGSYIPCKKIRILREFTRYRYKIVSCRSSEKNRYQNALTVCNVALDSVVSDIFGKSSTSIIDYLLEQSGNSINHEEIASKLLKSLKSKEDAVIESIEGYQMTDSQKYRMHLVRAHMDYITAEINDVDREIEKLISSDPDFENAIQFLMTIPGVKRDSAITVISEIGIDMTQFSSSKRLCCWAGLTPGSNESGGKKKSVRVTRAGVYLKPALVQCAHAAVKSEKSPYYKKKYESLMKRRGKKRAIVAIARMILTAIYQMLSTGESWNPSDLYKIDIPEALLEKQKAKAIKQAMKLLQREGLYPPPEPIAS

SEQ ID NO: 260932 - protein, 408 aa, unidentified
MNAVGIDVSKGTSTVVGIRPLGEVALTLREIPHTYSNLERLGYDIIGLGEDTRVIMEATGRYHEPVAAALHELGIYVCILNPIVIKQSGAGSVRKVKNDRKDAYKIAKYGLDNWTRLRQHTPMDAVRQLLKLFSRQYSLYMKTSVALQNNLISLLDKTFPGANTLFDSPTRPDGHQKWVDFVMDFWHCDCITRISQKVFTDRYQKWCKRSGYNFSVSKAEDVYISSAGHFPTLPKNDNSKLLITSAAAELNAARKVLMTVKAEVIRLAKLLPEYDTVQAMYGVGEITGAQLMAELGDVRRFDNRGSIVAFAGIDPEVNQSGTYQRESNPASKRGSPHLRKTLFLVAEAHLKKSPADEPVYQFLDKKRAEGKPYYVYMTAAANKFLRIYYARVKAYLNEHHPEREPLEL

SEQ ID NO: 260933 - protein, 322 aa, unidentified
MNKYKETFGVDISKDVFDVHGSNQGHDQYKNDEIGFKKFLKELPKSSLVVMEATGYYHYRLAQFLYKNEVVVSVVNPLSIKRFIQMKLAKVKTDKSDAKAICEYALINEVPIYNALTDTQSECLQLFRLLDAYLKQRTATKNKIHGEAVLGIPSKFVYRSLIRNKKQLNKEVTAIESKILSLVKEDQQEQLTLLTSIPGIGQKTALFLIVVTDGFSKFETASQLCSYVGITPTIRESGSSVRGRARISKVGNRKLRNLLFLCSFNACKHNKACREVYERIVNKGKSKKLALIAVANKLLKQSFAIAKSGRPYDEAYVSVLPK

SEQ ID NO: 260934 - protein, 418 aa, unidentified
METNQNRRCCGIDVHQKTVVVCVLPSDGTPGEPVKKVYGTFRNELTRMRGWLKQLRVTDIAMESTGVYWRPVWNVLEGHFAHLLLANPKQVKALQGRKSDHRDARRIAEFLQDGRLDASFVPPPEIRRLRDLTRCRVTLLGQRDEIHNKIRDLFETANVKLSSVMCNLLGVSGQRIIQAMVEGQESAEVLSWKLNGKLRPKEKQVRESLKGCFDEFHRMLLAVYWQQYRFLNSQIEVVEAQIALAMEEYAGLVELLDAIPGVDQIVAWTVIAEMGIDMTVFPDAAHCASWVKLCPGTHESAGKQMNSSTGHGNRYLRRVLLQAAWAASHSKNTYLRALFYRIKARRGWGKAIVAVAHKLVIIIYQMLRDRVAYLELGADHFDRINPVRTARKLVARLERLGLQVTLQPLQDDSQPQQT

SEQ ID NO: 260935 - protein, 483 aa, unidentified
MKPKQVESNKKASCRATPNHWQRMNHKQRREMLRKIQSADLSLEVVHPDAAGIDIGNESHYVAVPSARDRQPVRRFGCTTAEVKAMADWLKQCKIQTIAMQSTGVYWVSVYDILEEAGFEVYLVNANETRNLPGRKSDVQESQWLMKLHTYGLLRNSFRPSREIRTMRTYWRQRNDLVRAAGRHIQRMQKALTQMNIQLANVLSDVSGMTGQAIVQAILAGERDPYQLAALRNWRGKASQEEIARSLEGNWQEEHLFVLQQEQDGYQFCLKQMAECDQRLQQYLQLQEDRSHGASLPEEKRKERLRKKKKGNTPQFDLRTELFRMTGTDLTQIDGIDVTTTMTILSEAGWDMSKWKTEHHFVSWLRLCPDNRISGGKIIGKGRLPTNNRVTNALRMAASTLRLSSTYLGAQFRRLRTKLGAPVAIKAMAAKLARLVYRMLRYGMVFIDRGAEFYESQHRKLQINYLKRKAANLGFQIIEAPAA

SEQ ID NO: 260936 - protein, 425 aa, unidentified
MLAVGIDWAEEFHLVALGRPGEGVFDVRRVEHSPKAVDALVERIAALEPDPAEVRVVLETRHGLLVERLLDAGYVVVPVNPDLVARRRGPAKKKDDAEDARIACLLALDRFERLRPLIPHGELAGELRAIARDDARASRDERRLLNRLRQDLVSTFPAALQIAGDDLGAPAFLRLLERWPSTEALRQTTREQLVEHARACHHGWPERFADKIEAALADDHFQPRAYLARAKADTIRLSAQQLLAIGNQRRAWERRMGELLLGAPRRGRAKQPREGERGQSFPGGEVYLSFPGLGDRLAARVAGEIGDHPEQFESPNALQCYAGKAPVTRRSGKSEFVISCRLAYNRHLGDAVQQWAFCSLRSSPWAREFYDGKRAAGKGHHAALRALGNRWLEVLWHCLQKNVVYDETIHANNRNRTLRPLPKAA

SEQ ID NO: 260937 - protein, 311 aa, unidentified
MKKEITFDQVIDRGCGIDVHKSVIAATIRGFGIKETTKTFSGFTESIEEMRDWLKEEKITHVAMESTGVYWKPIFNILEEDFDIILVNARHIKNVPGRKTDKKDSKWIAKLLLSGLLKASFIPPKPIRELRDLTRYRRKIVGQVAAEKNRLQKILEDANIKLSSVVSNMSGATATKIINAMIDGEENIEELLKFRHGKMQSSIEDLAASLKGKLTEHHKFMLTTIKESIQEKKSLIEKLDIRIEQHLKANELILDSELLQTIPGVGKDAAAGILAEVGNNMNQFPNEQHLASWAGMSPGSNESAGKKKAVE

SEQ ID NO: 260938 - protein, 349 aa, unidentified
MKVIKKARKNKLNTFTEVEGYDHYLGLDYSQDGYSLGRVTAKMRSPKYISGSSKVEEIQEQLTKLRGRKILTIEETTSTHWLYVELKDYVDKIVVCDPYRNSLLSEGAKNDDIDAGKLSLLLRGGFLKEVYHSMEESYEIRKLISAYEDLIKSGVRIKNQQSSLYRSLGLSYKKREELPDSSIVKFIERQQNRAIKTYNEEKERYLKYFEKLQREIPVIDNMCKISGIETISSVKIYGTVIDGKRFANKNKYWGYCGLVNHQKMSGNRNYGKRKTRYSRVLKSVYKTAALAAIRGNNDIREYYEYLLSKGLPAHKARNAVSRYIAKVTYAMMKNNTEYIQYTWSKTEAA

SEQ ID NO: 260939 - protein, 386 aa, unidentified
MKPSNPSIATRGAEIAAVIFVSIELSKKSWLTAIHTPLADKIGLHKVAAGSGTELLALIRRVMKKVERTMKGPVKVLSCYEAGYDGFWLHRILAEAGIINYVIDPASLQVNRRARRAKTDRIDALGMVRALMAFERGEEQVFSVVRVPSVEGEDARRVHRERERLIKERIQHVNRIKGLLATQGIYDYEPMRRHRRERFEALTTAMETLIPRHLRDEITRHLQRLELVLAMIRAVEAQRDAVVEAEPAANEDGRKIQHLVRLKAIGPQFATVLVGEVFHKTFANRRQVASYAGLTPSPFNSGSLVREQGISKAGNPRARTTMIEMAWLWLRYQPHSALSRWFHERVGTGTGRIRRITIVAVARKLLIALWRYVETGLLPDGAELKA

SEQ ID NO: 260940 - protein, 406 aa, unidentified
MRFYIGLDWADAEHAVWVEDENATKIVGRIVPQTAEGLSEWGRWLDERRAEGIELWAAIEKPEGRIVDLLLDHGVLVFPVNPKALDRARDRFRMSGAKSDPFDARVLATFLRTDHGHLAPLRPSSEAAQELKGLTRDHARQVRQQTRLLNQLTATLKAYYPRALEVCDDLKSQWARAFLREYSTPAALAALTARQWQRWTREHRLGAERTAKLWAILQGPQLPVPAHVVRVNARLVGALLAQLEATVTAVEAYREAITDFFASMPAAEWATSLPGGRSGTTVPQLYAELGDAAGRWQTFRHLQGHAGSVPVTDRSGKQVSVQFRFACNMHLRQAVHQFAFQSLGKSEWARAYYDRGRKRGHSHHHAVRALAAKWLKIIFVLWTRQVAYDETYHLATMARQHLRQTA

SEQ ID NO: 260941 - protein, 309 aa, unidentified
MKQSVVYIGVDVAKEHLDVAWEKQSRRFGNNKSGHAALVAWIKQSATAVQLICEASGGYERGLLESLERSEVKVTLVQANRVRQYARAGGILAKTDKVDARVLSAFGTAMHPKATTPPSAEQKRLREYDAQRRHLTRILLAEQNRLAQLGCAELKSLSRSLISKIKKQIATLDARISSLIAKNEELHIKAQKLTSIVGVGARTAALVLAQVPELGQLNRRQTAALGGLAPFNRDSGTLRGKRLIFGGRRALRTGLYMAALAAARRNQILSAFYRRLRASGKPHKLALTAVMRKLLIVLNHTLKPITAQA

SEQ ID NO: 260942 - protein, 387 aa, unidentified
MAVVVIGVDPAKRSNTIEVIDAAENVLLLARFENTSADYRKMRALVKRWPERKWAVEGATGVGLNLAQRLVSDGERVVDVPSKLSTRVRAIDTGHGRKNDPTDAHAVAVVGLRTTGLREVTVDDEAVVMRLLSQRRRDLVRSRTQAVNRLHQALMQLIPAGARKKLTADKAKALLATVRPRDAAGKARRQLAADLIDDVAVLDRKLDAVDKRIAEAVKASTTTLTDIVGVGPVTAAAIIGEVGDVARFTTADRFASYTGTAPLEVSSGDVVRHRLSRAGNRRLNNALHVLALSNKRYDPRGKAYYERKLAAGKGKKGSLRCLKRRLSDVVFRTLVEDRARANPGGQMGATLTASAVDQIPKANTSDKPQPGFTTEATPTRRPAKAAS

SEQ ID NO: 260943 - protein, 307 aa, unidentified
MNFKNVIGIDVSKNVIDVCIHSSQLVNQFPNSKKGLSKFLKWVNTNVNQLDEILFVFEHTGMYSHLITVILSENKHNYYIASGLDIKRSMGITRGKDDAIDAKRIALYGYRLKDEIKPTKSIRKELTQLKSLMNLKAKLIKQRAAYKGTLKEQKAIYKTINFKTMFDVQEKMIHYLTKQINNIQVEIEQIIMTDNELKHNLNLISSIKGVGLQMAITIIITTDNFNKFDSWRKYASYCGIAPFSYKSGTSIRGRNKVSHLANKKVKALIHMCAISSIQHNPEMKKFYLKRIENGKSKMWNAYFYSYS

SEQ ID NO: 260944 - protein, 320 aa, unidentified
MTSRGAEKMKNDTIGVDVSKDQLDVYRLTDGAARRFANDKRGHKALVKWLAETPLYRVVFEPTGPYHRAVERALGASGVPFVKVNPRQARRFAEATGRLAKTDRLDAAILARMGALLELEARPARSEILLELKELYVAREALVKDRTAAKNRGKVLTLSLLKRQSAQRLEQIDRQIATVEAAILQIIEADASLADRFAILTSIPGISNITAFALLIAMPELGAMEAGQAANLAGLAPIARQSGRWTGRSFIRGGRADVRQALYMPALVAARFNPDMKAKYAQLIETGKPAKIALTAIMRKLVVLANALLKAKRLWTPKTA

SEQ ID NO: 260945 - protein, 316 aa, unidentified
METPQPFVGIDVSSQHLDVDSLPASHHFSEPNTEDGIASLVLRLRKLNPQIVLLEATGGYEVPVAYALYEAGLPVVIMNPKALRHFAKAIGKLAKTDKLDAQVLALYAQSIRPPVRPLKDQEQLELANLMTRRRQLQGMIVMEENRRRTCTPRVRGNIELSLAHLRQLLKDLDREIHDSIRRTPLWHENSEILQSFTGIGPKVSASLIAVIPELGTLPGTKASALAGLAPMNRDSGQYRGKRKIQGGRPAVRQALYMAALVAAHHNPVIMEFYQRLRLAGKPAKVALTACMRKILVILNAMLKNRTYWNPQLPLAA

SEQ ID NO: 260946 - protein, 428 aa, unidentified
MNCNTQNAKIASITEKTLIVGIDVGSETHYARAFDWRNYEYTKKPLEFSNTEAGFMTFKAWVEDIAEKHGKTAVIPGMEPTGHYWFALGKFLQDNGMKPVHVNPHHVKKSKELDDNNPNKNDRKDPKTIAALVNEGRFSYPYIPTGIYAEIRSLSNLRFQTQEELTRIKNRIARWFAIYFPEYKDVYRDLKAVSGRMILKVAPLPEEIKKLGVEGVNQIWRDAKLRGAGMKRAKILVSAAEHSVGSKEAPEAARMELKNLLNDMDVYASRMEELLRCIEEKLKEIPYIDKLMEIKGIGLVTVSGFIAEVGDIGRFDNPKQVQKLAGYAIVANDSGKHNGESRISYRGRKRLRYVLYEAAISLIGKNEEFKAIHEYYRTRKENPLRKMQSVVAVACKALRVFYAILTKGVDYDAEKLIGDIRRPQIQAA

SEQ ID NO: 260947 - protein, 326 aa, unidentified
MNASELIFVGIDVSKNTLEIALNDKAKTECISNDEKSIVALVKKLTSPSEKIGVVLLEATGGFERQVAVALCMAGLAVMVVNPRQARDFAKSMGYLSKTDAIDARVLSHFARTLHQSESRERLLLKLPTANQEELQALIVRRNQLIGIRVAEENRLATSHRSQHKSIKAVLKILDKQITVIDKDVHGRLKEHFADKLDLLKDFKGIGVCTKASLMAELPELGQLTHPQIGKLVGVAPLNADSGRHKGRRITWGGRANVRTALYMAALSAVRYNPVIKAFYDRLLAKGKLKKVALVACMHKILTIINAIIKSGIPWNPDHNKLIENA

SEQ ID NO: 260948 - protein, 455 aa, unidentified
MDGSYAGVDWASEKHDVLVADAAGEKLLAATFAHDEPGLRSLCRQLVRLKVRLVAVERPDGLMVERLLDAGLRVLALHPNQVAAARDRFRVSGGKSDHFDAFVLCELARTDHHRFRVLEPDSDATKAIRALTRGREDLVGARTALVNQLRAELERFWPGPLGLFSDLHNQISLAFLERYPSPADVRGLGEARLRAFLARERYCGQQTPAALLAKLKAAPTGRVGERELAIRRQLVCGLVAMIKTLSAQVAELEREITTAIREHPDGEIFTSLFKGAVLTAAELLAEMGDCRGRYPTRDTLAGDGGQAAVAIESGKRKTACFRWGCNKRLRRAFHTLADSSRHHNPWAQDLYAQAIARGHDHPRALRTLGRAWSRIVWQCWQDGVPYDPARHRALQRHITVTIPTASGPVPDIAATQRMAGATVTRRAARRAERPALDSKPTSAKPTARPAKPRGG

SEQ ID NO: 260949 - protein, 391 aa, unidentified
MIFIGIDAAKDKHDCFVISSDGEILFDVFTISNTLYGFNDLLAKIKSVSSDLSKVKVGLEATGHYSYNLLGFLLDNGLPTYVLNPLHTNLYRKSLSLRKTKTDKVDARTITSMLMSCVDLKPYTRALYHNEELKSLTRYRFDKVSERAKLKSSVSRLVTILFPELEKLVPTLHMVSVYALLSDFPSAKHIANASLTRLTNLLYTVSKGHYNKDTAIRFREAARNSIGSVMPAKSLELKHTIKLIGELDYEISEIEAEIELIVDSLGTTILTIPGIGYATAASILAEVGDFSNFETPDKILAFAGMSPSTYQSGQLTNCYAHMEKRGSKYLRFALYNATKYVCKWDSNFAAYLAKKRSEGKHYNVAISHAAKKLVRLIFALEKSRLPYVPAV

SEQ ID NO: 260950 - protein, 368 aa, unidentified
MNEHITIVGLDVHKATVVAAILPPTATRPTQTVTIENCPKAIERLVRRVAGEGRLVLVQEAGPCGYQVQRQMTEMGKKCVVVAPGLTPVRPGDRVKTDRRDAEKLARLYRAGELTEVHVPSCAEEAARDLVRIREDALEDRLRARHRLNKFLLRQGRVYRETKAWGVAHRAWLRRQRFEWQLLQQTFEGNLRAVEEAEARLESLDQQVRDLAQSGPYRMAVHYLRSLKGLETLGALTLAVETLDFGRFERAPAYMSLTGLVSSEHSSGGRERRGSITKAGNAHLRRILVEAAWSYRLKNTVSPALAERRRSCPPEVIQIARKAQDRLHRKFWRLVSRGKPSQVAAVAVARELAGFVWAIAQQVPAAAT

SEQ ID NO: 260951 - protein, 357 aa, unidentified
MKEIAPVVTGGVDSHADTHEAAALDERGRLLGTRKFATTSAGYAQLLGWLESFGELDVIGVESTGSYAAGLVRYLRLKEVRVVEVNQPHAHTRRRKGKSDPIDAEMAARRALAGEASAIPKLTNGIVESIRQLRVARESAIKSRSAAMVQLSELIITAPQDLREQLSHCKTLRGKVSLCRRLRPDLAELEQTSHAARLALRSLAKRIEGLEEEIADLDKHLDRLVATAAPRTTQLLGISTGHAGQLLVSAGQNIERLRGESSFAALCGASPIPVSSGRRNRHRLNYGGDRQANRALHMIAVCRLRYCQRTRAYAQRRTTEGKTKREIIRCLKRYIAREVYNALQADLTDLKNLAHTP

SEQ ID NO: 260952 - protein, 318 aa, unidentified
MPEPIHVGIDVAKDTLEVAFGPEAATQSFANDDDGHEALVTALTAHSVELIVMEATGGYEAPGACALQAAGFAVAVVNPRQARDFAKAMGYLAKTDCIDARVLAALASVLAKRPERDKVVRVLPSEEQQRLHAMVLRRRQLVQMLVAERNRLATSHRAARRSIEVLIKTIRKQIVEIESDLASHVARHHADLAKLLQSAKGVGPNTTMVLIADLPELGKLSSREITALVGLAPFNRDSGTMRGKRTIFGGRAQVRCALYMATIVAMRHNRVIKTFYERLLAAGKPKKVAIVACMRKLLTILNAMVRTGKKWDETYHFA

SEQ ID NO: 260953 - protein, 478 aa, unidentified
MDDRRLVGIDLGITSAHTVRVLSGEGATVCRRKAAPTLHGLAEVERAALAGAAPATRLEVVIEPTGPAWLPIAVFFCSRGHTVYRVSSAKAHDLRRFLHRHAKSNGIDADTLARLPLVDPAGLHPLELPDAERAALDRRVRACDRLTQQAATHKRRIKDLVRQLLPCSPLVGELGMADLAVLERYADPHALLAAGRARLARVIVKASGGHLGAARAEQWLQAANAALDLYGDHPAVAFQDLAAEVATEVRLLRVTQAELAAHATQREACYHWVDPLALARSLPGLAEIGGPALTATMGKASRFPAASKFRAFTGLAPRASETGQTDRKPQPISKAGNRLLRTTLVRAADNARHIDPQLARIYYVQMVQRGKDHLGAVCVVAAHLAERAWTVMDRGMPYVVCDTDGVPVTPQQAKAIIAEHWTVPEEVRRRRRSRKGKAPQQVLQGHVTGAQGATRRPSPSPASLGRRAGRVKQARART

SEQ ID NO: 260954 - protein, 391 aa, unidentified
MIYVGIDVAKDKHDCFITNSDGEVLFKAFSIANNRNGFNDLYQKIESVMEDVTKVKVGLEATGHYSYNLLGYLIDKGLAAYVINPLHTNLYRKSLSLRQTKTDKVDARTIASMLMSDVNLKSYSDISYHNEELKSLTRYRFDKVKERAKLKSSVSRLVCILFPELEKLVPTLHMASVYSMLSEFPGAKHVASAHLTRLTNLLSEASKGRYSKDTAITFREAARASIGSNMPAKSLELKHTIKLIQELDSEIDEIENEIKVIMDEINSPILSIPGINYRMGAMIIAEIGDFSRFDSPDKILAYAGFSPSTYQSGQLDGAYAHMEKRGSRYLRYALYNAAKYVCHWDPTFAGYLAKKRAEGKHYNVAISHAVKKLVRVIYHLEKTKQQYIKVA

SEQ ID NO: 260955 - protein, 359 aa, unidentified
MKETKVLKQALGIDVSKDSLSYCLGVLKSDMDKEFIQGKEVSNDTKGFKKLKKWIKTFGCKKVLPVVVMEATGVYHEEIANYLYSQGYEVCIMQSGRVKKYAQSLDQRSKTDALDSKMLSMLGCERKLSPWTPPSETLQELKFLSRERSRLVKERSIEKNQYHAMNASSYGYKQAIKRYKKRIQLLNLQIVEIESEMQEVVNKDNVLSAKINFLRSIPGLSFISVATVVAETSGFSLFTSGKQLVSYSGYDVVLRESGNYKGKTKISKKGNKHIRAILHMPSMAAIRLNPTLKPFYERLKPKKAKPLIAVVAVQRKLLLLMYSLWKNNQYYDPRYEIKKAARKQVLAAQDRSKNEFATS

SEQ ID NO: 260956 - protein, 377 aa, unidentified
MKKVRFVGLDVHADTIAVAVAEQKGAARSLGVIPNRFESIRKLVKKLGSPEELKACYEAGPTGYVLYWQLTQLGVACEVVAPTLVPRKPGEQVKTDRLDAEKLARCYRSGDLTAVWVPSDAHEALRDLVRAREAAKKDQLRARHRLSKFLLRRGIRPSEKMRPWGERHLKWVKSLRFAQPAHEATLIDYVGEVDHALDRIARLERAIDEAVEKAPEKMRTVIGALQALRGVGKMTAVTVVTEVGELSRFQHPSQLMGYSGMVSREHSSGNQIRRGSITKTGNAHLRRVVVESAWAYQHRPSLFHELRRRQQSLDEQTKAIAWKAQHRLNSRYRKLVARGKSSSVAITAVARELLGFIWAIGIHVERQLQVSKMRKAA

SEQ ID NO: 260957 - protein, 307 aa, unidentified
MEDGKFKTKIFTNSPQGFIALKDWLTRMDADAVPVCMEATGVYYENLATFLTDKGQTVSVVNPAWIKSFGGGQGVRTKNDKGDACLIARYCAQMRPAQWQPAPLAVRQLAALGRRRDALVAMRRQELNRQETVSLSAVRDSICTVLATIEAELADIEVRIRQHIASDPDLKHKSELLRSIPGVGEVVVETVLAESDGFQRFDRATEAVAFIGLSPQERSSGISVRGRAPICKMGNRRIRAKLYMSALTAMRCNPLVRNLAERLRAKAKPGKVIICACMKKLVRIMFGVLKHDQKFDPAFPINAQNPA

SEQ ID NO: 260958 - protein, 313 aa, unidentified
MYYIGIDVSKKDLSVFNGKLDLKFINQEGLRPFKKYLKGKYKSFSDLVIIFEPTGIYSFNLKEFCAENSIKAYIINPKRSHSFARSLGIRPKTDKIDAQILYQFHRLIDSKDIKVPKIDQQAKVLSVYLTSYEFALKQRVAISNHLESLRDKKLTNLLKKELKRAQKLEDKIFNDIKEYIRQNQNLREDYQRLLTISGVGEKMAIALLTLFKTYQGTNRAQITALVGLDSTKRESGTSVRGRAKISKNGKAIYRKVSYLPAVCATVHNQKIKIFYQRLLANHKPKKLAIIASMRKILLIAHAMYRDKTEYVAA

SEQ ID NO: 260959 - protein, 397 aa, unidentified
MIAVGIDISKAKSTVAVIDSDGTVLASPFTMAHTQLEMEAFVSYLKGLGEPTTILMEYTGHYHYPVLKKLQDEGFPVCIVNPYQMKKYGDVEIHKAKTDKKDALRIAAYALEKSYKLVPYSSMEQKYEDLKFLSRQYNQRISYVAKLKVQLIALLDQTMPGITRILPLNSRNPEKCALLLFIRRFKSFDEIQRIGKARFLASYDVLAKKASERSASSKGLSIYELAVDSITTRGEDPYIWLSQNQCVDLLSTTQNAADEIISQMRNIAETIPEYKVLRAMHGVGDRLGPIILAEIGDIRRFHSGKALNSYAGNDAPPYQSGQFESRNRHISKRGSSALRKACYEVMQALKLTKPQDDPVYLFMLKKEQEGKPFNVAKMAGVNKFLRIYYARAMELYK

SEQ ID NO: 260960 - protein, 428 aa, unidentified
MPYKIAGIDVHKRMLAVVVSDVEVDGEYAFERRQFGSNPAQLRLLADWLLEQQIEEVVMESTAQYWKPVWAALERYWTPTCKKREGAGAMSGTQHLAQAQSNRARQGRKNDFADAERLVKRLVANELTLSFVPDPEQRLWRTVTRTKYQLTRNRVQLQNRLEALLEECHIKLSSLVSDLLGVSARRMVKALADGETDPAALAALANYHLRATQEQLRDALGACQELNPVYRRLLKLALEELQLIEKQISQLDQEIADLLRPYQDQVQRLAEVPGLGVDSAQQIIAEVGPIAATFPSAGNLSSWVGACPGDDESAGVSHSHRSPKGNRQMRRLLNRAANAAVKYKGGIFEILYRRYVPRLGHKQTIGVIAHRLCRLIWKILYQGVRYEERGPDVRKKSQRYRAARMIRELQSLGYRVEQANSQSADVPA

SEQ ID NO: 260961 - protein, 344 aa, unidentified
MLYVGLDLSRKRLDWQALDREGERVAIGAVPPDRDGLAKLAQQLGDASALAVIESMSGARFVHDQLELAGWEVRIADAVKARGLAPLACKTDKIDCWVLAELARLNLVPEIWLPDPAVRAERERARFRLHLVKHRVSLKNRVHSILFQHGVPSPGSDLFGAGGRRLLERLQLPEPWASTLQASLALIDSLDEQIHGCERELRQLGADHHYIPLLVTCPGIAWILGFTIASEIGDISRFPTPRKLVGYTGLCPRVEQSGERDRRGPLRKNGPDYLRWALIEAAHTAGRDPRYRPIVERMRARHGKKRGSKIAAIEIARRLTEAIRQMLSHNRPFAPAGATAPLAA

SEQ ID NO: 260962 - protein, 308 aa, unidentified
MFIGIDVSKDRLDICVRPSGETFAVTRDDEGLEYLVERLRALAPVLVALEATGGYETVVASALAAAHLPLAVINPRQIRDFARSTGKLAKTDRLDAAAIAHFAEAIRPPARRVADGEAQALGELVARRRQVIEMIVAEKNRRRLAGQPRVLKAIDRHVDLLQAELSELDRDIDGAIRKSAAWQADADLLASVPGVGKATLRTLIAELPELGRLDRRKIAALVGVAPINRDSGAHRGRKTIAGGRAPVRTALYMAALVASRANPVIAAHYQKLRANGKAAKQALTACIRKLLVILNAILRDRKPWLLPA

SEQ ID NO: 260963 - protein, 392 aa, unidentified
MYIVGIDIGKNHHEASIVSPEGKQIGRSLRFATTHKGADSLMSFIFKNIGNSPCVFGMEATGHYWYPIYSFLKAKGYTICVINPIQSDSLRKMYIRQTKNDSIDSFLIAEVIRFGQFGTTSMADENILAMRQLCRYRDSVISSRTEIKLRIGTIMEQIFPEYEKQFSSLWVSTSMGILEKYLTPENIENAPIDELFEIIKDKSHNRLTKAKAISIKEAAADTFGIKIAQDAFSFQLKQLIDRMNFLDKQIEALDCQILEYYEKFDCYLHTIPGIGIIGAATILAEIGDISRFKNSSALVAFAGIDPTVRQSGEFNSTHNHMSKRGSPYLRHAIFLAATTCSFHNSPLNAYYKKKRDQGKHHLTATGAVARKLTTVIYAVLRDSKPYEPKKFC

SEQ ID NO: 260964 - protein, 365 aa, unidentified
MSGASTSRRRPSVVNTRASEGKTNDKGGPNVERQYVGIDLHRRRSVIVRRTPAGETLETVRITNDPVTLALELAKAGPDPEVVLEATYGWYWASDVLQANGANVHLAHPLGNNWGHRRVKNDERDATDLVDLLRMGRLAEAWIAPPELRELRELVRYRAKLVALRSGLKAQVHAVLAKEGVAVPMTDLFGVAGRALLDTCELGRAYTTRVESLRDLIELFDREVGMLEGLVNRQLAGHPGYRAVQAICGVGPVLGAIFVAEIGDVHRFPAAPQLCSWAGLTPSHHESDTTVRRGHITKQGSRLVRWAAVEAVQRQRGGTFLQAHHHRVADRRGKGIGKVATARKLLTLVYYGLRDGEIRCLAKAG

SEQ ID NO: 260965 - protein, 353 aa, unidentified
MSKPIVSPRQPAVSVNQLTHSQQASVFCGIDVSAETLAVAVIDPDQPSVQREFANSPSGHKALVTWLGKYKTPVRVSLEATGIYSMDLALALDAAERIELAVLNPKRVHDFARSMQRSKTDTADAQVLAEFSLRMPFQAWQRPRRSALALRAISRHIEALVLEHTRVFNRLHAARGSMATPRCVVEDLKRSLATLERRMRKLRREARTQIDSEDRLREQFLLLTSVPGIAEISAVQILGELVLLAPEMKVRQWVACSGLDPVHQDSGTSVHKPTHISRAGSRHLRRALYMPALAAVRYDPHLKAFYEALQARHKSKLQALMAVARKLLHAIYGIFKSCTPYDGNKLFPQQGVA

SEQ ID NO: 260966 - protein, 371 aa, unidentified
MTETVKYVGLDVHKETIAVAVADGEREGEVRFVGTVANEDDAIRKLVKRLTGPGVTLNVCYEAGPCGYGLHRLLTKLGQNCIVIAPSMMPRRPGDHVKTDRRDAMTLARLLRAGELTAIWIPDEAHEAVRDLIRARRSAQDDAIGAKQTVRSFLLRHDRRFGGKAAWTKMYWRWLSEQRFDFPHQQLAFEEMQKRVLEAQARVGRLEAALTEAVDAWCFAPLVRNLQVLRGIRLVSAATLVAEVGDLTRFDNPKQLMAYVGLVPSEHSSGARTKRGRITRAGNAQARTMLIEAGWSYRLPAREERRYRERVIDLSEDIQAIGWKAQVRLCQRYRRLAATGKPQPKVTTAIARELVGYAWDIARRVSPAIAG

SEQ ID NO: 260967 - protein, 347 aa, unidentified
MRFYNRQHRHYCGIDLHVKTMYVCILDAAGQSLVHRNVKSTPEAFLEVVAPYREDLVVAAECMFTWYWLADVCAAEGIAFVLGHALAMKAIHGGKAKNDKLDSFKIATLLRGGLLPQAYVYPAAMRATRDLIRRRLHLVRKRGQLLAHIQNTRAQYNLPAFERRIAYPANREGVAEYFADSSVRKSIEVDLTLIDQYDTLIVDLELTIVREAKRHDADAFHRLRSVPGIGKVLALTILYEIHDIARFDRVQEFASYARLVKCKKQSGGKTLGTSGAKMGNVHLKWAFSEAAVLFLRHTTGGKKLLAGMEKKHGKGKALSILAHKIGRAVFYMLSRGTVFSMEKFLAA

SEQ ID NO: 260968 - protein, 433 aa, unidentified
MHDVQDEPLFCERVAGLDIAKAGVEVTIRVPSDTTVGRRQQETRAFATTRAELESLGDWLACWGVSRIGMEATGDYWKPVFFLLESRGFDCQLYNAAQVKALPGRPKTDRADSVWLARITERGTVASSFVPPEPIRRLRTHTRYRRHLTQARTAEKQRVEKLLEDGHLKLSSVISDIHGVSGRDMLDAIAAGQRDPRALAQLARGTMRGKIARLEQALDCSFFTAEHAAVLAMMLAAIDHYTTQIHTLTATIENLIAPYLHQAGQLDAVPGIGPVGAQDIIAEIGVDMTVFPTAAHLVSWAKWSPQIRQSAGKRKGSNATGRGNPYLGAALGEATISAGRTQSFLGAKYRRLTRRMPKKKALVATGNSMLTHIHALLSDPAASYQDLGPDYYEQRMHVRRQARNHVKSLQRLGYKVAIEAISPGTGELQAATA

SEQ ID NO: 260969 - protein, 314 aa, unidentified
MICGVDVSSKSLDARIGRDGATASFTNNPKGIAELAEFCQCHKVHLVAMEATGGYEKKPFALLWAAGIQVAVVNPRAVRSFAQGMGLLEKTDRIDAGVIAWYADTKGCVAVSPASAQQQQLKAMVTRLRQLTELRTAQRNQRLLVTDKVVLKSFRKLLDLVQRQIRDLEVAIAGLIDADAVWQKLDQSFRSIKGVADRTVARLMAEMPEIGTLSNKRISKRAGLAPLACDSGQMKGKRTVRGGRRTIREILFVVAAGVSRHNPDFRAFRERLAAAGKAKKVIRIALAHKLLVRLNAKAREVRQLQAACAPALLS

SEQ ID NO: 260970 - protein, 373 aa, unidentified
MNTIYIGVDFHARQQTICYLTTETGELVTTELKHEPKTAVRAFYEQFSGQVIVGLEASGYSPWFERLLEELGHQVWLGDATEIRRRARWRQKNDRRDAELILDLLLHDEFPRLHRPSLQSREVMRMLRYRQKLIKMRTMSKNSLQSLALQSGIARRGRLFTREGKAELDAAVMSAAMQWQRAHWWQLLEALNQQALEAMTWLKGASQNDVSIARLRTHPGIGLLTSLCLVHTLQPVARFRNTRKVAAYAGFDPLERSSAERKHFLGISKAGSRVLRYLLVEAANTAVRKDEELKRFYQRLAQRRGRPKAKVAAARKLLIRAYIMMRDEIDYAEFRRRAVAARLARLGQGPPIPAALIGQPASTARQEPPARGK

SEQ ID NO: 260971 - protein, 408 aa, unidentified
MNTLYVGIDVSSKSNVIYLMLPNGDKHSNFSVANSHEGSTQLVKRILSALTSYSLDTVLIGLEATNVYGDNLVYFLREDATLAPFNRKIHVLNPKQVKKFHDTYNDLPKNDYVDSFVIADCLRFGRINKEVYLGDYRYKALQNLTRARYFAVQSLTKEKQRFINVLFKKYSTMTQEKVFCDTFSTTALAVYDEFDSAEALANMDLHELTNFIIKKGKNRFTDPDAVAKAIQKAARSSYRLPKTINDSVNQVLSISITSMKALESQIKEFDKAIKAQMELLPNVLISIPGIGPVYSAGIMAEIGDINRFNNQAALAKYAGLAWKQHQSGGFEAEVTRLIPSGNRFLKYYLCEAAFSLVRCDKEYSDFYHLKYKEVNRYQHKRALALTARKFVRLVFRLLKDNRLYCPAK

SEQ ID NO: 260972 - protein, 428 aa, unidentified
MPTTESTTPYPTATPSSPPPPQLWVGLDWGDTQHSYVWQDRSGQREEGTLEPSPEKLHQWLQSLGERTGGRPVRLALETRHHPVLHALVQYPWLEIYPVNPVTSARYRSAFTPSGASDDLPDARVLLELVRDHADKLRPFHQPDALSLQLTGLVQARRALVDRRTALTNQLTILLKSYYPQALQLFESLNSALAIALLRRWPNVIDLKAAKPGVLKRFYYQHQVRSAALVQARLDLIKSTVALTTEEATVSVAQMQLQALLDQLEIVRKHVARFDVQIKRVFARHPEASLFRDLPGAGPQLAPRLCVAFGTDRTLYPDPSSLQKFLGVAPVREKSGHQLWTHWRWRAPAFARQSLIEWAGQTVRYCHWARTYYERMLKKGKKHPAILRALAFKWIRVLWKCWQQRTPYDDARYARQLLHRQSPNAVTP

SEQ ID NO: 260973 - protein, 343 aa, unidentified
MKIYALGIDLGKTVFHLVGLDASGQVVIRKRCSRTQLLAFTANVQAQLIGMEACSGAHFLGRALRAQGHDVRLMPAQYVKPYVQTNKSDYIDAEAIAEAVQRPRMRFVPIKTEEQLDLQALHRVRERWVMRRTAVVNQVRSLLLERGLTVPKGRRHLNQALPRILEDAELPLSGSFRVLLAQLKLELEQLAARIEQMDAVIEQEARENEACQRLTTIPGVGPVTATALIAAIGNGSAFGKGRDLSTWMGIVPGEFTTGGKQKLLGISKRGNKYLRRLFVQGARSVLQQRDKQAPGLSLWLAQLLACKHQNVVVVALANKLVRIAWAVLCKNESYRAPVLPVST

SEQ ID NO: 260974 - protein, 354 aa, unidentified
MPGKPDSKIAVIGIDIGKNSFHLVGQDDRGALVLRQKWSRGQVEARLANLPPCLIGMEACVGAHHLSRKLQALGHDARLMPAKYVRPYSKGQKNDFKDAEAIAEAVQRPTMKFVATKTADQLDLQALHRVRERLVSQRTGIVNQIRAFLLERGIAVRQGLRFLRIELPRILAAPPEVLSPRMVHTIEDLAGDWRWLDERIERLSEEVEALARKDAGCERLMSVPGIGPIISTATVAAIGTGDGFSKGRDFAAWLGLVPKQISTGDRTILGKISKRGNRYLRVLFVQAARVVLVWPQSWERHGLKPWIEAARKRLHHNVLAIALANKLARIAWAVLARGRNFEARRTGDAVAQPA

SEQ ID NO: 260975 - protein, 379 aa, unidentified
MDHAITGTPAETILHGALELSKNSWLLALQLPDRAQPSLYSIRGGDTEGLMAKLMAARDRWAKVSGKAPSIVLCYEAGYDAFWLARFLKARGIECVVVDAASMQVNRRARRAKTDRIDVGMLLRALIAWGQGDRHVWSVVRVPSVDDEDLRRSHRERDRLVRERTAHINRIKGLLFGQGIRGINVKSKYKTLQIDKLVTGDGRPLPLRLAREITREIARLALIQEQIATLERERDQAPAPCKATEKKRVQLMSLTGIGPAIAAVMTREVYYRQFDNRRQVAGFLGLATSPHDSGDVERSQGISRAGRGQVRGTIIQAAWLWLKHQPKSAITRWFVQRTAGQSGRIRRIMIVAVARKLAIALWRFLEQGLVPQGAMLANR

SEQ ID NO: 260976 - protein, 357 aa, unidentified
MGKSIIDTSSVTRVGLDLAKRVFRVHAVDATGFVVIARSVNRRTLLKFFDTLPRCVVAMEACSCAHHWGRQLLELGFAVRLIPPAHVKPYVRRSKNDAADAAAICEAAGRPGQRFVPVRSVENQAALMRHRARELMVGQRTAALNALRGHLSEIGVVAAQGVPNAYALKKLADGGVDENGEIVVPDCVRLALAPLVRQIDALDEAIEAIDRELEASARTDETARRLMTIPGIGPVTAMALLATIQDFAAFSSGREFAAFLGLTPREHSTGGKPRLGRITKMGDRYLRKLLVQGACSALGHRKGHNDALRRWASGMLERKTVKYKFKLTAVALANKVARIVYALMTKGGQYDGRPVAA

SEQ ID NO: 260977 - protein, 333 aa, unidentified
MIQLKEGIEMNKPVLGIDISKLKFNICLINSNQKPRHKVFPNTLSGFEQLITWLSAQNAGDAQTCLEATGTYGEALALFLLQAGYCVSVVNPAAVKAFAGAGLSRTKTDKVDADLIARFCLSQEPEVWKPPAPEIRELQALVRRLESLIEMRVSEENRLSSGIVVEVVRRSLEEHIAYLIEQTKHTERMIREHIDNHPDLKRQSELLDSIPGVGQTTAALFLAEIVDIRQYKSARQVAAFAGLVPRERRSGTSVRGKVRLSKIGNARLRKALYFPAITALRCSEFFKQWASGMRERGKCKMSVIGAAMRKLIHLAYGVLKTGKPFDPNWAKTT

SEQ ID NO: 260978 - protein, 345 aa, unidentified
MPIVGGLDIHRNQITFDYLDTMTGEVRRGQIAPADRAHLRAWLARFAGRDDVAFALEGCTGWRYVAGELAAAGIAAHVGEPADTAFARGRKRHAKTDKTDSRHLRQLLAEGRLPECWIPPSHILECRALLETYHDLRREHTAWIQRIHAVFFHQGAPRLGEGALRTDQDLAALREAAACHLSPAGQLQIATALDMLAALEARMDMLRRQLLHAARHLAGAKALADRLYGVGPLAALALTCWLGGAGRFSSSRKAVRFAGLDVTVYSSDGKRSPGHLSRQGPEILRWVVYEAGKTHARASAPGHDYYAAVKDRTDGKLAALSQARKIVRQACHILAELGDDALTAA

SEQ ID NO: 260979 - protein, 368 aa, unidentified
MKKVSTAATMQSRDFCVQQKLTIGLDLGDRHSWYCVLDEAGKVQLEQRVRTSGKALRELFSTMPRSRVALETGTHSPWISRLLSELRHEVIVANARKVRLIGESRKKDDRLDAQTLARLARIDPELLCPVKHRSAKAQADLAMIRARAGLVRARTGLVNTARGLAKSYGQRLLSCNVRNMNPEKAEELSPELQRALEPLLSAIEELSERIVEYNEGIEALAQKSYPEVVLLKQIKGVGTLIALTFLLTLEDPHRFGKSRDVGGYLGLQPGRRTSGQSEPQMHISKEGDPYLRTLLVQGAQHILGPFGVDCDLRRWGLKLAERGGRNGKKRAIVATARKLAVLLHHLWVSGEVYEPLHNNSRTAVAAAA

SEQ ID NO: 260980 - protein, 299 aa, unidentified
MTLYCGIDLHSNNSVVAVLDEQDRTVYEKRLPNDLETITEVLRIYQTELAACVVESTYNWYWLVDGLMDAGFPVRLAHTSALPEYSGLKYSNDFSDARYLAHLVRLGLLPTGYIYPKEERALRDLLRRRLLLVRQRSLYHLSLQSLIARHSGQRLNTLQIKQLTKEQLADYLQGHALLGGEITHQARCWLESAIQRIERELQHHIKPREDYQLLQSMSGVGPVLGTTIALETGTIERFASPGNYASYARCVKSEKISNKKRKGQGNKKNGNKYLAWAFMEAGHYGSLGRIKALFHETDK

SEQ ID NO: 260981 - protein, 314 aa, unidentified
MNEITIGIDVGKHSLEVFITKAKKELKIPNTVKGIEALITRLKKYKSVKLIFEPTGGYELLLAKLLKQAGMRFSLVAPNRIRTFARALGISAKTDRLDAKVLARFGEMMDPKDTDFKGDQHLKLAEISRRRCQVLENIGAEQRRLEVLLDCSLRERIQRHIDYLNAELEELERELEDLINSNEDWKQRSHLLNTVPGVGVVVTQTLISDLPELGSLSNAEISSLVGVAPMNKDSGTHSGYRRTIGGRKRVRKVLYMATLSAIQHNPRVKEFYQRLKTNGKKSKVAIVAAMRKFLTLINTMVKTQKNWDEFLANA

SEQ ID NO: 260982 - protein, 412 aa, unidentified
MDVIVQHPAALDVHKEQVTACVRFPAPDGTRAQDVREFKTTVGGLLVLHDWLKAHGVTQVAMEATGVYWKPVWAVLEDSFDCLLVNARHVKQVPGRKTDVKDAEWLCQLLEAGLLRRSFVPPKPIRQLRNFTRYRKAQIKERQREANRLHKALEDTGIKLDCVATDILGVSGRAMLDALCAGTTDPEVLAELARGRLRAKLPALREALEGRFDAQHALLIGAILAHLDFLDEQIERLSDAIEEQLRPFQPAVDLLRTLGGIETRTAQNIIAEIGTDMSVFPTAGHCVSWAGQCSGNDQSAGKRRSGRSRKGSKWLNDALKDAAMAAIRTNDSYLQAQYRRLKPRIGHGRALGAVKHSILCAIWHMLSTGELYRDLGGDYFRKRDPERQTRRLVAQLERLGHQVTLQALAEAA

SEQ ID NO: 260983 - protein, 343 aa, unidentified
MDHFAGLDVSVKETSVCIVDDTGKIVREVKVASEPDALLAVLTPAYHFKRIGLEAGPLSQWLFSALAEADLPVVCVETRHMQAVLKAQINKTDRNDARGIAQMIRVGLYRPVHVKTLRSQKLRMLLTHRKLLQSKAIAIENDLRGTLRNFGLKVGMVGTVRFEARIKELVENQPDLAALVEPLLIVRRVLREQIVILHRRLLAIVRDDDVCRRLMTVPGVGPVVSLTYRATVDVPARFRKSKAVGVVFGLTCSKYQSGEVDRSGRISRCGDEMMRVMLYEAAQSMLRSKKWSWLKAWAMQIARRRGMKKAIVALARRLAVIMHRIWVDGTEFRWTREQAPAAA

SEQ ID NO: 260984 - protein, 304 aa, unidentified
MFGIGIDVSKATLDVAVHGEQFRQFSNDKRGFVRLIRWLKTWPIKQVVLEASGGYERAALDALHAAGLPMVRINPARARRFAQGTGRAAKTDRLDATVLAQMAHLLPLTRYVPPAPWQQRLAEFAQCRRHLVQMRVSEMQRLRRLVDPDLIAMKQRYIAQLSDDLKQLDKAIAEQLEGQPGWKNIGALKGVGPILISTLACELPELGSLGSKAIASLVGLAPMNRESGTWQGQRRISGGRAAVREALYMAALTAIRYEPRLRAFYAGLKAKGKASKVALVAVMRKMLVILNARKRDAEVALGCP

SEQ ID NO: 260985 - protein, 349 aa, unidentified
MGEVSTIGVDIAKSVFQIHGVDAEGTVVIRRRISRAKVLEFFAGLPPCLVGMEACATAHQWARELKKFGHDTRLMPPTYVKAYVKRGKNDAADAAAICEAVTRPSMRFVPIKSVEQQSALMLHRTRDLLIRQRTQLINALRAHLAELGLVAAKGHEGLHQLVTAVAESGDERLPSNARFACQSIVAQLHAVQTQINGLDKRITQAHRANADSKRLDAIPGFGVILSTAVVATMTDPKAFKTGREFAAWIGLVPRQNSSGGKERLGSISKQGDRYLRRLLVLGAISIVGTARTRPEKYSWVTELLGRRPAKVVAVALANKMARTAWAVLARGETYRAPTRSSSAAIAAAA

SEQ ID NO: 260986 - protein, 320 aa, unidentified
MKMPQIEVLVGLDVSGSQIDAHVLPGDPACRVANDAAGRAELLRWLQAAGVELAVLEASGGCERQLVRELRAAELAVRVVDPRRVREFASAAGKRAKNDRIDAAMIARFAQTFPGEPGEHDPAREALAALVGARQDLLEIRTSLGNRARHLEGRPLRGIQRVLKRVEAEIDGLERAIDKAIAADTRFQARAHRLATVPGVGPVLIAALIAWLPELGRLDRRKLAALVGVAPFDDDTGDSHGQRHIAGGRTALRGVLYMATLAAVSCNNPVLKAMYRRLRQAGKAAKVALVACMRKLVHILNVMIARQQDWNPNAATRPVA

SEQ ID NO: 260987 - protein, 475 aa, unidentified
MVKLKEIFLEKINENKDLNKREKKLFVGVDIGRLKNQVAFLSKDRNAELRKREKIENSFWGFMKLLEYIEELIVQESITMENVIIGIESTGHYWKNLYNFFLEKNIEVVMVKNKTVKLKREIKYPYKGKNDSLDSVCIALSLKDDDYIRIRKSNENYDSLRILSKIKDERVKANTQNKNRIIKWLDKHNQIYLKTFVDPYCKTGMALLKCFPGEADIKEKTVEEIIEILRSNNNKNKLQYRKISEYYELLIDILNDIKEIPIGARKEIENLIRLFEDTENYLETLQKDIDELSNEMELPVERFSQLKGLGKNEILDLISEIGMIENYKTSKHLQAYCGLRVIAYKSGEYQIKKPKISKAGNRKARRILFHMALILIARNPDWRKLFAYYLSYNRENQKSKKEMLIAVASKLCRTIFGMLKNDTEFDRKLLFRGLDFSKCNKERFINEYVGEKRNWVITDEELEELFGKSNTKKLF

SEQ ID NO: 260988 - protein, 344 aa, unidentified
MIIIGCDYHPSFQQIAWVDTDTGEVQERKLMHGDGEAERFYRQLGGPARVGLESTGNCHWFLDMLAEMGHEVWVGDAARISAKQVRQQRTDRRDAAHILDLLMKDDFPRIWTPSRSERDHRQLLIHRYKLVTLRVRVKNGLQHLALNQGMQKGRSLWSREGQKRLQELPLAFWARTRRQDLLELLKKLDGQITVLDQAVKKAAEENEKARLLMTQPGVGPITSLAFVLTLGDVTRFRRGKQVASYVGLIPREYSSGGKQRLGGISKQGNRFLRMLLVEAAQTVVRYDPKFRKEYLHRCHHKPKAVAKVAAARKLAIRLFWMLRTNKTYPEVVRIESSSRVPLAD

SEQ ID NO: 260989 - protein, 384 aa, unidentified
MEQKYVNPKVSRISQDTLIVGIDVAKRNHWVRMTDYRGIDLISPFKINNTIDGIKMLEEKIRIIKQKEGLNNVILGMEPSGHYWKVLAWQMKSNEQVNYLVGVNPYHVKKSKEFDDNSPSKNDKKDAGLIAKLIKDGRYFDMHLSNDVYSELKVLTTTREQLVSKRKNSKNIVIAIIDEYFPEYEKIYKNIFSEGSMKLLKTYPFPEEILRVGVEEIESVLKESTKGKDWKSRARKIYEAARESVGVRAGQKSAKMKLRMLLEEIELLTRQIQELEEEMKKMIEETEEGEYIESVPGIGTVMTATILGETGGLSRFKSWKQIRKLAGLNLYEESSGEHKGKTRITKRGRPLLRKIIYLMAKTVIRHNREIMEKYLKLRKREKIH

SEQ ID NO: 260990 - protein, 412 aa, unidentified
MKDLLEISCGLDVHKEKIVACILIGPLGKPTCSEIREFSTLIPDMIALRNWIVSKNCHHVAMESTGIYWMPIYEILEDAFYGDITLLVVNARHMKNVPGKKTDMRDSEWISTLLRAGLLNGSFIPEKRIREFRDLNRYRKSVIRDITSQKNRIEKFLQSSGFRLSSFISDIFGASGRNIILHLIEHGQIDKTALDSCLKTKTRNRIDEILMSVNGTLSEHQKAFLRILMTHYDSLKKHLAEIETSLEEDMAPFALQVEQLNSIYGISTTASCAIIAEIGIDMKPFKTAEHICSWAGLCPGNNESAGKRKSTSVTKGNPYIKSMLCEIAWVIAGKRNTYLSAWYWRIKQKKGAKKAIVALARKLLVIIYTMLKQGTLFDESCFETRRKHCEQKQLSRYIRELEKHGYHVEAQS

SEQ ID NO: 260991 - protein, 312 aa, unidentified
MAHIICGVDIGAETLDARIGRGGAWQQFVPTNDSIDRLAAFCRTHQAGLVVMEATGGYERLPFHRLWAADIPVAIVNPRSVRQFAEAMGTIEKTDKIDAGMIAWYGETKRIVPTPPPSDDQRALTALVRRLRQLIELRTAQNNQRRLVDQAVALDSFTTILAMINREIRSLQARIIAMIDADPLWLALDRAFREVKGVADRTIACLMANLPEIGTLSGKAIAKLAGLAPIARDSGKKNGNRPVRGGREAVRSILYVVAEIVRRHDPDFKAFHQTLRAAGKTAKVVRVALARKLLVRLNAKARDVRRELAQPA

SEQ ID NO: 260992 - protein, 351 aa, unidentified
MLIIGCDYHPSVQQIAFVDLETGETGERQLLHKDGEAERFYRDLKLRGISVRVGIEATGHARWFERLLAELGFELWIGDPAQIKAARVRKQKTDRQDAQLLLKLLVEERFPRIWIPSPENRDVRQLLWHRHRLVQMRTRVMNQLQAVAMNEGVRRKKALWSKSGRAQLESFVLSPWASRRRQDLLEVLDRLNPTIDELSTAVEQEAKKRPEVLRLMTHPGVGALTGLAFVLIIGSAERFACGKQIGSYLGLIPCEDSSANRQRLGHISKQGNTLLRFLLVEAAQAAVRGDAEWRRKFVHLAMRRDPRIAKVAMARKLAVSLFWMWRKEWNYEQVIKFGSHAGQSDYVHGVK

SEQ ID NO: 260993 - protein, 350 aa, unidentified
MELQTIGIDLGKTSFHLVGVDLRGSVVVRKRMSRSQLLHFTSNLRVEPIGMEACGGAHFLGRALQQQGHKVRLMPAQYVKPFVKTNKNDFIDAEAITEAVTRPTMRFVPIKTDDQLDIQSLHRVRERWVMRRTAVVNQIRGLLLERGITLRKGRRYVDAALPEILADTTIGLSGCLRALLAQLKLELDQLASRIAEADCALARTSRENEACQRLIAIPGIGPITATALIAAIGNGAAFRKGREFSAWVGVVPREHSTGGKQRLLGISKRGNSYLRRLFVQGARAVMMRRAKKAPGLRQWLEKLALCKHHNVAIVALANKLARIAWAVLAGNDFYRPPVLATASSAELACR

SEQ ID NO: 260994 - protein, 347 aa, unidentified
MTKVSTIGIDLAKSVFQVHGVDAAGKVAMKRQLKRKGVLAFFAQLPACLIGMEACGSAHYWARELARLGHDVKLMPAKYVKAYVKRGKNDAADAEAICEAVSRPSMREVAVKTVEQQSVLMLHRARDLLVRDRTRTINALRAHMAEIGVIAPAGRDGIAALLAIVSDAADPRLPGVARVALQALAATLASLGGAIAALDRAILAAHKADATSCRLETVPGVGALIASAVTATVGDARVFKSGRAFSAWLGITPRLDGTGGKVTLGPITKQGDRYLRRLLIMGATAVLGHAKHQPDKQLWAVGLLGRMPFKQAAVALANKMARIIWALMVRGGTYTPRHRPALLAATA

SEQ ID NO: 260995 - protein, 320 aa, unidentified
MRNAVGLDISKLTFDASAMVGNAEYSAKFDNDSKGLDQFSDRLKSLGCQNLHICMEATGNYYEEVADYFAQYYSVYVVNPLKISKYAESRFKRTKTGKQDAKLIAQYCRSAQESELVKRQKPTDEQYRLSRMIAAYAQIKSECAAMKNRHHAAKDEEAAKAYAQIIKAMNEQLEVLKEKIKEQTEKPNCKEGVKRLETIPAIGRMTAAVLFHHLTSSKFETSNKFAAFAGLSPQQKESGTSVRGKGKLTKFGNRKLRAVLFMPAMVAYRIRAFPDFIKRLEEKKKPKKVIIAALMRKLAVIAYHVHKKGGDYDPSRYKSA

SEQ ID NO: 260996 - protein, 355 aa, unidentified
MIVIGIDPHKTTHTAVAVDAVTGELRGELTVPATPAGAERLLAWAHALADEPVFALEDCRHVTRSLERFLVARDAQAVRVPPKLMAGQRRAGRTRGKSDAIDALAVARAYLREPALPRVESDERTRELKLLLDHREDLVHERTRIQARLRWHLHELELGADVPAGALDRALWLRRVGRRLARAEQTTLVQIAREQLRLVGGLTRRIGELERELAALVRAQAPALLEIPGCGVLSAAKIIAETGPVRRFSSDGALALHAGVAPLEVASGARRRHRLNRSGNRQLNCALHRIAVTQGRVYPPARAYLERKQAEGKSRREALRCLKRYLARSVYRTLQALEEDTMSSTNRPVSVPALT

SEQ ID NO: 260997 - protein, 316 aa, unidentified
MTITSAGFVGIDVAKEKLDLAVLGEFRVSQISNDSVGIANLVSQMLERKPELIVVEATGGYQRAVVQGLFEAGLPVAVVNPLRVRQYARACGKMAKTDRIDALVLAEFGKQVQPRRFEAQSEAGRYLEALLVRRKQVEGMLKAEKNRLRTVHQALRTSIEAMIDHLKAEMRQLEAEVRKFMDEQECWKEKREILVSAPGIGVVTTATLLAELPELGKMDRKKIAALVGVAPMNFDSGKKHGYRKTKGGRADVRSVLYMATLVATRYNPLIKAQYEHLVVRGKLKKVALTACMRKFLTILNAMLRDLKPFRAAPVSK

SEQ ID NO: 260998 - protein, 307 aa, unidentified
MNKAVVYVGVDVSKAYLDMAWAGRSRRFANNKSGLSALMKWIKQSPVHLICEASGGYERGLLDAAEQNAIKLSLVQANRVRQYARAAGILAKTDEVDARVLCAFGSAMQPKPLAPLSAQQKQLRELETQRRHLSRIFVAEQNRLAQLNDKELQRLTGRLLAALKKQMAAIDARIAALIAQDQTLNEKVQKLTTIVGVGTRTAVLLLAQMPELGTLNRAQAAALAGLAPFNRDSGTLRGKRTIFGGRRALRCGLYMAALVATRHNRLLRDFYQRLRTKGKPHKVALTAVMRKLLLALNHTVKPSACCA

SEQ ID NO: 260999 - protein, 320 aa, unidentified
MAKRTTICAGIDTGKRKLDVALDCSSEQLQVENTAEGYKTLLEWLGRHKVKRVGIEASGGYEQAVVAELRRKRLVVVVFQPAQVRAYAKYRGQRAKNDRIDAALIAACTAAVNELHPAPDARFSALAVHLTLIEQIGEDIARCKNRLESCRDVRIQKLWKEDITRLVKRKRAEFKALVAAIREHRDLAERLDLIYSVGGAGLPTAVAILVRMPEIGQLSREQAAALAGLAPYDDDSGEHTGARHIEGGRKRLRRALYAAALAGSFRWNPQLMALYKRLIAAGKGHKCALVACARKLLIFINAVVTRGTPWQADAPAAQAA

SEQ ID NO: 261000 - protein, 342 aa, unidentified
MDEYDGRQFVGIDLHRQRSVIVRQSESGDQLSAVRIVNDPAALRLELERAGTDPEVVLEATYGWYWAVDVLRDCGAQVHLAHPLGVKGFRYRRVKNDVRDAGDLADLLRMGRLPEAWIAPPQTRELRELVRYRAKLVAIRSGLKAQVHAVLAKAGVLIAVSDLFGVGGRQRLAKVPLGAAYAERVRSLLELIDVLDGHEARFAGLIANRLCNHRGYQALQQVPGIGPVLAAVFVAEIGDVHRFTSPAHLCSWAGLTPKHRESDTVVHRGHITKQGSKLVRWAAVEAIQRYPTTSKIALDRTRIESRRGKNIAKIAAARKLLTLVYYGLRDGHIRALDRPRAA

SEQ ID NO: 261001 - protein, 343 aa, unidentified
MQTITTIGLDIAKSVFQVHGVDTGGEVVIRRQLKRRSVLAFFEKLPPCLVGIEACASSHYWSRELQALGHTVRLMPPAYVKPYVKRQKNDSTDAEAICEAVTRPNMRFVPTKTVEQQSCLMLHRARHLFIRQQTAVINSIRAYLAEFGIVAPVGRRGVEQLLEVVANTADRRLPEVARMCLAALGSQLRALKAQILEFDRRIMAWHRSNATSKRLDAIPGVGPALATALVASVADPMAFRSGRDFSAWVGLVPKQNSSGGKDRLGSISKQGDRYLRSLFTAGALAVIRYAKIHGTGHRPWLAGLLARRPTKVAAIALANKLARMVWAMMARGERYKEPAALAA

SEQ ID NO: 261002 - protein, 331 aa, unidentified
MKNYQLAVGIDVSKKTLDVFIYNHSKHRVFDNTRSGYISLIKWVGKFSENEKSVLYCFEHTGNYSLKLAIFMQTNGLDYVQENPIVIKRSSGLVRTKSDRVDAQMIARYAWLHREELVCSSIRDESLLELGRLLSLRDQLVRNRTGLMGTLEELTGLLSSPSTDVSCKSLKHTIAYLSKQILKLEKQIDQLLKREEELGKNYRLLTSLKGVGRILACQLIYHTCNFERFSSWRQFSSYCGTAPFEHSSGTSVFKRAKGHPMSDRKMKSLLSMASVSAIQHDGELREYYQRKVAESKPKMIALNNVRNKLLSRAFAVIKRGTPYVDLCKYAA

SEQ ID NO: 261003 - protein, 415 aa, unidentified
MALKIVYKICCGIDVHKTFVVACIASTNDKGVTSYESHRFSTYTSGLKTLLQWLIDRNCKDVCMESTGKYWIPVYNILEKGCSIVLAHPKYVKAIRGKKTDKKDAKWIADLFKHNLVAGSFMPPSDIRQLRDLMRYRFKLTCFKSSEKNRLQNCLTVSNIQLGNVVSDTFGKSAQAILDKILENPADTSFDLEPLVFKSLKKKLPELRDAIDGYITPEQAGKLKVIKTHYEDLESRKAELEELILALATPYQQELAILQTSPGISSDFTAIGIISEIGTNMEAFPSAKHLCSWAGLTPTNNESAGKKKSVRVSKAGCYIKPLLVQCANAVIKSTKHPEMRNRYLRLKKRRGHKKAIIAIARMLLTALYHMLKNGENYNPELYRKTDLPPAGREITIEQALMLIRNQGYKIKSATT

SEQ ID NO: 261004 - protein, 403 aa, unidentified
MNSVGIDISKGRSTIAVMRPFGEVVISPFEVRHTDSELSELARQLKILDGETRVVMEATGNYHAPVAKLLHDAGLYVSVVNAKLVHDYGNNDLRRVKTDKKDAVKLANYGLDRWLTLPRYIPEEDTRLLLKNCYRQYRQYSKVQTVLKNNLISLLDTVFPNANRLFSSPIRGDGSEKWVDFVAEFWHCRCVSEKSERAFTCKYLHWCRKQGYNFSEAKAHTIYTEASGHIGVTPKSETTKLLIEQAVAQLRATSTALAALKHEMQSLASMLPEYPVVMDMFGVGPTLGPQLIAEIGDVRRFYSKKALVAYAGLDAPPNDSGDVTGRHKSMSKIGASSLRRTLFLVMSVYLQNAPLDEPVYQFMDKKRAEGKPYRVYMMASANKFLRIYYATVKAYLESLEHTA

SEQ ID NO: 261005 - protein, 406 aa, unidentified
MDGRCIGLDVHRDFCEVAVWDAGEVRSAPRVPARPGPLEQFAQQLGPADRVALEATGNALAIARIIRPHVAEVVIVNTRRLAAISDAKQKTDRRDARTLAQLLAARIIEGNWQPDENTRVLRRLVARRASLVVNRTRAKNEILAVLHRNLAPHPPMTDAFGVAGRRWLDQLVLAVDERDTINAALRQIDFLTEEIATIEHHLAEFALASEHARRLLTVPGVGLTTATTFLAHAGDITRFPTPGRLVGYFGLDPKVRQSGNHDARPGRISKEGPALARHVLVEAALTAVRSPGPLRGFYERVRARRGHQIAIVATARKMTALFWHLLTTGHDYAYSPPTSTNKKLRTIELKAGHAREKPGGPHTPINRERRRELERQTMQQAQTAYERTVAAWHRIQRERKTTQARA

SEQ ID NO: 261006 - protein, 339 aa, unidentified
MEINYPILGIDVSKATLDLCLLTGPDQRTPLRVANTATGYKRLWQWLQKQTTAPVTACLEATNVYSAGIALFLYQQGATVCLANPAAVHSYMGAELRRAKTDKADAISIAEFAGAMARKLRPWQPLPADYETLRDLVRHLHTLTRNRASIKNQLEKTHYLSSAAKQHILRSHKADLAHYDKQIRAVKKEIQATLKTSVPMTQRFERLTTPPGIGEITALTYMAEIPDVRQFPKGKHLTSFAGITPRIRHSGKRKPESQPISKMGSGRLRQALYMASLSAKQYNPSIALFAQRLQNEGKKPKVVNIAVGRKLLLQLYAIDKNHTTYDPNYHILHLASGTN

SEQ ID NO: 261007 - protein, 315 aa, unidentified
MEPQAVFVGVDVSQEQLDYAIRPTGQHGQLPNNETGIAELVTRLTAVQPALIVLEATGGLELAATAALLTGGCPVAVVNPRQARDFAKATGELAKTDRIDAATLAHFAEAIRPRVQELPDEQALRLKAWLTRRRQILEMLVAERNRLALTHPEVQGRLKEHITWLEHELDHLNHDLDHEIRNSPFWHEQDQLLQSVPGVGKVLSTTLLGYLPELGVLDRKAIAALVGVAPFNCDSGKLKGKRRVWGGREQVRYALYMSALSATRFNPIIRAFYQRLRQAGKPFKVAITACMHKLLIILNAMMKHQTRWLPPMPAH

SEQ ID NO: 261008 - protein, 353 aa, unidentified
MNDSHSIAWLGLDAHSKNCVLGQLDDHGTEIKWWGFPTKPEQLVQHIKAIPATEKHLMLEESNLARWLSQLLKPHVQQLVVCDARRNRLISQDHHKHDKRDAFALARLLRLNEFKPVWQPTEAQRVLFKRVAKSYENAVQRQTRLKLQLKSLFQHWGLFPTGATIYSKPGRVAWLKQLPYDTLRAQALLLYELLDQALAGQTQFRRLMCQTGRQFPEIQRLSTTPGVGLVGSHLFVAYVQDPKRFPKFGRLTRYCRLGIRDRTSDDKPLGYQQLDREGIGTLKAISYRAYLQAAKRRTGPVWDFHQLSLRHTGSTTHARLNTQRKILLTLWTLWLTGREFDPDQFSRAQPLDV

SEQ ID NO: 261009 - protein, 321 aa, unidentified
MTFYNNFIGIDIGKFNFVVALHNNKTTKEFDNSKAGIKLFLTNYKAELKTALCILETTGGYETELFNTLCMKNYSTHRANTRKVKSFISSHGNNAKTDKLDAKALAQYGFERSAILEIHTPPAKHILDLYELAQRRKDLKQMLVAEKNRLQAPRTDLTKNSCQSIIDALNKEIEIITDKINEIIAADPKLKAKKEVLKTIPGIGEIIANEILILMPELGTMNGKQAASLTGVAPRANESGKFKGYRSVANGRDIIKPTLFLAAMAARNSKSDLSLFYEVLIKRGKKKMVALTALMRKIIVRANAKLRDLVLAQQNEVNTAT

SEQ ID NO: 261010 - protein, 346 aa, unidentified
MTQQNYPNQNYPILGIDVSKKQLDVCVLQADEQRMSLTVNNTPAGYEKLMQWLKKQNVEPVAAGLESTSVYSMGIAVFLHEQGMVVYLANPSQVHSYMRAEMRRAKTDKADAEAIANFIAAMSKNLHPWQPIPEHYQELRDLVRYLHEITRSRATIKNRMEKIDYLTSNAKGRILRSINADLAHYEKEISSIKKDIRKCISKHKDLTCRYERITTAPGIGEITAVTYMSEVPNVKLFSCAKKLVAYAGISPRISHSGIRHPESQPISKMGNATLRQAVYMGALTAKRHNQSMTGFATRLRDDGKKKPKVVTVAVARKLLHLLYAMDKNQTSFDPNYQKQHLITGTI

SEQ ID NO: 261011 - protein, 427 aa, unidentified
MEEKTRSKALGWECHTHFMGFDWAKDHHQILVIDRDGQIALDLQIEHTAEGWYRLREKLVRLAGPDLSVVAVAIETNCGPAVEKLLELGCSVYPLNPKSAQRYRDRKAPGGSKTDHLDAWSFADALRTDGHGWRRLKPDDPMVQELRLLCRDEVQLIGQRTALVNQLQQTLVEYYPATLEAFDDWTIPACWEFVIRFPTPSALEKAGRRTWQKFLHAHHLYRPQTYQKRLDIFARATEFCGSQAVTNAKSMLAVSLAKQLRLLEQQLKIYRRRIEGLFQEHADHDIFDSLPGIGERLGPRLLSECRQDRGRFQDHQALQCYAGTAPVRFQSGQIHRVTFRRACNKHLRTAVHLWADSSCKDCLWAQIYYQQKRQEGKSHACALRCLGQRWLKILWKMWQTRTPYDEQLHMRNQVQHGSWVLALKPAK

SEQ ID NO: 261012 - protein, 410 aa, unidentified
MDVYCGIDWAEDHHDIALVNRDGQLVARRRISDDAAGLAQLLALLAEHGDSPEDPVPVAIETPRGLLVACLRATGRQIYPVNPMAVARYRDRHSVAGRKSGHGDAVVLANVLRTDLHAHRPLPAGTELAQAIAVLARAQQDAVWDRTQAHNKLRSHLRGYFPGFLAAFPARAGLTRPEARIILAAAPTPAAAARLTSTQLRALLKKAGRSRGLDTEAARLRDAFRAEQMRQLPLAEDAMGRQALALLRQLDAACASADDLEQATTGSFNQHPDAGIITSFPGLGALTGARVLAEIGDDRSRFQDAKGLKAYAGAAPITRASGKSKSVTRRHVKNNRLAAVGYTWSFSALTASPGARAHYDHRRHAGDRHAAAQRNLSGRMLGCLHHCLITGQHYDEATAFPARTTLPKAA

SEQ ID NO: 261013 - protein, 480 aa, unidentified
MNVKARRTKKQVNVENQAIKLLSKEELIRKIEVIKKELRAYTWRDLETNGKFAKNDKLSFITDDMLIVGCDIGSETHYIRAIDVRGRELSRGAFEFSNTSEGFANAKEWVLALAAKNDKKQIVLGLEPTGHYWFALATWMISNGISVVQVNPYAVKQSKEIEDNSQLKDDRKDPKLIANLVKDGNYGMPYLPEKVYADMRRLSMFRDQLTEDRIRNINRLHRELKIYFPEYMDAFGKIDGAFTLEVLKVSAIPTDITALGAEGMKNIWHNAKLRGRGYNRANEIVSYAEKSVGLTDGTDAGREAVKWYAEQILRLDEQLAEIESALHEKCREIPYAENILAINGVGENILAGILAEMGDISRFDDVKEIQKLSGMGLVACSSGKHKGQTKISHRGRKRLRYWLFQAAKSAVSHADEFKQLHEYYTTRSNNPLKKMQSLVVIACKILRVIYTILKTGTTYDPQKLLKDIKHPAASQAPMAA

SEQ ID NO: 261014 - protein, 435 aa, unidentified
MSTLGVDLAVRAAHVATLSNDRGEVIWSRRRFTSHPHDLAALSTAVGPASELTVVMEPTRSAWVVVAAHFRATGAKVVMIAPEQSADLRSYYKKHTKNDRLDSLVLSRVPLLHPEGLREVSGLGPAEPLRRAVRRRVDIVDQRGACHQRIDAMLDLLGPAYHEALGSRGTKTSAVVLERYGNPKTLRRLGLSRLTDLVRKTSGGHLGAEYAAGLLEAATEAIALWKGGGLDFEELAWDLAQEVRLINQLDVEIERLDARIAELYQLADPKGIVRSAPGVGPVLSAGIAGRLGDATRFANLAAVRSFSGIVLCVNQSGFTETRPSITKQGDPGLRRDLFLAAERARHQDPQLAAKYYRLIMERRLHHYSAICHLATTLVTRIAACMRSGQLYVVRDVDGTPVNSEEARAIIAKRYSIPPAARRRSRIPDAVSEPTR

SEQ ID NO: 261015 - protein, 330 aa, unidentified
MDRWNVVLGVDVSKKTIDICWAEGNLFIQISNNSEGFSKFKKWCKGNKIDLQKTFIVLEYTGGYEYRFIQFCELHSIDYRRVPGLEIKKSMGMVRGKSDKADAFRIGRYGEEKIRRLEPSKPMDKNILKLKTLLSFRKRLVRERAGYQSTVKERKHMYEVDDQDLIVSTAKEKIKANTQYIKKVEAQIIELITSDESMRLNYRLITSIKGIGPVNAWMTIAYTENFSSFPDGRHYAVYVGVIPFEHTSGTSKKGRRRTSNLAQKELKQELNQAAKIAIQHDPELRAYAERKMRNKEYGLVLNNVKFKLILRMFSLVNRHEMYVENYRRSA

SEQ ID NO: 261016 - protein, 339 aa, unidentified
MELYAGLDLHSRNTYIGIMDKAFNRVFKKRVPNHLELILQTLDPFRDQIKGFVVESTFNWYWLVDGLMDAGYSYPHLANPSAIKQYEGLKHSDDQHDAFFLAQLLILGILPQGYIYPKKGRPVRDLARKRMFLVQHKTAHILSLQSLIQRSCAMKVRANDMRHLTVKELEMWLEEEHLVLSAQANLDSVNFLKQKIKQLEKAIIQKVKLNKEFKYLLTVPGIGNILAMTIMLEVGDIKRFPKVGNFTSYCRCVPSRRLSDGKSKGQGNRKNGNRYLSWAFTEAAQLGRRHNERFRRYYNRKVAQANTSLATKALGNKLARICYYIMRDQVPFREELFCH

SEQ ID NO: 261017 - protein, 394 aa, unidentified
MHYVGIDWAEEKHQVAVVNAEGKCVSEFVVQEDGKGFALLQKQLALLSPVEINIERPDGLLVDWLVSQGYAVFVTAPRAAASHRPRSSKDDRNDARLLANLRRTQNEDCRPLVRHSATVQELLHLLRALEQLQRQQVRWVNQLRQVLQQYYPVMPKLFSHLYTDIALAFLQSYSTPQAATALTREQLEAFLKQQHYNHMQRLPSLYQMLQTPMPTAVVWQGYERHALALVPLLQQLNRQLTQLRRDIRQTFARHPEATWWQSLPGAGDLTTARLLALIGDNREAFPSCAALQALAGTVPVTRRSGKHLVVRFRWGCTKTLRKAMMDFARNSLAKSGWARSYYQDQLQRGHREQRALRALANRWVRIIWTLWQRRHTYDEAFHVANRAHNGRAAA

SEQ ID NO: 261018 - protein, 393 aa, unidentified
MVCVGIDVAKDKHDCFIISSEGEILADVFTIPNNAEGFDTLLQAIRRSTRPEDKIKVGLEATGHYSYNILGFLLDKGLPTYVINPLHTNLYRKSLSLRKTKTDRVDARTIAAMLMSDVDLKSYTDTVYHNEELKSLTRYRFDKVRERAKLKQSVSRLVTILFPELEKLVSSLHSASVYALLSEFPGAKQISSTHMTHLKAVLKNASQGRYGQEMAETIRNAARSSVGSVMPAKSLELQHTIRLIRELDAEIEDIETAIQAIVDEIQSPITTIPGMGVRMGAVILAEIGDFSRFDSPDKILAYAGMSPSTYQSGQLSLSGAYSHMEKRGSRYLRYALYNATKHVCHWDPTFAAYLAKKRAEGKHYNVALSHAAKKLVRLIFAMEKSQRPYCAAA

SEQ ID NO: 261019 - protein, 405 aa, unidentified
MDVVHKRCCGLDVHKKTVVACVLTPEGRQTRTFETMTDDLEALAEWLEQCGVTHVAMESTGVYWKPVYNVLETYDLELLVVNAQHMKAVPGRKTDVKDAEWIADLLRHGLVRASYVPSRDERELRELVRYRKSLIRERASEVNRVQKVLEGANIKLASVASNVMGKSGRAMLEALSLGATDPSALASLALGKLQEKQPELERALRGVVGPHQRALLATQLRHISFLDDEIERLSQQIADRQHPFEEARVRLETIPGVGRRTAEVILAEIGPSVSRFPTPGHLASWAGLCPGQNQSAGKNKSGRTRQGCVSLRDALTEAARDAARTRRTYLAAQYRRIAARRGAKRAAVAVAHSILVIVYRMLSRGSVYIDLGPNYFDERDKTATVNRAMARIARLGYNVTVVPAA

SEQ ID NO: 261020 - protein, 348 aa, unidentified
MTVYIGVDFHARQQTISYLTTEDGEIKHLVLMHDDPASVRAFYEQFTGHRVVVGFESSGYAAWFEELLEELGCEIWIGHATYIRQFAKRRQKNDRRDADLILELLHTGDFPRIHRYSRSTREMLQQLRYRQRLVKMRTMVINMLLFMASSRGVSMRTQLRSQKGQAKLQQLPLPEPLGNQRDELLSLLQTLNQKISTIEQWLEQQTKEDVGVQRLQTHPGIGLLTSICVRYTLEDIGRFSNTRKVTAFAGFDPMQDKSDERERMGAISKQGSRWLRFFLIEAGQIAMRRDVDLANVYHRVSRRGGHAKAKVAVGRRLLVRAFIMLRDEIDYAEFQRRGVAARSSRGTA

SEQ ID NO: 261021 - protein, 345 aa, unidentified
MMIIGIDAHKRSHTAVTIDGNGRQQETKTVGTTTQDHLKLLKWATALGGERLWAIEDCRHMTRRLERDLIAAGESVVRVSPKLMADVRDSARTYGKSDPIDALAVARAALREPDLPVARLDGVERELRLLIDHREDLVAERTRIISRLRWHLHELDPGWLPPASIDRTSAFTAITAHLQTCREHGLVLRLSRRLVQYVQVLTLEINALTAEITERVAVVAPSLLAIVGCGPLTAAKILGETAQVRRFRSKDAFARLNGTAPIPVWSSNKQRHRLSRTGNRQLNAALHRIAMTQARMHPPARELLARRKAGGDGGMEALRVLKRRLSDVVYRAMLSDETQSAPAAA

SEQ ID NO: 261022 - protein, 468 aa, unidentified
MVLTSFNHILRKNGSRWARFVRQIGAENLLIVGVDAAKYVHKAMICSFYGDIFIRPFEFDASESGFRKLVSKINEVKANQGTCEVVLGVEATGHYYEDIVLRSQASGFHVRVLNAVITAQERKYLLNRSKTDNLDLMVIVNAVISGRGTDSPLPTGSVHDLRKLTRARRELVNRRTAVQNSIRVHADHIFREFQGKYIWKNGKKEFVKPLSDFFGKASRYIMRHCLHPSDILALGDKGLRELSVKENLKIRDSSIQRLLKFAEDSISRPKEEVEIEQYLLNHQLDLLDLLDGQIKELERRIEDLFVQTEGAVILSVPGIGVITGAELYAEMGDISDFDHAGQLIKMAGTNPVVKQSGDRKPSFMSISKQGRRPFRNVVFLIGKSLSQNNPEMNVKYNEFRNRGKYPRQAYIALGNRMIRMAFSMIKNQSLYRTNHKYYDLNHEITKKLRNPNVKLFYESFVKPSSIVA

SEQ ID NO: 261023 - protein, 407 aa, unidentified
MEVLFPRCAGLDVHKDTVVACVRCVSAPKAHEVRTFGTTTRELLELTDWLASFRCTHVGMEATGVYWKPVWHLLEGSFELVLANAQHIRNVPGRKTDVNDAMWIADLLAHGLVRSSFVPPARIQELRDLTRTRKQLVREISQHSLRIQKVLETANVKLASVLSDVLGQSGRAMLAAIIAGEDDPEQLADLAKGTARKKRAALVEALRGHVTAHHRTMLQLHLDLIAALESALEEVDTAVGKALAPISYAAELLKTIPGIADVAAHVIIAEIGADMSRFPTAGHLVSWAGLCPRNDESAGKRRSTRVRKSGTWLKTTLVTAAWAAIRKKDCYLRSQFLRLKSRRGPKKAILAVAASMLTAAFYMLRNRVEYRDLGADHFDRLDKTKAAERLIRRLKTMGFEVQLKHAA

SEQ ID NO: 261024 - protein, 425 aa, unidentified
MGRNWGAPDSEKPRPKGGMAMSRKLYAGVDLGQRFHQVAVVDQGEELVVEPFKIERGRLGIEALLGAFRTLGSQPADVVVTIEATGNYWNELVWALTPRGFCVHLAHSKKAHDLRKFYALHTKTDVTDSEALARMPLVDKKLKPVWVPSPTQQMLLRLCRLRWKNRCRIADLKRRISYLAETVVPGVDQVLPVRYSKSSRLFLRRYLSPQKARRLGKKRLGELLSKAAWGKFSDKKHEQLWTCIESAPELGWSADDLLLEVNVQLDELEGLEDQVDRLDARIAELYSEVAPEQRIKRVGGLGEFLSAALTAVVGDVRRFGNKKALVAYSGLPPRVKRSSGRTKAGQAMTKHGNPYLRAWAYLGASCARQYDPALNAYYHRLRQKGKHYNVALCATAARLLERVYEILSEGGQNEVESQDQRAYAG

SEQ ID NO: 261025 - protein, 409 aa, unidentified
MLLVGDDWAEDHHDVELMDADGRVLAKARLPEGVAGIARLHAMIGQFVGEDVEGAADQVRIGIETDRGPWVRALVTAGYAVFAVNPLQAARYRERRGVSGAKSDAADAHMLADMVRTDAHQLRQVAADSAGVEAVKVVTRMHQTLIWERTRHTLRLRHALREYFPAALEAFADLAAADTLELLAKAPDPAAAARLTVGQIGGALKRARRRDVTAKADRIQAALRTEQLGQPPQVTAAYAASVRALVAVLAALNAQVKTLEEQVDAHFGQHPDTEIIRSQPGLGPITGARVLAEFGDAKDRYASAKARKNYAGTSPITRASGKRTIVAARFVRNNRLTDPLMAQALSALTASPGARAYYDRHRARGLEHHPALRQLANRLVGILHGCLRTRTRYDEATAWAHHDENKRAA

SEQ ID NO: 261026 - protein, 522 aa, unidentified
MAGKVSTIRRRKSRSNSRKRQSLQKPNGVIGHRVKKVGGANFAIVCVDPAKHRSEWMMADYFGNLLIEQQTLEHQAAFFKLAVAQIREAQRQHDIQDMIVVVERTGNYHLAPKRAFSKAGFETRVVHPFATKQYRMPADPGNKTDGNDLNAQHRAAVAGFGLCEVELESPYRELQLRSRHRRNLVEKSTAIACQIREHLHLAMPGFAKLFDHLFDHKSAMAIARRCDSPAKVIQLGRAGLSQHLRENKIRNQPRTIDKVLAWASQVDSIQDGPLHHAIWTDLEELYQHFQRRIFVLEREIAGDLVQTPYVRLMAIPGINVVSSAELAGEMGPITRYANANAITGRCGLYPSRYQSDQTDNSGPIIRQANRRLRCALMRIADNLVCHCAYYRGQADADQARGIDKRAARVKIAKKFSRLAFACVAGDEPMKHPAFQKPDSILEKLREFHHQHQTPVDQLLANLETVVGQLPYNTRSHEAEIVADVLQQQSNRHRGGVAIGEVLPAVLARLEIKTKENEHRDRS

SEQ ID NO: 261027 - protein, 350 aa, unidentified
MKKICIGIDVSKETLDVTVIHIESYELMEKLGYSKFENRPSGFRSMTAWVRKVIKSHGQMAEALFCMETTGSYDLPLCHWLHKNGLNVWRESALQIHCSKGFQRGKSDKEDSEIIALYAARHQNRYTAFAPDAEAIADLKELICYRDSLVERRKECKVRLANKKETLVNKNSKAWKCIERLSKAEIKRLDKVIGECDEEIRNLMKEDEQMEKNYQHLTSIVGIGLINGAALIAYTGNFKKITTPNKMSCYCGCFTFYEDSGTSVHRKSPYRNACCKMLKGYLRMAAKSAMLANTELRKYSERLREKGKPYAVILNNVANKLLHIMFSLVKHDYDYEYNHEVVRRMEREIA

SEQ ID NO: 261028 - protein, 321 aa, unidentified
MHSNNTVVYAGVDVAKATLQLHLQGQQSEFNNTPKGLHQLCAQLQKVPGVHVVCEATGGYERALVKVLHQGQIPVSVTNPARVRAAAQAQGQRAKTDQIDARGLTDYGQRYQPQPTPPTSATQEQLVALTQWLKQLIHGRALAKTQAEQHQDPFVRRQHAKLMTHLQSQIEAVEKQIQALLEQDAALQQRVNRLDEIAGVGPRTAWMVLAHMPELGRLNRHEVAALAGLAPWTRESGTMKGMRCIGGGRPEVRLALYMAALSAARCNPVLRSLYKRLRAKGKVAKVALTAVMRRLLTYMNHCIKALPSEPATASAKELKLA

SEQ ID NO: 261029 - protein, 444 aa, unidentified
MGKPQVFDDQEQERVFERVAAVDVAKASGVVCLRLPHPAQPAGRRSQVWEVPATMHAVTELAGRLTAEGVQKVTLESTSDYWRIWFYVLEEAGLAVQLVNASQARNLPGRPKTDKLDAMWLARLTEMGLLRPSFVPPAEIRVLRGYARARTRLTHDRTRCFQRLEKLLEDALIKVSAVASKLTTRSVQDMIRAMIAGQRDPQVLAGLARTRMKAKHDALAEALAGLFTDHHAELAQLLLDQIAFLDTQIARLAMLIGEQLASLRAAGGTGADGATGPGPGAIALPVIARLDEVPGVGAELAASIISETGLDMTRFPSPGHLASWAGLCGRTIQSGARTRTGKGQGNAWLRGYLGRAAIAAARTSTFLGERYRRLARRRGAARAQVAVARSILIIIWHLLNDPAARYHDLGPGHYQARTDKNRKARNHIRQLQALGYTVTITQAA

SEQ ID NO: 261030 - protein, 410 aa, unidentified
MKTIVRRCAALDVHKDSISATARTPRRGGGREQHQAAFGATAASLLALRDWLAAHKVTQVAMEATGIYWRPVWAVLEDEFELLLVNARHVKQVPGRKTDLSDSAWLCQLLEAGLLRASFVPPLAIRELRNLTRYRKAQVAERQREANRLHKMLQDAGIKLDSVATDILGASGRAMLRALCEGTTDPELLAELARGQLRRKIPALREALAGRFRADHALVVGHILAHLEFLDETIESLSGAIAEAMAPFAAQLELLQTIPGVGRRTAEVILAACGADMTQFASAGHLVSWAGLCPGHDESAGKRRSGRTRKGSKWLRVALVEAAASATRTDRTYLSAQYRRLKARRGHGRAILAVAHSMLASAWHMLSTGEIYRELGPDYYQRRDPQAAVRRLVRQLEALGQQVSLQPLAA

SEQ ID NO: 261031 - protein, 339 aa, unidentified
MSSIAHRGFVHLGMDVSKNSIAVAVLPPDRDVAEVDKIFHDADSIRRLVKRIGRPKEIWACYEAGPTGYDLQRLLTSMGVRCDVVAPSLIPKGSGDRVKTDRRDARRLAGLHRAGELTPVAVPTPAQEGVRDLCRTRGDMVQDLTRARNRLSGFLLRHSVVWRGGSPWTERHRRWLATPSFDDPAMATTYAHYLATVKLRDTALEAVETDLLSWCEKDPFGDQVQRLAAYRGVTRIGALCLAAEVFDWRRFPKARPFMSFTGLVPGENSTGLSSDGARSPGPATPTCGASSAKWPGPTSTAQTSGWASGSARRACRQRPWLVPGPHRSACPSGPTTGHP

SEQ ID NO: 261032 - protein, 342 aa, unidentified
MSTVTTIGLDIAKSVFQVHGIDAEGVVIIRRQVRRGQVLKFFASLPPCLIGIEACASAHHWSRELQSLGHEVKLMPPAYVKPYVKRQKNDMADAEAICEAVTRPTMRFVETKTCQQQSVLMLHRVRQMQVRQKTMLTNAIRAHLAEFGVVAKIGREGIDELLLLVRDGDERIPELARACVLALGEQLVLLKRQILEMDRRITASHRANEVSLRLAEIPGIGPLLASALVAHIPNPKAFASGRNLSAWIGLVPKQNSSGGKERLGGVTKQGNRYLRSMLTIGALAVIRYAQRHGTRRPWLVQLLARRATKVAAVALANKMARMVWAIMAKGERYREPVVGQAA

SEQ ID NO: 261033 - protein, 424 aa, unidentified
MDALVERSAGIDVHKDVLTACALTGSLDQKPQEEIREYSTSTQDLLALAEWLGERGITDIAMESTGIYWKPVWHVLAGSEYNFKLLLANARTIKNVPGRKTDRCDAVWIAKLTRAGLIESSFVPPQDIEELRELTRYRKRIVSDATSEKNRIHKILKKYNIRIDSYMSDLFSVSGRAILDALISGEVITLEKLELVVKTSMRPKIPEILNALNCELGITAREMLDYSFNHLQYLEQLIQKIEKNIDDHLTPYRKQVELLDAIPGVDKNGAAVLIAELGVDMSVFPSVKHCSSWAGLSPGNKESAGKKGRTKAVHGNKALRSILCECAWAASRKRGSHIASKYWRFVKRMGEKKATFAIGHTLLTIAYNILKDLSPYVELGSDYSEKRKPNHINLMIKKLLKAGYCVIPNPDAIGATVEALPEVA

SEQ ID NO: 261034 - protein, 341 aa, unidentified
MSVMIGIDPHKGSHAAAAVDIGEEVIAELEVRATKRQTHQLLVWAERFPQRCWAIESANGHGYLLAQQLVAAGEQVVDVPSTQAARVRVLDSTRSQKNDANDARSVAIVALRQPGLNAVTAEDHVAVLRMLAMRHKQLSSLKTQAAARLHAVLATLIPGGLNSEMTPNKAAALLRRVRPATMVEAERKRIAHDLLKEVRRLNKERKESKARLAIAVDASGTSLTQINGVGPVVAALLIGHSGDMGRFPTRHHYAAYNGTAPIEASSGARKRHRLNPRGNRMLNHAIHTIAICQLRFPHTEGRAFYERKRQEGKTPKEAIRALKRRLSDVVYRHLVADQQTR

SEQ ID NO: 261035 - protein, 338 aa, unidentified
MSAQAVGIDLGKTTFHLVALDSTGQVVEKKKCSRPQLLRRMSNLSAHVVGMEACAGAHWLAQALTQQGHHVRLLPPQYVRPYVKTNKNDFVDAEAIAEAVQRPTMRFVAIKTEAQLDLQALHRTRQRWMGRRTALINQIRSFLLERGIAVRVGPAWLRKQMPALLANENGTLSGSLLNLLAELWQEWLQLEERIERANQSLRATAEQDPGCQRLLSIPGIGLLTATALVAAIGNGGTFRKGRDLAAWLGLVPRQHSTGGKTKLLGISKRGNAYLRQLFVHGARAVFFHLKREPHRMGHWLNQLSARKRTSTVIVAMANKLARIAWAVLVRGQPYQATA

SEQ ID NO: 261036 - protein, 402 aa, unidentified
MKKCIAEQASQQTLAALDVARGWSRYGVFIGLDVHKETVAVAVAFPGRDEPEYRGEITHEPKAVRKWLDRLNAEFEGNLLLFCYEAGPCGYGLYRQLVAAGHDCQVVAPSLIPKKAGERVKTDRRDALKLARLLRSGDLTAVWVPDTEQEAMRDLTRARDDMKSQERKARQQLNAFVLRRGHHWPRGKTRWTQAHFNWLESIRFEQPWLQIVLQEYTDAVKAATRRVEDLRDQLLRALPGWSLSPVVDALVALRGIDKLAAIVLLAELGDISRFDSPKQLMAYLGLVPSEHSSGARRRQGAITLTGNGHARRMLVECAWSYRFPARQTMHLKRKAKATSAEAKAIAWRAQKRLCGRYRQLTQAGKNVKLVCVAIARELVGFIWDIVRHEMRRLRPRRAAVAG

SEQ ID NO: 261037 - protein, 345 aa, unidentified
MEITTIGLDLAKRVFQVHAVDAAGKVVVRKALRRAQVLPFFAKLSPCLIGIEACGTSHHWARELIVLGHTVGLMPPAYVKPYVKRGKTDAADAEAICEAVTRPSMRFVPVKSREQQAALFLHRTRNLLVKQRTQLVNMIRGQLAEFGIDIPEGLERALTLARQILDGAANLDLPEHGIMMLAILCNQALGSHEQIRKVERELLVLQRSDDMARRLATIPGIGPIGATAFAASVTDPAQFKSGRQFAAWLGLTPLQNSSGGKERLGRISKMGDKYLRRLLVIGATSLTRQYKNRPEKVPAHFASLLARKPLRVATVAMANKMARIIWALMTRKETYRIAHVPALAA

SEQ ID NO: 261038 - protein, 311 aa, unidentified
MSNVFVGIDVAGDHLDVHVLPQGEAFACPNDPDGIASLVERLRPARPALVVLEATGGYESLVAADLAAADLPVAVVNPRQPRDFARALGILAKTDRIDARALALFAEKVQPRCHTPRCDRDRRLKALVTRRHQLVGMRTAELNRRPLAPDEVRKSIDRVVKLLNRQIEALEHDIDGTIRHMPQWREKDDLLQGVPGVGPGTSRTLLAALPELGTLNRRQIASLVGLAPFNRDSGQMRGRRTIWGGRADVRCALYMATLSAVRFNPVLRTFYQRLLAAGKKPKLALTACMRKLLTILNAMLRNHQQWQHQNA

SEQ ID NO: 261039 - protein, 348 aa, unidentified
MLADQLDYVVGVDPHRDWHALAVVRVVSGAVVFEGSVAADSLGYAQALKLADQHAMGRRAFAVEGTGSFGAGLTRYLAGRGEQVLEVGRLRRERGSAGKTDALDAIRAARSVLAQERPATPRASGEREALRALMAAREGAVNAKRAALCQLRDLLVTTPEPLRSELRPLTRAPLLRRLAATRPERRQDPQLRGALLALRSVARRVLQLASEERELAREIETLTRKLAPQLLDQPGVGPLAAAQLVLSWSHKGRISSEAAFARLAGCAPIPASSGQTIRYRLDRSGDRKLNRALHMILVTRRRTHPPTIAYIERRIQEGKSRREATRCLKRYLARTLYRLLEHGTPQTA

SEQ ID NO: 261040 - protein, 412 aa, unidentified
MEVLYPNCAGLDVHKDTVVACVRHMVNGSVERKVRTFKTTTRDLLALSQWLADEGCTHVAMEATGVYWKPVWHVLSDGDFALVLANAAHVKNVPGRKTDVNDATWLADLLAHGLIRGSFVPDQQTQEMRNLLRTRKQLVRECSSHIQRLQKTLEDANIKLDSVISDVIGLSGRAMIEALIAGESDPERLAQLAHRRIKAPPEALREALRGRVTRHHRFLLRLHLQQIDAINAAIGEIDQEVDAQIEPFRTAIQLLTTIPGISELSAGVILAEIGRDMSRFPTAGHLISWAGLCPRNDESAGKRRSTRMRKGAPWLKTTLVQCAWAASRKKASYLQAQFHRLRTRRGAKKAIGALAASILTIIYRMLTDGTLYHDLGPDHFDKRGKGKQVHRLINRLQNLGFTVEITPAQAAA

SEQ ID NO: 261041 - protein, 396 aa, unidentified
MLYVGIDVAKRNHEVVVLDDRGQARGRAFSIPNSHAGLKHLIERVKQANPEREPVVFGLEATSHYWLALYSHLRKAGHEVVALNPLQTSAYRRLQIRPVKNDRRDAWCIAEVLRLEPIVRTALASDAILGLRHLSRLRSELVDQMADQKRRVLGVLDQVFPEFETVFGKVFGTTAMALLEEHPTPEEIAQLDLEQLTSLLHDHSRGRFGQAKAEQLQEAARTSFGVTIALDALAAQLQVLLAQIRFLGEQVSALEERIGAYLKQVPQHLTSVPGIGTVSAAAILGEIGDIRRFKNGSALVAYAGIDPVVFQTGEFQARSTRMSKRGSHYLRRAIWQAAHTAARDDPALKPYYEAKRRAGKHHFGAVGAVANKLTHIIYAVLRDNKPYVPIARPIAS

SEQ ID NO: 261042 - protein, 375 aa, unidentified
MTNAAARSNNLFVGIELSKNSWRLAFSDGAKIRQRTLPAGDQAALQQELAWSKQKLGLSADCAVRSCYETGRDGFWVHRLLSGWGIENVVVDAASIETARRGRRAKTDRLDAEKLVRKLMAWAGGEQTVWRIARVPSVEAEAQRRPMRERQRLTGERTAHRARIASLVALHGVRAKLNGRQEFGVVVEQLRDWQGQPLPAQTVVELQRELQRLALVHQQILGLEKQQATALANPQTAAERAAAKLMGLSGVGPISAMLLAVEFFGWRQFRNRREVGALAGLCATPYASGDSAQEQGISKAGNKRVRWVEVELAWSWLRFQPESALTKWFWRRFGLGSSRVRRIGIVAMARKLLVALWKYLEWDELPAGAKLRVAR

SEQ ID NO: 261043 - protein, 450 aa, unidentified
MDLFLFFNGFDWYEVTQTTAFRLLLVISLLTLDVSIHVITQPDSLWKTTAPNFFKEVSLMPLFFVGIDISKYKHDCCILSAADQTVVSRFVFPNNADGFHELLSRLNSLSTPEDIRIGFESTAHYALNLELFLEKAQHSFMEVNPVLISKYKESTTLRRTKTDRVDCESIARWLMTVEYKPHSRGFYHSYSLKSLTRLRDRLVRQRSFYLVKLTNVLDLTFPEFKPFFGERFSKTALYLLETYGSAERMARMNSSSYEKLCSLSRGKFSPQQFLKLKQLAVNTVGVSNEILEAELTCLLSLYKSLEKQISSMEAQILTLINDIHPCYMSIPGIGPISAAVIYAEYGDISNFSSPAQMLAYAGLEPGVNDSGTESHGGRMVKRGSSQLRYALMNCALPLIRFDMTFAAYYAKKRAEGKPHRVALSHVVKKLVRVIFALERQRTAFNVQALR

SEQ ID NO: 261044 - protein, 361 aa, unidentified
MKRHTQDLIAEVPRGCSQAGITIGIDLGDIWSHYCTLNEDGEVVNRGRFRTNPSSVDKWFIDLPRVRIAMEAGTHSIWISEQLQELGHEVIVANVRELRAISHSDRKSDQVDAEKLARFARLDPKILRPIAHRTVAQQEALTLIRARNLIVRLRTGAVNAVRGLAKPCGYRLPASSTLCFAKRCMAVLPPGLVQALGPVLEQIAEMTVKIKIYDKLIKQLTETEYPETQALLKVYGVGQLTALTYVLTLGSKERFQRSRDVGCYLGLRPRRSQSGERDPQLGITKAGNVYLRSLLVECANHVLGRHGKDSSLRQWGLHLASRGGKQSRNRAIVAVARKLAVLLHRIWITQEAYVPFYAVAA

SEQ ID NO: 261045 - protein, 335 aa, unidentified
MQVYGIDLSKEKFDVSFIDAKGKEKKQKVKNAVAPISRFLSSVSEDGILCAEHTGVYGDLLVYLCNQMNVPITLVPGYTIKHSLGLVKGKSDPLDSKRIREYGERFPDKLEYAEYPEENITELKQLYTLRHQLVKQRKSLRTLYKGEEHHPMQSISVHKHIHTALDGLDKEIVDIEEDLEMLIRKDQEMNENFELVTGIIGIGPVIATDLIIKTGNFKTIDTHRRAASYAGVCPFPNSSGKMLGKSKTSPFADKKLKSLLYMGARAAVKHNKEYKLYYQKKELEGKPYFLIMNNVSNKLLRTVYSIVKNKTPYVRDYVCLDPRERNINSSTKKVA

SEQ ID NO: 261046 - protein, 365 aa, unidentified
MASVSHLAPIHLGLDVHKDTISVGILDPDQQVPEVERITHDEASVRRLVARFPDRARLRACYEAGPTGFELARLLHSLDVRCEVIAPSLIPRAPGDKVKTDRRDCRRLARLHRAGELVCVRIPTVQEEAVRDLCRTRADMVEDLTRARNRLGKFLLRHGRVWRGGATWTLKHQAWLGSQRFDQPAMAQTFGHYLAVVEVRNTQLDAVEADLAGWCDRPPFAWQVARLAAYRGVTRLGALTLAAEVADWRRFASASQFMGFCGLVPSEYSSGNTVHRGRLTKAGNAHLRAQLVEAAWAYQHRPTVGVQIARRQQGLPPAVTARAWAAQQRLCARFRALAARKNIKSIVAAAIARELAGFLWAEMTA

SEQ ID NO: 261047 - protein, 440 aa, unidentified
MANEQLVVGIDFSKKWADLALLKSNGELIKRHQRVDNTAVGFEQAKTLILQTLQEQGLTGLEVAGEATSYYWLPMFIEMEQDAELASYNPDLFLLNPKWVHWYKKMQPTNHKNDKIDPAYIGNYLRQHRPPIVWHFDEHWLSLRLLTRLRFHLVKSLTREKNLFSLYLFLAYTTYAARKPFSNPSAVISRVLLRDPVLLASLEDLQDDEIADLLREQGYRSQSDPKQSAQRLRQVLQERYQLPETMAASVQLGIGLLIETIQNFEGQIAQVEGWIKEHVKVGYPEVAWLDSIPGIGLVFASGLAAEIGDIQRFLNVQVWDDRKQQMRPRHPHEVADAVGKYAGLWWPENSSGDFQAENKHLSREGNAYLRYYILEAADSLRQHLPDFTRYYNAKYNQALQHKHKRAIVLTGRKALDLFVALLRHNETYRAKEASSPTHKG

SEQ ID NO: 261048 - protein, 338 aa, unidentified
MNIVFLGIDLAKNVFQLCGLNQAGKPVYTKRTGRKELLQTLANIPACLIGIEASTGAFYWQREFEKLGHKVKVISPQYVKPFVRGQKNDGNDAQAIAVALMQPTMQFVPPKSPEQQDIQALHRARQRIVNHRTATVCQIRGLLLDRGIPIGSAVSRARRAIPLILEDAENGLSSRMRRTIAELYDLFNDLERRIHFFDKEIETVFRQSEACQRIAKVKGIGPKTATAVVAAIGKGTEFKNGRHFAAWLGLVPRQHSSGDRQVLMNMTKKGDKHLRTLFIHGARAVVRVATNNNDGHMNQWVNQLKERRGFNKTTVAVANKNARIIWSMLRNETEYQVV

SEQ ID NO: 261049 - protein, 496 aa, unidentified
MTSPKACVEISGGSFWKPRSEYLQLKDTSPLVFIHRQKKSMKKKTKMEIIHPNAAGIDVGSRSHFVAIGQGKEDVQEFGVYNEDLAALTQWLLDNDITHVAMESTGTYWQTLFSTLQEAGIVVTLCNGKFTKNIKGKKTDVIDCQWIQKLHTIGLLSSSFLPDALTEQLRTYCRHRLNLVDIAADCTRKMQKYLRLLNIRLDIVVRDVTGLTGLSIIESICSGETNPQILASLRNGNCKKSEAEIAKALQSNKRPDYLFALSQELHLYKQYQQQIAVCDIEIEKMIQQQIQTDENRKALQTTAKPHKRLNKNAPKNFDLNQLAYQYFDGIDLMGIEGIGHSTVIALMSEVGNDGIKKFDSPKQFASWLRLSPNTKKTGGKVISSHLPKGSNRLKIALRNAANAIGNLKDTHLSNFFKRVSFRRGRAAAVSATARKLAVIIWNMIVKHMPYKPPTDYMFLDQKRKLAVLNRIKKQINKFEIKPDDLGFADTSLSTTP

SEQ ID NO: 261050 - protein, 373 aa, unidentified
MKKVRFLGLDVHADTIAVAVAEPDGEVRSLGIIPNREESVRKLVKKLGPAEQLQACYEAGPTGYVLYWQLTALGVKCEVVAPSLVPVKAGDRVKTDRRDATKLARSYRAGDLTAVWVPNQEHEALRDLVRARETAKQDQLRARHRLSKFLLRHGRRVPLGIKVWTQKYQDWVKEQVHFEQPAQEYTLLDYLHEVEHVGDSIRRLDQAIAEAVKLAPPRMQEVMQSLQALRGIAQISAVTIVAELGKISRFDRARQLMGYSGAVSSEHSSGKRMQRGQITKTGNAHLRRIAMEAAWAYRHRPAIGPRLRKRQEGLSEEVKEIAWKAQHRLHKRYRNLSAAGKEKQKVVTAIGRELLGFIWAIGVQVERNSKQVA

SEQ ID NO: 261051 - protein, 410 aa, unidentified
MEVLHAHCAGLDVHKESVVACVRHMADSKVATVVKTFKTTTQELMALSDWLSAEGATHIAMEATGVYWKPVWHILSDGESELILANAAHVKNVPGRKTDVNDASWLADLMAHGLIRPSFVPDEPTQQMRDLLRTRKQMMRERSSHVQRIQKTLEDANIKLDSVVTDILGLSGRRIIEALIAGQTMPQALASLAHRRIHASADELEAALRGRVTKHHRFLLKLHLDHIDALDAALARIDGEVSANVEPFRTAIEMLSTIPGISTLSAEVIVAEIGIDMSRFETASHLISWAGLCPKNDESAGKRRSNRMKKGAPWLKTTLIQCAWAASRKKNSYLQAQYLRIRSRRGAKKAIGAVAASMLTAAYHMLKDGTLYQDLGANHFDNRAKEKHVLRLVNRLQNLGFDVQITPLAA

SEQ ID NO: 261052 - protein, 320 aa, unidentified
MSQNTTAIMNQNTKPVYAGLDIAKASLQLHLQSKSYDLANTAKGHARLIKRLAAVPGIHVICEATGGYERAVVAALHAASIAVSVINPARVRQFARASGELAKTDPIDAALLTAFGQAFAPEATPQRTATEIKLAALVSRRAQLIQVSVAEKQRADICEEPALQKLFKAWLAQLEKQMAKVESLIDQLLAGPSALADQVRRLEQITGVGRITAVAVLATLPELGQLNRRQAGALAGLCPYNRDSGKREGKRCIGGGRAEVRCALYMAALSASRSNPLLKTFYDRLIAAGKPAKVALTAVMRKLIVLMNHLLKNPSFSLAH

SEQ ID NO: 261053 - protein, 333 aa, unidentified
MVEGTEGSHHKEGSTKMRKHNMICGGIDTGKRKLDVALTECLHRLQVDNNCDGHTALSAWLRQHRVKRVGIEASGGYEQAVVARLRRDGFVVIVFQPAQVRAYAKFHLQRAKNDRIDAALIAVCAAATQKIHSPPDPRLAPLAEHLTLVEQITEDIAHVKTRRESCRDPRIRRHWDGEIARLKKLLRTELEALIAAIRQHRDLSARLDLIASVGGIGPKTAVAILLRMPEIGRVSREQAAALAGLAPYDDDSADQVGIRHIDGGRERLRKSLYAAALAAAFHWNPQLNVIYRRLIAAGKPHKVALVACARKLLIYANTVVERGTPWTNRPVEI

SEQ ID NO: 261054 - protein, 371 aa, unidentified
MADYREAFVGIDVAKLKNAFAVAESGRNGEVRYWGEVEASDAGIRRVIKRIAAKFEHVNFCYEAGPTGYGLYRLIRSLGHECIVVAPSLIPRKPGDRVKTNRRDAISLARLLRAGELTAVWVPDEGHEAMRDLVRARTSAVQTLRTHRQQVNAFMLKHGRIYPGKRGWTMRYLRWLQEQHFGHPAHQIALQEMVEAVRIAQERVQRLETVIAEFVPRWSLAPVVSALRALRGVDLIAAVTFATEVGDAGRFESPRQLMGYLGLVPGERSTGETTKRIGITKAGNSRVRTLLVECAWTYRYPPRIGKRKLYRLQEASSSVREIAWKAQTRLTARYRTLSARGKKSTVVCTAVARELAGFMWAIAREARQTTP

SEQ ID NO: 261055 - protein, 344 aa, unidentified
MSKVSTIGLDIAKSVFQVHGVDVAGAVVIRKRVSRAKVLEYFGELPPCLVGIEACPSAHHWGRELQALGHMVRLIPPSYVKAYLKRSKNDANDAAAICEAVTRPSMRFVPIKTREQQSALMLHRTRQLLVRQRTMLSNALRGHLAELGIVSAKGRNGTAELLRIIADDRDSRVSAAVRGILNVLARQYGAIGAEIASIDKSIMALHRGCEASRRLAEIPGIGPVGATALVAEIGDWNTFSSGRSLAAWIGMVPKQHSTGGKERLGSITKQGNRYLRWLLVVGAMAVIRYARKHGTARRPWLGRLIERRPTKVAAVALANKMARMAWAIMVRGERYKEPRLSLAA

SEQ ID NO: 261056 - protein, 316 aa, unidentified
MEEISTVGIDLAKSVFQVHAISGTGNVIVRRQLRRQQMLKFFEQLPPCLIGMEACGTAHYWARELSALGHDVRLMPPAYVKPYVKRQKNDVADAEAICEAVMRPTMRFVPIKSVEQQSAAMLHRSRALLVKQRTMLMHSIRSHLAELGIPTGAGISQIARVVRELAQGERTDLPELARFVLETLATLVCDLAQRLQAIEKKLISWHYRNDLSNRLETIPGVGFVTASALASIVPDPEAFRSGRHFAAWLGLVPRQNSSGGKTRLGRISKQGNRYIRQLLILGATSVLRYVRRDGDGGSSWIGGLLGSEQDLLSQTR

SEQ ID NO: 261057 - protein, 414 aa, unidentified
MVMTDRVALVGVDWGDKKHAFEVRTTGGTRRKGWIEHRPADIHEWVAGLREEFPNGTIAVAVEQSRGAFVYALSRYEFLELLPVHPSQTAALRGVVRPSGAKSDPIDATLVCDFVEKHGDQVRTWKAADPVTRELLLLVEWRRKLVDSSTSCRQQLQATLKQYFPQALDWAGELDSAMALDFLDKWPTLDALQRSRPSTVRSFYTRHHSRSAERIEKRLAEMVSATPLHSDHALIAALSTMVGTLVALVRTTVEQIRTVEHRIKQLWSTHPDRAIFESLPGAGPALAPRLATALGTDRARWTAETLQTFSGIAPVTVGSGSSKWVHARWTCPKFLRQTFHEFASNSIPHCEWAALFYRQQRARGKGHHAAVRALAFRWIRVIVRCWKDRRPYDDALYTSRLKVAHSPIASHLSP

SEQ ID NO: 261058 - protein, 315 aa, unidentified
MSQDVFVGVDVCKASLQVASDPPSSSEVFANDESGIDSLVAHLRKLKPALVVLEATGGLEVPVAAALAAARIPTAVVNPRQVRDFAKATGRLAKTDAIDAAVLAHFAGAVRPEPRPLPDELTRGLQALVARRRQIVQMITAERNRFSRAPRSVQARIQAHITYLQQELSSVDDDLGRSIHSSPLWREKDQLLRSVPGVGPVVSTTLLAALPELGTLNRKQIAALVGVAPLNRDSGPFRGRRCVWGGRATVRAALYMSALTAARCNPAIAQFHQRLRAQGKHPKVALTACMRKLLTILNAMLKEGTAWQPNLALSS

SEQ ID NO: 261059 - protein, 407 aa, unidentified
MNSQYPVVIGLDVGKTGHHACALDPDGSKLFDKPLPQHEAKLRELFMGLQKLGDVLMIVDQPNTIGALPIAVARDCGCAVAYVPGLTIRKAADLYPGRSKTDARDAFIIADTARTMPHTLRQVDRDSDVLSAVKVLAGFDEDLAHETTRALNRIRSLLTQIHPALERVFTGGSLSTALVLDLLEKFGGPTGLKTAGRGKVLRFARSHSRRDPEPLVDRIFTALGEQTVIVPATAAVELVIPRVAGQIKELKAQRATVARKVEGMLEDFPLAAVLRSMPGIGLKTAAQILLAIGDGSAFQTPGHLAAYAGITPVTRRSGTSIRGEFPARSGNKRLKNALFYSAWVASNHDPISKAYYDHKRTEGKRHNAAVICLARRRRNVIFAMLRDGTYYQPPASAPTPEPAALAA

SEQ ID NO: 261060 - protein, 355 aa, unidentified
MNSIKYIGMDLHSATISIAVVNDAGKLNMEATLATEASAVLDFIAGVQGTLHVAFEEGIHAPWLYDLLLPHVAQVLVCNARRLPRHRGENKNDKIDAQQLAQWLRLGVLQPVYHHPTRLRTLKELVRSYFSLVSDTTRVMNRLKAIYQARAIPAEGRRVYSPLFRETWLQQLGEPGVHYRAELLYRQLDLLLPLRREAKKSMIAESRKHAAQKILLSVPTLGPVRVAVLMAVIQTPHRFRRNRKLWTYAGLGLVSRSSANYRIVKGQLTRAGKPALILGLNLNHNHVLKALFKDAAATAVSRQGPWREFYARQLAPGSDPAIARVTVARKLATIVLTLWKKGERFNAEHWKPQAA

SEQ ID NO: 261061 - protein, 425 aa, unidentified
MGKVSPGNRNGQRPDGSILFVGCDIGSKHHAAAIMDSSGTVLEKLPKVFNSRKGFEFLEGKIDYWARRTGADTIRLGFEPTGHYWKPLIHYMCNRSVEVSFIKTTAVKAMRELTDSTQSKNDKRDAVTLAHLLREGKVLKSPPAEGVWRELRDLVKHHRRLTEENGAILQRLRAIIETFFPELAEAFCSNKAVGLWRLLEAAPFPEDLVARGPEWLRPNLRKWTRRDKSAEEKADLLVKAAGESVGLPVRRGDRVRLQSLLGLLEHYREELRMVEQEMERVLMETGYGEILLSFPGMGVITSATFLGELGDPANFENAGEVVSFAGIDPSEKSSGKKESRRKISKKGRPILRTNIYYMALAAIRHCPELKAYYTEHKSEIESGRLDLKPQQLLFAVAIKEVRMLFAMCRDKRPYIPGYLQMKRAA

SEQ ID NO: 261062 - protein, 391 aa, unidentified
MSGTSDRLVIGMDPHKRSATIEVMAGDETVVGGGRFDTDRDGYTAMRKYASRWPNRVWAIEGCQGIGRHIANRLLADGEQVVDVPPKLSARARVFATGQGRKTDATDAHSIALVGTRMAGLRPIVNDEQLALLRILVDRRRSLGEDHTRMVSQLHQLLLELIPGGAKKSLSAAQAKALLATVRPRDSVGKARRRVAAELIADLERIYRRTKEADKELKELVASTGTTLMDLHGIGPSGAARLLVEVNDITRFPNRAHFASWNGTAPIDASSGDQVRHRLSRAGNRQINRVLHIMATVQLRNPTEGRAYFDRKKASGKTSMEAMRALKRRLSDIVYRCMISDTVATAAGPGGQRGTTTGSSVTDSHPPAGSSEKSLPGPAETQDRTLLPAVS

SEQ ID NO: 261063 - protein, 346 aa, unidentified
MNSMNYIGLDIHKKSISCCVRQADGTIIQESTITATRHALDGWMRQLPDPWIAGMEATLFTGWIYDHLVSGGALVKVAHPAMLQAIAAGKKKNDRVDARKIADLLRCDYFPECHMASREIRDRRRVLRYRNLLVRQAVPMKNKVSGLLMEAGVPYNQQKVHQKKYFAALLQTQKQEMPPSMPELLRLSRSTVEALTGMQRQLIRALESDALLAARVERLASIPGVGRVVALTWALEMGDISRFASVKKAVSYCGLCGAEKSSGGKTERTPISKQRNKHLQTMLIEAAKLAPRWNVELALVYEHAKQKGNRNRATLAVARKLVAYLMAVDREERPFDTHLSVAGNAA

SEQ ID NO: 261064 - protein, 350 aa, unidentified
MNATTYGLDIAKSVFQLYWVDPGSGEVFNRRFSRDQLIRFLGNREPGRVALEACSGAHWWARKIVSLGHQAILLHAKYVRPFVQTNKTDAADARAIWTAAQQPGMRTVAIKSEAQQAILSLHRIRSGLVDTRTRQVNQIRGLLGEYGLHFRYGRKALMNELRARIAEIEQTVPPLIWRALQRQMAHLRQLETDIAEAERENLNRMKADPDAQTLATINGIGPLTATATVGVMGSPDAFRSGRTFAASLGLVPAQTGSGGKIRLGHISKRGDPYLRKLFIHGARIVVTRSKQRPEWVEELLKRRPVNVVIVALANKMARTAWALLAHGQTYDRQHVSVRPCASGPQSVESI

SEQ ID NO: 261065 - protein, 363 aa, unidentified
MKIRVGIDLHSNNALCGLRDESGPRLVHKKLPCDLTAILQLLEPYKDRIATLAVESTFNWYWLVDGLQDHGYHVVLANPVRMQPYSGMKYPDDVSDAYFLAELLRLKLLPTGHIHDRQTRPVRDLLRRRLLLVRQRTMLILSFKSLNERTLGQRVSLARVKAMKVEEAQARFSEPADPLLSGTEIELVGHLTTAITKVERHILGVAGKWPTYQRLQELPGIGKILGLTIALETGDAKRFADAGNFASYCRCVKSLRTSHGKKKGENHRKCGNKYLAWAFVEAAHFACRYDDQSRRFYDRKKQQTNPIIATKSLACKLAKAAWHVMKEDGPYDATRVFGPARKKDFGETGREPAKGSGHPSQEN

SEQ ID NO: 261066 - protein, 359 aa, unidentified
MIVVGIDPHMKTHTAVAIDAVTGVSIAERTVTCDGAGHDELLVWARGLDPERFFAVEDCRHVSGRLERHLLPRGERVVRVPPKMMAGARHSARTYGKSDPIDAACVARAALREPGLPEAALTGPEHDVRLLVDHRDDLTGERKRIQKRLRWNCHDLEVSLELPPRVLDRYVWLSRLEGVLEALPESTRRRIALDQLSRCRELTVEIRSLEREIRGLMRELAPDLLAIPGCSAVSAAHLVGQTAGASRFSGEAAFAMHVGAAPLPVSSGQSTRHRLNRTGNRRLNSTIHMIAVTQARMHPPAIAYMERKQAQGMSYREALRCLKRHLARVVFKTMLKTERAAAGRVLHAHFTAGPVAIAV

SEQ ID NO: 261067 - protein, 339 aa, unidentified
MEEITTVGLDLAKSVFQVHGVNAAGGVVLRRKLRRSALLDFFETLPPALVGMEACGGAHHWARELTRLGHTVRLMPPAYVKPYVKRGKTDAADAEAICEAVTRPTMRFVPIKTEAQQASLVELKVRDMLVRQRTQTINALRSHLAEYGIVAAQGRKLVELIAVVRGDEDSRLPHLAREALSELVAQIEALQERIERLDSRMVRHAREDETARRLASIPGIGAIGATALAAMVSDPQGFASARHFAASLGLTPKPHSSGGKERLGRISRQGNSMLRRLLVLGATSRLRYARRNPEASDWTTRLLARRPFKVVAVALANKMARIAWALLARGGTYTTTAAA

SEQ ID NO: 261068 - protein, 343 aa, unidentified
MQTISTIGLDIAKSVFQVHGVDAEGNAILRRQLKRRYVLAFFQKLPPCLVGIEACASSHYWSRELQALGHSIRLMPPAYVKPNVKRHKNDATDAEAICEAVSRPNMRFVATKTAEQQSCLTLHRTRHLFIRQQTAVINVVRALFAEFGIVAPVGRNGVEQLLEVAADSNDKRLPDVARACVTALGAQLRMLKVQILEFDRMIMAWHRSSEASQRLDDIPGVGPALATALVASIADPKAFRSGRDFSAWIGLVPKQNSSGGKDRLGSISKRGDRYLRSLFTTGALAVIRYAKIHSTKHRPWLTALLARRPTKVAAIALANKIARMAWAIMAKGEHYKEPAALAA

SEQ ID NO: 261069 - protein, 412 aa, unidentified
MQVVHARCCGLDVHKKSVVACVLLTREDGTVQRQVRSFGTMTADLLALADWLTAARVTHVAMESTGVYWRPVFNLLEDEARTIVLVNAQHMAAVPGRKTDVRDSEWLADLLRHGLVRASFIPPAPIRELRELTRYRKTLVQERAQEVHRLQKLLEGANIKLASVATDVLGLSGRDMLRALIGGEQDPEALAELARGKLRAKLPALRQALQGRVQPYHLILLTRILAHIDFLEGSLAQLQAEIDARLTSCEEAVALLQTIPGVGPIAAATIVAEIGTDMSRFPSAKHLASWAGVCPGNKQSGGKRLSGKPTNGDPWLRGVLGEVAQVVTRTRNNYLNAQYHRLARRRGKYKAILAVAHSILVIAYHVLRDRQPYSDLGADYFDKLDAKRIERHHVRRLEQLGYTVTLAPASAA

SEQ ID NO: 261070 - protein, 452 aa, unidentified
MSTRIIGIDLAVTAAHQAIVLDPARSQYLGPPRKFRARPQELARLWAWAQQDAPEPVSVVVVCEATGMAWYPVCCYFQRMGAQVFRVHGGKTRALRQVLQRHAGSDRIDCRALAQLYTVAQERLEPWPGVTGDQLALQRACREAYGWRQDEVARRNRITAYDQWAWGGLHCLIPKEAQDWMRQQWYDPWQVQAAGEAALSTAWTAAAPELPADVAWIPAWLARAAELIAVYGTPEQVGYADLQARITRELTWCAQAQQAQAELQRTLIRPLYRRLYPECHLESIYGIGIDSAAIYMAFIQDITRFPSLKRFRSWCGMIPGSHQSGTFQANHRPLTQAGPNLVKATLYLNANVARQWDVQLAALYYRQMVQYGKHHTQAVCACASHLASRIYTVLTEHRPYELRDLTQRPITLQESRRMCLTKYQVPEEVRQRTRVRARQARAAQRTERRFQP

SEQ ID NO: 261071 - protein, 295 aa, unidentified
MQKITTVRRGAKKVFKGQLTIGLDLGDRSSSYCVLDENGEILLEQKVATTPEAIQQAFGKMPRYRIAMETGTHSPWVSRLLEALGHEVIVAHAQKVRLIVKSRRKDDRLDARTLARLARIDPELLSPVQHRSAQAQLHLTEIRARAGLVSARTALVNAARGLVKSYGQRLRKCGTLQVSREITGGLSPGLREALEPLLREVESLNERIQEYDRRIEKMAKETYPETALLKQVKGVGDLIATAYVLTIEDPHRFRKSRDAGCFVGLQPGRRNSGESEPQMRISRVENLCDHAGWPA

SEQ ID NO: 261072 - protein, 341 aa, unidentified
MEQVSTIGLDIAKHVFQVHGADAAGHVLFRKRITRVKLLRFLAAQTRCVVAMEACAGAHYWAREIAKLGHHVRLIAPPYVKPFIKRQKNDAADAEAICEAAQRPSMRFVPVKTEEQQANGIVFRARDLLVRQRTQCVNALRGHLMEHGYVFPKGITHVETLVALVEDVQSPLPDSVRVILKLLVDTFTALEVQISALDAEINQRSKSDPTARRLMTIPGVGPIASTAITALVPAAEGFPAGRDFAAWLGLTPLQKSTGGKQKLGAVSKRGERTIRRLLIIGASAVVQQASRRGAPKGSWLAQMLARKPKMLVTVALANKMARIIWALLVKGGTYRTPVAAA

SEQ ID NO: 261073 - protein, 369 aa, unidentified
MDKAITYVGLDVHKDTIAVALAEAGVRGDVREYGKVANTPAAVKALATKLSRVGNALRFCYEAGPCGYGIQRQLTLAGHDCVVVAPSLIPRKPGDRIKTDRRDAINLAKLHRAGELTAVWVPDPAHEAIRDLVRARLAAVRSLRQARQQLSGFLLRHGRHYNRPAWTLMHRRWMAGLRFEQPAHHIVLEDCIAAVEAATARRDRLEAHIEAALPDWSLAPVVRALQALRGMALVAAATVIAELGDITRFANPRQLMAYLGLVPSEHSSGATKRQGGITKAGNGAARRMLIEAAWSYRFPARISREQLLRQEGLAKPIRDTAWKAQERLCRRYRKLARAGKSSTVVTTAIARELAGFAWAIARHVQIAGA

SEQ ID NO: 261074 - protein, 387 aa, unidentified
MKNTCSNVACGGMDVHYKFSNVTFRDKDGRVVRRERLGHPCRDQLRERLSRWPRGIPIVLEASFGWGWLSDLLSEMGLEPQLSNCYKLEQMRKARGWVKTNKKDADMLSLLPFETTAWWEVWRAPPQVRNRREQMRFRGDLVAVQTAVKSRIHAIFHRHGLFHEFSDLFGGKGRRFLAELCIGGSEHLSPQALQALRGQVKLLDHLRGQLADIERILHRQLAKTPLISRLKKIDGFGLILSHVLAAEIGKIERFRNHKALASYSLLAPRSKDTGQDDPDHSPLGRHLGTCGNRTLKWAFIEAAHGAVRSGGRWRAMFDRVTCGGRKDRNRGYIKVARELVKVVYVVWSRGLDYQPVPPARPGSDKNKKKSRSGTGQLLHPMVHALRA

SEQ ID NO: 261075 - protein, 348 aa, unidentified
MRIIGCDLHARQQTLAILDTTTGDIVNLQLMHEGNQVREFYSTLPRPALVGIEAGGSMPWFLNLMEELEIQCRVGDPAQIRAAEPRKQKHDRRDAELILKLLAEDRFPAIWLPSKELLDLRALLLHRHQWVRIRTRIQNALQAIALANGLRRGPSLWSNDGQEKVASLPLMPHTACRRTALQTMYRNIESQIEQLTRQVAEQAENRSASRRLMTHPGVGPVTALASDVFLGDPKRFADGKALASYVGIIPREYSSGGQQRLGGITKQGSPLLRFLWGEAGAHAVRRDPELKRFYRRKLVQKGLGKARVAVARKLGIRLWIMLRDEIDYPEFCRRGQMQRSGAACGGNA

SEQ ID NO: 261076 - protein, 346 aa, unidentified
MTIVEERTAITGGVDTHSEVHVAAALDPVGGLLGTREFPATAAGYAGLLGWLGTFGDVALVGVEGTGSYGAGLARYLAGRGVRVVEVDRADRQDRHRNGKSDPLDAVSAARAAQSGRASGMPKGRDGAVEAIRALMVAKRSARHERTQAINQARALILTGPDELRARFAGNRAAALAEAIAALRPRPGDAADYSLRVALRELGRRVEFLDAQIDRLDELIVPLVAARAPGLLGLYGVGPDTAALLLIAAGDQPERLRSEAAWAHMCAVAPIPASSGKTRRHRLNRGGNREANHALWRIVITRMSAHPATRAYVQRRTAEGLSKKEIIRCLKRYVAREVYPYLRSGA

SEQ ID NO: 261077 - protein, 418 aa, unidentified
MNTFASYEFTAFIGIDWSHTKHDICIQPAGSQEREFDRIAHQPQHIEQWAQEVYERFGGRIAVVLELSKGPIVSALQKYDFLVLFPINPAMLAKYREAFKPSRAKDDPTDAELAVDLVWRHPERFRPLQPQSAEMRTLVHLVEKRRRLVEDRRRFSNRLISALKAYFPQAVEWFSHKDTFVFCAFITRWPTLKHVKRARRNTLERFFREHNVRRPLIVEARIQAIKAAIPLTEDPAVIEPYSLEVLALAEQLRTVLEVIKRFDEAIAALRPSLPDHEVFASLPGAGPVFTPRLVAAFGEDRQRFQSAAEVQRYSGIAPVTERSGNTSWVHWRWACPNFVRQTFVEWAEKTVRHSFWADAYYQQQRNKGASHHTAVRALAFKWIRILYRCWKSHTPYNETLYLKALQRRGSNLISQQIT

SEQ ID NO: 261078 - protein, 344 aa, unidentified
MDKVITIGLDIAKSVFQVHGVDGAGAVVIRKRISRAKVLVFFADLPPCLIGIEACPSAHHWGRELESLGHTVRLMPPSYVKAYLKRSKNDANDAAAICEAVTRPSMRFVPLKTKEQQAALMLHRTRQLLVRQRTMLSNAIRGHLAELGIVSAKGRNGTGELLRIITDGADSRIPPMARGILGVLARQYSAIGAELGSIQKSILAWHRSCEASRRLEEIPGIGPIVATALVAEIGDWKAFGSGRNLAAWIGLVPKQHTTGGKDRLGGITKQGNRYLRWLLVTGAMAVIRYAQKHGTHKRPWLGRLMARRPTKVAAVALANKIARVAWAIMVHGDRYKEPELQAAA

SEQ ID NO: 261079 - protein, 423 aa, unidentified
MFKIILNNCCGLDVHKTRIYACIGITDTHSRTEYYEANFSSFPKDLRKLSEWLHKYNCVDVCMESSGKYWIPVFNVLEETCKVTLAHPKYTKPQKGNKTDRKDARWICDLFMCGMIKPSFIPPPAIRHLRDLVRYRVKLTNTLTGEKNRAQNCLTVSNLKLDDVFSDVFGKSARSITEYILAHPGEKFDVAPFVDKRCKTPLDVIQDAVDGAVSPEQAVKLRECLDHIDQLIAHRDRIEKEILSIAEPFSPQITLIRTVPGLNRDPMTAIVILSEIGSDMSVFPSAKNLVSWAGCCPRNDRSAKHVKSTRISQAGSCLKPLLVQVANALINSKDHPEFVERYHRIKSHRGHKKAIIAICKMLLTAIWNILSTGEVYNPSGYLIQTPRPINDTKVLTQKQALELLRLRGYVIKDDPLEPKPLPA

SEQ ID NO: 261080 - protein, 314 aa, unidentified
MRTQVFVGIDVSKAQLDVAFRPEGRFSAPNDEAGFAQVLERLRAVPPTLVVLEATGGLEIPLTGVLAAAGVPVVVVNPRQVRDFAKATGRLAKTDTLDAQTLAHFAQVMRPELRPLPDEQTQALAAILARRRQLVEMLTAEKNRLGSAPKPVRKSLRTHIAWLERELRHTDSNLAHAIRESPVWREKDALLRSTPGVGPVMTTTLLANLPELGTLTGKQIAALAGVAPLNRDSGTWRGKRTVWGGRAQIRATLYMAALVAARFNPVIRAFYQRLCATGKAKKVALTACMRKLLIILNAMLKHRTPWRTELVPCA

SEQ ID NO: 261081 - protein, 347 aa, unidentified
MAAVMIGVDPHKGSHTAVAIGPAEEPMGELRVRACTAQAERMLAWAVAWPDRTWAVEGAAGLGHLLSQQLLAAGERVLDVQPKLGARVRLLAAGAVNKNDPNDARSVAIAALRSPSRREVQADDHAAVLKVWSKRHRDLGRTRTQVACRLHAVLCDLVPGGVSKEITAGHAAQLLKAIKPSGAVEEARCELAAEFLEDLRRVDAQMGDTKKKLTAAVRASGTTLTEIFGVGPVIAATVIGYVRDVSRFPDRDHFAAYNGTAPIEVSSGNRKIYRLSRRGNRRLNHAIHMAAVTQIRYHHSDGRAYYDKKLAEGKTPREAKRALKRRISDAIFAHLQNDTRKTSTVTR

SEQ ID NO: 261082 - protein, 341 aa, unidentified
MLYYAGLDVSVKETSVCILDETGRVCLERKVASDPADLALVLQDPRWPLHRVGLEAGPLSQWLHAGLAQVGLPVICIETRHAKAFLKARVNKSDRHDARGIAQMMRVDLFRPVHVKTPASQSRRALLSARRLCQEKALAIENDIRGLLRNFGLKVGLVGKPQFETRIRDLVVDEPELQPVMESLLSARAGLRASEAALHRRLLQLVRQDPVCRRLMSVPGVGPVVSLAFVATIDDPGRFSNSKAAGPALGLVPRLDQSGETERIGRISRCGDAMMRGLLFEAATVLLTRVRTWSWLKAWAVNLARRRGMKRAIVALSRRLAVILHRIWVDGSEFQWTRATA

SEQ ID NO: 261083 - protein, 316 aa, unidentified
MQTVLDLGADVDSRTIVVACAAHSFAPQRIANERHAILAWLRSVPRGSRLGLEATGGYQELLADLAYAAGLQVFVLNARDLRRYAQGVGRRGKTDRLDAEVIACYVAREHTELHVYVPPSKEQRALSRLIKRRAKLIVIKGALTQSLRGLPGVRQELQQVSARLDRLISQVETLMQRALQQLPAARQAAQQIATIPGYGALGSTCLGYTFSRIPYANSDAVIAHTGFDPRPADSGQKHGRRRLSKRGPGETRRVLFNCAMSASKTKLWRPYYQAQRAKGLSSTAALVILARKMVRVAFAVYKQNQPFDPARITAHA

SEQ ID NO: 261084 - protein, 426 aa, unidentified
MLNSQINKIQAITSDTLIVGVDIAKNIQWAQFINFRGIEVSKHICFENNYSGFNSIMEKIEEIKSKNNFLSVIVGMEPTGHYWKTFVTFLHNNGIKVVQVNPYHTKKAKELDDNSQTKSDKKDALVIAKLIKDGRYSAIYFPEGEYANLRNLSNTRLEVSRLLNICKNRIHACVDEYFPEFETVFKSFIKGKVALHILKRIPFPTDILGLALEDIISVIREAAKKSVGKKKAEELIRAAKVSIGVKVGLEGARIRLNNLLEEYELYHNQLEKIEKEMVQELEKTGYKDILTSIPGIGIISAASFIGEIGDPKRFSNPQQIIRLAGYNLVEDSSGKHKSKTMISKRGRKILRTILYKISLIVVCKNQEIKLLYKYLITRKENPLKKKQALIVISGKMVKIMYSLIKKEEVYDKEKVLGIYRKQQIVA

SEQ ID NO: 261085 - protein, 451 aa, unidentified
MGGEPVEIEAEEHEQIVERVAAIDVAKASGEVCTRVPHASILGQRVTRVWAVAATTNAIIELAETLARQRVERIVVESTSDYWRPFVYLLEARGLTVWLVNARDVKQVPGRPKTDKRDAVWLAKLNERGMLRPSFVPPVEIRRLRDYTRLRSDLVRERTRHIQRLEKLLEDALIKLSSVASDIMGVSGRAMIEALIAGERDPSALAALAKGQLRKKHDPLVEALTGRFDDHHAELARLLLDQIDGLSANIDTLTLRIAELIGAIPAAQAPVGDQPSGSRGDSTAPPLPAVERLDEITGIGLKTAQVLIAELGLDMAQFPTPGHLVSWAKVSPRTIQSGTRTRPGTTGKGNRYLRAALGEAAVATAKTDTFLGERYRRLVKRRGKLKALVAVARSILVIVWHLLADPTARYRDLGADFYTRRIDRNRRQRHLVRQLQALGYAVTLEALPMAA

SEQ ID NO: 261086 - protein, 392 aa, unidentified
MFYIGIDIAKQFHQVAFLNDGGNVIVKPFVFQNSNQGFEKLVVAFTKYGISKDNCVIAMEATGHYWFALYFFLSDLGFSVKVLNPIQTDAFRDLSIRKVKNDVIDSINIAELLRFGKFSECVIPDENTIALKNISRFRYTMMDLCSDLKRKAICLLDQVFPEYDKLFSDIFGITSKQLLLKFSTPDEFNEISVTKLSNFISKVSQGRLGKTKAQDLKSAAANSIGISFALDSFSFQIKQLIEQIDFTEKQIEEIDLKLAELLAATQYSVITTITGIGAVTGSLIVGEIGDINRFDSAPKLVAYAGLDASVKQSGNFIGTQNKISKRGSPYLRRALWTAAFVASQHDPVLSVYYSNLIARGKSHKLALTAISRKLCNIVWAVLRSGNPYVPKA

SEQ ID NO: 261087 - protein, 428 aa, unidentified
MNEVDAIRLDQFRQLKKAIRGSEEHMIVGIDVAKDKHHAFFGTARGETLLRRLVFENNIQGFEKLVSHVQTLKARHGLSKVVFGLEPTANYHKPLGEHLIKCGCMLVLVAGEVIKKNRVLLDGRWDSHDTKDAANVADLIGQGKFHFYEYPPMPLRDLRNLLSWKRRLKKQEQGLKVRIRNHLLAQYFPELDRYFGPGGKEMLAVVKWCLSPSVMAGMAFDEFIGLVAPRDRGLKQRKKLRSIWELAFDSVGCTVGESLELESKMMVDGLVQVRETIRITGESIEKISLTFPEYHYLLSIPGFGPDVSSTVLAAIGNPYRFEKGSQVIRIAGYDLSAKRSGRTSDNAVPVITKKGKAHLRYALYQAALVASTRNKYFMLYYANKLRDRVKERGIKTKMKVKLAAKLLIIAWTLMKKREPFDPRYLNLN

SEQ ID NO: 261088 - protein, 447 aa, unidentified
MELSKAQKRNIEKRKPVKGKTIVAIDPASKKHQVAILSPEAIPMMRSFRIFNTGQGFKRLLRKLEGIKTEFPATEFLFAIEPSGHYWIPLLFFFKKRGYQFVLVPGLFVKRSREIEDHTSRQDDPKDAHIIGELALHGKYCDERQPKEIYAELRNFSNDWLELSQEKASHRLKIRMLLDQYFPEFPKLFSDFLGATGRFLLSRCPFPVHVLKQNLLLLREQVYKVSRCRIDDERVIELKQAAETSIGIDEGIAGARFRLRHLLAKYELCEQHQKEIISEIEAYLNCIEYTPFLLSLPGVGLVSVVLLLGQTGDLSKYKTVADLLSYAGLDLIYGDSGNRVGQRHISKRGRKQLRLVLYRMTLAFLQQHNIARRKYLNQRLAGKKPTQAIVSSISFFVRVMFAVMKEQRYYRPLDPSDLLVQEINQLEHQLAAKLKRTDKHINLKKAA

SEQ ID NO: 261089 - protein, 451 aa, unidentified
MGKRKMKMEIVNPNAAGIDIGSRSHFVAINQEHSDVKEFGVYAQDMKELLKWLIENDVKTVAMESTGSYWQNLFTELQNSEIEVILTNGKFTKNIKGKKTDVLDCMWIQKLHSLGLLSGSFLPDLQTEHLRTLVRHRTNLIQSAAKASKRMSQNMRLMNLRLDVVVKDIVGLTGLKIIQEICNGETKDTELAKLRHGNCKQSEQEIAKALQSNNRQDYLFVLKQELQKYQYTQQLIVECDIEIKNLLDEFINQDDVKKSLYIDKKVHKRVNKNTPKNIDLNLIAYQYFDGVDLYAIEGFSHGTVLSLMSEIGEKGIRKFPNGQHFASWLRLAPNNKISGGRILSSRTPKGSNRLKIALRQAANAIGNLKDTHLSNFFNRVAYRKGRSVAVSATARKLAMILWKMLYYNQQYNPPTIYEYLDQKRKKRVAELQKQIAILDARMSNLDNTSTC

SEQ ID NO: 261090 - protein, 357 aa, unidentified
MSVEEVVRVGVDLAKRVIQVHAVNAAGKVQTTRALRREQFIAWCAQLSPGCVVAMEASSSAHHWARKLQAMGLDARIISAQLVSPYRLEGHTGKNDANDASAICEAASRPQMRFIPVKSIEQQSMLCVHRLREGVKADRTACINRIRGLLAEFGLVFAQGADALQKILSEVLEDAGNELGALARLTLQRAHSQWHELDAHLAWCDERIAVHAKTNPAVKVAATLLGIGPVGASAAVATVGDFNQFRNGAQFGAWIGLTPRQHSSGGKSSLAGITKRGDTYLRTLLIQGAKSAVMTAHQRQDRISSWALALRERSGWQKAVVALANKNARILWAVMTRGEAFDANHLSVKPASASNAD

SEQ ID NO: 261091 - protein, 345 aa, unidentified
MDQISRIGMDTSKHIFQLHGVNAAESPVLRKKLRRKETVAFFAKLAPTVIAIEACGASHQWARLLQSFGHTVKLIAPQLVKPYVKRGKNDAADAEALCEAMSRPTMRFVPVKTAEQQAALMLVGVRDRLIRHRTQLSNAIRGYAAEFGLTAAKGKAHLVPLLERIEADESLPALARGLFAIQAKEYAQLQAQIDEVDAKLTTWHRVDECSRRLAKIPGVGPIGAVLLKMKTPAPELFRSGRQFAAWIGLTPKDHSTAGKVRLGVITRAGDEGLRSVLVVGATAVIQQARRGGRASPWLAELLKRKSPKLAAVALANKMARIAWKLMLTGETYIAKSAPTALAGAV

SEQ ID NO: 261092 - protein, 431 aa, unidentified
MKIIHDHAAGIDIGSRRIFISVQGQEVVSFATFTRNFREALDYLLSHGVDTVAMEATGSYWFILYDILHAGGLDVWLVDGRQTKQVPGRKTDVKDCQWIQQLHSYGLLNRCFVAEGDQKEIRSYLRLREDLLRNAAMHVNHMQKALVEMNIRLPEVLSQIHGASGMAVIGAILSGERDPGVLLSLCHTRLRRTKSQEILAALEGFYTERGVFALRIAHEAYLFYMKQIAECDHKLEALLQKGGDGGKGTQSGPRKPIRHNRPDIRDLGAHLLDLFQGRDATILPGITDYTWMQIYSETGNDLERWATEKHFTSWLGLSPGQNSSGTSSRRVKRKGKPLTGQIFRVIAQGLLQSKKIAIGEFGRRLRARKGPMIAIKAMANKLAAQYWRLMVKGTTYVEQGVQTYETQLKKQKEKYLNRLALEFDMKLEKIH

SEQ ID NO: 261093 - protein, 358 aa, unidentified
MTKFSEKLASVTRIGLDLAKNVFQIHGVDAAGNVVVTRKLRRGVVLEFFGQLPRCLVAMEACGSAHHWGREIAALGHEVRLIPPAHVKPYVRRNKTDAADAAAICEAAMRPAQRFVPVRSLANQASLMRHRVREQLVGQRTALLNALRGHLSEVGIIAPQGAQYVYELKQFAESGVDGNGEIVVCDEVRAALAPLAAQIDALDKEIAAIDAELEGVAKADDRAKRLMTIPGVGPITATALAATVVEVGAFANGREFAAFLGLTPRQHSSGGKERSGRISKMGDSYLRKLLVIGATSVLYRAGGHKDALRHWATGLLKRKGGFKCAFKLTAVALANKLARIVFAILRSGGVYDDRPVAA

SEQ ID NO: 261094 - protein, 344 aa, unidentified
MEYIGIDVHKNESQVCLVTGDGEILERRIATRRDKFAELLGVRSPARIVIEASTESEWVARCLEELGHEVIVADPNFSPMYATRSRRVKTDRRDAQALMDACRLGAFRAAHRTSEPQRDVRARLTARDALVRTRTRLILVLRALYRREGLRIRSGEAATFATRLREVDAPANLLELRDQLLRVLLAVNEELSRLDVRFRDLAQSDATVRRLTTIPGVGPITAAAFVSILDSVDRFERAHEVEAYLGLVPSEASSGERRQRGGVTKAGNGRMRWLLVESAWIIMRSRREDTRHLREWAERITLRRGRKIAALALARRIAGILFAMWRDGTSYAAPSHRTTRAVAV

SEQ ID NO: 261095 - protein, 424 aa, unidentified
MNSQSIPSFTAFVGLDWADRKHDFCLQAAGSDQREFGTMDHTPEVIAKWAYSLRDRFGGGPIAVSLELAKGPIVSALQRYDFIVLFPVHPSTLAKYREAFVPSGAKDDPTDAEIALDILLRHPDKLHPIKLQSVAMRTLGSLVEERRYLVNRVTSITNLMTSTLKEYYPQVLDWFEHRDTLIFCDFLDRWPTLKHVKRARNATLKSFFRLHNANRAYLVEERIQGIRAATSLTEDQAVIHPKQLLVQALVEQLRVLLKAIDRFDAEIDAVTKSLPDYDLFAALPGAGHILAPRLLVAFGEERERYASAVEIQRYSGVAPVVERSGKKCWVHWRFACPTFLRQTFVEWAGASIQRSYWAGVYYQQQRKKGCTHRVAVRALAFKWIRILYRCWQTRTPYDESVYLNSLKRRGSTLLANVSESAIMP

SEQ ID NO: 261096 - protein, 339 aa, unidentified
MNEITTVGLDLAKNVFQVHGVDAEGTTVLRKQLRRAQVLAFFSRLPRCLVGMEACATAHYWARELRTLGHEVRLMPAQYVKAYVKRNKNDAADAEAICEAVARPTMRFVPAKTAEQQAAVLLHRGRERLVRQRTMLVNALRGHLAEFGVIAPQGLRNVGRLIAIIRDEKDARLPGLARQVLQVLAVQIELEAAIAALEKQLMGWHKSNPVSQRLATIPGIGPIIATAIAAMVAEPSGFRSGREFAAWLGLVPRQNSTGGKNRLGGISKRGNQYLRRLLINGASANLLRSKATNADPWVIGLRRRRPSLVVAVALANKTARIAWAVMHRQENYQRMATAA

SEQ ID NO: 261097 - protein, 374 aa, unidentified
MSEPIIVVGMDVHKDTVTLAVLPATAVAPRRPQRLPNDPRRVKRFFDRLAKEGTIRACYEAGPAGYVLQRQLTAWGYHCDVIAPSLTPQRPGQQRKHDKYDASELARYYRSGDLVIIRIPSEADERVRDLVRCRETFQREILRSRHYVVKFLARRGLVYRDGGHWTQQHLAWLHRVAGSDTLAAEDAVVLREYLALLEYKLGRREELDRQIEVLALTPAYRSAVGRLGCFRGIATQTGMVLHSEIGDWHRFSSPRELMAYVGLVPREHSTGPQERRGPITKAGNSHCRHVLVQAAWAYRHQPRVGATLAVRQREQPPAVVAHAWKAQHRLHKLYRHLAYRKGPQVAVVAVARELVGFLWAVMHAEDETRGAQAA

SEQ ID NO: 261098 - protein, 417 aa, unidentified
MERLYETCCGIDIHKQTAVACLITTGAQGQRTRETRTFATTTEALGELRDWLRRAGCTHVAIESTGVYWKPAFNVLEEHCTVIVVNAAHIKQVPGRKTDVADAAWIADLLQHGLLRASFIPSRAQRELRDLTRTRTSLIDERSASVNRVQKVLEDANIKVAGTGVVTDIMGKSGRDILAALLEGTMNPAEMAALARGKLKNKREALEKALRGRMSDHHRMLIALHLEHIDLLDEQIERLSAEIAARLRPYEAELLRLETIPGVGRHIAEILAAEMGLNMEQFPSAGHLASWAGMCPGNHESAGKRKKGPVRKGNQALRRALNEAAQAAARTKKKDRTYLRGQYRRLVVRCGKKKAAVAVGHTILRIAYHLLKEGETYHEGMLVQLDERRRARVQQRALDQLRALGYEVTITPKEPAA

SEQ ID NO: 261099 - protein, 332 aa, unidentified
MYNVGIDVGSKELVMVIRHKGKNHKARTFNNTPEGHAKIVKTLSSKKGCVKICLEATGVYHFDLAVALNHADLSLMVVNPKAAKHYFEALMTRSKTDQVDAGILAQYVETMPFEAWQMPDEKIIQLQAFSRKIAALTKLKTQTKNQLHALESNRAVPAIIQEETLDSIAFFEKQIQRLKEHALALIDSDEKLQRSFEIVTSVKGIAEASAIQLLGELLVLPENMKNRQWVAFAGLDPRHHKSGTSVSKKPKISKAGNSYLRQALYMPALCAANRDSHVKAYYQHLIDDQGLKKMQALCAVMRKLLHAIHAMLKNNVSFDNTRFFNMAETEIL

SEQ ID NO: 261100 - protein, 348 aa, unidentified
MILVGCDLHARDQQVAVLDTATGEIQEQRLTHDGPSVEQFYAALPGPVTVRIESTGYALWFHALLHRLGHAVIVGDAAKIRAMVVRKTKTDRRDAAHLLDLLRHDRFPTVWLPDPAVRDQRTLVAHRMRLVRMRTMVKNGVHAIALNYRLALGPSLFTRAGVAQLQALSLPPHTSCRRSESLELLRWLDTHIKGLDDQIEEAAHAHPEAQRLMTHPGVGPLSALATVLVLGSVIRFPTSKHVVSNVGLAPAIESSAGKHRLGRITKQGNALLRYVLGQAGQAAIKRDPDLRRLYYAVLHRRGRSRAKIAVARKLLVRLYVMLRDQIDYQTFLYRAPAARRKELMPTTP

SEQ ID NO: 261101 - protein, 483 aa, unidentified
MKSKPQKRTKKATDHPTQRHWHEMNRKQRREAMRKIQSEEISLEVVHPNAAGIDIGNESHYVAIPPSRDSQPVQRFGCTTAELKAMAAWLKQCGIRTVAMQSTGVYWIAVYDILEQAGLEVYLVNARDTKNLPGRKSDVQESQWLMKLHTYGLLRNSFRPAQQIRTMRTYWRQRNDLVQSTGRHIQRMQKALTQMNLQLANVLSDVSGVTGQAIIKAILGGERDPHKLAEFRDPRVKASEEQIAQSLEGNWQEDLLFVLKQEQDGYEFCRKQMAECDRQLAQYLQQREDRSQGAPLPEEKRKTRLKKKKGNAPQFDLREGLFRLIGTDLTQIDCIDVMTAMTVISEAGWDMSKWKTEDHFVSWLRLCPDNRISGNKVIGKGRLPTNNPISIALKMAASTLRESKTYLGAQFRRLRTRLGAPIAIKAMAAKLARLVYRMLRYGMKYVDQGAAVYELRHRELQIKRLKAKAEKLGYRVAPIPAAA

SEQ ID NO: 261102 - protein, 361 aa, unidentified
MSKVAKRHGKEKREQVNFDGKACEVGVDVHKLTYAVAILDEDGQRLEFSTPAQPRKLLLQLLGMGMTIKALAYESGPCGYGLAWACQEMNIPVMVVAPSRIPRPVSKTGKTDRLDSMKLAEFLARGMLKGIAIPSREEFALREMERMRQRLVKKRREARQHIRAFLLRNELEDPPGLDAWGKAPLQALWEMPLPTCLRLSLDGYLEEHASILASLTKFTKQLEKAAIELGYGEQIKNLRSIPGVGVTIAHTFTCEIFRPERFKRAEDICAYVGLAPITSHSGSGKEKAWLRPVGQRYLRSILVESAWRLIAVEASYRDFYNRIRNKTGLAQKAITAVARKLLVLIWRIAIEGRAYRPVAAN

SEQ ID NO: 261103 - protein, 351 aa, unidentified
MSHKTAATVVHTIGIDTGKNTLHLIGLDDQGAIVLREKIARGRIAARLANVPRCLIGIEAGMATHYVARELSALGHDVKQVPPAYSKPFRQGHKNDFRDAHAIAEAVQRPSTRCVPVKTDDQLDLQALHRVRSRLVGQRTAVINQIRGFLLEHGIAVRQGLRFLRQQLPDILAKRSDVLSPRMIRIMEDLSGDWRRLDERIEHITKEIEVLAGTDVNCGQLMTVPGIGPIVASATVAAIGNGAAFARGRDFAAWLGLVPKQMSTGDRTILGRITKRGNRYLRMLFVQGARAILLRPKSWVKHSFGPWLTTAARRLHRNILTIALANKLARIALSVLIQGRSYETRIVPAAA

SEQ ID NO: 261104 - protein, 446 aa, unidentified
MAQRNRAFSRAGIEVTHPNAAGVDVGGATHYAAVRPDIDQPVRSFNCFTADLNAMADWFEQCGVTIVAMESTGVYWIPLYEVLERRGFQVLLVNAREVKNVSGRKSDVLDCQWIQQLLTFGLLRGAFRPADHMCALRSLCRQRARLLRDQGRYVQHMQKAMTLMNLQLANAISDVAGVTGQKIVRAIVAGERDPQVLATLRDCRIKATEEEIAASLLGNWRDEHLFALKQALGAFDFCGSQIAECDAEVERAMTLLHAHEGSPPARGRRSRNRNAPKFDVHTHLFKLSGVDLTRIDGIDVTTAMTILSEIGVDMSRFQTVKHFTSWLGLCPGTKISGGKVLSKASKRSANRATQALKLAAAALRSSRSALGAYYRRMCARMDKGKAVTAAAHKLARLVYLMLTRGEEYVDQGQQYYEERYRERVVRGLAKKAAELGLQLTPVAMPA

SEQ ID NO: 261105 - protein, 355 aa, unidentified
MPSKADTAVARTIGIDTGKNTLHMIGLDEKGAIVLREKVSRTRIAARFVNLPPCLVGIEAGMASHHVARDLVALGHEVKQVPPAYSKPFRQGHKNDFRDAHAVAEAVERPSTRCVPIKTDGQLDLQALHRVRSRLIGNRTAVINQIRGFLLEHGIPVRQGYRFLRQQLPQILATRTDVLSPRMIRIVGDLMADWKYLDERIEGVTDEIEALAHADEGCQQLITVPGIGPIISSAMVAAIGNGAAFCKGRDFAAWLGLVPKQMSTGDRTILGRITKRGNRYLRMLFIQGARAVLLRPASWAKHSFGSWLTAATRRLHRNVLTVALANKLARIAWTVLAQGRRYEARVEPRVEPAAA

SEQ ID NO: 261106 - protein, 425 aa, unidentified
MYRIAGIDVHKKVLAVVVTDIDAPGEAAYERRKVVYTPESLRQLAGWFIEQQVEEVVMESTAQYWQPLWSMLEQHWQPQRREREGAGKQAGSLHLAQAQSNRGRRGRKNDFGDAERLVKRLVSQELILSFVPSAEQRLWRTFTRRRTQLMQSRSRLQCHMESLLEQAHVKLASLASDLFGVSMVRILKALAKGESDPAVLASLADSNLKATKSQLMDALSPCRNWDPRYRVIIRHMMDELDLIERQVQELEKNAAELMKPYEDAVQRLAEMPGMGAVSALQVIAEIGPSAEAFPTPGELCSWVGVIPGENITADHNSSTHSPKGNRPLRRLLNQVAHAAIKTKGSIFELKFERFNKRMKPTAACWAVAHFICELFWIILHKGLKYEERGPGLNTKNRCRRISRMIRELRALGFHVSPPATPLLAV

SEQ ID NO: 261107 - protein, 433 aa, unidentified
MLKINYMSTLFVGIDVSSKSNSVYAMDFEENKYLSTSFGNNQPGADELVNRIAACMQKHKNLDTLLIVLESTSVYSVHISNFLASSEVLMPYKPYVFCVNPKATANYRKSYIGMEKTDPTDAYLIADFARVGRTKKLEPWRGGQFIALKRLTRHRMHLSECITREKTYMVSNLYLKFSELQLLEGDDKPFGSLYGATSSAILTEFLSPQEIIDMPEEDLLAFLAQRSRNRICDLSKTSELLRKAARDSYRLDKCMYEPLNISLASSFNCIHAYQKEIKLIEQAIEKCINGMNPNALIILQSIPGIGPIWASGILSEIGDITVFHSSDALAKYAGLYWPKGDSGDFTSEDNKMSKAGSPYLRYYLGEAANSVRKHIPEYADFYARKYAEVSKHQHKRALALTSRKFVRLVFGLLAKNQLYTGEKLDAEYNIKSN

SEQ ID NO: 261108 - protein, 486 aa, unidentified
MAPAFGAVIATPERRDPTASAVARPVNKAPARRAVITTPQSGGPFARVPPASNSTISARIEAARPRPPWGSVHERSYAAGKSAPIGASDSLTQEVNMNGQTDFTATKVEPEDFKNTLFLAMELSRSTWLVATFAPRLGDKISVHAIPGGNTKRLLELIGRLQAKLQDKDVSRVRTVCCYEAGYDGFWLHRVLVNHGIENHVLDAASLPIDRRAKHIKTDNIDAKRLLRAIVGFVQGDPQSCRVVRAPTPEEEDARRLHRERQRLVRERTGHLNRIKALLITHGIRALRITDAKWCERLDKMRTGDGRPIPARLKIEMEREWKRLKVVAEQVREIEAERDRLVKGSEPSGDVCTEKMRRLVKLHGIGAEFATVLTREVFYRPFQNRRQVASYVGLTPAPYDSGDTKHDQGINKAGNTRARVIAVQMAWLWLRYQSKSELSLWYYRRVGDLKGRVRRIMIIALARKLVIALWRYVETGRVPTGAIVTT

SEQ ID NO: 261109 - protein, 418 aa, unidentified
MNEERNTRGSKRYVALDIHKHYCVVAGVDREGRVLLQPVRVEHADLEGWLKKQLCSTDQVVIESTTNAWHVYDLLAPLVERVVVANPIRVKQIAQARVKTDIRDALILARLLAANLVPEVWVPPVHIREMRQLLSQRRQFVETHTQIVNRMHSVAHRHHLQHEQGKRFNEKTTGWHKDKTLSSLEQFQLQLEMENLNYIEKQIERVSKEVRKMCHQKPWAESMTYLMQLPGFGVITAMTVLAAVGDVQRFESPKQLASYSGLTPGLEQSGTKNRGKGITKEGRRELRWVLVEAAQMAVKSDPLWKHRFQEMQKRMHRNQAIAAIAHRLLELVWYVLTRRQAYRHFSHERIAYKYLTWAWKMDEVARDGLTRQQFARYYLMKLGIGHDLTRIALDPKHPRKLASEAELLALRPELTHIE

SEQ ID NO: 261110 - protein, 344 aa, unidentified
MITIGIDPHKSSHTAVALDAGGRVLDELRTPASKTTLERLLRWAERWPERVWAIEGAAGLGHFLAQRLVASEETVLDVPATLAARARLLARGHGRKTDGIDAASVARVAQGQPGLRRVRPEDHSAVLRLLSDRRDELTGERRRVVNRLHRILRDLRPGGAPIELSADAATRLLGRIRPETAVELERKMMARALVSDLRRIDRALVENRTRCATAVSASNTTLTGVFGISDVLAAKILGHVGDVGRFGSSDRFASYSGTAPIEVSSGDVIRHRLSRNGNRALNNALHITARVQVMHPGPGRDHYQRKLSEHKSSREALRSLKRQLAKVVYRCLVDDQAHRTALIR

SEQ ID NO: 261111 - protein, 343 aa, unidentified
MKLHALGIDLGKTVFHLVGLDSTGRVVIRKRCSRRQLLAFTANLQVQLIGMESCSGSHFLGRALREQGHQVRLMPAQYVKPYVQTNKSDFLDAEAIAEAVQRPRMRFVPIKTEEQLDWQALHRVRERWVMRRTAVVNQIRSLLLERGLTLPKGRSHVDHQLPRILEDAELPLSGSFRALLSQLQRELAQLTERIEQLDSVIQQRARKDEACQRLTTIPGVGPVTATALIAAIGNGAGFRKGRDLAAWVGIVPRECSTGGKQKLLGISKRGNAYLRRLFVQGARSVMQQRHRQAPGLSRWLAQLLARTHQNVAIVALANKLVRTAWAVLYRNEPYRAPALTIST

SEQ ID NO: 261112 - protein, 310 aa, unidentified
MDIIAVGIDVSKDRLDVAVHPGGEAFVVERNGAGLEQLTARLKQLAPTIVALEATGGFETIAAAAVGGAGLPVVVVNPAQVRAFAKALGQRAKTDPIDASVIAHFAAATRPEPGPLPDEATRFLSDLVTRRRQIVDMIGAERQREKRATSQHLRKSITRLIKALEKELVSVDTDIDDAVRSSPAWREAEDLLASVPGVGPIIARTLMAELPELGRLNRKQIAALAGLAPYTRQSGQWRGKSFIGGGRQAVRTVLFMGAMTARRHNPVLKAFFERLVANGKPKLVALIAVARKLLTILNVMIRTKTPWQPA

SEQ ID NO: 261113 - protein, 431 aa, unidentified
MRKKLSFKFVKSEVASFLETVRSYSDVNCTSICFALEVTGIYSTNVYDYIKANLYENESIKFLNTDFVNQWRIAHNIAKSDPLDAQTISTIIGTDLDVQYVNDNVFENKNGYQDLKALVHRHYQIKKIYSQEINRLIAQCDCLFPELQYVFEPKSAAFIAVLSSYPTTHDIINASRVEVFDVVYEATKHRCSMDKVDKLFELCQDTLVPDDISSYGKSIILDLVENIKNIKGQLKSIERYIKDIASLNPAYKLLLTITGCGPITAATVIAETGNIRRFKNADCFVSYSGTSPRNKRSGTSVETMGKISKKGSRYLRHAIYMIAEFARRHNPVLKHQFERIKNGNKKRHKLANIAIANKIARYIYSIMKNKSSFVILHDHIMRLPEETRDTFFNSISLDFPKNTRKQIYQYSDINGELHRFVYIKTDEMIPA

SEQ ID NO: 261114 - protein, 356 aa, unidentified
MSQEVTLIVGIDVHKLTHAAALIDDRGGLLDALTIANSPRGFRELIDWLVDRDAASAVIGVESPGSYGRCLVAALAGAGFEVLQVPAWRTHRERHRRGPGKTDPGDALSIAKVVMTDRADLGPAQEPELVRALGMLELQRRRFVHDRTQAIQRLRADWTQFDPVAEAGTIRCDRKRELRKLKRITLGDSLAQRTAARCLRELAEDIDDLNDRIAVLDNEIAALLAEHGRPLEQLHGVGSNLAAVIIAQAGDVRRFRDASAFARFCGAAPIPCGSGKTAGRHRLHRGGNRQLNAALYRIAIVQQRHHPPAKAFLARKIAEGKTPREARRALKRHLANVLYRHLIAWANATPAMNHLT

SEQ ID NO: 261115 - protein, 441 aa, unidentified
MRVMYERCCGLDIHKSSIAACALITEKGKPQEETRRFGTMTGDLRELAGWLQQKGIRHVAMESTGVYWKPVWNILEPAGFELLLANAQEVKVVPGRKTDQKDSQWIADLHKHGLLRKSFVPPRAIRDLRDLTRTRAILTQEHTSVCNRIQKVLEDANIKLGSVASDVFGVSGRAILRALMKEEKDPEVLAELSKGTLRKKIPQLRRALEGQITAHHRSLLTGHWDRMEFLEQQIADFETQIAQRMKPTPEEMALTIQNAAEEAPLPLSPREEAIQLWMEIPGVGWTAACSMVAELGVHMDQFPSPAHVASWAGLCPGNNETAGKRLSGKTRKGNVWLRRTMCEVAWAASHTKDSYFAAQFRRIASRRGNKRALVALAHSILVTAYHMLKHKRHYRELGADFFDVINRDQVRNRLVQRLTKLGFEVKLMPKGTVENVTSATN

SEQ ID NO: 261116 - protein, 332 aa, unidentified
MNAVGIDVSKGKSTVAVIQPFGVVIAEPFDVFHTDSGLKELVNFIKSLSGETKVVMEYTGTYYEPTANALHNAGIFVSVVNPLMIDDYDTNRVRKVKTDRIDALKIASFALDKWMKLREYTPVETVRKTLQIMNRHCIKLNKILVMQKNSLIALLDCCFPNANTLFTSPRRESDGHEKWVDFVLKFPHVDSVAKLSLSAFKTKYQSWCKKDHYNYSESKAEQIHAYARTLVSTLPMTDAIKKMVSDSAKLLNSTLEALGTLHSEMDSLASQLPEYETVMNLFAVGKVTCSQLIAEIGDVTKLKSGKSLVALAGIDPPPNQSGKEDKKSRSIS

SEQ ID NO: 261117 - protein, 438 aa, unidentified
MSNKVIFNLDELFISVGIDVGADFSWMSIALPNQQFVGKPYKILHNSIDSLTTAVSKIKEAEELYSLESRIFLETTGIYHYPLFCYLRDKGFNCSVINPIITKNSTNINIRKVHNDRFDSKKAALVGLKPDLKVSLMPSDLALNCRNLCREYYDLMDNRSAYVNKLQGELCMAFPQYLDIFSKVTINTSLTLLETYTSPYAFLEADRQEIIDIIRSTARFGLTYAQNKYNAIVQAATDANQFGYIINSNIKRIRLYISFIRKYDEEINRILESLHELVDANEDADFVKQIHLIETFKGAGFLSAVSIMGEIGDFSAFSKPKQLFAYFGLDPAVKQSGKFEGTKVQMSKRGSAIARLVIHTLTLQSISISRNGEAKNPVLREYYLKKCDSKPKLVAMGAVSHKVCNMIFAILRDNKPFKIIAPQEHIKQYNSAKCDIAA

SEQ ID NO: 261118 - protein, 395 aa, unidentified
MENPIIACDVSKGKSHIQGFIGLSNPIGNPFVVRHLKSDLKLIKELAKSLEKQAHKKPKFVFEFTGIYHECIAKYIRTLGLDLYAISPLESAKVRKSQIRVTKTDSKDCLNIATVYYTRCIRKFESDNNDIKSLSRRKRDIREERVRQRGVYHRYLDLIWPCFDEYFDVDSKVCDIIISTYKHPYVIKRRSVNMVVEILLNNGRFSKNRAFDIAYKIKDYASNCVSGVDEKSDYVNALINSYGKIKSLTNEMEEINLELDNLLRKSPVYQLLKTVPGVGENLLIQMSAEIGDYTRFKTAKQFVAYIGLDPSILQSGTNDGEHYSITRKGNGILRSCLYLAVSQMLTQKLDNQITRFYFKKKSSGLSHKVAAVASCRKLACCVFGMFKNGTCFETI

SEQ ID NO: 261119 - protein, 312 aa, unidentified
MATLSFGGIDVSKDRLDVLLLPRGMYFSVRNNAPGWTELVARLRPFRVAAIGLEPSGGYERGIIRTLLAAGLSVRRINPNKLRQFARARGVLAKNDRLDARLIAEYVAAMPTRVVRRDEALERLAEIVTMRRQLCDEHAAAMNQATHLEDAMLRRLSKRRLVRLEADICLLDKRLAELVGADPRLAHRYHLLISTPGVGPTLAYTLLASLPELGQLDRRQIAALVGLAPYDFDSGKLKGHRCIYGGRMPVRNVLYMAALSASRYNPQLKAFSKRLAAAGKKAKVIIVAVMRKMIVTLNAMLRDNTEWRPVVA

SEQ ID NO: 261120 - protein, 411 aa, unidentified
MPKIVHRVCCGIDVHKKFVVACIATTNDQLVTTYSRQRHFSTFTKDLRLLSEWLAENNCKDVCMESTGKYWIPVFNVLEHTCDCVLAHPKYAKAIKGKKTDKRDAKWIADIFKHDLIVGSFIPPPEVRQLRDLIRYHTKLTSYMTGEKNRAQNCFTVSNIKLDDVFSDVFGKAASAITARLLENNEPFDVTPYLTKNIKASPEEIQAAVDGEICAEQAEKLRIIRSHMESLELCKANLESAILTIAKPFMPQINLILTVPGVKTFSAMAIIGEIGADMSVFETSRHLCSWAGLTPQNDQSAGKKKTTRISRAGVYIKPLLVQCANAAIRCNDNPEIANRYNAVKKRRGHKKAIIAIARMLLTAIYNILKKNEPYNAELYRVSDKTPVQRVVTVEQAVFILQRQGYLVADSP

SEQ ID NO: 261121 - protein, 401 aa, unidentified
MPLFVGVDWGGGGHAVCVVDADGGIVMRLDVRHDAEGLGDLLGKLRQLGRPADLPIAIERPSGLVVETLAEAGHPIIPIHPNVVRACRPRYRAAGGKSDRGDAYMLADILRTDGHRFRPLMPMSTEVKALRSLVRARDDLVSQRVALTNQLRSLLEGFWPGAACVFAAIDSPIALAFIGQYPTPDSASGLGETHMAEFMRRNAYSGRRSAATLLARLRAAPTGLATGAEAEAKAVIVRSLAALLEHAMVEIANLTAHIEQLLADLPDGKIIMSFPRTGRLCAAQILAELGDVRERFPTEDQLAAEAGVCPVTHASGKSRGVVFRWACNKNLRTAITCFADNSRHASAWAATIYRNARARGCKHAHAVRILARAWVRVLWRAWQNRTEYDPARHAGAGRMTT

SEQ ID NO: 261122 - protein, 429 aa, unidentified
MKIIYPRVCGIDVHKKFIVAVICISESVEPIYLKKRFSTFHNDLIRFREWLIQNDCQNVCMESTGKYYIPVYNVLESHISNIVVANPKWVRAVKGEKDDDKDAKWIADLFKFGIVRSSFIPQKDFRILRELTRYRYKLVNMRSSEKNRFQNALTSGNCKLDMVFTDVFGKSASNIIDLILSDNPYTDEDILSKVHKKCKASPDMILDSVNGTDLTPVQKARIELVNDHIKQLSSNIQKLDKLIDLMIEPYEDYISFLCQIPGVSRNSAIIILSEIGIDMNQFTTSRRITSWAGLTPSSNQSAGKKKSVRISRAGVYLKPCLVEVAHAAVNDKSHPYYANKFNKISKRRGKKRAYIAIARKILVAAYHMLLTGEIWNPADLSEVETPVEQRLKYVKNNLKSDIKQLLDIGLTVEELTLMIQQNANIIATQ

SEQ ID NO: 261123 - protein, 452 aa, unidentified
MSVMGVPEQVEDEEYEQRLERVAAIDVAKASGKVCTRLPHEVKAGKRVTLVWDVAATTNAICELAARLVAERVERVVLESTSDYWRPFFYVLEAAGLGVWLVNASDVKQVSGRPKTDKLDAVWLAKLNERGMLRPSFVPPADIRRLRDCTRLRLDLTRERTRHKQRVEKLLEDALIKLSTVATDIFGKSGRDMIEALIAGTNDPKQLAGLARGRMRVKHAALTEALNGRFDAHHADLARILLEQVDGLDTQIQRLTATIDDLIAAMPAAVAGDPQPPTDTNGGDGERRTTLSAIARLDEVPGIAEHTAQVIIAELGLNMAQFPTAGHLVSWAKLSPRTIQSGPRTRGGKTGKGNPYLKGVLGEAATAAAKTNTFLGERYRRLVKRRGKLKALVAVARSILVIVWHLLNDPTARYHDLGPDFHTSRVNTDRKIRNLIHQLEALGHTVTLQPTT

SEQ ID NO: 261124 - protein, 390 aa, unidentified
MDVMHPVCCGIDVHQKSIVCCILDGPLTSNEPKKYQTTFGTTTKELKAALDWILEHQVTHVFFESTGQYWIPLFNIFSDSDLELILANPQHIKNVPGRKTDVKDAEWIAQLGRCGLINQSYIPSQEVLQLRYLTRYRLSVKQRLTQIKNHIHVILQRANIKLTSYLSDIFSKTGQALLTLFIDGEVINEYNVESCIHGRIKASTRQLIEAMDGKLSTVDRFLIKECMEEYQLQKKISDELNKEINEYILEHFPEEYQLLLTIPGISDNCCATILAEIGPNVEAFKTDKKLASWAGMCPGSNESAGVKKSSHTTQGNKYLKQALVMSVLSVQRVKEETFSVFYQRISSRGSKMKAIIACGHKMLRIIYKILQSHKPYDSQKALGLRQQTNA

SEQ ID NO: 261125 - protein, 385 aa, unidentified
MYQLSGSTQAALDYNSTIIGALELSEKKWVLAVQLPGVRRHSRHVLEACGDGLASFVERLKARCAATGRKIARVILTHEAGRDGFWLARFLARRGIEVHVIQPSSLPVDRRARRAKTDIIDVEMLLRTLMAWLRGEPRVCSMVPIPSEADEEARRAYREREDLTGERRSIVNKIDGILATLGVKGYKALRRDRREQLTAVRQPDGDPIPQKARARIERLLDRLDLVLKLIEQVESARDAVLKKDAPADEAERMIRSLTDLRSIGPDFATLLVREAFVRQFRNRRALGGYVGLGGTPFSSGGSEREQGIGKDGNRRVRAAMVELAWTWLRWQSDSALSVWFRARVGAMGGRIKKIMIVALARKLLVALWRYVMDGVIPDGAKMKAA

SEQ ID NO: 261126 - protein, 387 aa, unidentified
MIYVGIDIAKLNHFASALSSEGEVLIEPFKFTNDNDGFFLLLSKLIPYEKNSITIGLESTAHYGNNLMLFLVAKGYKVCLINPIQTSTLRKNNIRKTKTDRVDTFIIAKALMINDHRYVSLRDIGYMQLKNLGRFRLKTVKQRTRLKIQLTSYIDQVFPEIQYFFKSGIHHKGCYALLKEAPSPEAIASMHLTHLTHLLSANSHGRFKKETALELRVLAQKSVGTSDSSLSIQITHSIEQIELLDRQIEHIESEMTDIVSSLDSVIMTIPGIGPVNGGMILGEIGDITRFSDPGKLLAYAGLDPTVYQSGNFQARHTRMSKRGSRALRFALVNAAHNVVKNNDTFKAYYDLKRSEGRSHYNALGHCAGKLVRVIYKMLTDDIAFDLD

SEQ ID NO: 261127 - protein, 391 aa, unidentified
MIYIGIDVAKDKHDCFITNSDSEVLFKAFTIFNNLDGFNDLYQKIESVMDDVTKVKVGLEATGHYSYNLLGYLIDKGLPTYVINPLHTNLYRKSLSLRQTKTDKVDARTIASILMSDVNLKSYSDISYHNEELKSLTRYRFDKVKERAKLKTSVSRLVCILFPELEKLVPTLHMASVYALLSEFPSAKHVATAHLTRLTNLLSESSKGRYGKDTAITFRDSARASIGSNMPAKSLELKHTIKLIQELDSEIDEIENEIKIIMDEINSPILSIPGINYRMGAMIIAEIGDFNRFDSPDKILAYAGFSPSTYQSGQLDGAYAHMEKRGSRYLRYALYNATKYVCHWNPTFAAYLAKKRAEGKHYNVAISHAVKKLVRVIYHLEKTKQQYIKAA

SEQ ID NO: 261128 - protein, 340 aa, unidentified
MEQVIGIDLAKRVFQLHIASPLGKMMKNTVVSRDKLTAFLAQQPPSKIVMETCGSANYWSRQFKRFGHEVKQISPQYVAPFRMGSKNDKNDAAAIVEADSRPGMRYVPEKTQEQQDIQCLHRARQRLMKNRTALINQIRGLGLEYGIAIPESAHKVEQCLPDHLENAENDLTPLSRELFQELLLELKEQQQRLNVPDKRLDQLNAQQEDIRRLLTLPGIGPLGASALMIALGDSPDFKNGSHFASYLGRVPREHSSGGKVRLLGITKRGDGYLRGILIHGARSVAYRVQKLPDGRCNGLQRWLKGVITRSGLNKAAVALANKNARIAWALVNQQSSYEVR

SEQ ID NO: 261129 - protein, 416 aa, unidentified
MLFIGDDWAEDHHDVELVDDAGRRLARARLPEGLEGITRLHALVAEHGAAAWGDLPPEEVAAQVVIGIETDRGPWVTALRAAGYQVFAINPLSAARYRQRHCTSGAKSDAGDAHVLAEIVRLDRDHHRVVAGDSDLADAVKLLARAHQTAVWERTRHVLRLRSTLREYFPSAIEAFEDLAAQDAVKFLERAPDPGRAAKLSRSQLMVLLRAARRHHVEAKADVLLAVLRAPALRQQPTLEGAYASVVAGQISIITALNEQIAQLQKVVAEHFGRHPAADIYLSQPGFGVVLAARALGEFGDDSSRFTDAKARKNYSGQSPITRASGKKTVVLARYAGNRRLGTALLLQAFAALGASPGARAYYDALRGRNIGHHAALRQLANRLVGILHGCLKTGTAYSEEKAWQHHQKEVPAAAA

SEQ ID NO: 261130 - protein, 374 aa, unidentified
MDTIYIGVDFHARQQTICYLKTETGELVTCELKHQDKQKVHAFYAEFRGQVIVGLEASGYSPWFERLLEELGCEVWLGHATEIRRRARWRQKNDRRDAELILDLMLHDEFPRLHRPAVQSREVLRMLRYRQKLIKIRTMSKNSLQALALQAGLARGSGLFTKDGKQQLSTAEMSPVMHWQREHWLQLLQPLNQQLLETMSWFKAQSKGDICITRLRTHPGIGLLTSLCIVHTLQPVSRFRNQRKVAAYAGFDPVERSSAERKCFLGISKAGSRVLRYLLVEAAHTAIRKDEDLKRFYKRLAERRGRPKAKVAAARKLLIRAYIMLRDEIDYAEFRRRAVAARLARRGQRPNMPEVLIGQPASAECQEPAHYSEK

SEQ ID NO: 261131 - protein, 403 aa, unidentified
MEVFYERCCGIDVHKKMIVACMRIGTKTETKTFGSTSEELRQMAKWMQDNECEIAAMESTGSYWKPVYNVLEVLGQEVIVVNAKHMRNVPGRKTDKKDAEWIAELLQHGLLKASYIPDRDQRELREVSRYRKSLVEERAREINRLEKTLQGANIKLSSVMDDITCLTGRNLLNALVENGVSEKNIDDLLCGSLREKHAEILKACDGYMTSLQKKLVKAILDHIDDMTRRIADMDNIVKGEMDKYEDAMKRLEEIPGIGERSAQVILSEIGLDMSRFPTAKHLCAWAGVAPGNNESAGKRYSGKTRKGNSTLKTTLIQCAKSGKKKKGSFFKAQFDRVATRRGKNRATVAVAHSMLIAIYYMLKNDQSFVDLGEAYYTQFNTEKKINHYLKKLNELGWQMPSLA

SEQ ID NO: 261132 - protein, 338 aa, unidentified
MNSEKYIGLDVHQATIVVAVTDSSGKLIMESILETEAGTILQFFAGLRGTLSVTFEEGTWSAWLYDLLNPHVDKLVVCNPRKNALLKDGNKSDRIDACKLAELLRGNQLKPVYHGENGVRMLRELSRSYLTIVKDLSRVMNRLKAVYRSWAISCAGRDVYYTRHRAEWLAKIREAGVRRRAERLYEQLDMLQHLRQQARRELLAESRKHAITAKLRQVPYLGPIRSALAVALIQTPHRFRTKRQRWAYSGLALETGISGEYRLVEGQVRRSKKLLCIRGLNKDHNHDLKGLFKGAATMASVRPGPFQDFYQAALVQGIKPTMARLTLARKIAAITLTL

SEQ ID NO: 261133 - protein, 386 aa, unidentified
MIKDPFVPRDYDVFAGLDVDKRSISVTFTDHQGLSRSMRIPYNVEHLLNYVGKHFAGQKVAFAYEAGPTGYGLYDGLVAQGAPCLVASPSMIPKAPGQRVKTNRLDSQGLSENLRGGQLKSIHVPSAVYRELRHLTQLRDTFVSEAVGMKLRIKSLLLFEGIAFPPAPAGSQWSFMVRAKLRKLPCSGTVRFKLDHLLDSLEFSEKQVFKTTQEIRRFCQNDPELGQSIKYLMSIPGIGWIVASQLVARIGDWRKLETVRQLASFLGLVPTENSTGDKIDRGSITHTGDGRLRSKLIQASWSTIRQDAELREFFRSVARTHPRNVASRVAIVAVARKLSTRISAVLMRQRPYVVREKVHSAPVTQEETRPQGTTRRQAEPGETNNS

SEQ ID NO: 261134 - protein, 369 aa, unidentified
MEKDTTYVALDDSKRKIVAGILRPNDTAPELREIANDPHHIRRLLTRLQRERPVSACYEAGVSGYDLYRQLRALGVACDVIAPALTPRRPGRRIKTDRRDAAKLVHLYRAGELTAIHVPDEVEEGGRDLIRCRDDIRRDVLRWRHRLLKLLTRHGRMYVAGRNWSQAHWRWIREQRFDVPPLQRAFEATLFTLEQALARQAELDKEIEALAATVPYREPVGWLRCFRGIDTLSAMILLAEVIDFQRFHRPRELMAYLGLVPSEYSSGETQRRGALTKAGNAHARRVLVEAAWHYRHRPTIGHALATRSQGQPPAIVAQAWRAQQRLHRRYRHLVGHGKRPPVAVAAIARELVGFIWAAMTGHESRLQTA

SEQ ID NO: 261135 - protein, 368 aa, unidentified
MNIVKFIGMDVHKKTITIAIADECRQHQPRIYGSIANEIEALDKFCRKMVSTSNRLHFVYEAGPCGYGIYRHLTQKGYDCIVAAPSMIPKKSGDRIKNDPRDASMLARLHRAGELTAVYVPDAQDEAIRDLTRAREDAVSATRKAKQRLLAFLLRNRLTFPGRSKWSKAFFNWLADIGMPYPAQQVALQEYIDTVQENLSRVARLTDQIRQLTPGWRLAPVVSALQAARGVSLVVAATLLAELGDLSRFDKPSQLMAHLGLVPSEHSSGDSIKRGGITKTGNSHARRVLVEASWAYRMQARKSRILLNRQQGLPDTVCQIAWKAQLRLCARFKRLSAKGIPKPKVATAIARELSAFLWAIAKQVQPAA

SEQ ID NO: 261136 - protein, 338 aa, unidentified
MTIETLAIDIAKNVFQLHGVNRAGRVVLKRRVMRDQLFSTIAQVERCTIVLEACTGAFYWQRKFEALGHEVKIISPQYVKPFVRRQKNDGNDAEAICTAARQPHIPFVPKKSVEQQDIQALHRARQRMVNHRTAVVSQIRGLLLDRGIAMAKSITCARRLIPGILANLSNELTPMARGAIAELYDLFRDLDRRIAVFDRKIDEVFRNSEPCQRIAKIKGVGPKTATAIVAAVGDGSEFKNGRHLAAWIGIVPRQFSSGDRTILMGISKRGSQHLRSLLVHGARAVVRTAPSKTDARNEWVNQLRERRGFNRATVAVANKNARIIWAVLRTGEPYRAVF

SEQ ID NO: 261137 - protein, 313 aa, unidentified
MNYIGIDVHKSICTAVVMNDDEKVIDQIIDFGTNDEGCSSIVDRYSPEDSYILFENLTTAHRVYHFFKDRGYRVEGLHTGHGSVTEISKTDFKTDLEDATKLARMCKDHFTGRRKYALVHFADIDSMKAKELCRVMNDCSEQRDKLNLRIQAYMDLFDIHLPKGLKNVYSNKAMAYLKSLNHPALTIMVEDMASTMGHIETSREGLESLFKDNEDVKNLMSIKGIAIQTAATIYTAIDGIERFETPESLVSYFGLKITRHESGGDRDLHGHINKRGDPLVRKYLANVVVKHSIYYPDSDLAGFYKRKKEVMPH

SEQ ID NO: 261138 - protein, 319 aa, unidentified
MAQNDVVVVGMDVAKDKVDACIRGPKLRQTCPSTAQGHRKLVAWLRKHQVNKAVMEASGGYERAWAKVLREVGIEVRIVDPKRVRSFALSAGRLAKNDTIDAEMIAWFAETFSDAPSQKHDAAREELQALVKARLSLIDLRVCLVSQSEHAAPGLVQKAHAHILKSLASEIAKLEAAIFAKIKSTPDFAERAEIIESVPGLAEMSSANLVAGMPELGQVSDEIAAALIGVAPYDDDSGKRRGERHIKGGRRWVRNAIYMPCVGAATLNNPVLKAYYQRLIAKGKEPKVAVVACMRKLIVILNTMIARRQKWDPSRYALT

SEQ ID NO: 261139 - protein, 366 aa, unidentified
MKKSSTLAIEGMQIFRPNQLTIGLDLGDRSSRYCIVNEAGEIILEQELPTTPKGIEQGFGKIPRSRIALETGTHSPWISRQLTELGHEVIVAHARNVRLISQSSRKDDRLDARTLARLARIDPGLLGPVRHRSVKAQIHLTVIRARATLVSARTALVNAARGLTKSYGARLPKCGTAQMNRESAKELKAELREALDPLLAEIESLNARITEYDTRIEQLAKEVYPEVARLKQVKGVGPLIALTYVLTLDNPHRFRRSRDVGCFVGLRPGRRNSGMSEPQLHISKEGDRYLRTLLVQGAHYILGPFGQDSDLRRWGLKLSERGGRNAKKRAVVAVARKLAVLLHRLWVSKEVYEPLRNNRKQMAQVA

SEQ ID NO: 261140 - protein, 342 aa, unidentified
MEEVSIIGLDLAKRVFQVHGATTDGRVAFRKKLSRGQVLAFLADLPPCVVAMEACATAHYWAREISTLGHEVRLVPPAYVKPFVKRQKNDAADAEAIAEAASRPTMRFVEPKSPRQQARAMVFRTRDLFVRQRTQTINALRAHLAEHGLIAPQGLSNLAGIQRLVDEGAADLEPLIAETARIYLEQINDLTGRIVKMEATLKQEAAQSGASSRMMTMPGLGPITAMAIEAFAPTLSVFKRSRDFSAWLGLVPRQHSTGGKQVLGRTSKMGQRDIRRLLIIGAMSVIRWASRKGTVSGTWLHAMLLRKPRKVVAIALANKMARALWAMETRKEDYRDPQLAAA

SEQ ID NO: 261141 - protein, 375 aa, unidentified
MPTNLRYLGLDVHAETIAAAIAEPDGEVRALGILPNRPEAITKLIRKLEPRHGLHACYEAGPCGYVLYWQLTQLGVHCDVVAPTLVPTKPGDRIKTDRRDAARLARCYRAGDLTPVWVPHAAHEALRDLVRAREAAKQDQLRARHRLGKLLLRRGIRPPPAAKPWTQRHRRWLDTLQLDPPALQATLDDYLHEVDHAAARVERLEGALDNAIAAAPAPLRAVITALQTLRGVRQVTAATIVSEVGTLSRFTHPRQLMGYSGTVPSEHSSGASVHRGAITKTGNAHLRRVLVEAAWAYRFPPRCGKALRTRQRGQPDTITAIAWKAQHRLNTRYRRLLGRGKPTAQVVTAVARELVGFIWAIGVATERASTAAAAA

SEQ ID NO: 261142 - protein, 373 aa, unidentified
MPKYSTAFGMDVHLRSTTVCALDADTGEAVTRRFPGNPWGEIAGWMDGFPGPSLAAYESGYLGFAPQRELAGLGVECVVAAVSKIPRSAADSASKNDRNDAARMAKAILAHDISPVWVPSPEVEGIRDLAGAYDGATARLATAKQRLLAFLARRGFVYGGTTPAGNPRKYWTYDFLRWLDKVRPEDDGGVRTLAALRNEVEAAAEARSDLLSEYRAAVDAGPIAAEVAALQSIKGCAFALAAAFSAEVGDFTRFRSGRQVTAYFGLAPSQRSSGDSVRLGGISGAGNALVRKLAVEGSWCYAAARHQPKLMPRDTGVPLEIRMHGRKGSERLLRRREEMLARGVPAAKANAATAAELVRWLWALGMMCREGAE

SEQ ID NO: 261143 - protein, 373 aa, unidentified
MPRYSTAFGMDVHLRSTTVCALDAETGEAVARRFRGNPWGEVAEWMSGFPGPSLAAYESGYLGFAPQRELSALGVDCVVAAVSKVPRSAADLSSKNDRNDAARMAKAILSHDVTPVWVPSPEIEGLRDLAAAHDAATARLAAAKQRLLAFLARRGYVYGGTTPAGNPRKYWTYGFLRWLDGIRPADDGGIRALAALRNEVEAADETREAVLAEYRAAVAAGPLSAEVEALQSIKGCGFVLAAAFASEVGDFSRFRSGRQVTAYFGLAPKQRSSADSVRLGGISGAGNALVRRLAVEGSWRYAQAGHQPKLMPKGSGVPLEIRMHGRKGSERLLRRREEMLERGMPQAKANAATAAELVRWLWALGAMCREATE

SEQ ID NO: 261144 - protein, 420 aa, unidentified
MQVLYPCCSGLDIHKKFVVACVMTTNAEGHVQKESRTFSTMTQDLLALLDWLHAAGCTHVAMESTGSYWRPVYNLLEGQFTLLVGNAYHMKTVPGRKTEVKDAEWIADLLRHGLIRGSFIPTPAQRQLRDLTRYRTHLVEERARLTNRLQTVLEDANVKLASVVTDIRGVSARAILAALIAGETAPVVLAELARGRMRSKREVLAQAVVGRFTPHPDFLLTEHLSQLDYLEEAVARVSAEIAQRLQAEQEALELLDTIPGVGRRAAEIILAEIGTEMARFPSAKHLASWAGMCPGNKESGGKRLSGKTRKGNPWLRQVLIEVAHAASKTKDTYLAAQYRRLATRRGKQRALVALGHTILVIAYHLLTRRGPYHELGPLYFDVLDRQRVQQRLVQRLERLGYTVNLQPSAAYSDWRVDATW

SEQ ID NO: 261145 - protein, 342 aa, unidentified
MTILLLGIDLGKNSCSLAGLDERGAVVLRRRMQPATVVTFAAKLAPCTIAMEACCGAHYLGRTLAAQGHTVKLMAPEYVRPYVKAQKNDDRDAEAIAEAATRPTMRFVELKSQEQLDIQSLHRVRSRLVGARTTLTNQMRALLLERGATFAQGRRKFEKALDAMLADEARLPHGRIRELLVAMREEWAELDRRIDALDEEFSALARTDEAARRLTSIPGVGALNATALVAAVGRAESFSHARDLGAFLGLVPRQHTTGGKPRLLGISKRGNTYLRTMLIHGARAALPSLAKSETALGAWLRGLLARCHHNTVVVALANKLARIAWALLRRDTTFSIGEAASA

SEQ ID NO: 261146 - protein, 310 aa, unidentified
MDCCIGIDVSKATLDIASLPTGESWTVTNDDLGLAELTPRLVALTPVLVVLEATGGFETLAAVTLAKAGLPVAVVNPRQVRDFAKALGRLAKTDALDAGILAEFAQRVRPEPRPLPDEAAQLLDGLLTRRRQLVDMLTAEKNRLGFARGPVKRDINRHIRWLEKRLQHVDGDLEAAIAASPLYQAKADLLRSVPGVGPITTLTLIATLPELGQLSRHQIAALVGVAPLNRDSGTLRGKRMVWGGRAPVRAVLYMAALVGIKHNPVLRQFYERLRAAGKPFKVAVTACMRKLLTILNAMLRQNCRWDPHHA

SEQ ID NO: 261147 - protein, 484 aa, unidentified
MWSEDWPSDAVWKNTHPCSRRLALTFTTPKIMAKKAKKIKTAKGLRLKIVNPDSAGIDIADGEMQVCVPEDRDGDNNRRFGSFTEDLHAICEWLHACRIKTVAMEATGVYWLSLYQLLKEEGFDVVLANPLQVKNLMEEKTDEADAEWLMLLHSYGMVRPSFQPENIVRQIRNITRHRATIINKAGQETQRMQKALEMMNVKLSTVITDILGKTGQSIIRAILAGNHDPVSLSQMTDKHCKASKETVAKSLEGTWDEDLLFMLRQSVECYDFYQGQLQACDQQIESLLARYVSQIDNEGAKQLERVKKRRSQKNAVAVDMEMYAHMIWGTNVMAIPGMSTNSMLQLVAELGHDFTDKFDTCAKFCKWCNVVPNNKVTGGKLVSSHIPKRKNPVGLVLRVCANSVKAEKSEMGTYFRRMKAKSGHMQAIVATAHKMARILYAMVKNKQAYDPAKVGCDEKELLIRKIERTKRALQRLDDRLRDTG

SEQ ID NO: 261148 - protein, 325 aa, unidentified
MQGKVSPERSAEEVYVGVDVCKAWLDVYLHPVGRELRVANTPEGIRALKRALQAWTIKLVVAEATGKLHRLAYRSLHADGYPVAVVNPYRSRKFADALGQLAKTDKIDARVLALLGESLNPDARPPTPKQVAELQEIVLARQAALAEAVALENSLKATESRFLVRERSRWLKSLRERIKRLERAISQLIQADPEMARRFEVLTSIPGIGPVVAATLIACLAEIGGANSKEVAALAGLAPFNWDSGDMRGQRHIKGGRAHVRTPLYFAAIAAVRTDPGFMRFAQRLRAAGKPAKVILTAVMRKLVVLANTLVSQNRTWLPEAPKHA

SEQ ID NO: 261149 - protein, 413 aa, unidentified
MEAIIERCCGLDVHQASVVACLLVGRANEKPKKTVRTFGATTSALAALREWLADEACTHVAMESTGVYWLPVYIQLEGHFQLIVGNAMHIRNVPGRKTDVKDSEWIADLCRHGLIRASFVPPQPIRELRDLTRYRRKLTESHTAEGNRLRRLLETACIKLGSVVSEILGVSARLMLRALMDGTATPDQMAQLAKRRLRSKIPELALALDGRVTEHHRFLLRMQLDRVEQVECDIAKLDQHITLKLVPYQSQMQRLMGIPGVDWIGAASIIAELGVDMSIFKTEAHAAAWSGVCPGNNESAGRRKGQPIRKGNFHLTTALVQAAVCASKQKDCYLRDKYWRLKARRGPKRAALAVAHKILVAAYHILKEPLVEYRDLGPTYLDKLAPERTKHNLVKRLEQLGYRVTLEPAPIAA

SEQ ID NO: 261150 - protein, 459 aa, unidentified
MIEMPQRRKKSRKIKSPSGLPEHLRHININAAGIDVGSDRHVVAVPEGRDTDSVREFGTFTADLQAIGDWLEKCGVTTVAMESTGVYWIPLFEVLEQRGFEVKLVDARHVKNVSGRKSDVLDCQWIQQLHTYGLLAGAYRPPDEICTLRGYMRQREMLIQASSMHVQHMQKALQQMNVLLHNVVSDITGLTGMTILKAIIAGERDPKRLAENRHENCRNSKETIAKSLEGNFREEHLFALKQALELYEIYQCKIAECEKAIVAQLAKQPDVTDEERPGGGKPVRTRECIRGDMDVRQKMFKLTGVDLFSIPGLGADTLLTLTGEVGVDMKPWKTVKHFTSWLSLCPGTKISGGKVLSKRTKRNANRAAQAFRMAAASLARSQNALGAFYRRIRSRSTAIQAVTATAHKIARIYYAMLTTRKPYVEAGLHAYEERYKQRRIAALRKQARSLGFELSVCAV

SEQ ID NO: 261151 - protein, 354 aa, unidentified
MSQTLKTSVAVIGVDIGKNSFHVVGQDRRGAIVLRQKWSRGQIEARLANLPPCLIGMEACVGAHHLSRKLQMLGHDARLMPAKYVRPYSKGQKNDFRDAEAIAEAVQRPTMKFVATKTAEQLDLQALHRVRERLVSQRTGIINQIRAFLLERGVAVRQGLRFLRAELPGILATRSDVLSPRMLRIIEDLAGDWRRLDERIEGLSNEIETLARQDQACARLMTVPGIGPIISSAMVAAIGTGDVFSKGRDFGAWLGLVPKQISTGDRTILGSISRRGNRYLRVLFVQAAWVVLVRLKQWERYGLKSWIEAAKKRLHHNVLAIALANKLARIAWAVLNKGRAFECVKRDAMAPQPA

SEQ ID NO: 261152 - protein, 347 aa, unidentified
MCNVPRYFIGVDLHKTVLQICVLDRSGEIVEELRCRPVDQAGGELVLDRIQPYLNSGRIAVEAIGLNRWFVNRLITRNVDFIVCDPIKLNLKILGKKTDKRDALEIARRLLLGDIDRNAKTYYATDEEYGRRKLVRARQNLVRMRQQVINQIRSLLNSYKISGFPGRLTSKKNLTKLSELEMNTKELTVVLKAFLSQLVSFTESIEALDKQIKNLAQETLPRSLQEISGIGPLTALILVNELGDVRRFKNSRAVACYAGLVPRISQSADTAHHGSLTKRGNRELRHILGEWAVRLLSSDKRVSDWARSRLKRSHKNKVRMALARRLIVGVYKTLLTGDEFSLERCLS

SEQ ID NO: 261153 - protein, 394 aa, unidentified
MRFVGIDIAAETHVVAVVDESSALVVKPTPFGEDAAGYATLRALLGAPEDLLVAMEATGHYWQNLFAVLVAEGFAVALLNPMRTRRFAGEDLARAKTDAIDAVGIARFAAQKRPAVTRLPAAATQELRELVRLRDRLRQEFGDRTRQLHRLVDLGFPEFTRVIPDLKGRLATGLLAAYPTARAFAGVSVVRLAALRADGTHRVGAALARALLAAARDSVGQHHGPAYQLQVRYLCEDLELLRRRIEALEQDLETMLQAHEVGMLLTTITGIGVQTAARLVGELGDPARFRSAAALAAYVGVVPGTRESGKRRLTHARLAPTGHARLRAALWMPTLVAVRTNPWLRAYYARLRARGKLPKVALIAALHKLLFAVYSVAKHRRPFVPHLTVQGVQA

SEQ ID NO: 261154 - protein, 465 aa, unidentified
MRRINAKQEEKLSKGKVSNQLPKLNVDAAGIDVGSEEHWVAVPEDCAEHPVRSFKCFTADLQAMVQWLKECKIKTVAMESTGVYWIPIFQILDRAGFEVKLVNARHVKNAPGRKTDISDCQWLQRLHTYGLLNGSFRPSDQVCVLRSYWRHRDNLLRYASAHVLHMQKALTEMNIQLHKVITDITGMTGMRIIRAILAGERDPRVLANMKDYRIQSSVHDIVKSLEGNYRQEHLFVLKQAVDLYDYYHQQIEACDRQLEVCLSQFDSKVNVQSQPVPPAKAKGRKRRCNEPRIDLHTHLYRITGIDFTQINGLDVLSVQTILTEVGLNPDAFPSEKHFASWLGLCPDNRITGGKIKSSRTRKVVNRAANAFRLAANTMHRSASALGGYYRRMRAKLGAPKAITATAHKLARIFYRLWKTGKAYNDPGADYYEEKYKERVLNNIKAKAKQLGYEIALKPLAGSEVS

SEQ ID NO: 261155 - protein, 349 aa, unidentified
MSQNLNSAVAVIGIDIGKNSFHAVGLDDRGAIVLRQKWSRGQIEARLANMPPCLIGMEACVGAHHLSRKLKALGHDARLMPAKYVRPYSKGQKNDFRDAEAIAEAVQRPTMKFVATKTADQLDLQALHRVRERLVSQRTGIINQIRAFLLERGVAVRQGLRFLRAELPRILATPPDVLSARMVQVISDLAEDWRRLDHRIDDLSNQIAVLARQDAGCERLMSVPGIGPIISSAMVAAIGTGDAFSKGRDFAAWLGLVPKQISTGDRTILGKISKRGNRYLRVLFVQAAWVVLIKPMSWDRHGLKHWIEAAKKRLHRNVLAIALANKLARIAWGVLSGSRTFEVSKLQAA

SEQ ID NO: 261156 - protein, 346 aa, unidentified
MKHITTIGLDLAKQVFQMHGADAEGAPIVSRKLRRAEVLRFFEKQPTCLVGIEACGGAHYWAREIAALGHEVRLIPPAYVKPFLKRGKTDAADAEAISEAVTRKTMRFVPIKSAEQQAAAMVLKTRGLLVRQQTQAINALRSHLSELGIVAGIGTAKIAGLIEIVRDDTDARLPNAARFSLSAVADQIEALKEQVDKFEREIVAEAKRDEDMRRLATIPGVSAITAATIKALVPDPGGFKSGRHFAAWLGLTPKSHSSGGKERLGGISKMGNPELRCLLVLGATTVLRYARGNDKAPKWLAALLARRPFKVVAVALANKMARIIWALLNKGGTYRGLTEASCVASA

SEQ ID NO: 261157 - protein, 368 aa, unidentified
MIVIGVDAHKRTHTLVALDAGTGASRGEVTIQATDDGALNALRFAGGIDPERVWAVEDCRHVTSRLERALLGAGQRVIRVPPSLTGESRKASRTAGKSDPIDARAVALAALREGVENLPIAFLDEQAHEIRVLCDYRDQLMNERSRLINRLRWHLVRIAPHLEAQLGPEALKGPRVRARLARQLGQLPASPELRVAKAQLRRINEITKEQKELFAELTDLIQAHTPQLLEQPRIGTVTAAIIIGRTAGAKRFRSEACFARHTGTAPIPASSGKKVRHRLHRGGDRQLNRAIHIIALGRMAGDPETRAYIERRVSEGKTKREALRCLKRHIARQIWHLLYNHQPTAPAPPQPPRQRVTASAPGLMPCTR

SEQ ID NO: 261158 - protein, 433 aa, unidentified
MNSLYYSSIIGIDVAACFSIATTLKPDGSVYQKNMRINHDLTGFKKILFFIQKVEEEFNSNPVIFLESTGIYHLTLLHFLLDHHVDARLLNPLITNSNKNSNIRKAKTDKLDSYKIATLCKTTSVKRSIVPSKEFWHLKTLVREYHRINEEAAKYKTRFTNAIYVSYPGLNRTFSDIAGNSAMVFFQEYPTPKALLTAHSEDVITLLRKASKRGEVWAVRKYNLIVKVAQEATQIGVNHDLFEHHVQTFISFYTFHKEHVIKLEKKILEYITNASFAHKFNHELDLLLSFPGIGKMTAITLLCEMNDFDNFSKANQLVAFFGVDPGVNQSGNFVGDKNKMSKRGTALGRKVLYSVALSSVRKSKNGKAVNQVLYDYYHQTLKAKKKKVRLVAIMNKLLRYIFSIFKNDKPYVMRHPKLHKRMFLETNKTASVA

SEQ ID NO: 261159 - protein, 340 aa, unidentified
MKATKKNYLGIDVSKLWFDVSLLVVIDHVKQPMLTERFDNSVTGMKAFKTWLKSQGVSYDQNSLLVIENTGVYHRLIWSFCSKHNLQLHIGNAAHIKWSLGITRGKNDVIDSQRLCLYCCKQSDELKTTPVLNPVFMKLKDLMTSRSRLVVQLHSTKNYLKEIQCTDDKALLSLLDKAHKAAIEGIKKSIIQIEMMIEQIIQQDPGIYSNYELIKSVPGIGHLTAVYIICCTNNFASKISGKQLGSYAGVVPFANTSGTSIKGKNRVHKMANKELKRMLHLCALTAIKYYPEFRQYFDRKKAEGKNGMLVLNAIKNKLVLRVVAVVNKQQPYVDNTKIAA

SEQ ID NO: 261160 - protein, 414 aa, unidentified
MERVYERCAALDVHKAQVTACVHVPDRQGKRAELRAEFSTMTAELLALRDWLKGLGVTHVAMEATGVYWKPVYYLLEDDFELLLVNAQHVKNVPGRKTDVQDAQWLCQLLEHGLVRSSYVPPKPIRELRDLTRYRKSLVWERAREANRLHKVLEDANIKLDCVASRPFGASGKAMLKELCEGNNDPVALADLAKGKLRAKLPALHQALEGRFRDHHALLVGHLLAHIEYLDQTIAELSEEIEERMRPFEHKRELLCTIPGVAERTAEVIIAELGPDMERFPTHRHAASWAAICPGHHESAGKRHSGRTRKGDSWLRTALIEAAQSAAGRTKDTYLNSQYLRVKRRRGHKKAIVAVAHSILVAAYYILRDQVTYEELGGDYFVRREDQDRLTRRLVRQLERLGQHVTLEPALEAR

SEQ ID NO: 261161 - protein, 387 aa, unidentified
MPQPNDLSRSLVALDQDSTLITVVEMSQSSWLVGGMLPGIERQPRKKLEPSPERLLALLHRWRDEAVKAGRNITRIALAFEAGRDGFWLARWLEARGVEAHVIHPSSVAVSRKHRRAKTDRLDTALLKRAFLGWLRGERGHCSMARIPTIAEEDAKRPNRERECLVRERTRIVNRIKGTLARLGIRDFRPTLRKSAERLATLHTPEGSLLPPNVSAELHRDLARLGFVVSQIKEIEKARQKQLEQHPETGPHAMVRLLARVVGVGIETADMLVHEVLSRPLGDRKAVARYAGLTGSPDESGAKRREQGLARAGNARVRRGMIQLAWRFLLFQKQSALAQWYRARTGDSRKGTRKTMIVALARKLLIALWRFVTTGETLEGVILRPAG

SEQ ID NO: 261162 - protein, 334 aa, unidentified
MNNVSLIGIDLGKNSFHVHCQDATGRALNRKKFTRTKLFEFLAHSPSTTVVMEACAGAHYMARKISELGHTPKLISPQFVRPFVKSNKNDFVDAEAICEAASRPSMRFVAPRTESQQEILALHRVRESLVRDKVKTTNQMHAFLLEFGISMPKGLAMLRRLSVVLAENNLPPYLEKLLMKLQSHYLYLVEQIHDIEHELELAAKQDDTTQRLMSIPSVGPITASILMANLGNGQQYKRSRDFAAATGLVPKQFSTGGRPTLLGISKRGNKNLRRLLVQCARVFILHLEHQSGYLAEWVKNQLSKKHSCVVACALANKLARIAWAITTKQSTYMA

SEQ ID NO: 261163 - protein, 414 aa, unidentified
MQVVYPRCCGLDVHKKSVTACVLVLDQQGQRSVRKKQFETHRQGLQRLVLWLYACKVGPVAMESTGVYWKPVWNALEKHFHLILANPYQVKCIPSEKTDPGNAQWLADLLAHGLIRPSFVPPREIRELRDLTRHRVKLVQERNRVHNRIHKLLEDASIKLDTVASNILGTSGRAIIEAIMAGEERPDWLADKAQGTLRTKRNQLRLALRGQVTDHHRWMLQRLMEEWKFIENQILCLEQHLAVAMQPYQPAIDRLGSIPGVDMITAWTLIAELGPDMRVFADSQHAASWAGLCPSNCESAGKQLSHSTRKGNRWIRRALCQSAWAISHKKDCHLTAYFYRKARAGVRQAIVATAHKILIVAYHVLKDGTLYHELGGNHFDQLHPERARNRLTRRLEQLGWEVSLQPKTTSAPDS

SEQ ID NO: 261164 - protein, 376 aa, unidentified
MITCFIGIDAHTTNYTLSTAIDAEDKPFNTCKYAPKLTYILKYANALCKKYNLKKEDILLGYEAGCIGFKLQRDLNENGFNCVVMAPSTIPGTAINRRKKTKNDIRDAEAIAKALRNDDYSSVATPDEEDEAIREFIRAREDVRMELKRCKQHIMAFCNRHGQHYEETGWTQKHMKWLNNLAFSQPVLKETLNSLLLEYEYLTEKLEEKDRRIEEFAQMDKYRESVHKLTCFKGIKTLTALAVIVEIGDFARFMKAKNFVAYLGLSVGEQSSGNDHNQTGITKQGNRFIRKLLTEAAQCFSRATSKKSKELKKRQEGNVEEVIAYADKANERLRKRYHHLVIHNMKSPNKAKCAITRELACFIWGMMTDNIHTVLV

SEQ ID NO: 261165 - protein, 341 aa, unidentified
MNATLIAVDLAKDVFELACANRNWHIVDRKRLNRKQFHRFCAQHPPVEFVIESCGTAHFWARELQAMGHCVRLLPAQYVRAYVRRSKTDRNDAAAIVEAARNREIRSVAIKSVEQQCIQTLHRVRSQWMATRTARINALRGLLRELGHPLPLGAANALKGARACFDQLPLTIQPAVSALLDEIHDLQDRAAGIEASLKQHAKQSDTVQHLLTVPGIGLLTATALSASAGEAEHFHNGRHLAAWLGLTPKEYSSGNHRYLGRISKRGDGYVRMLLVHGARAVLNRAKLLARAAKPLSKLQQWVVTLERRVGHNKAAVALANKLARIAWAVWKHNTAYIAAYP

SEQ ID NO: 261166 - protein, 352 aa, unidentified
MYIGVDTHKKEHVLVAIDEQGRRGGTHHSPNTPEGWAQSVAWARAQGSACRWGIENSGSLGKGFAQFLLAQGETAVHEVSPHRTAQYRRRGRTQDKTDETDALAIARLMLAEGEQLPHVQRDDRSTELRLLSDHRDNLLVERTRLINQLHSQMLQIDPSYKEKSGRLTAESGVIYCRDLTIADAGDLIQTRLLIVQQLAAQIVRLNADIAAVTADLERRVQESETPLLTLRGVGTIVAARVIGELGTTPRISSAPALAALAGIAPVAVSSGGRGGYRLNRGGNRQLNRAIHIIALAQRRCDPRAQAYYAKKRAEGKSARAAMRCLKRRLVDVLYRLLPREPAGMALTAAPAA

SEQ ID NO: 261167 - protein, 348 aa, unidentified
MVVGVDTHKAFHVAAVIDSVGGLLGSTTVPATAAGYAQLVAWARSFGRLERAGVEGTGSYGAGLARHIAERGIAVIEVNRPDKSTRRRRGKTDAIDAESAARAVLSGYAHGTAKSADGPVEMLRMFKLAKDSAMKSRTQAINQLRAVLVNTEPSLRESLSGLGTTRLVQRCARLLPGDGGDALAASKYTLRLLARRIQNLTAEIEDLQREIHRVVTAHRPQLLEGYGLGPDTAATLLITAGDNPDRLRSEASFASLCGVCPVEASSGNTSRRRLSRGGDRRANAAIYRIALSRLRWDQRTQSYLQRRIAEGKTKREALRCLKRDIARELYPLLLGQPNTGPERLPEAA

SEQ ID NO: 261168 - protein, 482 aa, unidentified
MAKRRKSTYERLQSSSPNRQQRKKLQRQFDADSAELVVVHANAAGVDVGNASHFVSVPPERDQTPVREFGSWTADLRRTAEWLKSCGITTVVMQSTGVYWIAIYDLLEQAGFDVYLVNARGTKNLPGRKSDVQECQWLRKLHTYGLLRKSFRPPEQIREVRTLWRLRGRVLEDSSRAVQHIQKALTTMNVQLANAISDVSGVTGMAIVRAILQGQRDPHELAKLRDPRIQASEEEIAHSLEGNWQRDVLFELQQVVDAYDFHRQQLATIDTELQKYLTALPTREPVGEASADVSKLSAKLRKKLKANRKSKDNRPAFDLGAELTRLMGVDLRLIDGIDVMTVQTIYSEVGADLSDWPTEDHFASWLELAPRNNITGGKVIKKQKRPSNNRVTTALRNAAETLVRSDSYLGARYRHFTGRLVGLKGVKAMARYLACLVYRLLTKGPAWVDRGAAYYENKRRDRELVGLHRKAAAAGMKLVPIT

SEQ ID NO: 261169 - protein, 525 aa, unidentified
MMWATMTNGSDHRWPDGKRLVLLAALLHKRPLRKSGAPMLCCMTANTQPAPRRRRRRPPGNKKQRPGRDSRSRHFSFGSAHHEAAAQPGLLRAVPRQIHPPIHSEGVMFLAKATLYVGTDISERVNRTRFYDGAGNEVGGRVESHNDLPGSSDLAEQALCRADLSGAKEILWGLEATNLFWWHLATFLTTHPKLLASGLRCYTFNPRQVKKFKESYPDIGKDDWTDAMVIADRLRFGRLPAECYLDERYQPLQRLTRYRRHLVTQLVREKNVALGYVYLKLSAYSLERPLSDTFGATSQELLEGYLTPDEIAAAPIDELASLVKEYGRGRVADPEEVAKVVVQAARRSYRLSASMVEPVNLILSSSLTTIRTLKAQLGPIEKAIAAELCATPPQTLATIPGLGPVFTAGIVSEIGDVGRFEREGSLAKFAGLTWRRHQSGEFEGEDRPLTKTGNAYLRYYMVEAANSVRLSCPEFGSYYHKKFREATRHKHRRALVLTARKLVRLVHSMLRSGRIYQPAGARESR

SEQ ID NO: 261170 - protein, 343 aa, unidentified
MKTITTIGLDIAKSVFQVHGIDAAGDVVIRQQLKRARILPFFKKLPACIVGIEACASSHHWARELTALGHTVKLMPPAYVKPYVKRQKNDASDAEAICEAVQRPSMRFVPIKAPQQQAALVLHRTRHLFVRQMTAVINALRAHLAEFGIAAPVGRNGVEELVAVIEDRNDKRIPDLVRTCLTALRIQLDTLKQQIRILDRRLLVWHRANETCRRLDAIPGVGPALATALVASVADPKAFRSGRDFSAWIGLVPKQNSSGGKERLGNITKAGDRYLRSLFCAGALAVIRYAQKHGTKHRPWLTTLLERRPTKVAAIALANKLARMAWAMMAKGESYKEPMALAR

SEQ ID NO: 261171 - protein, 373 aa, unidentified
MYQRTFIGMDVHARSVKICAITPETGEVQRASLAMDHHGVRDWIVAHGGEISTLRAVYEAGPTGYGLARTLTAAGIQCVVAAPSRLIRPSGDRVKTDARDAEHLARLLSLGQVTEVRVPGPEEEAARDLVRLREDARMDLMRSRHRLSKLLLRHDLLYTGGKAWTADHRAWLEAISFEIPALQMTLYESIEMVDTVIERRDRLDTQIELMATTSSYAPVVTALECLRGVGTLTAFGLAVEIGDWTRFTGNSIGAYLGLVPSEHSSGQTRSQGPVTKTGNKHARRLLVEAAWHHARPYDESSATLRRRWDAATPETRAHAHRANQRLHRRWQAFEERKKRRCVANVAIARELAGWCWALAEPQQRHGQDTIMGS

SEQ ID NO: 261172 - protein, 467 aa, unidentified
MAARKQKQKRMSAQVVEDEDYQLRYEVAAGIDVAKESAVVCVRMPPAGGRKHRTSHLQTVPATVPAITELAAELKALGVQMVSMEATSDYWRIWFVVLEEAGLAVQLVSSSQARNLPGRPKTDKEDARWIARLTEMGMLRSSFVPPPQIRALRVYTRHIWDLTGDRTRYWQRLEKLLEDALCKLTSVVSKLAGHQTARAVIEAMIAGERDPQILAALGQGRMRNDKLPALAEALSGMRFGPQHAHAAASLLRSIDLLEAELRDLQERVTAHLAAIPGSWGVDSDGVTGPGAGRAADAAALPAAERLDEIPGLGREAAMALIAEIGLDMSRFPTPEALVSWAGLTPTARQSGPRSGRGKKGHGNTYAKRIAVLAAYAAANTDTFLGERFRRLSSRPGGGGRKKAGCAVGRSILIIVWHLLNDPAARYRDLGPDWHARHTDRSRKARNARRQLEALGYDVVITLREDAA

SEQ ID NO: 261173 - protein, 315 aa, unidentified
MVEISMICAGCDVSKTKLDIALYPGTAFLSVAYDAAGLKQLDAFLKKHRVARVGFEASGGYEWRLLAHLRRGPVAAARFQPGQIRHFAKSRLQWAKNDRLDAALIAAFTASIEELPPLPDARFDELNAEMTYLEQLEARIAVLKTMAETTILARLKRLHEHDIARLETRRKARIALIARQAAQDATLAHRLDLLVSIKGIGLRTALSLAIRLPELGSIGRGQIAALIGVAPYDDDSGGRRGRRHIRAGRTRLRKSLFMSAFTASQHNPDLRAHYPRMRAAGKHHLLAIVAVTRKLAILANAVIARGTPWTPVHTR

SEQ ID NO: 261174 - protein, 344 aa, unidentified
MDHIGIDLHKRESQICMETSDGELIERTIQTTRDRFAAVLGGRAPARILVEASTESEWVAQCLEALGHEVIVGDPNYAPMYPERRRRVKTNRRDARTLATACRLGAYRPAHRVSAEQRRIRQQLTVRDVLVRSRTRAIAMTGALVRGEGLRVRSGAAEQFLARLDALALPPGLTATLMSTRALLTTLDAEIRQADAAIEQIAVHDPVVARLISAPGIGPVTAAAFVATLDRADRFAGAHQVESYLGLVPSEDSSADYRRRGHITKAGDPRMRWLLVQAAWAVWHSKQTDAQPLRAWAQRIAHRRGRSVAVVALARRLAGILFAMWRDETPFEVARLRRRAMTAS

SEQ ID NO: 261175 - protein, 399 aa, unidentified
MLGNHDDVEVFIGVDVGKGEHHAVALDRAGKKLLDRALPNDEARIREILVELEHHGRLLVVVDQPATIGALPVAVAQAAGAVVGYLPGLAMRRIADLHPGESKTDARDAFIIADAARTMPHTLRSVQLSDVQLAELSMLCGFDDDLAKQATATSNRIRGLLTQIHPALERVLGPRLDHPAVLDLLRTWPTPEALRHAGRRRIANRLTKLAPRMGERLADDIIEALSRQTVTVVGTNAATIVLPQLAAMLAGLHESRLTVYAQVEALVEAHPLHQVLMSLPAVGIRTAARILTEVAGKDFPTAGHLASYAGLTPVTWRSGTSVRADRASRKGNKVLKRTLYLSAFAALKDPLSRAYYDRKRAEGKHHNQALIALARRRCDTLYAMLRDGTVYQAQTPTAA

SEQ ID NO: 261176 - protein, 320 aa, unidentified
MLSFCGIDVSKDRLDVMVLPDEYSSSVPNDPAGWAILVEQLRGFSITAIGIEASGGYERGAVRSLQAAGMPVRQVNPFKLRQFAKASGVLAKNDPLDARMIASFVGIMPTRPALRTTPAAEQLVEMLAVRRQLSAEKTAAENASRLLEDLMLQRLSRRRIARLAADIELLDKRLLEIVATDATLAHRYRLLTSMPGVGPVLACTLIALLPELGGMSRKQVAALVGVAPYAFESGTLKGRRSIWGGRANVRQVLYMAAMSASNWNPMLKLFHDRLKGAGKLPKVVIVAVMRKMITTLNAMVRDDIAWADRLSGRHSVTTAR

SEQ ID NO: 261177 - protein, 347 aa, unidentified
MTLYIGVDFHPHQQTVSYCNNEEGEVHQTSLIHNVEQVRRFYRQLPKAVVGIEASCTAAWFEQMLFDLGHELRVGNPTAIRARARSRHKSDKRDADLILDLLLKDEFPTLWRRSVQGQSVLEQLRFRHQLVKHRTQICNRLQALAHAAGLPKKGIQTKRARVALMEARLSETQSFQRDQLFELLDDLTERIKQVEQWLEEKAAGDTKVQLLLTHKGIGLLSALATVHTLGDVSRFPSSKEAVAYTGLDPLEQSSAGKVRYGSISKAGSSVLRHLLGQAMHVASRYDGELRSFYKRLASRRSKSIAKVAATRKLLVRLFIMLRDGIDYAEFKRRGATVGMPVLSHGLK

SEQ ID NO: 261178 - protein, 402 aa, unidentified
MNAVGIDVSKSKSVVAIMRPFGEIVSTPFEIKHTASDIHSLIELINSVEGESRIVMEHTGRYYEVLAHQLLEANLFVSAINPKLIKDFDNDSLRKVKSDKADAVKIARYALDKWQNLKQYNVMDELRNQLKTMNRQFGFYMKHKTAMKNNLIGILDQTYPGVNTYFDSPARSDGSQKWVDFASTYWHVDCVRKMSLNAFIDHYQNWCKRKKYNFSQSKAEEIYGKAKELVPVLPKDAITKLIIKQAVDQLNSASTTVESLRTLMNETASKLPEYPVVMAMKGVGTSLGPQLMAEIGNVSRFTHKSAITAFAGVDPGVNESGTYEQKSVPTSKRGSSDLRKTLFQVMDVLIKTHPQDDPVYQFLDKKRAQGKPYYVYMTAGANKFLRIYYGRVKEYLASLPES

SEQ ID NO: 261179 - protein, 330 aa, unidentified
MFITNGLKVQVTLNQNTLGIDIAKNKFDVALLKDGKYKTKSFDNKPSGFIALALWLEQRGADTARVCMEATGSYGDNLAKFLFGKGQIVHVVNPIRIKRYGESELIRNKNDQIDAKLIARFCEKHDLVAWQPDPPEIEHLRMLGRRREVLIDMRTQEFNRRGNPDDAVNDSIEKVIDFLNKEIEQISQSIKTHIDNTPDLKKKRDLLKTIPGVGDVVVEVILSEARGFDGFDRIQKVVAYMGLSPKQRDSGTSVKGKPSLCKIGSARMRKALYMPALSAVRSNPFVRALYLRLKEKSKNGMVIACACMKKLVHIMFGVLKNGKPFDPTYA

SEQ ID NO: 261180 - protein, 389 aa, unidentified
MIAGPAGRKPEKQIRTFGTMHHELKQLRDWLAERGCTLVTMESTGVYWKPVYAMLEDRFDLIVGNAQRIKNVPGRKTDVKDSEWICDLARHGLIAHSFVPPRAIRELRDLTRYRRKLVQAASGERNRLIKLLESAGIKLAGVVSDVFGVSGEAMVRALIDADQSPAEMARLARGRMRRKLPELEHALHGDIGEHQRFILGLQLGRIKAAEDDLAALEERIEEKLVPYEDALLRLLGIPGVERATAACVIAEIGDDMSQFHGAAHLASWAGLCPGNHESAGRKRGGKARRGNVFLKAALVTAAVAAGKARGTYYAEKYRRLCARRGKLRAAVAIGHKILVAIYHMLTDGTLHEDPGAGYLDSLDRHRTSNQLIRRLNSMGFDVVLTPRAA

SEQ ID NO: 261181 - protein, 334 aa, unidentified
MRQVSQVGVDVDSEKLVCMMQRVGQRMLLPTFANTAAGHKKFIRWATKRARPARVCLEATGIYSLQFALALHDAKNVEVMVVNPRAIKDFARACMQRAKTDAVDAGGILEYLERMPFTAWQPPAPEILQLQAINRRIVQLQTELTREKNRGHASEFAGASGDAVANDIEINIRHLERRIERMHDSGLQLVHGVPALATKLAHLVSAKGIGEASAMRLLAEVLVLPVDLAAPQWVAHAGLDPRPYESGTSIHRPRRITKVGNRHLRAALYMPALVAIQHEPNVKAFYNKLVAAGKKPMQAVVAVMRKLLHAIWGMLKHDQDFDGNKFFRLAEKTA

SEQ ID NO: 261182 - protein, 354 aa, unidentified
MIIIGADYHPGFQQIAFVDSDSGEFQERRLQHREEAEKFYRELAAQRMEVRVGMEASGHARWFERLLAELQIELWIGDAAEIRTRRVRKQKTDRQDAQLILKLMLKNDFPQIWVPSWENRDLRQLLWHRHRMVQARTRIMNQLQAVALNEGLRCKKRLWRKHGRQQLESFRLAPWASRRRRDLLELLDRLNPTIAELSQAIEQEAEKFPEARCLMTHPGVGALTALAFVLIIGRADRFQCGKQIASYLGLVPLEDSSGNRRRLGHITKQGSSMLRFLLVEAAQVTARNLPEWRSKYFHLAMRRGRKIAKVAMARRLAVALYWMWRKGWDYERVKKFGSHAGQLEPGHGVQSNTE

SEQ ID NO: 261183 - protein, 403 aa, unidentified
MNSVGIDISKGRSTIAVMRPFGEVVISPFEVRHTGSELSKLAKQLKSLDGETRVVMEATGNYHASVAKLLHDAGLYVSVVNAKLVHDYGNNELRRVKTDRKDAVKLANYGLDRWLTLPRYIPEEDTRLLLKNCYRQYRQYSKVQTVLKNNLISLLDTVFPNANRLFSSPIRGDGSEKWVDFVAEFWHCRCVSEKSERAFTSKYLRWCRKHGYNFREAKAHTIYAEASGHIGVMPKFETTKLLVEQAVAQLRATSTALAALKHEMQSLASQLPEYPVVMDLFGVGPTLGPQLIAEIGDVRRFYSKKALVAYAGLDAPPNDSGDVTGRHKSMSKIGASSLRRTLFLVMSVYLQTAPLDEPVYQFMDRKRAEGKPYRVYMMASANKFLRIYYATVKAYLESLEHTA

SEQ ID NO: 261184 - protein, 438 aa, unidentified
MTVMHERVAGIGVHKKMIKVAIRSPGDKPWTRKAQVLTFRTFYGVLREMARELRRRGVTHVAMEASGIYTDPVYYALLEEDFTEVLVVSPAHARALKGHKTDAKDCARLAELLGCGLLQGSYIPAPELKEVRDLTRYRIKKVQARTSEIQRLDKTLESAGIKLGSVASGITGKGPVAMIEALIDGERRGKVMADLARGRARAAGKLADLSMALEGRFTGHHALVCRLILDQIQGLDAAAGDLDQRIAGLAAAWQREIDLLKTIPGFGDVVAWTWIAEIGPAPHQWSGSQEKPASWVSLVPGNYISAGKRKHSRTGDAGTYIKPVLVQAAWAAIRARGRLQARCNRLVRRFGGPKNPAAKKKAIVAIAHTLLKIAYKVLKSGTPYQDLGEDLYTRRETPAQRQAWLERQIQKLHPGCTVTITIGPPPGHAPEAALTAGA

SEQ ID NO: 261185 - protein, 434 aa, unidentified
MEEITDEPLYRDRVCGVDLGKAGLVATIRVPSDANPARRAAETRSFGTTRREVLALADWLRCWQVPAVVMESTGDYWKGPFYRLEAEGFDCVLADAKQVRHLPGRPKRDPSDSRWLAACFERGAVTACFVAAPEFRVIRLHTRYRRDLTEERTREKQRAEKLLESAAIKLSSVVTDLHGVTGRDIMDHLIAGETSPKVLAQFARARARRKITELEQALEGAEFFTAEHAALLKVMLARIDQLNTQIARLTEVIEQLLAPHEEQLQQAGSMPGWGRRSAQDALAETGPDMSRFPTPSHLASWAGRTPLDNSSGKRTGKAKSKKGNRYLAAVTGETAVAAGKTQTREGARYRRLSRRRGKAKAQVALGNTQLKVYHALLSHPGTRYQDLGPDYYQRQAGTRRQIAHHVGKLAALGFEVTLARLPEPDPTGADNQAA

SEQ ID NO: 261186 - protein, 397 aa, unidentified
MLYLGIDIGKNNHVASLIDEKGKIVFKAFSFSNTTDGGESLLCKLNNFIPSVNDIEIGMEATGHYWLSIYSFLVEKGFVIHVVNPIQTDGWRKGTEIRKRKTDIIDSVLIAELIRYGDFLETSLADENTMSLRNLSRFRNYLISSIGDLKRKTICVLDQVFPEYQSVFSDIFGQTSKEILLNFSSPGDFENISSDQLQNALSEITLKKFATNKINQLSSMAKRSFGVTFCLDSFALQLKLLIEQINFIENQVKDIEQQISNLLDKINSTITTIPGIGKVTAATILGEIGDISRFSTPSKLVAYAGIDASVSQSGEYHSTNNKMSKRGSPYLRKALFNAALVASNCDPIFKAFYQKKRAEGKHHLTAVGAVARKLCYTIHAILKNNSSYEVRLPDSDQ

SEQ ID NO: 261187 - protein, 394 aa, unidentified
MILVGIDIGKNQHTFSIIDKNTGEILSNPSFFPNNREGFLFLIKKLNTYSKSDLLIGMEDTGHYHFALLKHLLDSRYTVALINPTTTDLTRKLQGGITKNDPLDSLTICDVIGSNQRNKPYRITKVNRFDLYEQKQLTRHHHNLKEELNTYKNRLQKCIDIVFPEFNSLFRSKYGIVYMNVLKTFSSAEKIANSDIRTIRKCFEYNKRGKRISLSAEQLKAAAKTSIGMPSVAEEIQIRHLVCQIEMIEEQLSEIDKKIEEFSLQNNSPILSIPGISHFSGTSILAELGDICNYTKAAQIIKFAGVAPYHYESSQFNAQHTAITKKGSRYLRKTLYQIIFPVIYHNKVFNVYYNKKLAEGKGHRCAQGHCVRKLLRIIYHLLSTGQIFDPALLR

SEQ ID NO: 261188 - protein, 309 aa, unidentified
MATRSYVGIDVSKDRLDVAVLGEERGWQVDNTQAGIAKLVPQMQELQPELIVVEATGGYQRAVVEGLFQAGLPVAVVNPARVRQFARACGLLAKTDKLDARVLAVFGQRVQPRRYEGKSEAEKQLSALLVRRKQVEEMLKAEQNRLRTTSASLKNSVEQVLVCLKEQKKHLDKQIQQFLSEQKAWQEQSEILRSAPGVGPVTTATLLAELPELGKMDRKKIAALVGVAPMNYDSGRKRGYRKTKGGRGEVRSVLYMATLVATRRNPVIRTQYQHLLKRGKEKKVALTACMRKFLTILNAMQRDQQPFRI

SEQ ID NO: 261189 - protein, 344 aa, unidentified
MTIVTLGIDLGKNLNSVVGLDAQERVVLRRRVRRATLSELADKLQPCTVAMEACCGAHHVGRLFAAKGHEVRLMSPEYVRPYVRAQKNDDNDAAGIAEAATRPSMRFVELKSQDRLDLQTLHRARSRLVAARKTLVNQLRAILLERGHTFRQGREILEREIDPFLAEPPADLSARMLRLVGDMRTEWQSLNERIDALNDDLKEHARADEAANRLTSIPGIGVLGATALVAAVGDGEAFRRARDVPAWLGLVPKQMTTGGKPRLLRITKRGNVYLRMLLIYGARAALPSLSKQATPLGEWLRGLLSRAHRNVVIVALAAKLARIAWATLRRGVRFHPQMGAAAMT

SEQ ID NO: 261190 - protein, 395 aa, unidentified
MPPRNETAAPAGLEDSTLYVSIEVSRTSWVVGLKGPSGSRIGLHTLGPSDVDGLAALIARHRARGARSVGGSVRVLCCYEAGYEGFWLARRLGRERSLEVVVLDPASLPVDRRAKQRKTDRIDARKMVRALVAYDRGETTALRRVRVPSVAEEDRRRLLRERRCLVKERTALCNRMGGLLKLHGIFDLPPRAPGFVARLAGARTGYGAPLPRFARRELERLAGRLALVERQLAAVEAERDAVARSGEAVSPAHAPEGSAARAAARIATLVRLKGIGANDATLLAHEVLWRDFRNRRELAGWVGLAAAPWASGKVRRDQGIGRDGPGWIRAQLVQMAWRWLRYQPDSALARWFEKRTAGGDARTRRIMITALARRLLIALWRFAETGLVPQGARLA

SEQ ID NO: 261191 - protein, 346 aa, unidentified
MKITTIGIDLAKALFQIHGVDEHGKVVLRTQLKRKDMAKYFANLEPCLIGMEACGSAHYWARKLEGYGHTIKLMAPQFVKPYVKTNKNDIADAEAICEAVSRPNMRYVSVKTVEQQAILSVHRARQGFVKARTAQSNQIRGLLSEFGIVIPQGIRSIMNQMPEILEDGENGLPGMMRTLLERLMENLKEMNRQVEELEKQIVLWHRENEASRRLAEISGIGPITVSAIVATVGKAKEFKSGRQLAAWMGLVPRQHSSGGKQNLLGISKRGDTYLRTLLIHGARAVIRFAVNKAKPESWLRKLMTRRNKNVAAVALANKNARIVWALLANNQTFHPDHIPATIVAKM

SEQ ID NO: 261192 - protein, 421 aa, unidentified
MDRGIKPPHTLLPVSCIPAWKGGIIYICRMYYVGIDIGKRMHELTAIDEKGNIVSKSIRFGNDRVGFEKLLSFVSAVSPEKQSVQFALESTGHYWLVLYHFLTNAGFTVLVLNPLQTEGQRRSHIRKTKTDKKDSLIIAKLLRLGDIHISYVPSADIFHLRDLVRFRFGLSDSLGDLKRKVISILDKVFPEYEKLFSNIFIKTSKTMLQENWSLSELASMDLSKLTAVLKKESHGHFGLEKAQEIQSLATTSVGLSFLQEASKIELSCLMQHISFIEKQLIVVDMHIVDLYQKGTFNKHLLTIPGINKLLAAGIVSEIGDIARFTSETAIVAFSGLDPSVYQSGEYQGTISHVSKRGSAHLRRYLWLATETARKKNPDLETYFKKKLSQGKQYNVAYGATVRKLLIRVYTVLKENRPYVIR

SEQ ID NO: 261193 - protein, 411 aa, unidentified
MEVIYKRCCGLDVHKEIVVACLLIREGGKVLKEIRTFLTMTMDLVVLHDWLKAHQVTHVAMESTGIYWRPVFNLLEEDFTVLLVNAGHIKTVPGRKTDVKDCEWIADLLSHGLLKGSFIPPEPIRDLRDLTRYRKSLTDERVREVNRLQKFLEAANIKLSSVATDVMGVSGRAMLEALTAGSTDPQVLSELAKGRLRKKLPELKKALEGRFRSHHRFMVAEILTHLDFLDEAIERVSQEVSSRLVPFSKMVELMDLVPGINQRVAEGVLSEMGADMSCFPSHGHAASWAGLCPGNNESAGKRKSGKTRKGNQWLRRYLIEASWAAVKKRGTYLSALYYRLVPRRGKKKAIVAVAHAILVMIYHILKDQVPYHELGSHYFNKLNAAYVQRHHVKRLESLGFKVILEPLSEAA

SEQ ID NO: 261194 - protein, 390 aa, unidentified
MILVGIDVAKDKHDCCIINSDGEFPEEVFSILNNREGYETLYKRICSLAVDLAKVKVGLESTGHYSSNLLAFLLDKHLTAYVINPLRVNLFRKGQSLRRTKTDKIDSRNIAHLLMTDSSLKPYSLSSYHMEELKSLTRYRAFIVRERTKLKTSIARLVTILFPELEQLVSSIHIHSIYAMLEEFPGSAYIATAHLTRLTALLLKASRGRFGRETAIRIRDTAKRSIGAVSPAKSMELQHTIAHLRVYDQEIGEIESEIEKIMDDVNSPITSVPGIGMQMGAVILAEIGSFRRFDSPDKILAYAGMSPSMYQSGKLTGSYSRMEKRGSRYLRYALFNVTRYVCHYDPGFTAYLSKKRKEGKHYYVAISHAVKRLVRVLYAMEISGNRYKTA

SEQ ID NO: 261195 - protein, 358 aa, unidentified
MIGNTDIIIANVGVDIGKNAFHICAMNAKGTIVLRERLTRTALPKRLANILPCLIGMEACAGAHHVGRKLASLGHDVRLMPAKYVKPFLKGHKNDYRDAEAIAEAVQRPTMRFVPFKSDEQLDLQALHRVRSRLVGQRTAVINQIRAFLLEHGVPVRQGPGALRQALPSILAQRTDTLSSRIIRLIEGLIDDWRRFDQRIADVTSEVEQLAKQSENCKGLMSVPGIGPITASAMVAAIGDGSAFSKGRDFAAWLGLVPKQISTGDRTILGGISRRGNSYLRTLFIQGARSVLQRFEGWEKKSFGRWLIAASKRLHKNVLAVALANKLARIAWSVLYNARGYDATYANSGMTTVAASQK

SEQ ID NO: 261196 - protein, 353 aa, unidentified
MKPWHYIGLDVHCQFTSLAAMTQSGRITKRWQGPTTIPDLGEALGAVPRPRKVILEEGALADWLLRNLQAHADEVVVCEPRRNALIAKDSDKDDPIDAEKLADLMRGGYIKVVHHPESQDRAIFKQHVALYHQTVRHRVREANRSIAYLRRWGIFVSEAKLVMPKSRQDVLGRLPEDATVRADFDTMLALYDVASEQEHKMRQRLLAQARQNGLIKRWQEIPGVGWIRGATFFVFLDTPWRFKTKAKLWRYMGIGLESQHSGVGPKMVHVCQKANRYLKAAILGAARSATCTEEATTNPFAEQYWRWVTQGISPRNARRNLARSLAATLWSMWKTGDVYRPELVGRDPSEPRS

SEQ ID NO: 261197 - protein, 417 aa, unidentified
MWNKVTRVKCPVDPASNKYAGGIIMICVGIDVAKDKHDCFILSSEGEVLADVFTIPNNAEGFDTLLQTIHRCACPEDKIKVGLEATGHYSYNILGFLLDKGLHTFVINPLHTNLYRKSLSLRKTKTDRVDARTIAAMLMSDVDLKSYTDTAYHNEELKSLTRYRFDKVKERAKLKQSVSRLVTILFPELEKLVPTLHMASVYALLSEFPGAKQIARAHLTHLKALLNDASKGRYGRDMATELRDAARCSVGSVMPAKSLELQHTIRLIRELNTEIEDIESAIQTIMEEMQSPITTIPGIGIRMGAMILAEIGDFSRFDSPDKILAYAGMSPSTYQSGQLSLSGAYSHMEKRGSRYLRYALYNATKYVCLWDPTFEAYLAKKRAEGKHYNVALSHAAKKLVRLIYAMEKSRQPYNSVA

SEQ ID NO: 261198 - protein, 341 aa, unidentified
MMIIGCDFHPRFQQIAFIDQETGEYGELRLSHPEEADRFYRSLAGRQVRIGAEATGNFRWFRQLMEELGHEFLLGDATQIRASNPRKQKTDKRDARHIFKLLVEDRFPAVWQPPMENEDLRQLLLHRCRLVRMRTRIKNQLDSMAKNEGLLGSRAWSAKRRKAIEALPLSGWYVERRKDLLALWDQLDRQIAPLDEAVGEAAENNPEARLLMTHPGVGPIVSLAYVLTIGDWRRFPRGKQVGSYLGLIPVEESSGQKRRLGKVSKQGNTLLRWLLVEAAVHAQRHDASWHRQYVRLSMTKHHGVAKVAIAHKLAVRLYWMLRSAQDYEQVRERGSHVGQSV

SEQ ID NO: 261199 - protein, 344 aa, unidentified
MLIIGCDFHSSFQQIAIFDNQTGEIEEKKLLHPAEAMEFYRGLNGPVLVGMEAGVPCQWFRRLLEKCGHEFWVGDAARIRAAEPRKQKTDRRDAELILKLLIEGRFPRIWLPTEEERDVRQLLMDRHHRMRARTKVKNQLQSLALNQGMQKGRKLWSESGMQALRELPMMEHAGRRRDQLLRTVCDLDQQIAELDVLVRRQAEGRDDARRLMTHPGVGPQTALAMVLTLGDVSRFDCSKQVGSYLGLIPGEYSSGNKQRLGHISKQGSSLMRFLLVEAGQTAVRGDEPLRRAYARLAAKKSRAVAKVMVARRLAVRLYWMLRKDWTYTELARHAGEPGSFCGAQ

SEQ ID NO: 261200 - protein, 364 aa, unidentified
MEEPTHIGLDVHKETIAVAVLRPGTVECDERVIPNTPEALRRLLSRYPDGAALRTCYEAGPTGYDTQRLITSLGISCDVIAPSLIPRRSGVRVKTDRADARNLARLHRAGELVAVRVPTPAEEALRDLVRAREDLKNDRRIARQRIRSFLLRYGKRYPAPGSRWSFRFEVWLRALRFSEPASQAAFEHLLGAYFMRDSQLGAVDKQIAELALAEPLAGAVARLRAFRGIDTLTAVTLLTETCDFRRFGSAGSFMAFTGLVPSEHSSGQSRHQGSITKTGNAHLRRVLVEAAWAYRYAPAVRGKLRARQIGQPLEVVAYSWAAQCRLHGTYRRLAAKKGPNKAVVAVARELSGFVWGAMSDRMAV

SEQ ID NO: 261201 - protein, 357 aa, unidentified
MIAMKYYTSTTQFNCGIDLHARQMYVCVLDRDGKKLVHTNIKNNDFAYFLKLVAPYRHDLTVCAECMFGWYWLADACADAGIHFVLAHALYLKAIHGGKNKNDRIDSEKLAHLLRTNFIPPGHVYPAEKRPLRALLRQRLLYVWNRSELLARIQSHQLAHNRPTCRQHVYNREPWAEQLLRAEPDPLRQFALQNDLALIGHYDTQLATLEKELLKLTKQTASRDFTLLQTAPGIGDYLGLTILHEIGDIARFPTVKDFLSYCRLVKGTVASAGKIKGLRGAKLGNPYLRWAFGEAAVVAKRDPLVIGPLAQRLEARLNNKFKANTVLAIKLARAVYFMLKQKTVFDPDRLVAALSRN

SEQ ID NO: 261202 - protein, 465 aa, unidentified
MMGIDPDAGGFECALVEGGSERPKCRRFSVSTRGLEEFVRWVAEEEPQIVAVEGIHGQSEPIEKALRKAGVVFYSLVPRRVEKYRKAVLGENKNNRLDAEAVAGYALSLREQGRLERWRGVWEPDGELRLLSRRHESVGKQINGETNRLWKVLRAASGDLYLALGGGGQEAEGAPGMLENKGILTLISNEPQLGGWKELSEDALMAAMGGGEYRGRRQLLRNLRPAMERVPAISESMQAVIRGIAGHLVGLRQEQGQIEGLLERLGEDRPSVLALDRRPGIGRLTACTIVAEIIDIRRFPAEKNLASYSGLGRVEFKTGNQERERQACGYNRRLKDALMTAARNVVRFDPESHLAGYQRWLLKRGMEPCEVTKRVARALVRVIYRELKALVEPDRRTTPAGAAPRRAGAAKERGARKPRPSHGRQPSRSLRGSGALTPAKGRSRRTAHPATGLTTGRRAQLKESS

SEQ ID NO: 261203 - protein, 420 aa, unidentified
MKAWNQITHYAGFDWAKDHHDVIVLDSSGKIVADFRFEHTAGGWEQFREKLAAFAGVAVAIETKFGTVIERLQEIDCCIFPVHPQSAKAYRQRKVPSGNKTDHVDAWSLADALRLDGANWKQLAPQEPLIKELRLLCRDEVALIRDRTALITQLRQTLYDYYPAALEAFDDWTMPAAWAFILAFPTPEALVKAGKRKWEKFLHVHKLGRPETYQRRLEIFARADRFAGSPPAIHAKSRLAVTRAKQLQLLQTQINEYRQEIRRLFAQHPDAALFESLPGAGDKIAPRLLSEIGDDRVLFPDAQGLQCLAGTAPVSFQSGQIHRVHLRRQCNKSLRNVVHLWANLSREFCPWAETYYKALRAKGKSHACALRALGQRWLKIVWKMWQTRTLYDADLHTRNQIKHGSWVLQLVNKADASPKT

SEQ ID NO: 261204 - protein, 403 aa, unidentified
MNNVAGIDVSKGKSMVSVLRPFGEVVAKPFSIGHTGSELKELADYLKSLDGETRVVMEHTGRYYEPVARFLHEEGVFVSAVNPKLIKDYGNNTLRKVKTDKADARKIARYGLDNWAELRQHTPMDTIRMQLKTLNRQQSLYAKTKTMMKNNLIALLDQTYPGVNALFDSPVREDGSQKWVDFATAFWHVDCVRNMSLTAFAERYRKWCKRHGYNFSQSKAVEVHAGAQDLIAMLPRDALTKTMVRQAIDALNAISASMERLKAEMQALAAQLPEYPVVMAMHGVGDSLGPQLMAELGDVTRFTHRNAITAFAGVDPGADQSGTHEAKSTRVSKSGPPELRRALFLVMDCLLKTQPQDDPVYRFMDKKRAEGKPYLVYMTAGANKFLRIYYGRVKEYLASLEEN

SEQ ID NO: 261205 - protein, 342 aa, unidentified
MEHTTIAVDLAKSVFQVAVSHRPGRVDEERRLSRDRFLECFAQRAPATILLEACGSAHDWARQLQPFGHVVRLLPPHDVRPYVRRNKTDRTDAKGLLEANRNEDIHPVPVKTIEHQAIASLHRLRSTWLATRTARLNTIRGLLREFGIFIPVGAHHVVARVRTRLLESTTVPVLLHTTLAAACDEIDVLEADMRAVERQLGALAAEMADVTLLQTVPGVGLITATALIALVADIRRFPSGRHFASFLGLTPKEDSSALRRRLGAIRKHGDVYVRMLLTHGARSFLWHAKAARQPTALPQWALSVEQRRGHNVATVAVANKLARIVWAVWTQPRPFVTDHRQP

SEQ ID NO: 261206 - protein, 411 aa, unidentified
MSYKIAGIDVHKKVLMVVVIDATTPEEKPERRRFATLPSDLHRLLIWLREQGVEEAVMESTAQYWRSVWLELEPHMRLHLAQAFSNRAPRGRKHDFKDAERLVRRLIANELILSFVPGGEQRTWRNMTRMKLQLTRDRVRLQNQMECLLEEMRIKLSIVVSNLLGASGIRMLRALAKGETDPKQLAQLGDERLQCTEEQLVDALTGRAQPLHREMLALQLERLQLIDTQIAKLNGMIAQAMKPHQEAVMRLAEVPGLGVDSAQQIIAEVGEQASTFPSAAELTSWVGTCPGKDESAEQNHSSRSAKGNKYLRRVLNQAAHAAVKRKGSYFQVVFRRLLPRLGYQSAIWAVAHRLCRVVWKILHEGVRFIEHGIEPDPKAKMRHARRLAQALRKLGYQVTITPTNLASGMQM

SEQ ID NO: 261207 - protein, 379 aa, unidentified
MYRILKIGMDVHTTNYTLCALESKFGQSDAVLANITVSPELRNVVDFIKRIKQKMDPYGRDEIDVECGYEAGCLGYSLYHALTGCKVKCTILAPTTMSVEKGPRIKTDKRDARNIADCLSTGKYSAVHIPTEQDNAIKEYIRMRDDHVIALKKIKQQMNALCIRSGFIYDGNKWTEKHLRWLCGLNLPELVRETLNEYLVTYSEQTAKIERYDKRIAELASQSEYQENVRRLECFLGIKTNTAMSLIVETGDFTRFAKGNLYASYLGLTPGEHTSSENGGKLGITKAGNKHLRTMLIEAAGTICKGTVGYKSKNLRARQDGNMPEVIAYADKANMRLRGKYYRLIRHGKKRNIAVTAVARELACFVWGMMTDNISKTAV

SEQ ID NO: 261208 - protein, 344 aa, unidentified
MITLGVDTHKDLHVAVTLDALGRRLGIASFPTDDAHHADLWQWVAGFGQLTQAGVEGTGSYGYRLAQFLTGRGITVFEVNRPDRAARRRRGKSDPVDAENAARAVLSGDATATPKTRTGPAGQLRALLVARRSATKSRTQAELQLRSLILELDDDQRAQLDRRRTDHLAAACATLTGADGISLALASLARRWQFLDTEVRANTAQVEAIVRQTAPRLLNQPGIGPITAAQLLATAGDNPDRLSGEAAFAALCGVSPVEHSSGKTQRHRLNLGGDRAANSALWTIANNRLMYDPRTREYAARRTALGSSRKEILRLLKRYIARQVFTEIRRALTPPKINQAQNLT

SEQ ID NO: 261209 - protein, 317 aa, unidentified
MTKLETARIANSPAALRAVIARAGENPQVVVEATYGWYWAADVLEAAGAEVHLAHPLGVKAFSYRRVKNDERDCADLADLLRLGRLPEAWIAPPPVRALREITRYRHKLVGQRTSCKDQVHAVLAKCGIPVTHSDIFGRGGGIWLDGLPLPQPYAGKIASLRALIGVLDSEIARLEEQAAAMLAGDRGYAAIRQLPGIGPVLGAVITAEIGDITRFRTPGQLASWAGLTPRHYESDTKVIRGHVSKQGSRMLRWAVTEAIQRQPAGTRPQQVKDAIITRRGPEARSIAKTAAARQLLTLVFYALRDGHIRRATSQAA

SEQ ID NO: 261210 - protein, 313 aa, unidentified
MAQMIPNVGIDVCKERLDVALYPQGSRFSVSNDAAGWRELCRRLRPIGARAIGVEASGGYERGVIGALLEAELPVRSVNAWKLRQFGKAMGTLAKNDRLDAQVIARFVATLPTRPAERDPEREHVAELVSARRQIVDLRQELGNQLEHLRDAELRRVQERRIRQLDRDLARLDARIVDAIAAAPVLARRYRLLCSMRGVGPVLAATLVAFVPELGTISNRAVGALVGVVPYDFDSGKMKGLRCIFGGRAAVRRVLFMAAQVAAMHNPVLQAFKQRLRAGGKKPKVVIVAVMRKMITILNAMLRDGQEWEAAVG

SEQ ID NO: 261211 - protein, 348 aa, unidentified
MEILAMDLGKSNTVICFYDSDSAKHKFGKVKTAPQQIHDLIAEHSPDRVVFEMGSATGWIYDIAMASGVEVQVANANHHAWRWKNVKKKNDRADALKLAQLSAMNQLPLVHVPKRSIRQKRSLIRYRQNLVKRRTQIKNNIRAILDKEGCSMPQGKSGWSKGTLEELRKMALPIDKCDVDNLWRGQLYVELELLESMGSCIRKIETCLDGQGKTDKQIQRLQTATGIGPRLAEAVVAFLDEPNRFKNGKQVGSYVGLTPRQYQSGEMNHQGKISGQGNKLLRALLVEVSWLGLRHNPWMLKTYERMLRGSVSRKKIAITAVARKLLVRCWAMMRDEQDWRDEKAKQVA

SEQ ID NO: 261212 - protein, 327 aa, unidentified
MLDTATGRTRAHLAAPADGAGYGQMLDWASQHASGRRVWALEGTGSFAAGLADALAEAGEDVVEVGALKRSRGAKNDRLDAVRAARSAMARDHQASPRARGLREAIRALTATRHAVLISRTKAINELKSLIIVAPEHLRASLRGRPLARQLDRIGAMTTSAGATVEHRITTLTLQSITARIRFLTAQLAELDPELAQLVRQHPAGPALLAEPGVGPVVAAQMLISWSHPGRVRDEAAFACLAGVAPLEASSGQQTRHRLSRGGDRALNRALHTIAITRMRCHPETRSYEARRTAQGKTHRDVRRCIKRAIARRLYRIMESAARQPAT

SEQ ID NO: 261213 - protein, 443 aa, unidentified
MARKNQKRFEIVHHDCAGIDVGSREHWVAVNPDRSDPPVRKFLTFTDDLIALADWLESLKIKVVAMEATGVYWIPLFEVLDARGFEVYLVNSRATRQTSGRKSDVLDCQWIWQLMTHGLLSGAFRPADEICSMRSLVRQRANKVADQAKTINRMQKALSQMNIQLANVISDITGVTGMKILQAINQGERDPHALAALRDRRIKADHATITRSLHGNWRVEHLHALRQELACYDFLETQIAECDMAIAQALERLPVRQEEVPAACKALRNTHRSAVQQTALHQALGRVMGVDLTAIPTIGVDTALVLASELGPDLSRFPSSQHFCSWLGVAPPTRISGGKPLPGRAPKVINRAAQALKQSASNARNDKSFIGASHRARLSRMDTGCAIKATAHQLARLIYAMLTKGQPYVEQGLEAYEEKSRSRQLRALERKARKLGMQLVMAG

SEQ ID NO: 261214 - protein, 338 aa, unidentified
MVVIGVDAHKRMHAAVAVDASGTILPEWKGPNTASGWHELCTWVTAFAVPRQWGLEGVWNDGRGLAQHLVASGEPLYEVNPRWTAQRRRRARKQGKSDRLHAHAVAQLVREESATLPQVAPDDETVVLDLLTTEREAALAEATRLRNHLHQLLLQTFPDYTDHLPSLTSDAGLQAAETFQRTTPSPLQQQRAAAIRRTAERLRLTLQQAEALAEEIRQLAAVHFAPLTQLCGVQLLTAGALAGILGPGARFKSEAQLAMYAGVAVVERASAGVIRHRLNRGGNRRLNAILYRIALAPARGSNDAGAYLARRRAEGKRWREAMRALKRHLIRAMWRLWQ

SEQ ID NO: 261215 - protein, 365 aa, unidentified
MFNETVVGLDVHADSIVAAILPPKSDTPEVVKLSGELMQVRRLFRRLSAEGPVRSCYEASGAGFVLHRLLSYDGFACEVIAPSLIPRKPGDHRKTDRLDAIMLARLYRSGHLTPVHVPDEDHEALRRLLRLRETYHAYCTATMHRISGILRNHGHVFKEGKSTWTKKHRRWLGELRQSLQGPLQTALGAELQHFEYLETEQASFDAELERYAALPQYRKAVEALCCLRGVKTLTALTLLVEIGDVRRFRSPRSLMAYFGLVPSEYSSGNREYRGSITKAGNAHVRRLMVEAAWNNRHNAAAALVLKRRRQGQPPEIVAIAMKAQLRLVNKFLRLDKRKHRHVAITAVARELCGFVWAILMALPEH

SEQ ID NO: 261216 - protein, 420 aa, unidentified
MEEVTEEPAELVERVAALDIGKASLVCCVRVPHESRPGARRQEVRTCDTVTPALLELRDWLICQGVTRVVMEATSAYWKPPFYLLEDDIECWVVNARDVKNVPGRPKTDKIDSIWLCKLAERGMLRPSFIPARPQRQLRDLTRYRRTLTQERSREKQRAEKLLEDAQVKLSSVISDIFGVSGRDMLAALIAGQRDPYALADLARKSMRAKISVLRRALTGHFTDHHAFLLGMMLDRVDALTGQIDALTTRIEEAIAPLAAQVAQLDEIPGIGVTTAQEIIAEIGTDMTRFPTPGHLVSWAKFAPKARQSAGRSKAATTGQGNPWLGGTIGEAATSAARTSTFLAGRYKRIVKRRGKKRALVAVGNSILTICWHLLSDPSAHFTDLGPDWHDRLAPQRRKHQLIAELERLSGKKVTLNDAA

SEQ ID NO: 261217 - protein, 444 aa, unidentified
MARKSKKQRLKIVHPRCAGIDIGSREHWVAVDPEHCEEPVRCFTSFTDDLQALADWLKSLAVDVVAMEATGVYWIPLYEVLDAQGFDVYLVNSRATRQVSGRKSDVLDCQWIWQLMSHGLLSGAFRPGDEVCALRAFVRQRAETVEAHSRCVAHMQKALTQMNVQLDNVVSDLMGKTGMAILRRIVAGERDPQQLATLRDRRLRADEATVARSLHGNWREEHVFALTQALAQYDFLGEQLSACDRMIKQALKRLPKLSEEAPEPVKLLRSKLRTHAQQNSLHQALHAVMGVDLCAIPTLGVDTVLVLAGEIGADLSRFPTEKQFCAWLALAPPTHISGGKHLRGRKPKVFNRAGQALRQAAANARRSDSFIGASHRARLARMDTAKAIKATAHQLARLIYAMLTKGQPYVEKGIKAYEARSQDRQLRALQRKASKLGMTLTAAA

SEQ ID NO: 261218 - protein, 317 aa, unidentified
MTAVGIDVAKKTLAVLVLLADGRQRQKHCANSPAGHAELVKWLGRYAPGRVPVGLEATGGYQEAVAIRLHDAGYAVSVINPQAIAAYSQSQLRRAKTDPTDAALIAHYVLTQAPALWTPPPPELRQLQALVRRLDALIEMRTQELNRLELAAPVVQASIRETVAHFEQQIAQVKAQIATHIDQHPTLRAQRDLMQSIPGIGELTAAIVLGELLNLQRFSSARQMAAYTGLVPQIRQSGTSLRGRGSLSKLGASRLRKSLYYPALTALRHNPPLMRFGARLRAAGKPNLVIIAAVMRKLIHQIFGVLRSGRPFDPARA

SEQ ID NO: 261219 - protein, 356 aa, unidentified
MNNVSRLDFTGQQIYVGMDVHKKSWSISIFTDQFEHKTFSQPPEVEVLVNYLKRNFPGAAYKSVYEAGFSGFWIHDRLQEQGVQCVVTNPADVPTKDKERATKTDRIDCRKLARSLRNGEIEGIYVPARPKVEDRSLLRTRGSMVKKQTRCKNQIKSVLSFYGIDIPEDFANGYWSNRFIIWIESVRMERASGNLAFKAHLDELKHIRSIIADLNRGIRALAKMEEYRENVRILQTVPGVSLLTAMTLLTELYDINRFKTLDKLCSYVGLIPNTKSSGETDYKTGMTGRRNAQLRVILIESAWTAVRKDPALMMAFTELCKNMPKTKAIVRIARKLLNRIRYVLKNQQEYVPAVVR

SEQ ID NO: 261220 - protein, 306 aa, unidentified
MVNVGVDVGKASLDIVIHEKGLYWRENNTEHGIQRVLKRLSHYRVERLVMEATGRYEFELAHAAYGKGLPVCIAKPLSVRRYAGAVEQLAKTDKIDAAIIAEYAAVVQPRVTPQKSKNLIAIKNLVVRRRQLINLRTQEMNRLKVMGKTFEVSCRRMIRALDSEVERMEKRLANHVAQQAEWTERHTLLNSAPGVGNTLIYTLLADLPELGTLNNKEISALVGVAPINRDSGKQRGKRRVQGGRAAIRTVLYMATLSAIQCNPVIKAFYRKLLAQGKHKKVAITACMRKFIAILNTMVKNNTEWAY

SEQ ID NO: 261221 - protein, 387 aa, unidentified
MSQPNDLSRCLVSLEQDTTLVAVIELSQSSWLVAGTVPGIERQPLKKILPDEAALLRLLHRWRDEAIGKSRAITRIAVAFEAGRDGFWLARWLAKRGIETHVIHSSSVAVSREHKRAKTDRLDTAMLTRVFLGWLRGERGHCTMVAVPTIEQEDAKRPSRERESLTGERTRLINRMKSALARLGVRGFKPELRNAPQLVDALRTPEGIPIPPNTLAELRRDLARLATLREQIKDIEQARLRHLEDMPQSGPNAMVRLLASVIGVGVETACLLVQEVFSRDLRDRRAVARYAGLTGAPDESGSKRREKGLTKAGNARVRGGMVQLAWRFLRFQRDSALAEWFRSRTEGANGARKTKMIVALARKLLIALWRMVATGEVPHGVVLRPAA

SEQ ID NO: 261222 - protein, 315 aa, unidentified
MRSTVAQSVGVDISKDTLDVAIHPGGESFRITNNPKGHRALIKRLKGFDIARIVFEATGAYHRLFQQAMVEVGLPWVKVNPCQARRFAQATGKLAKTDRCDALMLARMGAVLDLEPRAPASKTVEALKELVNARDALIKDRVAALNRQAIAVSPLIKRQLAQRLRQIDGQIEAIDRRLKTLRNADSDLCQRFDILTSIPGIGEVTANVLVVETPELGRLEHAQAASLVGLAPVPRDSGQTHGKRSIRGGRPRARQALYMPALNAIRLNPEFKAKYEAMVKAGKPAKVAIVAIMRKLLILANALIRDQRKWAPANP

SEQ ID NO: 261223 - protein, 353 aa, unidentified
MNSLTDLREMVDVVIGVDTHVHTHSAAVLDTATGGVLDEITVEATPAGYAELVEFANGYPSLRAWAIEGTGGHGAGLCRQLLESSEIVIELDRPKRIARRNGAKSDPLDAIRAAREAMARPRLGSPRSGGERQALSVLLAARRSAINASTEAQQQVFSLVIAAPDPIRARFRGQKLATMLNTAANLRLRSSWDIETTSTVVALRTLARRAHAMLKEARELQKQIVTIIRSWRPDLLEEFGVGPIVAATVLCAWSHPGRIHSEAAFAMLAGVAPIPANSGQVTNRYRLNRYGDRQLNNALHTVVQSRIQYQQATRDYIARRTAEGKTSREIKRCLARYVARDLYRLLENGPAAA

SEQ ID NO: 261224 - protein, 464 aa, unidentified
MDVLYSHVAGIDVHKKQVTVTARTPDPRRPVRREKTRTFRTFYADLLAMGSWLVELEVTRVAMESTGPYWWPVYAALREVGGPGLSIDVVNAAHVKAVPGRKTDIKDSQWLAQLLEVGLLRGSFLPPDDIREIRDLTRYQTKLTEERSREKQRLLKVLEAAGIKLDVVASDTFGVSGRAMLDALVAGERDPHVLAGLARGVLRNKTDNLRLALAGRFTTHHGQMIGFHLTRLDQLDQVIGQVKEQIGDTGIAGTSRRAATGPSGLVAPFAEQIRLLSSIPGIGERVATVIISEIGVDMSRFPSAKHLAAWAGLAPGNNESGGRRRRARHRKGNTHVQSILIEAALAASRTRTRLGARFHRLHRRFGGKANNTAGKKAAFAVAHTLIKVVWTVLSTATLYTDLGHDYYTRRVNPESHARRLIAQLEALSGKKIILVDHDDGPSDGPGDNSGGDIPDPGHNGEAAA

SEQ ID NO: 261225 - protein, 417 aa, unidentified
MTANSLMQRRSAIKPDTLIVGIDVAKFNHVARTLVPGGAIGRPLEFANSRGGFAALTAEIEARKPTPASAVIVGLESTGIYWINLARWLAEQGYQVVQVSGLYVHHSKELADNSRGTSDGKDALLIADLVAQGKYLGFVRPAGVLADLRPLVGLHQRLVWERAARYNLLHQSVDLLFPEFVTVFREVTGPSARRVLRRFPAPAAALAHPPDEMRRLLSEDGRVRVSVAKLARLQTVAQQSIGTCEGTTGLEYALNDTLLELDSLDARVKQVEVEIDRLLAQVDETPILTSLVGRMTAAVILSETGGLRQYSCAAAVLKLAGLNLYQISSGQYCGDRHISQMGRPLLRQALYLAVLQHTHPGMPLYPYYAELLRRGKPKPVALIALCCRLVRLLYALVRDGRCYSAQPPERNQQNSAA

SEQ ID NO: 261226 - protein, 338 aa, unidentified
MAIVTLGIDLAKNVFALHGVDSAGRAVLVRPSVPRAKLLELVAVLPPCVIGMEACSGAHHWARLFAGHGHTVRLMAPKFVIPYRLSGKQGKNDAADAAAICEAVTRPNMRFVPIKSLDQQGELMVHRARQGFVAQRTATLNRIRGLLSEFGVVLPLKAATVRRQAMLQLEDLPGWANTVIGDLLSEVTRLDERIAQYDHHLKQIAKGSEAARALMQLPGVAETTATALVATIGRGQDFKCGRQLAAWLGLVPGQYSSGGKQRLGRITKAGDPYLRMLLILGARSVLQTASAKSDPVSRWAVQLAARVGYWKAIVAIAAKNARMCWAVLARGDQFKLPA

SEQ ID NO: 261227 - protein, 334 aa, unidentified
MVDGTKVFASDKEGSRKMSHPNMLCAGIDTGKRQLDVALAGRPERLRVDNSPAGHANLSAWLRRHRVTRVGIEASGGYEQAVVRQLRRNGFVVILFQPAQVRAYAMFRLQRAKNDRIDAALIAECTAATRRIHPPPDPRLAPLAERLTLVEQLGEDIACHKTRRETARDARIRCLWDAEIARLEGLLRRELQQLVAAIRAHRDLAVTLDLIESIDGIGLRTAVAILVRLPKIGRLSRAQVAALAGLAPYDDDSGERSGARHIDGGRKRLRKSVYTAALAAAFHWNAPLMAFYRRLTAAGKPHKVALVACARKLLIYANAVVQRGTPWLSGPAAA

SEQ ID NO: 261228 - protein, 459 aa, unidentified
MNGKRSKKASSEQPEWSLNLDVVHPNAAGIDIGNESHYVAVPPNRDPEPVRQFACFTEDLRRMAAWLKSCAIDTVAMQSTGVYWLPVYEMLTEEGLRVFLVNARHTKNLPGRKTDVQECQWLLQLHTFGLLNNSFRPPEEICVLRAYWRQRAQHVASASACIQRMQKVLTEMNVQLANVISDISGVTGMAILQAILKGERNRYQLAALADSRIQATREEIARSLEGNWRKELLFILQQEFNLYQTYQQQIAECDIALQAHLQTLEDKIEPDSQLPPAKANKKARGNAPTGFDLRGELYRISGVDLTQIDGINIMCAQTIIAEVGADMTRFPSEAHFASFLGLCPDNQITGGKVFRRGTRHVQNRAATALRMAATSLWRSKTYLGAKFRRLRARLGAPKAITAMAHMLARLVYRMLRYGEHYVDKGMKFYEDKYRQHQIRSIERTAKDLGFTLTFTPATA

SEQ ID NO: 261229 - protein, 343 aa, unidentified
MDYYAGIDVSLELSSVCIVNQDGKIFREVKVASDPEALIGLFGGLGVTLSRIGLEAGPLSQWLHAGLTAGGYDVVLLETRHVKAGLSAMTVKTDRKDARGIAHLLRMGWFRPVHCKTNSAQEIRVLLVGRKLLQSKMGDLEQGIRGLLRGFGLKVGVISKGRFAARIRELVAGQAMLETVAEPMLRARDALRAEFTLLHRQILAIVRRDDLCRRLMTVPGVGPLVALTFKSGIDDPSRFTSSKTVGAHFGLTPKKYQSGETDITGGITRTGDAMVRMALYEAAQVLLTRSQRFSSLKRWALEVAKRRGMKRAKVALARKLATVLHRMWIDGSDFRWGKEITSA

SEQ ID NO: 261230 - protein, 363 aa, unidentified
MNESTTVTVGLDVHARSIRLAAIRGDELLTERTLPYDEEAVERVLRQWPHVRCCYEAGPTGFGLYRYLVERGLDCEVVAPGLVPQRPGDRVKTDPRDARKLARLLAGGLLQPIHVPTRELEAARDLVRAREAARLDRMRDRHRLSKFCLRHGRLLPGSSWTVTRRRWLSEQRFAFAAEQLTFDTYLHAVDLVDLRIAALERSLREAAEEDSWRQLVARLRCLRGIDTLSALGLVTEIGDFSRFRTAEEFMAFVGLVPSEHSSGERRRQGSITKVGNAHVRRLLVEAAWHARRRPRVGYELHRRQRGQDAVVVERAWRCQQRLYSRWQRMAGRGKPSQKIVVACARELAGFIWAIATEQPLRSA

SEQ ID NO: 261231 - protein, 315 aa, unidentified
MMNAPVFVGIDVSQAQLDIALRPAGHFTAPNDDAGIAKVVDQLRAVTPTVVLLEATGGLELPLVGALAAAALPVVVVNPRQVRDFAKAAGQLAKTDALDAQILAHFAEAMRPAPRPLPDEQTHALAALLTRRRQLVEMLTAEKNRLASARKLVRTSLQAHITWLERELTRTDTDLAHAIRESPVWREKDELLRSAPGVGPVLTTTLLANLPELGTLTGKQIAALVGVAPLNRDSGTLRGKRTVWGGRAQIRAVLYMGALVAARYNPVIRAFYHRLCAAGKAKKVALTACMRKLLIILNAMLKHRTPWHANVAACA

SEQ ID NO: 261232 - protein, 342 aa, unidentified
MEEVTIIGIDLAKNVFQLHGAAADGRPVFRKKLTRLQFQRFMAAQPPRIVAMEACPGSHYWAREMAALGHTVKVISPQYVTPYVKRQKNDAADAEAIAEAATRPHMRFVEPKSAEQQARAVVFRVRQKAIAQRIELVNALRSHLYEFGYIAPVGLQHLPKLVAVLEDETSDLPGPARIACRGILRQIESLGGEIAALDAQIAELSKESRWARLLQTMPGVGPITAMAIEAFAPPMETFRRGRDFAAWLGLVPRQSSSGGKARLGKVSKAGQHDIRRLLVIGAMAAMVGACRRGIPEDTWLGKLMLRKPRILVAIALANKMARRIWAMLTKGESYRDPALAAV

SEQ ID NO: 261233 - protein, 459 aa, unidentified
MNNKPFRNPNRRKKSKKIQINDQWEKVNPDAAGIDIGSRENYVCVPVDRDAESVRRFGTTTPELEQMAQWLEKCAIKTVALEATGIYWIATFQILEKRGFKVALVNPRQIKNVTGRKSDVQDCQWIQKLHSFGLLGSSFRPTDPYCVARTYLRLRDDLVGNRSAQIQLMQKALHQMNVQLSHVLSDISGESGLAIIEAILSGQRDPVALAGLANKRVRSSKERIAQALVGDYRPEHVFALQTAYDMYMAYQLKIRQCNDRLASELDNLPDKVDPKLKPLPPRASKKQIDEGLRLGLYCKLGVDITAIEGIGVMVGLTMLTEVGSDLSAFKSEKNFSSWLGLCPDNRISGGKVLTTRTRRVINRLSNALRIAATTLEQSQSALGACYRRMKAKLGAAEAITAMAHKLARLLYRLIKHGEAYVRQGIEQYEEKNRQRKLTAVHKMAESLGLKILEPQAVSL

SEQ ID NO: 261234 - protein, 393 aa, unidentified
MKKVSGLVVVGVDPHKRINAVVVVDAHGQVVDRGTFANSTAGLGELAVFVRRFPNRTWAIEGCNGVGKHLSQRLVAGGERVVDVATRRSSLVRVFAGGNGRKSDDTDALSIAMVGLQSTDLPVVRPDDRATTLRLLAHRRAELVSTRTQAVCRLQRELLILLPGGTKRGLTAARAKTLLASVRPRDEVGRTRKAIAVDLLGDLIAADKKIKTITAQIKDVLASTDTTLTELFGVGAVSAAWLIGEVLDIARFTDAEHFASYNGTAPIEWGSGQGGPGPFILNRGGNRRINHALHMVAVSQIRHPGPGRGYYQRKIAEGKTKKEALRALKRRISDAVYRRLVADAQGVEERGPGGHLGATTKISAADPTPTVDSSIKPQPGPRPNATPASAKAS

SEQ ID NO: 261235 - protein, 373 aa, unidentified
MNAVGIDVSKGKSMVTILRPFGEIVSSPFEIKHTSSDIHSLIKLIHSIEGESRVVMEHTGRYYEALAHQLSAADLFVSAVNPKLVKDFNNDSLRKIKSDKADSVKIARYALDKWQSLEPYSITDELRAQLKVMNRQFHFYVKQKTAMKNNLIGLIDQTYPNANTYFNSPTRSDGSQKWVDFVSTYWHVDCIRKMSLNAFVEHYQNWCKRKKYAFNKSKAEEIYTKTKELVPVFPKNEITKHIIRQAVDQLNSTSVTVETIRTLMNETASKLPEYSIVMQFKGIGPSLGPQLMAEIGDVTRFTHKGALTAFAGVDPGVNESGSYAQKSVPTSKRGSSNLRKTLFQVMDVLIKTMPLVLCQEKVQIKYNQFSLFM

SEQ ID NO: 261236 - protein, 374 aa, unidentified
MQVVHDHCCGLDVHKKTVVACIMVTSPQGVVQKQVRTFSTMTADLLALADWLGASHVTHVAIESTGVFWKPVFNLLEADFAVILVNAQHIKTVPGRKTDVKDSEWIADLLRHGLLKASFIPPQPIRVLREMTRYRTSLIKERAQEVNRLQKTLEGANIKLAAVATDVLGKSGRDMIQALIDGETDAQVLADLARGVLRKKLPQLQEALLGRVQPHHRTLLAHILAHIDFLESTLEQLLADIEAQLTPYKEERELLTSIPGIADTTAAIIIAEIGVDMEVFPSDKHLASWAGLCPGNRQSGGKRLSGAITGGNPYLRSVLTESWPGLFPIPKTTTYLPNIIVWPDASDERRRLLLWRDPHSGHHLSCLTDQETVH

SEQ ID NO: 261237 - protein, 319 aa, unidentified
MFEGKVAAEPGALVSLIRKRAPQAARVGLETGATSPWLYHSLKKADLPVVLMDARHAHAALSMRPTKSDRSDARGLAEMLRMRWYRAVTAKSFTAHERMALLGARRHLVEIRVELDGQIRGLLKTFGLILGKGNTDALIRRAETLAEGNPVISSLVAKLAEVQRQVVAQIAALDRDIRHLVRSEPALKRFMTVPGVGPITALAFLSTIDDPERFKHARDVGPYLGLTPTRYQSGETDRHGRISKCGDAFTRTCLYEAANVLLTKVQQFSPLKAWGTRLVQRIGAKKARVVVARKIAVILRCIWVDGTEFWWTRQEAKMA

SEQ ID NO: 261238 - protein, 347 aa, unidentified
MLYAGLDLSRQRLDVHVLDEEGRTVEVTAATPEVFGLRELVARISRHGQEVSATIESMNGARFVHDQLELAGWDVEIADAVKVKGLAPLAAKTDKIDAWVLAELGRRDLVPAIWLPDPTVRAERERARFRLHLVRHRTALKNRIHATLIAFGHPVPVSDLFGVRGRELLASLAIPEPWATTLGTSLRLVDELDAEIAACERELRSRGADHPYVALLQTVPGIAWVLGYTIAAELGDIGRFSSPKKLAGYTGLCPLVRQSGRRDDRGPLAKNGPKYLRWALIEAATHAARHPAYRERYEHTKQRLGRQRGSKVARVELARELTTAIWHMLTKNESFAPGRPPARPLVA

SEQ ID NO: 261239 - protein, 341 aa, unidentified
MDNVTLIGIDLGKHSFHVHGQDRHGKALLRKKFGRKQLIEFLSKFPPCTIVMEACAGAHHMARQLAALGHEPKLISPQFVRPFVKSNKNDFIDAEAICEAACRPAMRFVTPKNEAQQTLAALHRVRDSLVHDRVKASNQIHGFLLEFGISLPIGHAAIRRLPVILAEQELPPKLVQVLERLQTHFKYLEAQIADIEKELTRQVTEDDLGQRLMTVPGIGPITASVLAAEVGDGKHYRCGRDFAASVGLVPRQYSTGGRNKLLGISKRGDKDLRRLLVQCARAYMLRLERQRGCLAQWVRSMLTRRHSNVVACALANKLARITWAIAAHHAQFEMKEAPLGR

SEQ ID NO: 261240 - protein, 353 aa, unidentified
MPIVAEKYQFVIGVDTHAASHSFAVIAPATTAVGQEAQFPATAAGLSRAVAWAGRHAGSPDVALVVVEGIGSYGAGVARAFTAAGYRIVEGGAQSAGDRRGTGKSDALDAVRIARSVIGTDTAQLREPRADGTRNALRILIISREMMTRERTATVNALTALVRTTDLGLDARKALTIGQLRVIAAWRTRTGDAIDVAVARAEATRLARHALELGTHAAANARQLDGLVRQVAPDLLDKRGVGPVTAAVLVVSWSHHGRVRSEAAFAALAGTCPIPASSGNTTRHRLNRGGDRRLNWAIHTIALGRMAHDPDTKAYIAKRVAEGKTKREAMRCLKRYLTRSLHRTLENSPAMAA

SEQ ID NO: 261241 - protein, 347 aa, unidentified
MKIIGCDYHPSYQQIAMVDTETGELLEGRLEHEHGEARRFYESLAGPVRVGMEAIGNSLWFERMLAELGHELWIGDAAQIRRLVVRQQKTDRRDARHILQLLQDERFPRIWVPSPEMRDVRQLLRHRQKLVEMRTQVKNQLQHLALNQGVRRKRRLWSREGRAVLEKLPLEGWTARRRSDLLEMLDRLEAQVEELDRAVRAEAEKRPEVRLLMTHPGVGPVVGLAYALTIGPAARFARGKRVASYLGLIPREHSSGGRQKLGAISKQGNTMMRTLLVEAGQNAARYDEELRRDYSRLKARKHSALAKVMVARKLAVRMYWMLRENKAYTPHPVAPVQGSPSHSVVAG

SEQ ID NO: 261242 - protein, 375 aa, unidentified
MKDVQKFVGLDVSKEMISVGVAEAGRGEPRFHGNVPNNPESVRKLMKKLGNPENLHVCYEAGSTGYGLVRLLLSMGIDCIVVAPTLIPRRAGDRVKTDRRDALRLAQLLRAGELTPVWTPDEDHEALRDLIRARHDVKEDLQRARQRLVHFLLRNDIRPPQGTRNWTVKHRNWLNTLKFEKPSLRIVFQEYLHAIKEIEDRMKRIEAEIHQEAIHSEHAPVIQALQTLRGIAEVTAVTLVAEIGQFSRFSSARQLMSYAGLVPKEYSSGFSRWQGSITKIGNAQIRRVLCESAWSYRHTPSVKGELLKRQEGQDPEVKRISWKAQNRLHKKFYRITSRGKSGKQAAVAVARELIGFIWAIGCYIEEKKLNEINVA

SEQ ID NO: 261243 - protein, 395 aa, unidentified
MFIVGIDIAKRSHEAIIIAEDGQVVRKAFSFRNNCTGYNLLLEQVRRLSLVKSQIVFAMESTAHYWLALYARLLKDGYAVMVLNPIQSHSLRELYIRKAKTDARDSLIIADLVRFGRCKVSNVPQDKILALRELCRSRAYLVDMAADLKRKLIALLDRIFPEYESLFDSVFSKASIAVLSKYSTPQKVKNANLRKLTDILMESSNGHFGEWKAHQLKEAACSSFGIDDSGGVYSTLLGMFLEQILSLTAQADSLEKQISVFFQEFNNPLTSIPGVGTVLAATILSEIGDITRFSSADKLLAYAGLDPSVKQSGEFKSNQNRMSKRGSPYLRRAIWLASTVAVHRDPMFQTYYEKKISEGLHYMNVIGHVSRKMTAVIFAVLRDGQPYQPILQSAG

SEQ ID NO: 261244 - protein, 343 aa, unidentified
MDYFAGLDVSVKDTSVCIVDGTGKIVREVKVASEPEALLPVLRDSAYRFKRIGLEAGPLSQWLFSALAEADLPVICVETRHMRAVLKAQINKTDRNDARGIAQMMRVGLYRPVHVKTLRSQKLRMLLTHRKLLQAKAIAVENDLRATLRNFGLKVGAVGTVKFEARVKELVDNFPDLLALVEPLLVVRRVLREQISILHRRVLAAVRNDEVCRRLMTVPGVGPVVALTYRATVDVPARFRKSKSVGAVFGLTPARDQSGESDRPGAISRCGDEMMRTTLYEAAQVMLLRSAKWSWLKAWAMKIARHRGMKKAIVALARRLAVIMHRIWIDGTEFRWTREAAAA

SEQ ID NO: 261245 - protein, 337 aa, unidentified
MTIIRIGLDTAKHVFQLHGVDASEAPVLRRQLRRSEVEKFFAKLPPTRIGLEACGASHHWARVLRGLGHDAVLLPPQYIKPYVKRGKNDAIDAAAICEAMSRPGMHFVPVKNAEQQAVLTLLRTRDLLIKQRTMLSNAMRGHAAEFGVIAAKGPVKLAELLQRAHAEDAGVPALALEMLRLLSDQIDSIAAKLKTIEERLLAWHKQDPVSQCLVTQPGIGPIGAVSFSLKVPDPRAFRSGRHFSAWLGLTPRENSTGGRHRPGRISRQGDEILRRLLVLGATARIRVAAAGKASPWLINLLARRPRKLAAVALANKMARTLWAMMVSGELYRQPAEV

SEQ ID NO: 261246 - protein, 352 aa, unidentified
MNQEKYIGMDVHAATISAAVKNAEGKLLMECVLETKAATILEFIQGLRGTLALTFEEGTLAAWLHDLLKPHVSRLVVCDPRKNALMRDGNQNDRVDARNLAELLRTNQVKAVYHGKHGTRALGRSYLTLTKDSTRVMNRIKSVYRSWAIPCAGTSVYSRRHRAEWLAKLVEPGVRIRAEHLYQQLDSLEPVRQAARGELLRESRKHAAVKLLRQIPAIGPIRSALLVALLQTPHRFRTKRQLWAYSGFAVQTYDSGEYRFVRGKLQRNRERITVRGLNHNHNHDLKNLLKGAAISAIERPGPLQDFYAALVEKGMRPSMARLTLARKIAAITLTMWKKGVSFDPQQLQRQAA

SEQ ID NO: 261247 - protein, 368 aa, unidentified
MKMNAIKAAPAASAIAIKNEKSAKAKRILIGTDVHLRGYQAARKVDNGVIGVVENFRSEEALLLHVEKQCERAEQVVVVYEAGPLGYTLYRKLTARGVLCYVCAPDSSEQKRKRRKNNKIDARNLTSKLFNYLNGDEGALQLARVPTEAQEQLRLASREHDQMVEERKRLGAKGNALLLSQGFGSWSNWWRPKAWAQLSSLVPEWLLERLKIWVDVLKMLDEKICLAKVALARACSGPRPKGVGALSQIQLQSEVLDWSLYTNRRKIACLAGMVPSEWSTGDTERRGSITKVGVPAIRRIIVEMVWRIVLFQPQYKPVQKWQKVLQGTNPALKKKAVVAIGRQLIVDLWRLQTGRVTAQELNLLMIGA

SEQ ID NO: 261248 - protein, 429 aa, unidentified
MEEVDEVELVVQRVAALDLGKATLEACMRVPHPSKPGRRMQEIRGYATTTAALLEMAIWLRQWGIERVVMESTSDYWKGVYYLLESEGFDCWLVNAREVKNVPGRAKTDRADAVWLAKVAERGMCRPSLVHPPPIRRLRDLTRYRRALVSDRSREMQRVEKLLEDAQIKISSVLSDIHGVSGRAMMEALIAGQRDPWSLARLAKGNARKKIDRLEEALRGFFTDHHATILQMMLDNIDRIGAQIAALDARIAEAIGPFSRQVAQLSDIAGVDTVAGAELVAEIGVDMARFPTAAHLVSWAKFCPQIHQSAGKSRSKGRGKGNPWLAGAVGRIVFSASRTDTFLGARYRRLARRRGKSKAIIAVGNSVLTIVYHLLSDADLDFCELGPAHYESRINKNRRARDLATQLQALTGQRIVIRDGKAVITDTAA

SEQ ID NO: 261249 - protein, 427 aa, unidentified
MNEIESNSIDRFRQFKKEIRGSKEHLIVGLDIAKRKHHGFLGDANGRTLLKGLIVENSAEGFRHLLTQVRFYMDREGLSEVVFGLEPTSVYHKPLAEHLIEQGHLVVYATNEAIKKNRSLIDGRWDKNDTKDSANVADLVAQGKCHYYDLPELRLRDLRILLLFRKRLKKQLHSCRVRIRNNLVAQYFPELDELWNTAEAENLAIVQWYLDPARIRQLSCEQFIAKVRTHNGGLRQQRRLRCIWEAAGTSIGCQPGPALALEAELVVDALKFVRQQLDRVERAIATLAEGFEEYSYLKTIPGFGPYVAAMTLASIGNPHRFENRAQLIRLAGLDLSANRSGEKSRSAVPVISKKGKADFRYALYQAALVASSLTTDFRAYYHRLLEGRQRESGIRTKMLVKIAAKMLVIAWTLMKRKEPFNPAYIQA

SEQ ID NO: 261250 - protein, 404 aa, unidentified
MLYAGLDWADDHHDVAIIDEAGRKLASKRVKHTKEGLDELILFLEGFTGPTHKEQIACIAETNRGLLIAALLEAGFSVYPVNPKVADRRRGASGAKTDQIDAYLLAKLGRAELVDLRQLRPDSPIIAELKELTRDQDALVHMQTRLVNQLTACLKAYDPVALELFTKLQQRSTLLFLQAFPTPEKAAAASVHQMEQVLKAAGHSTAHKVATRIHETLSQPHLTANAITTRTKSRLALALIAQLLPLLEQIAAYEKEIERLFLTHEDHALFESLPGAGKRLAPRLLAELGDDRSRYTDCTQIQALAGTAPVLYQSGNYLKAHRRHACLKPLRNTLYQFARTSRQQERWADEYYQRKRAEGKSHSVALRALSNVWVRIVYRMWVTSTCYDPAIFGAAQQAHAPRAA

SEQ ID NO: 261251 - protein, 335 aa, unidentified
MEFNHYIGVDVSKNTLDFAVNANGQIISQFKCENHKKGITQLIKQMRKLPGFKITKAVFCMEFTGIYNNYLVDYLLGAKSSIWMETALRIKQSQGMTRGKSDVIDAVRIADYAYTFRDKIRLWTPTREELKKLRLLITMRDRLVNSITRFKVSAKENQEFSSKEFQKLESRLTKNSITAMKKDLASVDQQIKELVKKDPHLNELFQLMTSVTGVGPVVAVNILVTTDEFKKFETPAQFACYSGVAPFEHTSGKSIRGRSRVSHLANKKIKTLLNLAARAAITAKGELREYYLRKVAQGKNKMSVLNAIRNKIIQRIFCVIKRGTPYQKNYLNPLA

SEQ ID NO: 261252 - protein, 412 aa, unidentified
MEAQYVLAGIDVHKKMLAVVVTNAGHLELQFECRRFGTTVSELRHLAAWLQEREVGEVVMESTAQYWRPVWLALEGQCRLHLAQARSNRGPRGRKTDFRDAQRAVSRLLSGDLVLSYVPEAEQRCWRTLTRTKYQLTRDKVRLQSQLESLLEECQIKLSSVVSDLLGASGQRILRAMAQGETDPGRLAELGDKRLRASESELKDALSGQPQVIHRKLLSLYLNRLDLIESQMASLDKMIAEAMRAHQDAIVRLAELPGLGIDSAQQIIAEIGPQASAFPSAAQLASWVGVCPGTQESAGVSSSDRSAKGNRSMRRLLNQLAHAAVRKEDCQLQIVFRRLSARLGYAKAVWAIAHRLCRLIWKVLHEGVSYVEYGPVPTPITLKRRRQRLVTQLKNLGYDVQLTPRISDTSTG

SEQ ID NO: 261253 - protein, 482 aa, unidentified
MPDGINCALPTLSTLRNVSCLQKSLDPKPPKGCHPERSESAKKKGMPRGKLYGSPEENHQEEVIPMQKRVYRGIPLAKFKIESILEEVSGRRVVFGVDVGKDVMAGTFMTETQKAAANIMWRNPWDTREVLRVLEALPASQVEVALEPSGTYGDPFRHQCVKRGIPVYRVSAKRSHDAAEVFDGVPSWHDVKSAGVIARLHLAGASHEWRERTEDEQELAAAVRVMVMHDSHAHNNMNRLEAMLSRHWPEITVHLGLGTMTLYRMLEVSGGPRWVCENSAEAVKQVQRWGGTFLSAESVKGAVASAKTTTGVPMIEAEESMVREMSAEILRCRKAARKMKNRVQRLVIDHPEARPMEKVIGVRATAAMVASGMNPIHYENSSSLVKALGLNLKERSSGKYKGQLKITKRGPGICRFYLYLAVLRLIQREPAFKKWYDAKVIRDGGKIKNKAIVALMRKLTSAMWYVARGDAFDPTKLIPAKR

SEQ ID NO: 261254 - protein, 288 aa, unidentified
MMIIGCDYHPGFQQIAYLNSDTGELHECRLGHKEEAEQFYHDLRTRGLPVRVGMEASGHARWFERLLAELQFELWIGDAAAVRSKRVRKQKTDRQDAQLLLQLLMENRFPRIWVPDAENRDLRQLLWHRHRLVQMRTRVMNQLHVVALNEGLRRKKALWRPAGRAELEGLLLAPWASRRRQDLLDLLDQLTPKILELTRRLEEVVEKRAVAAHLRTHPGVGPLTALAFELVIGTPERFQCAKQIASYVGLVPAEESSGDRRRLGHISKQGNALLRFLLVEAAQVTVRS

SEQ ID NO: 261255 - protein, 322 aa, unidentified
MHTLGIDVGKTELHACLLTSDSKTLRRRIENTDDGCATLVEWLVRKVGEPVHACMEATGGWEQRIAVHLHALGHSVSIVNPHRTSAYAQSEGARSKTDRADAARIARFCQSQRPSTWTPPSEAERALTDLVRRRADLEKMRVAEGNRLEAPIASLDVRHSIERSIAVLEDEIADVSCRIRGHIDEHDELKGQRELITSIPGIADATAEIILGELGDLMRFQSARQLAAYCGLVPCEWRSGTSVCRRPAISKRGNARLRAALFYPAMSAMRHNSVIRDLAERLRHAGKNGMQIVVAAMRKLLHLVFGVVKNNAPFDPAWGLTT

SEQ ID NO: 261256 - protein, 411 aa, unidentified
MDVVHKRCSGLDVHRDSVAACVALSAEGRVGRKEIRIFETTTRGLLAMSDWLAGHGVTHVAMESTGVFWKPVFNILESRFEVLLVNAFHIKQVPGRKTDVKDCEWIADLLRHGLLKASFVPDRPQRELRDLTRHRAQLVGEQTRVANRVHKILEDANIKLGSVVSDVLGKSGREMIQALLAGESSPAEMADLARGRMRDKREALTAALEGRMTEHHKFMLLMLWDHLLYIEKTIEMLDGRIEEMVRPFESEIRRLDGIPGVDRVVAQAMIAEIGTDMNRFATAAHLASWAGLCPGNYESAGKRKSGRILKGNRWLKRSLCQAAWAASHTKDTYASALYRRIAKRRGNKRAIVALGHTILVSAYYILLRSSEYKDLGGDYFDRLNPLRLRTYHVHRLENLGYQVQLTQTSPA

SEQ ID NO: 261257 - protein, 342 aa, unidentified
MKDMMIGVDLAKNVFQVHGALRTGEVQFRKKLTRKQFPAFMAKQEPCLVIFEACGSAHYWAREMETLGHEVKLIAPQYARPFVKRQKNDAADAEAIVIAARQPEMRFVELKTVEQQSRAAVFRGRERLVYQRTADVNALRALLYEHGHVFPAGIRYLDRMKALVEDAASELPGLIREECQDLVTQIAEKTARIIERTAKLKTLAAQSDRARRLQTMPGVGPLTAVAVEAFGPDMAQFKKGRDFAAWLGLVPRQHSTGGKARLGRMTKAGQADIRRLLIIGAMSRLNWLGQRTIMEGNWLSRMLARKPRMLVAIALANKMARQVWAMLTKNEDYKDPALAVAA

SEQ ID NO: 261258 - protein, 339 aa, unidentified
MTIQSNEIVQEQKSLSAGIDVGAEELILVIRKNGTPCKPQKFANTPADRARLVKKLVNLPGIIACLEATGVYHFDLSIALHDAGVALMVANPKSSHNFAKALMKNSKTDAVDAETLAQYAERMDFVAWARPSDEKIALRSFARRIDALTRQKAAAKNQLHALSASKENPKAVLRDVNLSISQLEKRIDSLGNDALVLIQKHADLERVFKLLTGIKGIAQTSAIALMGELLLLPAGLSHREWVKSAGLDPRAFDSGKSVHKKTRISKAGNRHIRSALYMPALSAKQHDPYVKAYFEHLVDNGKLPLQALCAVMRKLLHAIHGMLKHDKPFDNTRFYAIPA

SEQ ID NO: 261259 - protein, 397 aa, unidentified
MYIVGIDIAKRKHEAAVIDGEGTVIIKPFSFTNNCSGYNRLLAMLARAKLPLDEVSFAMEATGHYWLALFTRLQKEGFRVQVINPVQTNSIRSFYIRQAKTDPRDALLIAEVIRFGHFSESTLHPENIYELRELCRGRHAIVSMQADVKRKVVALLDQVFPEYETAFTNMFSDTSMAILQTCPTPKELSEMPLEELCHLIEVSSHKRFRMAKAQELQALARNSFGFAMAGDVFSTMIRLYAKHLDFLKQQVREMDRKIAEIMDTLDTPITTITGIGPTLGAYILSEIGDINRFSSSAKLAAYAGIDPTMRQSGEYNGVRNRMSKRGSPYLRHAIWLATSSAVLHDPALKLYFQKKRDEGKPYMASVGHACRKMVSIIYAVMRDNKAYTPYIPNEISA

SEQ ID NO: 261260 - protein, 366 aa, unidentified
MDTIYIGVDFHARQQTICYLKTETGELVTSELKHQDKEQVRAFYAHFSGRVIVGLEASGYSPWFEALLEELGCEVWLGHATEIRRRARWRQKNDRRDAELILDLMLHNEFPRLHRPAVQSREVLRMLRYRQKLIKIRTMSKNSLQALALQAGLAKGSSLFTKAGQQQLSTAEMSPVMHWQREHWLQLLQTLNQQLLETMVWFKTQSKGDVCIARLRTHPGIGLLTSLCIVHTLQPVNRFRNTRKVAAYAGFDPVERSSAERKCFLGISKAGSRLLRYLLVEAAQTAVRKDEDLKRFYKRLAERRGRPKAKVAAARKLLIRAYIMLRDEIDYAEFRRRAVAARLARRGQGPTNVPEVLIGQPASLAQ

SEQ ID NO: 261261 - protein, 318 aa, unidentified
MMDLERFIGIDVSKELLEIAILPEKETWSSRNDEAGVEALVKRLKGLSPSLIVLEATGGLETLVLASLTAAGLSVCVINPRQVRSFAKATGTLAKTDRIDANILAQFGQKLRPEPRALKDHELQQLGALTVRRHQLVTMLTAEKNRLGAAPKSVRRNIQAHITWLEQCLKEINKDLEQSIKATPLWCEKDALLRSVPGVGPVLSATLLTGLPELGTLNRKQIAALVGVAPLNRDSGQLRGKRGIWGGRALIRTTLYMATVVAVRCNPVIKVFYTRLIAAGKGVKVALTACMRKLLTILNAIIKNHKPWQQSFAATVDN

SEQ ID NO: 261262 - protein, 322 aa, unidentified
MKNVSLGIDVARLTFVAALWFGNGRFAKATFDNQVGGFRKLRRWLQAHNAGHVRCALESTNTYGEALAEWLYKEGHAVHILNPERTACYARSVGQRNKTDPVDAVMIARFISVHACTPWRPPAPEQKTLRSLTRTRHQLVEYSKQLRNQLKTADVTAQRYLQATLEAIRQQLGAIVRAIGQHLEAHPVLGEQVRRMMTLKGVGLVTAAVTLAELPPITPDTDPRAICAWAGLTPRRWQSGKTEWRTCLSRKGNVYLRQALYMPALVAKRHNPLLHAFAQQLAAKGKTSGAILGAISHKMLRILVGLLRTNTDFNPNYSLQKN

SEQ ID NO: 261263 - protein, 343 aa, unidentified
MDYFAGLDVSVKDTSVCVVDGTGKIVREVKVPSEPDTLLAVLTNPAYHFKRIGLEAGPLSQWLFSALAEADLPVVCVETRHMRAVLKAQINKTDRNDARGIAQMMRVGLYRPVHVKTLRSQKLRMLLTHRKLLQSKAIAIENDLRGTLRNFGLKVGIVGRTKFEARIEELVEDVPDLAALVEPLLIVRRVLREQMAVLHRRLLALVRDDEVCRRLMTVPGVGSVVALTYRATVDVPARFRRSKSVGAVFGLTCSKYQSGEIDRSGRISRCGDEMMRVMLYEAAQSMLRSKKWSWLKAWAMQVAGRCGMKKAIVALARRLAVIMHRIWVDGTEFRWTREAALAA

SEQ ID NO: 261264 - protein, 444 aa, unidentified
MMSRKHKTHLRGERGQAFADKIRGIASEQILCVSLDISKYFHLVMIHNALGEIVRPSFEIDIFRTGFEQLCQAVDQAIEQTQAQVVLVGMEPTGHYFENLARHLLARPQPVTLINSYAVKQNRQQQMMGREKTDPIDAAAIGDLLRRGEGSPYRPLSGVYLQLQQLDRVRLAKVKIRTMLKNQIIGHLDRIFPGLVLIGDEAKSRYTPLFATDLWDCQTLQNLIRVCPDPSQLAAMSNSELIAAFHSHNFKMGPKTAAKIISYAQKVLVPHPELIAIRAELLHHDLLLLAAVEARITVLEERLCALLAQTPYQIWTQLKGLSQVQVASLAAAIGNPNHYSRAKQVFRRSGLVSGRNDTGVRQREGQGSPIVKTGDVYLRRALMDAVYSLIPHQPLLGRYYAQLKFTKPKLVARVATARRATGILWATQRDQHAATLRLKRGALM

SEQ ID NO: 261265 - protein, 357 aa, unidentified
MKYIGCDFHPSFQQIAMLDKETGEMVERRLLHTEEARAFYQGLRGEVVVGVEASGNMDWFESLLAHCQHQLWIGDAAAIARQEGRKQKHDRRAAALILKLMVENRFPKIWVPTVGERDLRQLLIHRQHLVRMRTRIKNQLQHIALNQGWQKKRKLWSQAGLELLRSLKLEPWTHQRRDTLLEMLEELEEKIRPLDQAVAKEAEQCEAARRLATHPGVGPVISLATVLTMGDVGRFADSRSWVSYLGLNPSEQSSGQRRRLGSISKQGNPFLRYLLVEGATSAARGDKDLGRVYTRLKARKHHGVAKVAVARKLAVRLYWMARTKKSYPEVVRTQGSQSLPVAEVKAVRLSRPPASHP

SEQ ID NO: 261266 - protein, 340 aa, unidentified
MPLYGGIDLHANNSVVVLLNDQDQVIYEKRLPNHLPAILEPLRLHPGEIEGVVVESTYNWYWLVDGLMEAGYRVHLANPAAIQQYSGLKYSNDHSDARWLAHLLRLGILPQGYIYPKAERAVRDLLRKRAHLVRQHTANVLSMQNILARNTGARFSLTRIHELTKQELQRLLTEEAQVLAVTSSLAVLDCLQHQIKILEQSVHKRLRHTPSYEQLLTVAGIGPILAQTIALETGAISRFPSVGHYASYCRCVDSNKLSNGKRKGTGNVKNGNPYLAWAYMEAAQFALRFQPAAQRFYQRKLAKSRNNTVLARKALAHKLARACYYMMRDLVPFEATKAFG

SEQ ID NO: 261267 - protein, 386 aa, unidentified
MGQKAFIPQAYDVFAGLDVDKKSISVTFSNHQQGFIRSLHMPYSVVNLGKHVRQHFTDQKVAFVYEAGPTGYGLYDGLEAQGYNCLVAAPSMIPRAPGQRVKTNRLDSRALSENLRGGQLKSIHVPSPIYRELRHLTQLRDTLVSEVAGMKQRIQSLLLFEGIAFPSAPAGSRWSLKVKAQLRKLECSKSVRFKLDQLLDNEEFSEKQVVKVTKEIRQLCQNDPELAQCIKYMMSVCGIGWIVASQLLARIGDWRELKNVRQLAGFLGVVPSENSTGEKTDRGSITRTGHGRLRSKLIQAAWSAIRQDGELREFYSSVCRRHPRQVGPRVAIVAVARKLSARIAAVLMEQRPYVVRQKVHSAPLTQEETSPQGTTRRLGEPGEENS

SEQ ID NO: 261268 - protein, 319 aa, unidentified
MNEKQTEVYVGIDVSKTKLDVAIDQDGEYWQTNNDGVGIRKIVERLLAIRPTLIVVESTGGLEMALITELYAAGLPFALVHPARVRDFARSIGLLAKTDKLDARLLARFAEAIKPPLSHLPGEAEQYLNALMLRRRQLLDILVDEKNHLVSTRLSLRSMVEEHLTWLQKEVAELDQQIADQIQQIPQFKEKEAILRSAKGVGPVLCAKLLSGLPELGQLNRKKIAALVGVAPFNDDSGYRRGKRRTKGGREDVREVLYMGTVAAARSNPVIKPFYQHLLKQGKLKKVALVACMRKFLTILNAMLRDMRPFLAPFNPIQP

SEQ ID NO: 261269 - protein, 341 aa, unidentified
MSIITIGIDLAKTIFAVHGVNESGKAELVKPKVGRDQLLPLIANLPPCLIGMEACTGAHHWARLFRQHGHTVRLIAPKFVTPYRMSGKRGKNDAADAAAICEAVTRPQMRFVPIKDEHQQATLTLHRTRQGFIEERTALYNRIRGLIAEFGIVLPQKVERLRREIGPHLEDLPGWANRCVGDMLSHADRLDERIHEYDQAITEIARQDERCKRLMQLPGIGPTSATSIVASIGVGHDFDHGRQVAAWLGLTPGQYSSGGKTRLGRITKAGDGYIRSLLVLGARAVLNSLGDKQDRFSRWARNLLERRGYWRAVVAIAAKNARLAWAVLKYGEDFRLNLNEA

SEQ ID NO: 261270 - protein, 345 aa, unidentified
MTNNIQFSSVCGIDIAKSVMQIYRVTSDGVVSNKAVKRADFLNEFRNTSPALIGMEACGGSQHWAHELQSLGHTVRLMPPKLVKPYVTGLKNDKNDARGIYTALVMDVREVPVKSAAIRDLALLQTMRTKRQREKVAKINHIRGILSEYGLIMGKSVNSFLAKAGSLIAELKERADVSPYIVSELNALFPKVKEAMAKIKELETNIESIAKTLKHYDLFQSAPGVGPITAATMLVLLCNPEVFKNGREFAAYIGLAPKSSGSGGKNFVTHIPKKYECNNEVRTLLVQCAHAICRSKHKSDWVSSILARKPKKVAIIAVANKLARQLWIMAKKGEKFERRFILAAV

SEQ ID NO: 261271 - protein, 387 aa, unidentified
MYFVGIDISKYKHDCFICTETGEVIESNFSFPNTSDGFEQLLNLLKSIDNFKEIRIGFEATGHYGMNLKLFLEKNNYSFMEFNPKLVKEFISGQTLRKTKTDKKDAYQITKYLISVDYKPHPKQFYHKYSLKSLSRMREKLVKQRSYYEVALTNVLDHIFPEYKPFFNNTFSASSIFILSKYKSPDKIKNMKDYDSIRKISRGKFTSAQFFLLKDLAKNTIGTSNEIFELELETLLILRSQIEVEIKKLESNIEEIIKELNPPILSIKGIGYILGAGIVSEYGDVYRFKSADAMVAFAGIEPSICQSGTESHTGHMVKHGSGHLRYYLLNAADCIFLHEPIFTEFYYKKRNEGKSHRVALNHVAKKLIRIIYKLETENITFDSSKVK

SEQ ID NO: 261272 - protein, 370 aa, unidentified
MLDTTTFVGLDVHARSIKAVSLDVMTGEAHCATFGYDAGAVAEWVRSVDPKARCVYESGVTGFDLQKRLSGLGVDCVVGAVSKMIKPSADRRRKNDRNDAEFLARMLSVGNVVEVWVPDDECEAARDLTRALEDARDDLSRSKQRLSKFLLRHGLVFDERTPTGRRKGNWTRAHWSWIESIRFAEGADNDVLAYYVDAVRRAAEEKARLEGLVEAEARKPRWRRRVDSLRCLKGVDTASAADLVFEAGEFSRFGNARSFAAWVGLTPSEHSSGESDRRGAITKAGNKHLRKTLVEAAWHYLTCSARPKEPARGQAPDPGARRHAAKGVRRLIERREALLARGVHGNKANVATARELACWVWAVGLMAEEA

SEQ ID NO: 261273 - protein, 319 aa, unidentified
MNKKHVCGIDISHLTFNAHCKGKDYKYSNDRRGFAKLCKETARTVYAMEATGNYYYRLACYLHSKGHEVYVFNPYRVSCYGKSIGFSAKTDKHDARLVYRYAMLSEAEGCRWEPPATKMLERAKAIMSLLASLRSIASASANVQHANKLVVSKGDSLLNVMPCISEAIQHQKENLEMELCGIIEKVYPDKFRNLQTIPGIAAKSAAALLVYGRGMECFESSRKLAKFVGIAPKVTQSGTSVSGSRAITKTGNPYLRGLLFMCATSAARFCPPCADLHNRLIKRGKPKMLAKVAVMHRLVKIAFGVTQSGEPFRGGITAK

SEQ ID NO: 261274 - protein, 395 aa, unidentified
MLAANERPLAPTAIRIDLGAIFVSLELSRSKWLITSLSPGGSKKMSKHAVAADDIAGLLARFAELKRKAQARTGRCFPIIVIQEAGLDGFWIHRVLQAEGIESHVVDPASIATSRRRRRAKTDKIDGETLVRALLAYKRGEPRVCAMLRVPTPEEEDRRRISRERKALTNERVRHVNRIKGLLFSQGVSGYQPLRRDRRTRLEELRTGDGRPLPTHLKAQVGRELDRLELLIGQIKAVEAERDAMLAAAPVGSAHFADCEQQALPMLLALKGIGPEFAVVLWSEGLSRHFDNRRQVAAYAGLAPTPWQSGSVDHDQGVSKAGNPRLRTTLIQVAWLWLRHQPHSALSLWFKQRVKQNDGRLKKKTIVALARKLLVALWKYVDAGVVIEGAMMKTP

SEQ ID NO: 261275 - protein, 355 aa, unidentified
MNSEKYIGLDVHQATISVAVLDSTGKLVMESILETKAATILEFFAGLRGTLSVTFEEGTWAAWLYDLLKPHVAKLVVCNPRKNALLKDGNKSDRIDAHKLAELLYLNKLSSVYHGETGVRMLRELARSYLTIVKDLTRVMCRLKAVYRSWAIPCAGRDVYYTRHRTAWLGKIKEAGVRRRAERLYQQLDMLQYLRQQARRELLAESRKHAITVKLRQIPSLGPIRSALAVALIQTPHRFRTKRQLWAYSGLALETRTSAEYCYVKGGLRRSKKQISIRGLNKDHNHDLKGLFKGAATRASVLPGPFQDFYQRSLAKGIKPTMARLTLARKIAAITLTLWKKGENFDADKLKSQAA

SEQ ID NO: 261276 - protein, 363 aa, unidentified
MFTERTSVGLDVHARSVAAAAIDSVTGEVQQARLTPAHEHIRSWISGLQGPVAVAYEAGPTGFGLQRSLTEAGIRCVVVAPSKLQKPAGDRVKTDARDALHLCRLLRLDEITSVSIPSVGQEAARDLVRAREDCRGDLMRARHRLSKLLLRHGIVYYGRAAWTGAHDQWLRTVAAPQLRAPATRMAFDADYDHVLTMQARRRRLDAAIEEMAADGEFAAIVRRVSCLRGVNTLTGFALAVEIGDWNRFTGNTIGSFVGLVPSEFSSGSSRAQGPITKTGNGHVRRLLVEAAWHHKPRYHVGAVMRSRWDLASPAARVRGDEGNRRLHGRWVGFLERRKRPVTANVAVARELAGWCWSLAVMDD

SEQ ID NO: 261277 - protein, 345 aa, unidentified
MERYIGIDTHRDSSTICVLSAAGKRVTQEVVATNGHVLVDLLRQQRGTLHVCIEESTWSEWLYEILSPYASHLVVYQSAWTPGAKSDAIDAHGLAEKLRIGQAGPGVFKSPQRYRQLREWARVYRGLSQDVVRAKNRLKGQFQRRGIACSGTSVYDPRARDGWLQQLPAPMRPQTELLGLELDRVTELKAQAEAALVTASHRYRISRVLETAPGIGPIRAAMLIATVVTPHRFRSKRQFWSYCGFAVVTRSSADWVQTESGWIKAQAVRTRGLNRNHNPTLKAIFKGAAITAIHQTQAGHPLKEAYARLLEGGTRPPLARLTIARKIAATVLAMWKREEVYRATA

SEQ ID NO: 261278 - protein, 424 aa, unidentified
MVQVVDAVEIIERVAALDIGKAEVVCCVRVPDESRSGRGAGRGQQVRTFATMTRSLTELSDWLTGLRVTRVVMEATSDYRKLPFYLLEAAGFDVWLVNAHEVKHLPGRPKTDALDAVWLCKIAERQMIRASFVPPAPIRQLRDLTRYRVDLIGDRGREKNRIEKLLEDAGIKLSVVASDLFGVSGRAMMDALVAGERDPQVLADLARTRLRARIPELREALTGHFTDHHGFLLNQMLGHVDHLDARIAAVEAQIDDRIRPYADTVARLDQIPGIGPAAAGMIIAEIGTDMTRFPTAAHLASWAKFSPTVKESAGKTKGNAATGRGNRYLARALGEAAVGASRTNTFLGERYRRIARRRGKQRALVAIGRSILTVIWHLLSDPNATFNDLGADPYDNRGSTQRALRRHVNALHALGFAVTITPTG

SEQ ID NO: 261279 - protein, 409 aa, unidentified
MNTGTITAVGIDVSKHKSTVAARRPGGEVVLLPFDVEHTAEGLKKLITKLRELDGEIRIVMEHTGMYWRPIAMTLKEAGFYVSVVNAILIHNFSDNSIRKVKTDRADAMKIANYGLTFWSDLQEYAGEDENRQLLKIQSRLYERTATTAGMLRNGLISLLDQTFPGANKLFRDESRNSKGHVKWIDFVLRFWHKECVAALSLATFTDTFQKWCKRTGYKFSASDAERIHAIARNAVATLPKNDSTKLLITQATNSLNAIYDSLQAIRTEMDRLASMLPEYELVMGMEGIGKVTGPQLMAEVGDVRRFSHKGALVAYAGVDASPYQSGSFDSKSRHVSKRGSPHLRRVLFVIMSMTLIRANTANPVFCFMDKKRAEGKHFYVYTVAGSAKFLRIYYAKVKEYLNALEKTA

SEQ ID NO: 261280 - protein, 357 aa, unidentified
MLSSNVKYIGLDVHKEAVAIAVLNGAGKLVMESIVETKASTLLDFLHGLRGELHVTLEEGTWAAWLYDVLKPHVADIVVCNPRRNALLKEGSKSDKIDARRLAELLRSGMLRAVYHGENGLGTLRELARGYLTISKDQARVMSRLKALYRSWGIPCSGRQVYTPRHREQWLSKIVQPGVRRRAELLYQQMDGLLLVRHTVRGELLAESRKHPAVKILRQIPLIGPLRATLLLALMQTPYRFRSKRQLWTYSGLGAETHDSAQHRYVDGQLQRSKKPQQIRGLNQNHNHEMKKLFKSTAMSASRCAGPLQDFYAGLLAKGMKPDMARLTLARKIAAITLTLWKKGERFDAEHLKSQAA

SEQ ID NO: 261281 - protein, 348 aa, unidentified
MLIIGCDYHPGFQQIAFVDTETGEFGERRLTHREGAEEFYATLKEGKVRVGMEASGHARWFERLLNGLQFELWIGDAAEIRTKRVRKQKTDRQDAQLLLRLMVEDRFPRIWVAEAADRDLRQLLWHRHRLVQMRTRIMNQLHVVALNEGVRRKKALWRPAGRNELESLNLAPWARRRRQDLLDLLDQLTPKIQESTRALEEEAEKRPVARRLMTHPGVGVLTALAFELVIGTPGRFRCGKQIASYVGLVPSEESSGDRRRLGHISKQGNSLLRFLLVEAAQVTVRSQVQWRSKFFHLAMRRGRKIAKVAMARKLAVHLYWMWRQGWDYGQLEKLGSHAGEPGNRHGVQ

SEQ ID NO: 261282 - protein, 384 aa, unidentified
MHQATTLPERTCSRGDCATLFVSLELSRSTWVATTLAPGSSKMSKYTLVGGDGHQLLDLLARLKSRAEQRIAAPVKVVAIHEVGLDGFWIHRLLEANGVESQVVDPASIAVPRRHRRAKTDAIDGETLLRTLMAWQRNEPRVCAMTVPPSPSEEDHRRISRERATLLQERVRHTNRIRGLLFGQGITNYNPLHKNRRENLEALRTGDGRSVPAHLKSQILREIDRLELVLRQIGEVETERDEMLQLAQPSSPAALLMRLKGIGAEFATVLYLEGLFRQFENRRQLAAYAGLAPSPWKSGSIDQEQGLSKAGNPRLRTTMVELAWMWVRYQPGSALSCWFRQRVGSERGRIRRISIVALARKLLIVLSRYVSHGEIPAGAVMKAG

SEQ ID NO: 261283 - protein, 370 aa, unidentified
MSQSTTLFVGMDVHKDTIAVAYVAQEHGAEVTYLGTIGTRQCDLDQLIRKRQSKAQHLIFIYEAGPCGYWLYRYLQQKHYDCWVVAPSLIPKKAGERVKTDRRDAVQLARLARSGDLTLVYVPQVNDEAIRDLTRAREDTISDLKDAKFRLKAFLLRQDIRYAGRANWGPAHLRWLAEVVCPTPAQQIVFQAYVRTVTEHTERLGRLDQELREQVTTWRLHPVVDALQALRGVQFTVAVTMVAEIGDLTRFEPPSELMKCLGLVPAEYSSGARRQQGAITKTGNTHARRVLVEGAWAYRYPAKVSRQLQLRLENQPQVIQDISWKAQVRLCKRYQRLVAQGKHANVVTVAIARELVGFVWAIAKEVPLTL

SEQ ID NO: 261284 - protein, 356 aa, unidentified
MTIVSHSRPFVIGVDCHARTHTYAILDPRTGQQIGCQQFPSTSSGMNRAISWVARHAGGDLGTLWVIEGIGAYGARLARAVTQAGYDAVEAPRMSARARRGIGKSDPLDAAAIAVAVLGLDETRLRQPRQDEGVRAALRTLASARDQLTRERTVNVNALTALVRVNDLGIDARKPLTTTQILTITRWREREEPLEVMIAREEAIRLARRINDITAQLDANQKRMTGLIQQSPAAPILDITGVGAVTAAVILTAWSHPDRVRNEAAFASLAGVSPIPASSGNTTRHRLNRGGDRRLNRALHTIAMVRMTHDPDTRAYVEKRIQEGRTTREIRRALKRYIARHLYRTLNTLHAAPMTI

SEQ ID NO: 261285 - protein, 339 aa, unidentified
MKYTPVGVDIAKHVIQVHFINEHTGEVVDKQVRRQDFLAYFSNREPCLIGMEACGGSQHWARELTKLGHKVRLLQARFVKAFVMGNKNDVMDARAIWMAVQQPGKEIAVKTEEQQSVLVLHRTRMQLVKFRTAQINALHGTLLEFGETIHKGRAAMEREFPEALERMKERLPPYLIMVLENQYNRLNELDSLIEDIEKQLTSVARQNETCKRLLDIPGVGPLIATAAVATMGEASAFKSGREFAAYVGLVPKQTGSGGKVRLLGISKRGDTYLRTLFIHGARAVALVAKEPGPWITELKKRRPASVAIVAMANKLARTVWAITAHDRKYDRNHVSIRPY

SEQ ID NO: 261286 - protein, 370 aa, unidentified
MLDTTTFVGLDVHARSIKAVSLDVMTGEVRCATFGYDAGAVAEWVRSVDPRARCVYESGVTGFDLQKRLSGLGVDCAVGAVSKMIKPSADRRRKNDRNDAEFLARMLSVGNVVEVWAPDDECEAARDLTRALEDARDDLSRSKQRLSKFLLRHGLAFDERTPTGRRKGNWTRAHWSWIESIRFAEGADNDVLAYYVDAVRRAAEEKARLEGLVEAEARKPRWRKRVDSLRCLKGVDTASAADLVFEAGEFSRFGNARSFAAWVGLTPSEHSSGESDRRGAITKAGNKHLRKTLVEAAWHYLTCSGRPKGLAKGQAPDRGARRHAAKGVRRPVERREALLARGVHGNKANVATARELACWVWAVGLMAEEA

SEQ ID NO: 261287 - protein, 351 aa, unidentified
MKTKNTACPKLFIGIDIHKTSWSIRVATDLFLGKRMTMPSDPENLRRYVEKYYGDHEIHCAYEAGCCGYSAHRAFSSFGWRSLVFNPSDIARTGKSQFQKTDGIDADLICRELRDQRLVGITVPDLEREHLRCLFRRRNDLVKDIRQIKSQIKGQLLFMGIKIPQEQDNSNWSHSYRKWIESLVLENETAKSAITSRLLQFEFLDKSVREVSNELRKYCRTHYKKDYMLLRSIPGIGGIVACGILSEIGDLRRFGNFKQLASYVGIMPAVHQSGDNTRSSGINPRGNSIMRSYFVEAAWQCLRFDPVMQKYYRTHTGRNSKSILIKVARKLLSRVHSVIKTETPYQIGVIA

SEQ ID NO: 261288 - protein, 347 aa, unidentified
MRFYNRQHRHYCGIDLHVKTMYLCILDSAGQVLVHRNVPSTPEALLETVAPYREDLVVAAECMFTWYWVADVCAAEGIRFVLGHALAMKAIHGGKAKNDKIDSHKIASLLRGGLLPQAYVDPAAMRSTRDLIRRRLHLVRKRGQLLAHIQNTRAQYNLPIFGRKLAYRANRDGVVEQCPDPSVQKSVEVDLALIDQYDTLLGDLELTIVREAKRHDADAFHRLRSVPGIGKVLALTILYEIHDIRRFDRVQEFASYARLVKCVHQSGGQKLGTGGAKMGNVHLKWAFSEAAVLFLRHTKDGKKMLARIEKKHGKGKALSILAHKIGRAVFYMLSRGTVFSMEKFLAA

SEQ ID NO: 261289 - protein, 423 aa, unidentified
MQLATEQPFTALVGVDWSDKKHDFCLQGAGTQQREQGVVPHRPEAIEQWARALHQRFGGPIAVCLEMAKGPLVHALQRYGFLVLFPVNPATLAKYREAFVPSRAKDDPSDAEIALELLVHHRDKLQALKAQSAPMRALSTLVEQRRNLVGDKTRITNRLCSTLKEYFPQALDWFEDRDTVLFCDFLQRWPSLKHVKRARQTTLRSFFFAHNLRRSELIEERICAIRCASALTDDVAVIGPCQLLVQVLVAQLRVTLQAIEAFDTKITELAKRLPDYALFAALPGAGAILAPRLLVAFGEQRERYASAAQLQQYAGVAPVLERSGNKCWVHWRMACPTFLRQTFVEWAGSTIPRSFWANAYYQRQRDKGCSHQAALRALAYKWIRIVYRCWQSHTPYDESAYLQALKRRGSPLLAAVSAAPRSA

SEQ ID NO: 261290 - protein, 356 aa, unidentified
MSIVGAFDVHRRQLTFEYLDTVTGELKRGRIMPADRPHLRAWLSRFAGQRDVQFALEGCTGWRYVVEELYAAGITPHLAEPADTAALRGKKRHAKTDKTDTRHLRVHLMAGDLPECWIPPQHVLEARATARLYKDLVDERGGWHQRVAATLFHHGVPAAVSVAKPDGRAAAEQAFLSPAGRQAVETGLRQIDRLTAELEPLRRQLDMLSRRQPGCAALRAAHFGIGAVTSVAIWAELGDVRRFGNSDDVVRHTGLDITVYSSDGKRSAGHLSRQGPPLLRWALYEAAKCAARPAAPDYGYYTAARDDRGGGRATLSVARKLARRCYHTLRELGEEAMAPAAYPGSLPPPPARPTRR

SEQ ID NO: 261291 - protein, 410 aa, unidentified
MRYYLGVDWADQTHAVWVVDEQGTKVAGRAVPHTAAGLSEWGRELDEWHAQGIELWAAIERPEGRVVDFLLDHGVVVYPVNPKALDRARDRFRSSAAKSDPFDARVLAEFLRTDHQHLQALQPSSETAQELKYLTADYRRHVRQQTRLVNQLTATLKAYYPRALEVSELTTALARQFLRAYPTPVAVAALTEQRWQRWARTHRLSEPRTQELWGVLQRPQLPVPAHVVRAKARLMLTLVEELTAVVAAVGQYREAIDAFFAGLPEAQWIRTLPIGNHGVTAPTLWALLGDAPTRWESWQHLQGHAGTVPVTIRSGQQRIVRFRSACDKAMRYVVDQVAFLSLGKSEWARAYYDQQRARGHDHHPALRALGAKWLKIIFVMWARQIPYDEQHHLATMTRQQLRQRNQKKVA

SEQ ID NO: 261292 - protein, 310 aa, unidentified
MERLFVGLDVAKDRLDVHIRPTDEQFGVAYEEAGVATLVHRLVGLQPTLMVLEATGGYESAVAAALAHAGLPAAVVNPRQVRQFALATGQLAKTDRLDARANARFAELVQPAARPLATEQAQELGDLVARRRQRVDMLGAEQNRHRQARARGLQQRIRAHVTWLTRAIAEVDEQIARLIRTSAVWRETEDLLTSAPGIGDITAHALIADLPELGQLDRRRIAALVGLAPWNRDSGHWRGRRMIGGGRAAVRRALYMPTLVAIHHNPVIREVYRRLTAAGRPKKVAVIAAMRKLLTILNAMLRDRRPWQPA

SEQ ID NO: 261293 - protein, 370 aa, unidentified
MAHSVTLFVGMDVHKDSISVAYCLGHESNPPHFVGKIGTRKADIEKMVRRLQSQASHLVFAYEAGPCGYVLYRHFTSKGLECRVIAPSLIPKRPGDKVKTDRRDALELARLLRAGDLTPVYVPSVEDEAIRDLCRARDATRLTLKSAKLRLKSFLLRLGLNYTGRANWTDAHRRYLATVACPTPTQQIVFQESIRAVDEQVDRLQRLEEELIERGSQWRLAPVVLAVQALRGVQWVVALTVIAELGDITRFDNPRQLAAFVGLIPSENSSGGKRRQGPITKTGNGRARRALIEGAWAYRYPAKMSPIIQKRNEALPKAIRDIGWKAQVRLCKRYRRLISRGKHSNVAVTAIARELLAFMWAIAKEVPIQI

SEQ ID NO: 261294 - protein, 375 aa, unidentified
MVLTCTKIAYLRVSWTNKARKFLKRYGTLTPNLIELRDTLEEMGCVRVAMESTSIYWMPIWHVLYGDFSLTLANPYFIKQLPGRKSDVKDAQWIAECLQKDLIKGSFVVDGVLQQMRQYARQHRRLTKHRVRMEQQLDNQLQRCNIRFSNYVSNQGNNVSMRKIIKAIQAGERAPEKLSRLVHGRTKNRHGTQVITDSLNGVIEQVDVEMLRQCMEQIELIEKQQAACLNHLEELANTHFAEEISLLCTIPGVQKLSALFILSEIGHDMSAFSNANSLVGWAGLRPRNEESAGKIQSRKTLHGNKYLRQILVEISWSAARSNKSFLGKKYSLLSKRMKSQKALMAITRKMLVIIYNVLKTKQPFDHNRNIQAIVA

SEQ ID NO: 261295 - protein, 336 aa, unidentified
MQITTIGLDLAKHIFQVHGIDANEGVVEKRRLRRGQVLSYFAKLAPCRVGMEACATAHFWARELRRLGHDVLLIPPQYVKAYLKRGKNDAADAAAICEAVTRPSMRFVPIKNEEQQAVLVMHRSRDLLVRQRTQLINALRGHLSEFGLIEAQGPSHVRRLLESMQADSSVPQLARDTLALLASTLDAVSVQIDAIEAKIAAWHKVNPTSQRLATIPGIGPLIASAITATVTDPAAFRGGREFAAWLGLTPRQKSTGGKQRLGRISRKGDQYLRRLLIIGAQTVLLRSKAARANPWIQGLLARCARLKVAVALANKTARIAWAVMMRGESYQPVAAD

SEQ ID NO: 261296 - protein, 384 aa, unidentified
MRAVCGLDVHKDSVYLCILTGEGELIEKIFGVLTFQLQQMRDLLLAHNVDEVSMESTSVYWIPIWRVLAPHFHMRLVNPYFIRQLPGRKSDVADAQWIAECTLKNLVSGSFVSPEDIQQLRQYDRRIFDLDEEIVRKLSKFDAVMQRCNFRLSNYVSNVDCKSYKDVVRKISEGVTDPESLIGEIHGHIIKHHGRETILASLAGVISQAEIDVLRQLREELALAEEHKRECLERMLEICQEKYPDELRRLQTIPGVKERTATSLIAEIGTDMSKFETANHLSAWSGLRPRNDESNKKFKSRRITHGNVYLRKNIIQCAWAASRTKGCFFSRFSYHQTQVRKKNKMKVIVAVARKLLVAAWHVIHDKTDYADFQKQDRQAPASNG

SEQ ID NO: 261297 - protein, 367 aa, unidentified
MNNMIPVSTKAAAGPKATVPPLTIGIDLGDRWSQLCFLNAEGEILEKSRLQSTPRSFTQRFEALAPARIAIEAGTHSPWVTELLTEFGHEVLVANARELRAISTSDRKNDQADAEKLARYARVDPSILRPITHRDSRTQADLLVIRARAALIRMRSLAINAVRGLIKPFGHRLSACSTDSFVTRCRTELPSEYSALLAPLLEQIASLTQQIQSADRQVEQLTKAKYPEAVALQNVPGVGPLTALTFVLTIGDEQRFIRSRDVGCYLGLRPRQQQSGERNPQLGITKAGDGYLRTLLVECAQHVLGVFGPDTALRRWGLRLAERGGRNAKKRAIVAVARKLAVLLHRLWVTKQPYEPFFGVPTPMTTS

SEQ ID NO: 261298 - protein, 347 aa, unidentified
MSHTNIVTIGIDLGKNAFHVVGFDATGAIILRKKRSRNQLGPSLANVPPCLIGMEACAGAHHLGRMLEKLGHRVRLLPAQYVKPYLKGHKNDFRDAEAIAEAVQRPTMRFVPLKSADQLDLQALHRARSRLVTQRTAVINQIRGFLLERGLPVRQGAAALRLALPQILSMLSDNLSPRVVRLIQDLAEDWRYLDRRVASITKEINELADQDVHCRRLMSAPGIGPIISSAMVAAIGTGDAFHKGRDFAAWLGVVPKQISTGDRTILGRISRRGNRYLRTLFIQGARAVLLRRQTWPKHGFGAWLEAASKRLHSNVLVVALAAKLARMAWSMLAKARDYDANFLGRTA

SEQ ID NO: 261299 - protein, 351 aa, unidentified
MDAIYIGVDFHARQQTICYLKTETGELVIVELKHEDKEQVRAFYQQFQEPLVVGLEASGYSPWFETMLEELNCEVWVGHATEIRRRARWRQKNDRRDAELIWDLMVHDEFPRLHRPTATSREVLRMLRYRQKLIKLRTMAKNSLQAIALQAGLAKGSQLFTRAGQEEFNSAPLSAVLQWQRAHWCQLLQPLNAQVLETMGWFKAHSKDDVRIQRLRTHPGIGLLTALCLVHTLQPVERFRNTRKVVAYAGFDPVERSSGERQQFLGISKAGSRLLRYLLVEAVQTTVRYDEDLKRFYRRLAERRGRPKAKVATARKLLIRAYIMMRDEIDYAEFRRRAIAVRLARPGQGLT

SEQ ID NO: 261300 - protein, 323 aa, unidentified
MDTQTNAAAASAAIFVGIDVSKAALDVALRPSGEPWHCTNDETGIATLVNRLQPLAPELVVLEATGGLERLVVAALALAGLPVAVVNPRQVRDFAKATGRLAKTDALDAAVLAHFAEAIHPTPRPLPDAQSQALAALVERRRQVVGMLTAEKNRVQQALPAVRPKVAAHITWLEQALKELDAELDQTLRASPLWRERDHLLRSVPGVGPTVSRTLLAHLPELGQGSAKHIATLVGLAPLNRDSGTWRGTRAIWGGRRHVRAALYMAALVGVRHNPVLRTFYQGLLARGKPKKVALTACMHKLLTILHAVLRDRTPWQPTPLAT

SEQ ID NO: 261301 - protein, 316 aa, unidentified
MDEPRPACCVGIDVSKDRLDVHLRPSDEAFSVARDGKGLENLVDRLKALNVSLIVLEATGSFETTVAAALAGAGLPLAVVNPRQIRDFARALGRLAKTDAIDAEVIAIFAEKIRPQARPIASKEAQLLGELVARRRQIVEMIGMEQNRRRRTTDKRLAKRIDRHLAFLEKELAEVDGDIDAGVRASPAWRETEQLLTSVPGVGPVTARTLIAELPELGRLDRRKLAALVGVAPFNRDSGTWRGHRMIAGGRTSVRCALYMAALVAIRHNPPIKAVYQRLIARGRPKKVAIIACLRQLLTILNAIVRDATPWIVQNA

SEQ ID NO: 261302 - protein, 344 aa, unidentified
MSKVTIGLDIAKSVFHLVFMNQSGRVLRKKKLRRHQMLSYFSQLEPCIVVMEACGSCHYWCRELTKAGHEVKAIAPQYVVAYRKGNKHDYNDAEAIAEASQREGMRFVPFKSQDQQDIQLMHRIRERMIAQQTALSNQIRGLLSEYGIVYVRGVATLVKELPLTLEEADNGLSMLARRQFQGLLNDLRELREHIKEMDKELKAFSQSQPVCERLMSMTGIGPLIATALYAGIGQGQAFNSGRHLAAWLGVVPKQHTTGDNPRLLGISKRGNTYLRTQIINGARAALRHIGDKTDKVSEWCRACLARMSFNKACVALANKMVRMAWAMLHYQQDYQPGLINKAAA

SEQ ID NO: 261303 - protein, 368 aa, unidentified
MNKQEQKTVTFLRYCIGIDVSKDTLQVCLSVIDMNGKVTIKGSRKIINKISAFDSFLTWVNKHCQGKDLPVRYVMESTGVYHETIAWYLFQKDLAVSVILPNKAKHYLKSIGNKSKNDTIDARGLAQMGLEHNLKLWQPLSKNIYSLRMLTRQHQRLQELKNQSENQKHSLLHSQFTDKFIIKQLDKLIKLYEQQIQQIAQEINRLLEEENVLKSKIEQLSRIKGLGLLSVATIVAETNGFTGFENSRQLVSFAGYDVVENQSGKRVGKTKISKKGNSRIRRILFMPAFNAVKWGEAACKALFERIMSKNVPKMKAYVAVQKKLLILCFALWKNNTDYNPMYYTNNVKELNGRDKKIVPINGTTQDVA

SEQ ID NO: 261304 - protein, 310 aa, unidentified
MMGTYIGIDVSKDRLDVHVLPQDEAFWVERNGKGLALLVERLRPLAPSLVAVEATGGFESTTAAAVAGAGLPLAVVNPAQVRHYAQALGKRAKTDPIDAKVIARFAADIRPEPRPLADEMTQLLADLVARRRQIVDMLQAERQRQKRAVVRRLKKSIARLIAALEKELAELDRDIDDAVRGSSVWREKEDLLASVPGVGNTTARTLIAELPELGTLDRKQIASLAGLAPYTRQSGTWKGKSMIAGGRKAVRSSLFMAAMVAGRFNPVLKAFRDRLVAAGKPKMVAIIAVARKLLTILNAILRDKTPWQTA

SEQ ID NO: 261305 - protein, 341 aa, unidentified
MDYFAGLDVSVKETSICIVDDAGKIVREVRVASEPEALLQVLTNTIYRFKRVGLEAGPLSQWLFSVLAEAGLPVICVETRHMRAVLKAQINKTDRNDARGIAQMMRVRLYRPVHVKTLRSQKLRMLLTHRKLLQSKAIAIENDLRATLRNFGLKVGMVGTVKFEARIKELVEDLPDLAILVEPLLVVRRVLREQLGILHRRVLAVVRDDEVCRRLMTIPGVGPVVALTYRVDVPARFRNSKAVGAVFGLTPAKDQSGERDRSGAISRCGDEMMRVMLYEAAQIMLLRSAKWSWLKAWAMKIARHRGMKKAIVALARRLAVIMHRMWVDGTEFRWTREVAAA

SEQ ID NO: 261306 - protein, 345 aa, unidentified
MSYYAGLDVSLEETAICIVDNAGKVIRELRATSEPDAVVETLAATGLSFERVGLEACSLSSWLHQGLTRAGLPALCIETRAAKAAMGAMPNKTDRNDARGLAQIIRTGWYRAVHVKSMPCRSARALLGARRTMLNKQRDIENAVRAVLREVGLKLGTPPRKLFPGRVRELASVDDAISDIVEPLLAVLDVMVRQIDHLTKRVLEAVRVEPICRRLMTVPGVGPLTALTFRATIDQPERFRRSRDVGAHLGLTPRRYQSGETDVQGRISRCGDELARTALYEAAHTLLTRCQKWSTLKAWGMRVAQRRGMAKARVAVARKLAVILHRMWSDQAEFRWGKSPALAAV

SEQ ID NO: 261307 - protein, 362 aa, unidentified
MGKCMMIGCDLHDKSMLLKGAVGRGKPWLKTYGTSPGARRRMIADLRRRAAKVEAPRIVFAYEACGFGFLLHDELVAAGVECYVVAPSKMLRSSHSRKRKTDEYDAQAILDALRSFVLAGVRLPAVWVPSLQARDDRELVRRRLSVAEDASAAKTRIHWLLKQHGVEGAPAEPWTSEYWRWLDELIAGQLAGGAGASLASLVRQVKWLLEERSRLDEQVTALSRTERHAAVVSALCRRQGVGVLTAMVFLTELGDLRRFDNRRQLGSFLGLTPASHESGEDADHKGHITHQGPARVRKVLCQAVWSRLRVEPSEQRAYSRLVARNPRKKKIAVVARMRVMAIRMWHDGLAAQEAVDAATTAA

SEQ ID NO: 261308 - protein, 343 aa, unidentified
MKIHALGIDLAKTVFHLVGLDASGQVVVRKRCSRTQLLAFTANLQVGLIGMEACSGAHFLGRALRAQGHEVRLMPAQYVKPYVKTNRSDYIDAEAIAEAVQRPRMRFVPIKTEEQLDLQALHRVRERWVMRRTAVVNQIRSLLLERGLTLPKGRSHLDEQLPGILEDAELNLSDSFRVLLAQLKLELEQLAARIEEMDRVIEKTDRENEACQRLTEIPGVGPVTSTALIAAVGNASAFGKGRKLSAWMGIVPGEYSTGGKQKLLGISKRGNKYLRRLFIQGARSVLQQRHKQAPGLSEWLAQLLARTHQNVVVVALANKLVRMAWAVLCKNERYRAPVFVGTT

SEQ ID NO: 261309 - protein, 405 aa, unidentified
MLFVGDDWAEGHHDIEIMDASGKKLCGSRLPEGVEGIQQLHALIADHADGGPDHVSVGIETDRGPWVTALVAAGYRVFAVNPRQAARFRERFALSGAKSDAADAHALADMVRTDSHQLREVAGDSELSEAIKLLARTHQTLIWDRQRQVARLRAQLRDFFPAALAAFGEDLAAGEVLDLLKRAPDPDAAAKLSRSEILASLKRVGRKRLVEQRAERIHTGLSSEQLRLPAVLQRAYSISVRGLVGVIAALVEQINRIEAELVKCFGRHPDAEIYLSQPGMGEIVSSRVLGEFGDDRARYAGAKARKNYAGTSPVTIESGRRSTVSARRVRNTRLIDALMRQAMCALRSSPGARAYYDRQRARGVPHNAALRHVANRLVGIPHGCLAARTTYDEATAWAHHVVRAA

SEQ ID NO: 261310 - protein, 322 aa, unidentified
MQTKNIIGIDVSKDKLSLFNDSNDSFEEINNSNESLLNYIIKHNLEKEKCKIGLESTGDYSFLPTKFFVEKGFETVIINPIISKRYIKSTVRGKKTDKSDAEIITKMVKDNEGAVVTKNGLNIEKKTVLRTESKLTSISSDLKKLKQSLKLKKENGIDVSCALDEVERIIGEIEVSTKKIMSKVVSEGQTRQEEIIDSIPGFAVKLSAIVSAEAGDISRFNDAKEFVAYAGLDPKVFQSSNSIRLGKITKRGNPYLRKALFLSAHVSRMHDPEIKAFYEKKMSEGKHYKTVICAVARKLCLRIFSVAKEDRLYEVRLFEAVS

SEQ ID NO: 261311 - protein, 370 aa, unidentified
MLDTTTFVGLDVHARSIKAVSLDVMTGEARCATFGYDAGAVAGWVRSVDPKARCVYESGVTGFDLQKRLSGLGVDCVVGAVSKMIKPSADRRRKNDRNDAEFLARMLSVGNVVEVWVPDDECEAARDLTRALEDARDDLSRSKQRLSKFLLRHGLVFDERTPTGRRKGNWTRAHWSWIESIRFAERADNDVLAYYVDAVRRAAEEKARLEGLVEAEARKPRWRRRVDSLRCLKGVDTATAADLVFEAGEFSRFRNARSFAAWVGLTPSEHSSGESDRRGAITKAGNKHLRKTLVEAAWHYLTCSGRPKDLAKGQAPDRGARRHAAKGVRRLAERREALLARGVHGNKANVATARELACWVWAVGLMAEEA

SEQ ID NO: 261312 - protein, 332 aa, unidentified
MSIIGCDLHTRYQVIAMLDSETGEISTRRLEHEGEEARRFYAGLGKPALIGIEATGYTQWFERLVAELGHELWVGDPAEIRARAVRRQKTDTRDAEHLLDLLLSKRFPRVWVPRPEERDFRQLLKHRDKLVKMQTSVRNQLHFLAMSQGVCRKQKLWSVRGRQELEGLELGPWASRRRQELLELLDRLGPRIEELEAAVKAEAARRPEAVLLMEQKGVGPVTALAFVLTVGPVERFATSRKLTSYLGLNPREDSSGGHQRLGHISKQGNEMLRWLLVEAGHTAARLDPELRRVYQRLKFRRGGKVAKVAIARRLAVRLYWSLRRYAAGSHVQ

SEQ ID NO: 261313 - protein, 391 aa, unidentified
MFYIGVDIAKNNHEASIIDSNGKLVSESFSFSNSIRGLEKFQKFISSFSIDSNNCIIGMEATGHYWLSLYSFLIDLDFSCVVINPIQSDAFRKMYIRQTKNDSVDSFVIAQILRFGEFSVSHFSDEDTFALRNLSRFRFALVDEASDWKRKLVAILDQVFPEYSSIFSNIYGVASKELLSKYPLPEDMISIPADELAKMLSKCSRGRFGIDKAKEIQEKASNSFGVKFALKSFSFQIKQIIAQISFLEDQIFEIEDEISSMINSLCPVITSITGIGDVLGAAIFSEIGDISRFERANQLVAYAGLDVAVKQSGNFNATDTKISKRGSPYLRRAIWLAACVAAFKDPALSVYYQKLRQRGKAHGTAIGAVARKLTNIIFAVLRDNKVYIPNI

SEQ ID NO: 261314 - protein, 333 aa, unidentified
MAKYSVSRISDFLEAFEGREIHVGVDVHKLSYHVAVRREDGACETWVAPAKPYDLVLALLELGQPIAQVTYESGPTGFGLCRAMEEAGIDCCVVAPSKVPRAVVAGSKTDRLDCIKLADYAAKGMLKGIAVPTPAEEGERSLIRRRSQIVDNIRRAKLRIKSLLLYVGAEEPPGLSQWSGQAVGRLSTLQIEPAAKLTLDSLLRELSWQKVELKEIEATLSMIMVKRHEEAMKRLRTVPGVGPTVATTFLLEVFRPERFQCHEQVVSYLGLAPTVRQSGERSSRGRLVPVGQKRLRSLLVESAWIWQAKVPKIKERYNQLVAKQECRKKPLQP

SEQ ID NO: 261315 - protein, 440 aa, unidentified
MLPILASSDGRTVWSGRWLEVGSGMDVIIGMDPHKRSATIEVLDERHQVIGGGRFATDTAGYQDMLAAGRQWPQRTWAVEGAGGIGKHLAQRLLADGEQVVDVPATLSARVRVFSTGNGRKTDATDAHSIALVAVRTPTLQRVVVDGENMALRLLVDRRDELGVLRTQTVNRIHKLLLELMPGGAKKFLTAAQAKTLLATVKPRDVVGKTRRALAAEKIADLAVIDVKIKAAKKQLSELITATGSGLLELNGIGPSGAARLLGDVADIARFPTKAHFASWNGTAPIDASSGDHSRQRLSRLGNRRINRVLHIAAIVQIRHDTPGRAYYRRKLAAGKSPLEAIRCLKRRLSDVVYRQMVADSAAAAAPVEANAAPLVEVKEVAQEQVLVTGPGGQAGASTGSSATGSDPDAGSSEKSLPGPAAPIVATRSRPRKTPVRPGP

SEQ ID NO: 261316 - protein, 421 aa, unidentified
MSQRTLSKKLSSLKPGTLYVGVDLALEQNRAVVLTERAEQLTRFSFPNQREGYDFFYRRLATLQQRQQAPAVLIGMEPTNYYWKLLAADLEQQQPDYAYRLVNPYTVKKSREGDQLDRSKDDNRDAFAIADLLRTGKYTETRLLQGGYAELRQYVTLHHRLQKDLRRQKLLINNLAGQLFPELAQVFEDFTGQTALAMLRHHAAPVVVQAQSPEGFIAGVRADFQGRRLPVTKLRRAYQLAQQSVGLRAGQTALQVAIRLHIDTWLAFRQQLATLDGHLAETFLALPEARYLLSIPGLSIIAAATILAEIGDPSHYRNGRQLIKLAGTQPVPNTSGRKSRSQTPMSHKGRPGLRTVLFFAVLRLIQQDDDFAQAYQHLQQRAKNPLSPMQAVGALMNKLLRIVWAVIRQRTLYQSASQSAV

SEQ ID NO: 261317 - protein, 343 aa, unidentified
MQTITTIGLDLAKSVFQVHGVDAGGQVIVRRQLKRRYVVTFFQKLSPCLVGIEACASAHHWSRELQALGHTVRLMPPAYVKPYVKRQKNDATDAEAICEAVTRANMRFVPTKTSGQQSGLLLHRARHLFIRQQTSVINAIRAHLAEFGIVAPVGRHGVEELLNVVADPNDKRVPEIARACLSAFGAQLRRIKEQVLEFDRLIRAWHRSNELSMRLDEAPGVGPVLATALVAAVADPKSFRSGRNFSAWIGLVPKQHSSGGKNRLGNISKQGDRYLRGLFVAGALAVIRYAKIHGTTHRPWLTALLARRPTKVAAIALANKIARMVWAMMARGERYKEPFALAR

SEQ ID NO: 261318 - protein, 342 aa, unidentified
MREKRYLGIDLHRRRFTCCVRLESGRNYLSEWSLARLPEFVSKLRPGDEVAVEVTGNTRLFYEAVAPHVARTVVVDPNQFRVISHSVKKTDPNDARNLALYLAKGLLPEVRMKEKAQAEVASLTQTRDRLVKLRTALKNKVNNLLSARGIDLDKEALGSEKGLAAVLRHRVEGLVRIELEIIVEQIRSLNQSVARIEQVIQEAAKKLPGYSNLTSIKGIGSLGASIMLSVIGDVQDFQEEGKLASYFGIVPRVQNSNETQHSGHITKRGTKLGRTVLVQCALIAKRYSPYLNRFYERIRARRGTGKAIIALARKFLGIIYHTLKNNWIFEDFPNFVLAEAKT

SEQ ID NO: 261319 - protein, 366 aa, unidentified
MTTTDAATEARETVYVAIELSKKTWVLGIAHPDRDRPSIHRVSGGNIAELVSRLRVAARNNRRILVCYEAGYDGFWLARALAKMGIECRVLDPASIQVNRRARRVKTDRIDVLALLRALIATDRGERHVCAIVRVPSVEEEDARRSHRERQRLVRERTGHINRIKGLLFAQGIRDIKPKLRRTRIDFAALETAEGHPLPDRLRRELEREYARLSLIATQLREVEKERDTADAQDPVVEQKRQLLVALHGVGATSAAILAREVFARSFASRRQLGSYLGLTPSAYDSGSTTRCQGISKAGNSWARRILIEVAWLWQKYQPASPLSIWYIQRTAGQSSRIRRIMLIALARKLAISLWRYSRPALFPRA

SEQ ID NO: 261320 - protein, 352 aa, unidentified
MRDQRAHPLRVAQIPLYGGAAMYIGVDYHKKYIVATKMDESGTIMEQVRLNNDPDTLLGYAHTLPTGSKIALEATEGWYHFYELLENQCPDIYLAHPLKTRAIAEARIKTDKVDSTMLAHLLRTNLLPHSYIPPREIRDMREILRYRASLVSLRTSIKNKVHAILSKNGIRMEYADIFGKKALSSLGSLSLRSCYTIELMGYIQVGETLNALIDKVSEVIEHQVKENPKARLLLTIPGISYYSALLVISEIGDITRFPSAKKLCSYAGLVPQVYSSGGKTRYGSITKQGSKWLRWILVELSHHFIHADTKLEEMFRRVMLTHGKNTARVAVAREMLKIIYYMLRDNRPFMRR

SEQ ID NO: 261321 - protein, 337 aa, unidentified
MEQQKQYVGIDLHRKRSVIVRRNAAGETVDTVRIDNDPLTLASELAKAGEHPEVVLEATYGWYWAVDVLEECGASVHLAHPLGNNWGQRRVKNDERDATDLVDLLRLGRLAEAWIAPPPLRELREYIRYRAKLVHQRTSLKAQVHSVLAKEGVRVPMTDLFGVRGHALLNEVHLGDAYRVRVESLRDLIEACDREITMLEEHIAPILAGDLGYQSVQTIPGVGPILASIFVAEIGDISRFSSARHLCSWAGLTPTHRESDEKVRRGHITKQGSRLVRWAAVEAVARQRADSPIRAHHRRVGERRGKQVGRVAAARKLLMLVYYGLRDGEIRCLAKTE

SEQ ID NO: 261322 - protein, 450 aa, unidentified
MNASFVLGIDPGKFFFAATLLHSTGERIWKGREFDMSRDGFDKLRCSLPNGDLTVGIEASGRIDDNLLAWFGQWKSVCRERAIKVIRINPGQSARFGGPKPRRDQTDGSDSDHIAEFTRVYADRLEAFVHDPKAQAMTRLINERQHLVEELAATKNRIREQLLVCFPEFIQIFVDPFAKLARAVLRKAPTARQTAQQRPLSLARVSAGRKERSLGIEPAHKLIDLAKRSIASAGEDHDGAAVLFLLDQLDLLEKRLANMAETLAAYAAQAKDEIEAVGAQGVSAARQIQLLDSMPGIAIVAASTLVLGTRGLARFESGSALAAQWASCPERTQTGTSLNKARLTARGDHKRRAMLYLSTQVACMYDPAFAFHKWRMEQRGLCPQQAVCAAMNRMARVAWAIVATNQTYDVNLMLRQIQIHHTELWKTFVRLHQNNGTLWKNVNLKYKKTA

SEQ ID NO: 261323 - protein, 311 aa, unidentified
MTIFDRYVGCDVSKEWLDLFDPAEGRVRRIDNTAADVQRWAGHLARTNCLVVFEATGSYDRILREHLHRAGVANARLNPTLVRRYAQARGRKAKTDALDAVVLADLGERLRPEPDAPPCPHRLRLAELSAHRDQIVAMRVMEKNRLSQVQDPFVREDLEAAIARLGEAIARVEAEIHRHVKAQRDLRDQARLLASAPAIGPVSAQVLLALMPELGRTGPKRLAALAGLAPFNHDSGKLKGQRCIAGGRARVRKALYMAALIAARSCPDLKAFADRITQTAKARKIALIATARKLLIRLNAMLRDNVPYRAT

SEQ ID NO: 261324 - protein, 337 aa, unidentified
MYYVGHDGHKDISAFCITTASGNVKETFETTATPEGMDVLIEKMKGKKFKVLAEASTYTIDLHDYLVSKGVESYLAHPHDLKLITESCRKTDRNDSKTLASYLRLWDEHELDISISFVVDGDNRSLRELCRLRESVSEMKGLTMQQIKSHMRINGQYVEFEDLKTMKARKHIRENFCEDLCLMMLLDMYVVFEDKGKILDSEIERRFGDRREVQLLATIPGVGITTAAQLMSMIVDVHRFPTADKMRSYFGMAPTVRDSGGSLKHGHITRRGDPMMRKILSRVVAQLIKNAPNDNLAVYRESHRSAMRPGMLMVACMNRLLDIIYALLVRGTPYIHM

SEQ ID NO: 261325 - protein, 345 aa, unidentified
MKISTVGLDLAKNVFQVHGVDVGGGVVVRRALRRRQVMPFFRKLDPCLIGMEACGTSHHWARELIGLGHEVKLMPPAYVKPYVKRGKTDAADAEAICEAVTRPTMRFVAVKSTEQQAILALHRTRDLLIRQRTQLVNMIRAQLAEFGIVVARGIGHVLELVGRLLDGEVPDIPPLAVKVVIALARQLRDLQARIGSLEKDLVKWSRGNPMAKRLETIPGIGVITASALAATVTDPRQFTSGRQFAAWLGLTPRANCSGGKERLGHISKMGDRYLRRLLVNGMMSRLRWLRLRPDSQPWAAGLLRRKPAKLVAVAMANKTARIAWAVMTRDQTYRPQHPSTREVAA

SEQ ID NO: 261326 - protein, 448 aa, unidentified
MTTMTQPGCCVTGGVDTHKDVHVAAALDALGRLLGTESFPTTRAGYRQLLGWLRAFGEVDAVGVEGTGAWGAGLHRFLTANGVRVVEVMRPNRQRRRRYGKSDVADAISAARAVQAGEAVGTPKTATGTVEAIRLLRIARRSAMKARTQAGNQIHAVIDTSPEDLRHRYHGHSSAQVVAAAARFHRRFPSTPLDAAKLTLRVLARRWQHLDAELAELDARLDELTATVAPTLRAMNGVGPQVATALLAAAGDNPDRLRSASSFAALCGASPVDASSGRQQHHRLNRGGDRQGNWALHVIIISRLRWHQPTKAYMAKRRAQGRSEKRSSAASNATSPAKSTAPSPPTSANNTIQRDHRESPLDIQRSFGRPALPNDAGPGSVRDRPSRRGPADAAGVEQARPRRRPQNAESGALAAASRRPALVPLVRRQAGGRRQSDSGLPDSQRDMG

SEQ ID NO: 261327 - protein, 352 aa, unidentified
MEMIALDCHKHYSVANVQSPDGRCLAEGRIEHRRGSIRAFLSPYSDGCPVAVETIGNWYWIVDEIEQAGKVPRLVHARKAKLMLGSINKTDKLDVRGLNRLQQTGTLPTVWIPPASLRDHRELPRTRMVFATARTRLKNRIHSVLDKYGLQDQLTGVSDIFAAGARERLEGCIQQLPPQAAYTSDLLLEQLEAVQETIEALEERIAQLFKPTEEFTLLDTLPGVGLILGVVLVLEIGDIRRFCCAERLASYAGTVPRVHASGGKTHYGRTRPDVNHYLKWAYTEAANAVAVHRESLAHRHVGQLYSRIRSRRGHASAVGAVARHLAEATYWMLTKKEPYRERGITEVSPQGL

SEQ ID NO: 261328 - protein, 310 aa, unidentified
MTLHPFYIGIDISKAYLDIFEESTSKHLQIENTSEAISAWLSALPDMPSLNIIFEATGRYDRKLTHALHTLKIRFSRVNPARARDFARALGQMAKTDQIDARMLADMGKCLKPDATTQRAPERDQLAALHKRRDELVDTRKKERQRLAQALSEEHASIARHISWLNEEIKFIEQKRDTLLKETAEFTHDNKLLRSIPGVGPVAATTLLALMPELGHASPKAIAALAGLAPFNVDSGQFRGHRAIKGGRKRVRNALYMAAVTAARSNSHFASFAQALIKRGKPFKAAIIALARKILITANALLRDGVPFNA

SEQ ID NO: 261329 - protein, 391 aa, unidentified
MVCVGIDVAKDKHDCCILDSDGTIRADCITIPNNMDGFKQLLQTIRDCTKKSDKIKVGLEATGHYSYNILGFLLDNDLAVYVMNPLHTNLYRKSLSLRKTKTDRVDARTIATMLLSDVDLKSYTDTAYHNEELKSLTRYRFDKVRERAKLKQSVSRLVTILFPELEKLVPSLHIASVYALLSEYPGAKQISEIHLTKLTNLLATASKGRYGKDKAIQIRDAARTSIGSVMPAKFLELKHTIKLIQELTSEIDEIEVSIQKIMDELNPPILSIPGVGIQSAAMILAEIGDFSNFESPDKILAYAGCSPSTYQSGKLTNCYAHMEKRGSRYLRYALYNATKYVCHWNPVFAEYLAKKRAEGKHYNVALSHATKKLVRLIYALQKSGKAYLVAA

SEQ ID NO: 261330 - protein, 343 aa, unidentified
MAKTPIAVLGIDLGKNSCSLAGLDAAGAVIMRRRMTREGTIKFVATLPACVVAMEACCGAHFLGRTFACQGHTVRLMSPEYVAPYVKAQKTDNRDAEAIAEAATRPTMRLVTLKSEAQLDLQVLHRARERLVAGRTRLTNQLRAMLLERGVILPKRRAPLIKRLDELMAGELPISQRARQLLLDLRDEWMDQDRRIKAYDDELMALTREDGAARRLATIPGIGVINATALLAAVGDASAFAKGRDLAAWLGLTPRQHSTGGKTKLLGISKRGNKYLRTQLIHGARAAIVHFAKKATPVGTWVRQLLTRAHPNVVVVALAAKLARIAWAVLRHGSNYDHRTATV

SEQ ID NO: 261331 - protein, 335 aa, unidentified
MKEITTVGVDLAKSVFTVHGVDAMGRVVLRKTVRREQLVELIAGLPPCLIGMEACGGAHEWGRKFQIYGHRVGIMMARFVTPYRKSSKNDGNDAEAICEAVARPNMRFVPVKSAEQQAILSLHRVRQGFIEERTATINRIRGLLSEFGVVLPQRAEQVRRAAVVVAEGLPVLAREAVADLRAHLTYLDERITRYERQLVSLARQREAAVRIQRLPGVGPLTASAITASISDGHEFANGRQFAAWLGLVPRQYSTGGKPRLGRITKRGDPYLRTLLMLGARAVLQSAAQKTDRLSRWALALRARRGYHRAIIAVAAKNARIIWALLAKNRDFVLPA

SEQ ID NO: 261332 - protein, 387 aa, unidentified
MLLDHPIDGPAAIRTQFGAIFVSLELSRSTWLVTSLSPGKGEKMSKHSVEAGGLAELLKLFAELKRKAQVRMGESYPIITIQEAGLDGFWLHRALQQEGIESHVVDPASIATPRRRRRAKTDRLDGETLLRTLLAYKRGEPRVCAMVVAPSPEEEDRRRLCRERRTLIAERIEHVNRIKGLLFAQGISDYAPLRRDRRKRLELLRTGDGRALLPHLKAQIGRELDRLELLLNQIAAVEREQDALLAVSKPSGEKAASDPVTMLLNLKSLGPNFAAILWSEAFWRQFANRRQVASYAGLAATPWRSGGIEQEQGVSKAGNPRLRTTMIQLAWLWVRHQPQSALTQWFKAHSQRGRKRAIVALARKLLVALWKYVTAGVVIEGAELKAA

SEQ ID NO: 261333 - protein, 343 aa, unidentified
MELHAIGIDLGKTVFHLVGLDSSGNVIVRKRCSRTQLLKYTANLRVQRIGMEACSGSHFLARALREQGHDARLIPAQYVKPYVKTNKSDYIDAEAIAEAVQRPTMRFVPIKTEEQLDLQTVHRVRERWVMRRTAVVNQIRGLLLERGLTLPKGRSHVDRALPEILTDPALRLAGSFRVLLGQLQLELEQLSARIEQMDAVILETAKENEACQRLTTIPGIGPVTATALVAAIGNGAGFRRGKDLAAWVGMVPREYSTGGKQKLLGISKRGNSYLRRLFVQGARVVMQYRTKQAPALSSWLSQLMARTHQNVAVVALANKLLRMAWAVLCKNETYRIPALATAP

SEQ ID NO: 261334 - protein, 351 aa, unidentified
MLIIGCDYHPGVQQIAFMDTETGEFGERRLEHGEREAEKFYRDLQQAGISVRVGMEATGHARWFERLLEELHFELWIGDPLEIRATRVRKQKTDRHDAQLLLKLLLEDRFPRIWVASWENRDLRQLLWHRHRLVQMRTRIMNQLQAVALNEGVRQKKRLWGQAGRAQLESFVLAPWASRRRKELLELLDRLNPSIRELNAAVEQEATRRPEVRRLMTHPGVGSLTALAFVLIVGTPQRFACGKQIASYVGLVPTEESSGGRRRLGHISKQGNSLLRFLLVEAAQATVRSDPDWQRKFLHLAMRRERGIAKVAMARKLAVRLYWMWRKGWDYEQVKRFGSHAGQPGNPLGVQ

SEQ ID NO: 261335 - protein, 372 aa, unidentified
MIVVGTDTHKQTHTCGAVDTLTARACGELTAAARRGSFGKLLVWARKLDPERVWAIEDCRHVSGAFERFLIARGERVVRVAPKHMAGARRSARERGKSDSIDAFAVARAALKEGLENLPGAHLDGRALDIRLLSDHRDDVIHARTQDQQRLRWHLHDMWPEFEIPRGALDTKKWLGKASRRLACAQQTVRVRVARELVRQIATRTTRINELERELAQLVADYAPQLLAEPGCGPLTAAKLVGEIAGADRFATDAKLARTSGTAPIPASSGATHRHRLDRGGNRQLNCALHRLAVNKGKWDPAAAAYLERKQAEGKSRKEALRCLKRHLARRVWKLLHTAPATPTPGPALPIGPKATDCVEILGAPSRMICLG

SEQ ID NO: 261336 - protein, 309 aa, unidentified
MKKVSTGAGRQAKNFSEQKLTIGLDLGDRSSWYCVLDEAGVILLEQRLSTTPKAMREVFGGMPHSRIALETGMHSPWVSRVLNELGQEVIVAHARNVRLIGESRKKDDRMDAQTLARLARIDPELLCPVKHRSAKAQADLTVIRARAGLVRARTALVNTARGLAKSYGERLRGCSVRNMNPEKAQGLSPDLRTALEPLLAGIESLSERIRECNQGIERLAQESYPQVALLKQVKGVGTLIALTFLLTLEDPHRFRKSRDVGCYLGLQPGRRNSGQSEPQMHISKEGDPYLRTLLVQGAHHSSGSVWSGL

SEQ ID NO: 261337 - protein, 400 aa, unidentified
MLSIGIDVSKGKSTVCGMKPGGEIVYTPFEVQHTREGMSELVSLLRGSGEEVRVVLESTGSYHCPVVAALLENGIFVSVVNSLRMKRFCSQSIRRVKTDQIDAMQIALYGLAYWQELQPTRLPENTYRELQLLARQYYQMTSLLIKAKVDFNALCDQVLPGMQELMSDHAGRHKLSDFVLRYHHTAHILKMGETRFRKDYCKWAEKKGYRNHERMAALIFATAQNGIPVLPDAPSTQIVITEAIRVLHTVEASRDAILTQMQALAKTLPEYSLVREMPCIGDTLAPRLIAEIGDVRRFHSKRALIAYAGIDAPPYQSGKFCANNRHISKRGNRYLRKTGYEVMQSYVMHKPANDPIFTFIEKKRGEGKSGKLAMVAGLNKFLRVYYGKVTELYRSSSAIE

SEQ ID NO: 261338 - protein, 416 aa, unidentified
MADMVVTLATVLFVGIDWASEEHAVHVMDPTGRKLSAFNIAHSRDGFDRLIKKLAGLGAAGEIPVAIERPDGRLVDALLEAGHPVVAVHPNAIKAWREAEVTSGAKSDPGDAEVIAEYLRLRQRKLRVLSPFSDATRALRAVVRARDDLVDQRVAANNQLEACLDAFWPGAKAIFADVCSEIALTFLERYPTPASARSLGEKRLAAFLVEHGYSGRRSPAALLERLHSVPDGIGDGPEAEARRDTVLGYVRVIRALNTSIKQLARSIAAHLGEHPDNEIFTTLPRSGSINAAQMLAEWGDCRAAYDSPDAVGALAGLAPVTKHSGKHHAVHFRWACNTRFRNAMTTFADNSRHASPWAADIYQRAIARGCDHPHAIRILARAWIRVIWRCWTDHTPYDPTRHGGAIRHATQLEEAA

SEQ ID NO: 261339 - protein, 332 aa, unidentified
MSKFNYFLGIDVSKEYFDAVVLLNSDKNNTVHNQFTNNNKGLKELIHWLKNHQANPENTLVCLEHTGLYGKIIIHNLLAKEFKVWVEMSLKIIRSLGIQRGKNDKIDAERIAYYAMKNQEDAQIYQPPREVVSKIRKLLTLRDHLVKTKAMLVKNTNELKGFEPELAKLSQNFSKATIQGIEKDLKSIEQQLDKLIKEDETISNLFEKTTSVVGVGKVTALFLICFTNEFTLYENPRQLACYCGVVPFEYSSGKSVRAKPKVHYMANKTLKKQLHMCALSCISTKGELKDYFERKVAEGKNKMLVINNIRNKLIHRICACVRDNKIYDRKVA

SEQ ID NO: 261340 - protein, 427 aa, unidentified
MKELTKVCGIDVHKMFLQVCILTRSGETSQHRFHNTPTGILALKNLVVAEGCEIVAMESTGVYWYRLYLELELDIRTIVANARQIKSIPGRKTDMNDARWIAELALHGLIRPSRIFPRRDREFRDLTRNRETLVRTRTTIKNRIHKILDNAGIRLNLALKDLFGKSGRHLLLGLAEQKDLETTLATIPSPRILRRADQLREILQGSPLSPIQLHLLTTQLHLLEEVEEKIAQLDELILASLRDSQMEAVAICTSVPGISITAATTILAELGDVQDFPTASHLVSWAGLAPSVYQSADSLVCGKITKQGSKSLRWILVQVAQAASRTTGTVFSNFFRRIAYRRGRNKAIVALARKILSILWHLLVNREHYIEPGLKRVRKLPARMTLPKISIDDAVATLLNAGYLVYSPENQKSTGKGVRAERATHPI

SEQ ID NO: 261341 - protein, 425 aa, unidentified
MPTSSIFIRGDKTLLRIIYPICCGIDIHKSFVVACIASTDDKGVTTYKSERFSTYTKGLRSLAEWLTTNNCKDVCMESTGKYWHPVYNILELTCNVVLAHPKYLKAIRGKKTDKKDAKWIADIFKHDLVSGSFIPPSVIRQLRDLMRYRFKLTNYITGEKNRAQNCLTISNIQLDHAFSDVFGKSATAILDYLLAHPDEKDFDVTPFVHRRCKTPIEEIQLAIDGTIQCEQAEKLKIIRSHMDNLERCKLNLESVILTIAESFLPQITLVSSVPGIKGFSAIAVIAEIGTDMSAFTTAKHLCSWAGLAPQCNESGGKKKSSRISRAGVYIKPLLIQCANAVVKSNKHPEIRNRYLAIKKRRGHKKAIVAIARMLLTAIYNILKKNEPYNPELYHKCDISQIDYEQQAILLLQRRGFVVTKAVVSS

SEQ ID NO: 261342 - protein, 338 aa, unidentified
MNIVFLGIDLAKNVFQLCGLNQAGKPVYTKRTGRKELLQTLANIPACLIGIEASTGAFYWQREFEKLGHKVKVISPQYVKPFVRGQKNDGNDAQAIAVALMQPTMQFVPPKSPEQQDIQALHRARQRIVNHRTATVCQIRGLLLDRGIPIGSAVSRVRRAIPLILEDAENGLSSRMRRTIAELYELFNDLGRRIHFFDKEIETVFRQSEACQRIARVKGIGPKTATAVVAAIGKGTEFKNGRHFAAWLGLVPRQHSSGDRQVLMNMTKKGDKHLRTLFIHGARAVVRVATNNNDGHMNQWVNQLKERRGFNKTTVAVANKNARVIWSMLRNETEYQVV

SEQ ID NO: 261343 - protein, 325 aa, unidentified
MKTMSGSAVMIGIDVASAHVDVAAIGGELPAALGHVGNDADGHSALADGLARLKPELVLMEATGGYEAALACALQAAGLRVAVVNPRMARDFARAMQRLAKTDRIDAATLAEFAGVLARRPDCARFIRPLSEPEQQDLAALVTRRRQLVSMQLAERQRLRLARPVARPSIEALLEAIARQLDEVEAEMARHVEQHHAQMAKLLQSVAGIGRVAAATLIAELPELGRLNRRQICALVGVAPYANDSGASRGRRRIVGGRFEVRRALYMATLTATRHNAAIRAFYERLVAAGKFKKVALIACMRKLIIHLNALTRDHLNAQNRSIIA

SEQ ID NO: 261344 - protein, 352 aa, unidentified
MSIIAFDSHKYYTFARVEDEDGRNVQECRIEHQRGSIVAFLRRQQPGSAVAIETIGNWYWIVDEIEKAGMRPVLVHAGKAKLMMGCINKTDKLDAKGLNMLQRVGRLPTVWIPPADIRDKRELPRVRMVFGTARTKLKNRIHSVLDKYGLQDEFEDISDIFGVKGIQRLNRVIEQLPEQTYCTTVLLLEHLEQTQQKIDCIEGRMKELFEETPQSILVETLPGVGFILAVVIIQEVGDIGRFSGAECFASYCGATPRVHASGGKVRYGRLRPDTNHYLKWAFSEAGNSVALNSKRLPDRHVSQLYNRIRHRRNHGKAIGAVARHLAEATYWILTKGEAYRERGLLEVSSTGA

SEQ ID NO: 261345 - protein, 470 aa, unidentified
MAAVMIGVDPHKASHTAVAISAAEEPLGELRVRACVAQAGRLLAWASAWPQRTWAVEGAGGTGHLLAQQLVSAGERVLDVQPKLGARVRLLAAGDVNKNDPDDARSVAVAALRSAGVQEVRADDHAAVLKIWSKRYRDLGRSRTQVVCRLHAVLGELIPGGVPKAITAARAARVLRAIRPEGAVQAARWELAAAFLEDLRRIDAGIRETRKKLAVAVAAAGTSLTGLFGVGPVIAAAVIGDVRDVSRFPGRDHFAAYDGTAPIEVSSGQRKVYRLSRRGNRRLNHAIHMAAITQIRNRHSQGRAYYDKKLTEGKTPKEALRALKRQVSNAIFACLQADARRAAARAKGPGGQQGNDSVASAAGSHPRHRLFGQATPGPDHHPTTVTGGPPPGPARSRDRAGHSSIAATLPPATPKVQVERPQRSKDERPGGAARRRPHSAARKATGQTAQVKTQRPKGTSHAAERTDGTS

SEQ ID NO: 261346 - protein, 315 aa, unidentified
MAMAVSVVKPIVGVDVAKNELVIYQAELDLLETITNDKTAIKKWLKALLAPVDLAIESTNIYHLEFADLAHEAGCTIYMVGGYELSHYRKGVKIRAKTDALDAKLLARYLKNEYEELHPWIPPSPLYRRLLSLFRRRAALVQARVGLVQSWANEPLLKTAFAEQLASMRRLETLVEKMINDHLNEAGLLAQLKRCMKVEGIGFLTGARLIAAFQRGDFRNADAFIAFLGMDLRVSKAGQKDGRRSLTKRGDPEARRLLHNAAMSASRTPSWKGFYEEQRARGFSTTQALVILARKLARVVFALLKGQGEYQPKAG

SEQ ID NO: 261347 - protein, 347 aa, unidentified
MNYIGVDCHISSLDFAVVNERGAVTQKAKVNTSVKEFMAFVKSIPRPRKIFIEEGELAGWMLETSLKFGEELIITDPKINKWIGKAGQKNDPIDAEKLAQLARGKYVKEIYHPVNHRRRFKDLVFAYHDTVKSRTRIKNKIKAHFRRNGIPCSGETVFSEKYRDKWREKLSNNKMTHLIVEELWVQLDQLRQSKEKLKRNIKIQSKQYPEIKKFRKVPGIGLIHASTISAIIETPHRFANKKKLWMYAGIGLVERSSGEKVYSRKLTWEYNRPLKNAIKKAAEAAILAKDNQFRRQYLRLTIEKGIASHRAKLTVARSMLATLYGMWKKGEEYDPEIDNKRDKGIKK

SEQ ID NO: 261348 - protein, 344 aa, unidentified
MSKHSIRAGDVAGLLMRLSQLKEKARGRTGRDFPIIAIQEAGLDGFWIHRVLQSEGIESHVVDAASILTSRRRRRAKTDGIDGETLVRTLLAYKRGEPRVCAMVKAPTPEEEDRRRICRERKTLVGERVEHVNRIKGLLFAQGVSDYEPLKRNRRARLEELKTGDGRPLPAHLKAQISRELDRLELVLPQLKAVEAERDALLKPVSEGCPTPVAMLAQLKGMGPEFTAILWSEGLFRSFSNRRQLAAYAGLAPTPWQSGSVAHEQGVSKAGNPRLRTTMIQLAWLWLRHQPTSALSVWFQERVQSNGGKMRKTTIVALARKLLVALWKYSTSGVVIEGAVMKTI

SEQ ID NO: 261349 - protein, 402 aa, unidentified
MNAVGIDVSKSKSVVAIMRPFGEIVSTPFEIKHTASDIHSLIELINSVEGESRIVMEHTGRYYEVLAHQLSEANLFVSAINPKLIKDFDNDSLRKVKSDKADAVKIARYTLDKWQNLKQYNVMDELRNQLKTMNRQFGFYIKHKTAMKNNLIGILDQTYPGVNTYFDSPARSDGSQKWVDFASTYWHVDCVRKMSLNAFIDHYQNWCKRKKYNFSQSKAEEIYGKAKELVPVLSKDAITKLIIKQAVDQLNSASTTVESLRTLMNETASKLPEYPVVMAMKGVGTSLGPQLMAEIGNVSRFTHKSAITAFAGVDPGVNESGSYEQKSVPTSKRGSSDLRKTLFQVMDVLIKTHPQDDPVYQFLDKKRAQGKPYYVYMTAGANKFLRIYYGRVKEYLSSLPES

SEQ ID NO: 261350 - protein, 350 aa, unidentified
MEHHAGLDVSLEETSVCIVDGAGKIIRETQVASEPETLVGYFSSLEIEVVRIGLEAGPLSQWLHAALTEAGFEVVLLETRHVKAALSAMTVKTDRRDARGIAQLLRMGWYRPVHCKTLPSQEVRAIITARKTLLGKLIDIELSMRGILRGFGLKVGAVTRKSFETRVRELMDGQSTLTAIMEGMLNTRATLITEVAKLHKQILRIARADGVCVRLMTAPGVGALTALIFKTAIDDPTRIAKSRDVGPLFGLTPGRYQSGETDIIGRITKVGDVMVRTALFEAATVMLTRSTKKSRLKAWALDVVKRRGTKRAIVALARKLGVVLHRMWVDLTEFRFAKQEAAVPALITAK

SEQ ID NO: 261351 - protein, 338 aa, unidentified
MQLYCGIDLHCNNSVISIINERDHVLQEKRLDNCLEQIISFLTPYQSELSGVVIESTYNWYWLVDGLMESGFPVHLANTLAIQQYSGLKYTSDSTDARFLAHLLRLNILPKGYIYPKAMRSVRDLLRRRLLLIKQRTAHHLSLQSMINRHTGQRLKALQIKQLKKEALGEYFTDRASLLTARCEWQLMQDLTQHIEAIEHFVLADCQESRGFAILQSTPGIGKILAMTILLETGPIERFPKVGNYSSYARCVPSDKISNGKSKGKGNTKNGNRYLAMAFVEAAHYATIWNPHIKRVYQRKLRKVPTMVAKKAIANKLTRACYHMLKDNTIFDVKRAFG

SEQ ID NO: 261352 - protein, 279 aa, unidentified
MEITVVGLDIAKRVFQLHGVDAAGKAVLRRKLQRSEVLAFFKALPPCLVGMEACGTAHYWAREIRELGHEVRLMPPSYVAPYVKRGKTDAADAAAICEAVTRPTMRFVPIKTAEQQAVLMLHRTRDLLVRQRTMLVNALRGHMAELGVIAPQGIARVADLMAVLLGEDTTNVPALARQALRGLAAELEALDRRVKEIEVAIVTWHKDNEASRRLATIPGVGPIRASAIVAIITDPFQFHSARHLAAWIGLVPRQHSSGGKQRHRVIATCADCWCWVQPR

SEQ ID NO: 261353 - protein, 340 aa, unidentified
MTITTVGIDLAKNVFAVHCVDQHGKTVLVKPKVSRAALPELIASLPPCVIGMEPCSGAHYWARLFRQYGHEPRLMAAKFVSPYRMAGKSGKNDAADAQAICEAVRRPHMRFVPVKDESQQAMQCLHRIRQGFIEEKTATYNRLRGLISEFGVIAPQSTDALRHMVSEQKSSLPLQVQQCVNDLMEHIDRIEDNITEYDRILSRMAKTDHRSQRLMELKGIGPTTACALVASIGNAHDFKNGRQLAAWLGLTPSQYSSGGKSKLGRITKAGDSYLRTLLVQGARSVLIGAEKRTDLFSRWVCSLVDRRGYWRAVVAIAAKNARLCWASLHYGDDFRLYSAS

SEQ ID NO: 261354 - protein, 341 aa, unidentified
MNEVTLIGIDLGKHVFHLHAQDAKGSEVFRKKPPRSQLLPFFSNLKAVTVVMEACAGSHWLARKLNAMGHVAKLVSPQYVRPFVKSNKNDFVDAEAICEAASRPSMRFVEPRTEAQQLLAALHRVRESLVIERTATINRIHGILLEFGIVIPLSKITLRRLPDALAVHDLAPRLIQIIHRLHEHYRYLDQQVADVERDLTAQLREDENAARLLSIPGIGTITASLLASEVGNVAQFACGRNFAASIGLVPRQHSTGGRSTLCGISKRCDKHLRHLLVQGARAVIQRADQRTDRLGAWIRSMLTRRHSNVVACAVANKLARIARAVLTKHTAYDASRLECEV

SEQ ID NO: 261355 - protein, 391 aa, unidentified
MTYFVGIDIAKFKHDCFIQDHNGVVIRHSFSFRNNQDGFNTLLDALNGLDHSQEIKIGLEATGHYGSNIKQFLNSNDYSFMEFNPLLIKRFSQATTLRKTKTDKIDAALISSFLMTVDYKPITHTSYHTSALKSLTRLRESLVKERSLTLVRITNVLDIIFPEFKPLFDNSLKSSTCMYILENYSSPDRISRMNVESYNKMKSKLRKTISYDKFLKIRDAAKSTVGTTDEIYVYELQILLGIYKELDSRISDLENKIIQYYRQFNSHIHTIKGVSELSAAAIYAELNGVTGFRNPDQILAFAGLDCSRIQSGESDKNGRMVKHGSSALRCVLMRCADSFALHNPVVYEYKLKKMNEGKFFRVALSHVAKKLVRTIYTLEKNDLDFDQSKLR

SEQ ID NO: 261356 - protein, 346 aa, unidentified
MQIIGCDFHPSWQQVAVFDSLTGEIVERKLVNGNGEAERFYRSLPVPSLIGLESCGNSQWFVELVEKLGHEVWIGDAAQIRASYVRKQKTDKRDAAHILKLLIEGRFPRLWAPDATVRDLRQLLIHRHKLVEIRARVKNGLQHLAMNRGMQKKSRLWSVAGQKAFVALPLEGWASCRREDLQRLRTMLDCQIGKLDEAAAKAAASNESARLLMTQPGVGPITSLAFVLTLGDVARFQRGKQVASYLGLIPREHSSGGKQHLGAISKQGNRFARMLLVEAAQTAVRLDEGFRKQYQHRCHSKAKGVAKVAAARRLAVRLYWMLRTKMPYPEIVRIESSSRVPLDGAS

SEQ ID NO: 261357 - protein, 350 aa, unidentified
MLIIGCDFHSRFQQIAMLDGQTGEVIERRLEHATGEARAFYAALPGRARVGMEATGYAQWFEGLLAGQGHELWVGDAAEIHAARVRKQKTDSRDACHLLDLLLQDRFPRIWVPSPQERDVRQLLRHRHKLVCSRTSVMNQLHALAMGQGVCRKQKLWTAAGRRELESLALGPWASRRRRELIEMLGRFDASIQELDQAVIQEADRHPAAMRLMEHSGIGPVTALAWVLTIGPIERFEKSRQLVSYLGLNPRESSSGGKQRLGSISKQGNSMLRSLLVEAAQTASRFDPELRRHYVRLKFRRGRAVAKVAIARKLVVRLYWRLREQVSAAPPARTQGNPGNFLMELSPSTK

SEQ ID NO: 261358 - protein, 372 aa, unidentified
MGEHSEVYVAFDTAKLKHAVAIAEGGRGGELRFVGEIENRPATIERLIKKLARRYKRLQVCFEAGPTGYGLYRQMQALGHDCLVVAPALIPWRSGERVKTNRRDALTLARLFRAGELSGVWVPDAVHEAVRDLVRGRTTAAEDVRRKRQQLLSFLLRHGRIFTGGDHWTRAHRRWLAEQSFDHAAQQIVFQDAVATIEDAVERQRRLEEQLANLVRTWSMAPVVAAYQAMRGVSFLVAVTFAAEIGDVRRFDTPRQLMSFLGLVPAERSTGETVRRAGLTLAGNRRARRVLVEAAWSYRHPARVSETLRVRLEGLPKTIRDIAWKAQVRLCGRYRRLNAAGKKLPVIIAAIAREMAAFLWAIGRQIAPVAVT

SEQ ID NO: 261359 - protein, 318 aa, unidentified
MSSAAPAFVGIDVAKAELVITIRPSGEHWTIANDVAGIHTLVQRVRGHAPTLIVLEATGGYERAAVAALAAAQLPVVVANPRQVRDFARATGQLAKTDRIDADILALFAERVRPAPRALPDDAAQALDALLTRRRQVLEMLIAERNRLEHAVPTVRRGITQHIRWLERQLADVDQDLDDTIQASPVWRAKDNLLRSTPGVGPVLSRTLIGELPELGTLPRKQIAALVGVAPLARDSGTLKHKRLVWGGRAPVRAALFMAALVGTRCNPVLRAFYRRLLEAGKPKKVALTACMRKLLTILNAMMRTNTAWRHIDLSPTT

SEQ ID NO: 261360 - protein, 393 aa, unidentified
MDARTVNNLPPDAPHNNGATRCYMAIELSKKSWVVAVNTPLSEKISRHTLRGCDSKELLELIEKIRTRIERELKRPVEIVCCYEAGYDGFWLHRLLLDHGVCNFVIDPASVQVNRRARRAKTDNIDVAQLLRFLMAYLRGDPKVWSVVRVPTIDEEDDRRLHRERDRLIKERVQHVNRIKGLCALHGIYDYQPLRSDRMRRLEQLRTRDGRELPLRLKAELRRELQRLELALQMIKAVERERDAIASGNAVSTHTNTRMIQDLVKIRSIGAETAAVLVGEVFYRRFHNRRQLGSYAGLTPSPFNSGSTNRDQGISKAGNPKARTTMIELAWAWLRYQPKSPLSTWFNERVGSAKGRIRRITIVAVARKLLIDLWRYLETGVVPTGALVRGCKR

SEQ ID NO: 261361 - protein, 350 aa, unidentified
MKTNSSSITIGIDLGDLKHAICVLDADGTIIKESKITNSRNALQKLSNKYPGALIAMEVGMHSLWINWFLKDLGHRVLVANPRKVRAISANIRKSDRNDAEILARLARSDEKLLSPIEHRSLDMQRDRLQVKLRDNLVRQRVDVISAVRFTLKSLGIRLRSTNTACFAKYGRRVLGEEHPEILTLVEPSLAVIDVMTQQIRGFERSIEALAVDKYPETEFLTQIPGVGTLTSLTFVLTIGDPTRFKRGRDVAAYLGLVPKRDQSGDTDKQLRISKAGDVYLRRLLVTAAQYILGPFGPDCRLKRYGEKLAERGGSRAKKKAVVAVARKLAVLLLTLWRDEAIYQPKRRAA

SEQ ID NO: 261362 - protein, 339 aa, unidentified
MVEVYAGLDVSDKSTQVCVVDGSGAVVWAGACATDPEVLAKTLMRHARGLVRVVLETGPLSAFLYHGLVERDVPTICVCARHAKGVLKARVNKSDVHDAEGLAQMSRTGWFKAIRIKAETTHIDRARLKIRDQLITSRQAMANQLRGLLKLFGLRLGQVTTPAKRSERLKALFQLRPDLEPALRPLIESLQALEGQIRCSSKALAASAAADPVTARMMTIPSVGPITALTYKTTIEDPNRFARGEDAGAFAGLVPRRDQSGERDYRGRISKAGDPMLRSVLYEAANNLLVRVKRPCALQAWGKRLAETKGPKRARIAVARKLAVLLHRLWLSETEFRWA

SEQ ID NO: 261363 - protein, 419 aa, unidentified
MAGSNDNGIVNVVHPICCGLDVHKEKISACLISSSVFGGTYTEVQEFGTFTDELMRLRDWLLKNVCPIVAMESTGIYWRPVHNVLEGYVEVILVNARHIKNVPGRKTDICDSKWLAGLLRHGLLKGSFIPPKEVREWRDLTRLRRTYVETLGDYKRRTHKLFESANIKIDSVVSDLFGQTGRNLMRLLGQGSFPIRQEDMEGCLRGKLKAKREELYRSIQGFFTDHHGYLLHSLLKTIATIEGEIEAINDRLRQVMKNHESLLRMLMEVAGISEVSACGILSEAGSTMDPFRTSAALCSWAGVCPGNNESAGKRHSGKSPVRKHHLKTIMVEVAWAAVKVKGSYYREKYYRLKARRGARRAIVGIAHRLLKAVYHIIKDGVPFKDLGEDFLNRANGLQSRVRRLRNQAHQLGYALVAQI

SEQ ID NO: 261364 - protein, 315 aa, unidentified
MTVCLAQNVGVDISKDFLDIAFFPPAESWRFSNDHKGFRALLKRLGTRVIERIVYEPTGAYHRLFERTLAEAHMPLVKVNPRQARRFAQASGKLAKTDPCDAAMLARMGAALQLEPHCVVSNAVDALEELQIARDALVKDRVAALNRKKTARSELIKTQLGERLRQIDAQIKEIEREQKKLRDADPALRQNFDILDSMPSLGAVTANALLAEMPELGHLGEEQASALVGLAPIAEESGKHKGKRTIGGGRARVRQALYMPALNAIKPNGIFHKKFMAMIDAGKPAKVAITAIMRKMLILANALIRDQRKWTPTPP

SEQ ID NO: 261365 - protein, 362 aa, unidentified
MMYLGVDLHRKVSHVVALDGAGATILSRRFEHSRDAFRRVFGELEPEPISVAFEATYGWGWFADLLADAGIEAHMAHPLATKAIGAGRVKNDAVDAATLAHLLRTNLLPEAWIAPPEVRELRRLVRMRASLVRVRSRLKCQVHAICADAGVSVPASDLFGRKGRATLETLTLPPRSASRLAANLRLIDDIALEIIAADREIVMAFKGDDRVRRLLPIPGIGILTAATIVAEVWDVGRFPSADHLASWAGLTPTERSSADHVRRGHISKQGSRWLRWAMVEAATKIGSSRSARLHRFVDPIADRRGTKIARVALARRILTLAFYALRDERGCREYPALPRPSRRPVTARSPRVMASPDGRLSD

SEQ ID NO: 261366 - protein, 341 aa, unidentified
MDQYVGLDVSLKQTWISVRQNRKRIWRGKCLSHPRAVADAIRQHAPNAVLVVFETGALATWFHHALTAEGLPAVCIDARHAKAALDTAPNKTDANDADGLALLAEAGFFREVRVKSWEAMPVRTLVGGRAQLIAISNDLSNQIRGIMKTFGLVVPKGGGRSFETNVRALLEGQAALAGSVLPRLEAWRAVRVQTAKLDRQLVAVARKSPACRLLMTVPGVGTITALSYTTMIEDPANFANSRAVGAFVGLTTRSYQSGEVDYDGHISRRGDKHVRALLYEAATVVLTRVRSDSALRRWGLKLKEKVGFKRAAVAVARKLAVILHALWRDGRVFDPAFGAPA

SEQ ID NO: 261367 - protein, 426 aa, unidentified
MESVHRSCVGLDVHKKSVAACVRRLDSSGKVHKHFRQFGTMTGELEELVAWLKSHEVTHVAMESTGVYWKPIYNLLEERFEVLLVNAQHIKHVSGRKTDMKDCEWIAQLLQHGLLKASFIPERLQRDLRDLTRSRVKCVEQRTGVANRIHKVLQDANIKLSSVATEILGVSGRSMIRAIIAGEEDPEKLANLARQSLRGKIPQLKEALRGKVRDHHRFLLETLFEQLISTEETIEKYSKRIDELLGSEPFVERAEEDKPLPFGEATTLLRTMPGISRVAAHAILAETGTDMSQFPSAGHLCSWCGISAGNNESGGKQRSAKIPKGNRWLRRILVETALSAGRSKNTYLSAQYRRIASRRGRKKAAVAVAHSMLESIYHMLKRHVEYQDLGPHHFDTLEPDRLTRYLVKRLENLGHKVTLEPRAMSA

SEQ ID NO: 261368 - protein, 425 aa, unidentified
MSQRDYNKQVAKRQRIRKATLIVGVDVGKSFNALGFMDKEGNVLGSCAKLYNNRDGFEEFINLIEGLKAKHHLRDVLIGMEPTGHYWRKLAYFAKEHGYEVRFVRTTALKHHRELDESSSAKSDQRDALTIANITREGKYIDTVIEDGVLRQLRTLSKARERLLRYSVSAKNSLHAALDDYFPELHEIFWSMGSRSLWTILEQCPFPQDVMLMEVSTLQNLIARSSRKKAGSARKAEKLIEAAQKSIGVKQIGNADRYRVQMCLEEVKRTVMTLKNIDKQLKCLLKETSAASYLMSIPGIGPLSAAVFLGELGDPTHFHNARQIVKYAGYDPQESDSGSRIGRKFISKKGRWLLRKYLFFMSMRVVVLSNYFQAYYLRKLETKNRVGQQPRRKEMLCAVAIKLIKVIFALLRDKREFEDLVPAAA

SEQ ID NO: 261369 - protein, 412 aa, unidentified
MDIVHERAAGMDISKRDAKVCVRVPGTRAGTYTSKVTTWGATTQSILELREFLEHEHVTTVVMEATSDYWKPFFYLLEETLPVMLVNAKAARNIPGRKTDVSDAAWLAQLAAHGLLRASFVPPEPIRELRDLTRARALATRDRAREIQRLEKFLESSGIKLSSVVSDLTGVSSRDMLEALINGERNPEVLAGMARGTMRSKIPALVDALTGRFKPHHAFMARLHLDQIDAHNRTIEALTARIEEAMEPFRDAREALATIPGVSQRIAEVIIAETGGDMTVFETPGRLASWTGVCPSANESAGRIKSAHILPGNKYLKGALGTAAMSAAQSKNTYLAAKYHRITVRSGRNKALVAVEHSILTATWHMLRNGECYTDPGADHYTRLNPSRAKNNAIKQLNSLGYDVTITPAPAA

SEQ ID NO: 261370 - protein, 332 aa, unidentified
MENFYFIGVDVLKKKLNFCVMFEGKVVHEEETSNHQGAIMSLLHHLEEDYGIASGQMLVCAEHTGQYTFPLACACKAVECKLWLENAAEIKYSSGVQRGKNDRVDAKRIAIYASRFQDKVQYYERPTEDIERLKQLESERTLYVTDFAKYKGQMKDQKEYMPKSLYERKMKRLQALMDDLEEAIQSITDEMDEVIASCPVLFRQRELLMSIDGVGRVVATNMIIATEAFTRFDDPRKFNCYAGVAPFSYSSGSSQHSKARVSHRADKVMKRLLHLAAVAVTHRIGGELKKYYERKVAEGKNKMSVINALRAKIVARMFAVIKRNERYKPILS

SEQ ID NO: 261371 - protein, 411 aa, unidentified
MEILTKCACGLDVHQATVVACLLTVLSNGKVNKQMRTFGTKTRELVELRNWLQSEGCTHVAMESTGVYWKPVYTILEEGPFELTVANAQHIKHVPGRKTDVKDAEWIADLQLHGLLNPSFVPSKPIRELRDLTRYRRKLVESRSAERNRLLKVLETANIKLSSVAADVFGVSGMLMIKALVEGKATPAEMAQLARGCLRKKLPELEPALEGRMQEHHRYLLKLQLRRLQDLDQDLKELEARIQEKLQPYQEQMELLRGIPGVDWGTAAAIIAELGPDMKGFRSASQVSCWAGLAPGNHQSAGKRRQARVTKGNVYLKTALVEAAHAASRAKGTYLRDKYYRVKARRGAKRAAVTVAHKILIAVYHMLSNMVPYKDLGDVYLDKLNQHQVKRSLVRRLERLGYRVTLEQQAA

SEQ ID NO: 261372 - protein, 459 aa, unidentified
MQTFYLGIDASKGYADFIIVNIHKKVVLESFQLDDTFDGHCLLYELLMNFLTDHPDSNICAALESTGGYENNWYNALLEFQGTLNLQTARLNPLGVHHNSKAGLKRNVTDKISAQNVAEYMIAHPEKVSYQSQDQLASLRKQWGFIKMLTKQCTQILNQLGSLLYSANPEILTYCKDGVPAWVLKLLVKYPTAANLARAKVCLISQIPFVSTTKAEALVLNAKRSVASAVDEVTQQLVAATVKQILHLKETIKIQTAIMAKACAVPEVDLLKTFIGISDASAIGLILNIQSVKRFKTVKKLAAFFGIHPKLKISGDGISAVRMSKEGRAEPRQILYMVAMVAITHNPLIREIYEKHVSQGMEKMAAIGLCMHKILRIAYGMLKNNRPFDPEIDRRNSQKPTTHRKQRENKTRRYQDYDSKAPISRRQKAKRMEQRQSQSDNGAAVRDLSPRSIPDVSLP

SEQ ID NO: 261373 - protein, 382 aa, unidentified
MIFDPALGPKEAERIIGCDLHARQQTLAMLDTETGEVVNLTLMHEGNNVREFYSKLPPPVLVGIEATGSMQWFLNLMEELGIECRVGHPAQIRAAEPRKQKHDRRDADLILKLLAQNRFPAIWLPSKELLDLRALLLHRHQWVRMRVRMQNALQAIALANGLRRGPALWSYDGQAKIAFLPLLPHAAYRRSALQAMYKNMQSEIENLTRRVAEQAGNRCGARLLMTHPGVGPVTALATEVFLGDPQRFTDSKRLASYVGIIPREYSSGEHQRLGGVTKQGSPLLRFLWGEAGAHAARRDPELKRFYRRKLVQKGLGKARVAVARKLGIRLWIMLRDEIDYQEFCRRGQIQQKTVRPVVGMPETGNGAKSHRPSDEATRLPES

SEQ ID NO: 261374 - protein, 406 aa, unidentified
MHPRCCGIDIHKESVVACLRLQEGRRAKTEVRRFGTTTAELLRLHEWLSHAACTHVAMESTSVYWKPVFNLLEGSFEVVLANAYHIKAVPGRKTDVKDCEWIANLLAHGLIRASFIPPAPIRDLRDLTRHRKSLIRDRVQATNRVHKLLETANIKLANVVADVLGVSGRAMLDALVAGETDPQRLAKLAKGSLIPKVKPLAEALRGGFTSHHAFLLGQMLTQLDQLAAMVAQCDARILEVSKPFEADIQRLQTIVGVGRRSAEVLVSEIGVDMSRFSTAGHLASWARICPGSYESAGKRRSAGTGTGNNWLRTTLLESAWAAAHTRKSYLGAQFRRISKRRGPKRAGIAVAHSILVIAYHMLRNGVDFKDLGADYFDRMNTAKLTRYHLRRLAELGCDVSALAVSA

SEQ ID NO: 261375 - protein, 439 aa, unidentified
MTDRSLGSPEPEWAAFVAIDWADKKHAWSLYVAGAPKREHGEIEHSPEAIHIWISQLTTRFAGRPIAVCVEQSRGALLFALSKYDNLVLYPIHPAVANDFRKAVYPSGSKSDPVDADVLLDFLLTHRDRLRVLQADSEQTRELQFLVEDRRRIMDEKTRCLNRLTQRLKMYFPQVLCWFGSVDSLLVWRFLEQWPDLESLRKARRSTLKAFLERDRRCSPPEIEELWPAIRNAIPATQDAAVIASSILFVKTMLRQLQILREAIREYDKRIKQLTETHPDFPLVHSFPGVGQALAPRLIAALGTQRDRFASANELQSYSGIAPVQESSGKRHCTHVRRACPKFVRQTFQEWAHHSVPHCQWARAYYDQHRARGKQHHAIIRGLAFKWIRILYRCWQNHTPYEEAAYLARHSRRSPTPRTTVETVWKTTAGFSKITAFNS

SEQ ID NO: 261376 - protein, 394 aa, unidentified
MRFVGIDVASERHVVAGVDETSAVLFKPTSFTEDAEGYEKLLALLGAATDTLVAMEATGHYWKNLFAALVAQGFAVALLNPLRTRRFAGEDLQRTQTDAIDALGIARFAAQKRPPATRVPDRATEELRELVRFRDRLVQDFGDRVRQLHRLVDLGFPEFTRYVRDLGSELATALLSEYPTATAFAGVSVRRVAGLRYDGHHKVGDELAAAVREVAARSVGRHHGEAYRLQVRYTCEDLALLRRRLRTLERDIERLLSDHEVGQLLTTIPGIGPQTSARLVATFGDFTGFPDAAAVAAYVGVIPALRQSGKRTSPRAGLTPLGAAALRAKLWMPTLTAVRKNPWLRAYYDRLIARGKLPKVALVAAMRKLLHAVYSVATHRRPFVPHPIAAEARP

SEQ ID NO: 261377 - protein, 411 aa, unidentified
METIVRRCAGLDVHKESVVACARVIDDNGELQLSTQTFGTTVSDLLILNDWLASHGVTLVGMESTGVFWKPVYMLLETEFECWLLNAQHLRNVPGRKTDVGDAAWIAQLVAHGLVRPSFVPPKEIRELREVTRYRKALIEDRTREAQRLHKIIEGSGIKLANVATDILGVSGRAILNALIGGTHDPDILAELARGRLRKKLPALRKALSGWFSPAHRLLVGELLAHLEYIDESIERLSNDVATMIAPFAREINLLDTIPGVNLRSAEVMISEIGVDMGRFGSAGRLVSWAGMCPGNNESAGKHFSGKTRKGSKWLRIALIESAKAASRTKDSYFAAQYARIKGRHGHQKATVAVAHSILVVAYHLLERGEPYNELGGDYFIERQQKDAYQRRLVKQLERMGYEVALTKHAA

SEQ ID NO: 261378 - protein, 350 aa, unidentified
MPRKVGTAIVTIGIDPGKNTMHLVGLDARGEIVLREKVARTKIVSRLANVPPCLIGIEAGMGTHYVTRELLALDHDVRQVPPVYAKPFRQTHKNDFRDAHAVAEAVQRPTTRCVPPKTDEQLDLQALHRVRYRLVGERTAIINQIRCFLLEHGITVRQRLHWLRHALPDILAKRTDVLSPRMVRILEDLAQDWRRLDDRIEAVSGEIDALSKNTELCRHLMTIPGIGPIISSAVVAAIGDGAAFARGRDFAAWLGLVPKQISTGDRTILGRITKRGNRYLRTLFLQAARVVLLRPRNWMQHGFGPWLAAAAQRLHHNVLATALANKLARIAWSVLAQHREYEARLSVAAT

SEQ ID NO: 261379 - protein, 377 aa, unidentified
MKATSTRPAAVLGLDVGKSSHWACLVDRDGEVLASAPVRNREAELDTLFASAPAGTLVVVDQFRNIGSLAVRRARAAGLGVAYLPGLAASRAAGLFAGETKTDERDAAVIARTALGVPDSLSGVPGRGEALEAARALSSQRDHVVACATRDKNRLRAVLLESCPALEAAVDLSDRRWLELLAGFGGAWGIARSGAGGPRAEAAGEAAAASTAPPPALVEAENRQVRFLAARISEALDEAGALEAETAALLEGDETYACLLTVPGIGPRTAAQLAVSVDIGRFPDHDHLASYCGIAPRVRSSGTSVRSVRASRRGDARLKSLLIFSCNSLVRSSGRYGEYYRACRARGMGHGRALKAVARKRLRAIYAVMRDRVPYRE

SEQ ID NO: 261380 - protein, 387 aa, unidentified
MPQPNDLSRSLAALDQDSTLIAVVEMSQTSWLIGAIVPGVERHPLKKIVPDENELLRLLYRWRDEAIKAGRRITRITVAYEAGRDGFWLARWLRARGVEAYVIHASSVAVSREHRRAKTDGLDTELLKRTFLGWLRGERDHCKMAAIPTLAEEDAKRPSREREALVRERTRLTNRMKSALARLGIRNFKPQLRKAAERLAAVRTPEGEPLPPHTLAELHRDIARLQLVKGQIEQIERARLERLRQPPTDAPHAMLVQLAQVYGLGIETADMLVHEVMVRDLRDRRAVARYGGLTGAPDESGARRREKGLARAGNARVRRGMLQLAWRFLRFQKQSALVKWFEARTADGRMATRKTMILALARKLLIALWRLATVGEIPPGVKLRPAA

SEQ ID NO: 261381 - protein, 341 aa, unidentified
MDKVSTIGLDIAKSVFQVHGVDAAGAVLIRKRISRAKVLEYFGELPPCLVGIEACPSAHHWGRELQGLGHTVRLIPPSYVKAYLKRGKNDANDAAAICEAVTRPSMRFVPIKTKEQQTALMLHRARQLLVRQRTMLSNALRGHLAELGIVSAKGRNGTAELLRIIADGRVSPAVCGILKVLTRQYGAVGTEIASIDKSIMALHRGCEASQRLAEIPGIGPIGATALVAEIGDWNAFASGRSLAAWIGLVPKQHTTGGKDRLGSITKQGNRYLRWLLVVGAMAVIRYARKHGTQKRPWLGRLMERRPTKVAAVALANKIARMAWAIMVRGERYKEPKLLLAA

SEQ ID NO: 261382 - protein, 345 aa, unidentified
MEPMYYIGLDVHKRKISYCVKDSAGKVYAEGSLPAARMDLDLWMKTLPQPWSAAMEATMFTGWIYDHLKPHAAALKVAHPLMLRAIALAKKKNDRIDANKICDCLRCDFLPECYMAPAAIRERRRTLRYRNLLVRQMVQMKIKISSLLMEAGVSYNKQRLHKAGYFRELLATNPDIDEGLRSLLRLCRETVVRLQKTEGAMVRSLERDSLLMDRVERLMTIPAVGPITALTWALEVGDVQRFSSIKKAISYCGLCGAEKSSANTVQRTPLSKQRNKHLQTTLIEAAKMAPRNSSELAMLYDTEKHKGNANRATLAVARKLVAYLMAVDRRQRDFQVVETGNEIAA

SEQ ID NO: 261383 - protein, 334 aa, unidentified
MNTPIVGIDVSKRKLDVALLVDGKVKAKAVPNSQEGFAELEVWLNKQKISLLETHICLESTGVYSEPIALYWFDKGIKVSLVNPNCIKSFGSSENIRNKNDQIDAGLIARYCAAMAPPSWDAPSREQRQLRAWGNRLTALQDMRQQELNRLEVHETAKQQDVIPHVQAHIKWLDAQIAQIARDIDDHIDRHPGLKQDAELIESIPGLGRTTAVKVLGHVGDVRRFGNAKALAAVIGVTPRQRQSGTSIRGRTMMTRMGNKHLRAALFLPSLVAKRHNPILKQFGQRLEANGLSKMAVAGAIMRKLVHLIYGVVKSGKPFDPKYMEKGLAVQDGI

SEQ ID NO: 261384 - protein, 413 aa, unidentified
MVDVLHERCCGLDVHQKTVVACLITPGAGGPPHKEIRTFGTMTADLLELADWLRAAACSVVAMEATGVYWKPLWNLLEDEFTLLLVNARHIKAVPGRKTDVKDCEWLADLLRHGLLRASFVPDRPQRELRELTRYRTALVRERAAEIQRLHKTLEGANLKLGSVASKVLGVSARQMVDALLAGTTDPAALADLAKGKLRAKRPQLERALVGTPGLHQHFLLACQLAHIDFLDETVEQVSVEIAERVRPCADALARLDGIPGVGQATAEVLLAEIGADMSRFPSAEHLAAWAGMCPGNYESAGKRQKGKTRKGSKWLRTALLEAARAAARKKESYLAAQYHRLVPRLGKKKAAVAVGHSILRIVYYLLQRETTYQELGGTYFDARHRDRVERRLVHRLEQLGFEVTLTPKDPAA

SEQ ID NO: 261385 - protein, 369 aa, unidentified
MNTTTFVGLDVHARSIKAVALDAMTGEVRSATFAYDAAAVAEWVGSLDPAAKCVYESGVTGFDLQKKLTALGVDCVVGAVSKMIKPSADRKRKNDRNDAEFLARMLSVGNVVEVCVPDDECEAARDLTRALDDAREDLKRCKQRLSKFLLRHGLVFSETNAKGQRKKNWTAAHWAWIRSISFPDKADDEVLAYYIDAARQAMEDKARLERLVEAEASKPRWKKRVDSVRCLKGIDVTSAADLVFEAGEFSRFKNARSFAAWIGLTPSEHSSGESVRQGGITKAGNKHLRRVLVESAWHYLGCSPHSKDLAKGQAPDPGARRHAAKGVRRLVGRRAAMLERGVHKNKANVATARELACWCWAIGRMVENG

SEQ ID NO: 261386 - protein, 350 aa, unidentified
MLIIGCDLHTRYQQIAVLDKETGEVVEHRLEHKNGETRAFYASLPCGAVVGIEATTPAHWFERMLTEFHHELWVGDAAQIRAMSVRRQKHDPRDAWHLMDLMASGRFPRIWTPSPRERDLRQLLAHRDKLVRMRTAVKNQLHALALSQGLCRGHQLWSARGQAELQSLTLLPWAGRRRQDLRRLLTPLDTTIAELDKAVAREAEAREEVKLLMTHPGVGPVVGLTFVLTLGAVERFPRSKQVVSYLGLNPREHSSGGRQRLGRISKQGNVMMRWLLVEAAQTAARFDPELHRRYCRLKFRRGSSLAKVAIARHLAVRLYWMLRNQKGYAQLVRMQGSPGSGVVDPGPSTN

SEQ ID NO: 261387 - protein, 430 aa, unidentified
MEASIATTEAVTAYIGIDWADQKHAIALRSAAEPNKIEHQLIDQKPEALMEWIGGLEQRFGTQGKILVCLEQSRGALIYHLMGYDFFELYPVNPLQLARYRETFSPGGAKDDRPDSELLCELLYCHGERLRVLKPDSVLGRKLNFFNEGRREAVDQRNGLSNAIKSQLKVYFPLALELLDQDTSTALAADLLLGWPTLEAIQKQPAHRLRKFFYGHNCRGEHRMLKRLELVQKAKPLTQDSAVIEPAALRVQILARQLKNLLPDIARYEDKIAQLFAAHPDRFLFENLPGAGEALAPRLASAFGSDPQRWESALEIATLSGIAPVRRASGMKSGKKGQRKASVQFRQACPKFLRQSFHEFAGCSIRYCPWAQAHYDALRARGKGHHAAVRAVAFKWIRILFACWKQRTPYDPQRYLQALQRRGSPLATAC

SEQ ID NO: 261388 - protein, 400 aa, unidentified
MSNSPQIRVSIDVGYRQHSVAVGLSNGELLDEFEIAHDPHGFDAFFTRIESHQGLYDGEIAVAMEGYNGFARPLDSLVQKRRWQLYNINNLKLARFKEIFPAAAKSDRIDARRALELFQLQDHLPLAKRVLQRVPPGSLCNAKLKRLTRRRRTLVDDKVQVLNRFQSDLQAVCPCLLGITRHADNLWFLRLITQVSTLPKLARLREKTLLKIPSIGRNYVAIIRQWQKRARFSGEVDYVGPMIIDDAKRILQLHTQIKELEVQCAELINDSPMAQRIDSIPGFATVCASELAGEIGTIERFAHEGSLAVYLGMANLDRSSGASKGAKAPRHVNTRAKRAMMTGVDRQRKQVPQSQRYYEKKRAEGKGHNQAIRALGRHLCRILFTMLKNDRDYETRTETA

SEQ ID NO: 261389 - protein, 326 aa, unidentified
MEHELHYIGIDTAKEKLDVDVLRPDGRHRTKKFANTTKGHDELVSWLKGHKIDHAHICIEATGTYMEPVAECLYDAGYIVSVINPALGKAFAQSEGLRNKTDTVDARMLAEFCRQKRPAAWEAPHPLERALRALVVRHQALTDMHTQELNRTETAREVQRPSIDAHLLWLEAELKRLEKQIKDLTDDDPDMKHPRKLLESIPGIGEKTSAVLLAYIGLKDRFAHARQFAAFAGLTPRRYESGSSVRGASRMSKAGHVSLRRALYMPAMVATSKTEWGRAFRDRLAANGKKGKVILGAMMRKLAQVAYGVLKSGVAFDASRHNPVAA

SEQ ID NO: 261390 - protein, 343 aa, unidentified
MNVTRIGLDLAKNVFQVHGVDRDGRVVAKRQLKRGQVHAYFEKLPACRIGMEACAGAHYWAREFGRMGHEVKLIAPQLVKPYVKGQKNDANDAEAICEAAGRPSMRFVTAKTVAQQDLQAVHRIRSELVRQRTAKVNQIRGLLAEYGIVVATRIDVLRRALPDIQEDADRGLSGLFRRLLEGLRQDLVELDRRVAELDGEIQTAAKEDETACRLQSIPGIGPITATALAASVGDGRQFKRGRDLAAWLGLTPGQHSSGGKDRLLGMSKRGDSYLRTLLIHGARSVIQAAGNKTDPRSRWIIGVAERRHKNVAAVALANKNARIAWALLARGGAYDSQHGMAAA

SEQ ID NO: 261391 - protein, 341 aa, unidentified
MSIVGAFDVHRRQLTFDYLDTVTGEVKRGRVVPADREHLRAWLDRFAGQDDAHFALEGCTGWRYVTEELAAAGITPHLAEPADTAALRGKKRHAKTDKTDSRHLRVHLLAGDLPECWIPPGHVLEARAVVRLYKDLLDERGAWHQRIAATLFHQGAPLTGSVATAPGRAAAGQADLSPAGRQAVETGLRQIGRLSAELDPLRRQLDMLSRRQPGCRALRNTHYGIGPITSVAIWAELGDVRRFGNSDDVVRHTGLDITVYSSDTKRAAGHLSRQGPELLRWALYESAKLAARPAAPDYGYYTATRGRRTGGLATLSVARKLARRCYHTLRELGEEAIQPAA

SEQ ID NO: 261392 - protein, 343 aa, unidentified
MQTITTIGLDLAKSVFQVHGVDAGGQVIVRRQLKRRYVLTFFQKLSPCLVGIEACGSAHHWSRELHALGHTVRLMPPAYVKPYVKRQKNDATDAEAICEAVTRANMRFVPTKTPGQQSGLLLHRARHLFIRQQTSVINAIRAHLAEFGIVAPVGRHGVEELLNVVADPNDKRVPEIARACLSAFGAQLRRIKEQVLEFDRLIRAWHRSNELSMRLDEVPGVGPVLATALVAAVADPKSFRSGRNFSAWIGLVPKQHSSGGKNRLGNISKQGDRYLRGLFVAGALAVIRYAKIHGTTHRPWLTALLARRPTKVAAIALANKIARMVWAMMARGERYKEPFALAR

SEQ ID NO: 261393 - protein, 411 aa, unidentified
MVIGIDIGSEKHWARAFDNRGMEISKKAFGFNNTAFGFSSFESWYENQRRAAGLKRIMVGLEPTGHYWFNIKQFLTTNGIQVVLVAPQHVKHSKELDDNTQRKDDLKDPRVIAKLVIEGRYFLPYRPSGVYADLRDGFSRRCGIVESMTRVKNRLHRWFCINFPEYLELYSSVVAKTGLMILRKAPLPKDIVELGVDGIDKIWREAKVRGIGKKKAAALVALAQESIGEKSANEAARLELWQLLEDYEHYAHQYVVVEEMLERRIHEVPYADNLLRIPGIGYCTVIGFFAEVGAVDRFDDPKQIQKLAGLSIVENSSGKRKGMPGISKRGRDRLRCVLYQAAMSAVKNNSEFKEIHLYFTTRKDNPLKKMQSLMAVAAKIIRVFYGMVRTGAAYDPERLLRDIHRPEKATA

SEQ ID NO: 261394 - protein, 328 aa, unidentified
MLQIGIDVSKKKLDICLLLEGISGKRKTKVIDNNAHSANELINWLGKQKCRLEEVRIVLEATGTYHELLCDQLFDAGIYLSIVNPYRIREFAKGMGILTKNDTVDAYTLACFGTLKQPDAWVPPPAEIRELKSLLRRRDALLADVLCEQNRLEKAEVTRTPKIVMRSLMKMLKALEKEQKAIEAEIAKHINSHPNMKKDMDLLTSIKSVGPQLGGNMLMVLRGRNFHSAEQVAAYLGVAPVERRSGTSVNGHAHLSKAGPSDIRAKLFFAALTATRFNPHVKALYERLLAKGKSKMSALGAAMRKLVHLCYGVLKTQLPYDGNYAISC

SEQ ID NO: 261395 - protein, 369 aa, unidentified
MEQCSEVFVGIDVAKMRNAIAVADGERGGEVRYLGEIDAAPESMRRLVKRLAAKHARLHFCYEAGPTGYGLYRLITDLGHSCMVVAPSLIPRKPGDRVKTNRRDALALAKLLRAGELTAVWVPDEGHEAMRDLVRARAAAVESQRVHRQQVSAFMLKHGRVYPRKKGWTMRYLRWLQEQRFEHPAHQIALQEMVEAVRIAKERVARIEAAIAEFVPSWSLGPAVQALQTLRGVDLIVAVTFVTEVGDVTRFESPRQLMGYLGLVPGERSTGDTVRRGGITKAGNGRVRHMLVESAWTYRHPPRIGAEKLYRLEAAPPRVREIAWKAQSRLTARYRALSGRGKKATVVCTAIARELVGFMWSVAREAQTA

SEQ ID NO: 261396 - protein, 264 aa, unidentified
MKRYVGLDVGLEETSLCIVDSEGVTVREVKVSTEPEAIRSALEGSADRLDRVGVEASSLGIWLYRELQPAGVSIIVAEARHMRVSLSTMRNKTDRNDARGIAQMMRLGWYRAVHVKNIDMQKMRTLLSNGKLLKRKLIDIENHIRGALRAYGLLVGAVARGAYEARIRELLERSDPIFAMTVEAMLDVRRAIFEGYERLHRVLLQVVQHDPVCRRLMTVPGVGPVAALSFKVGVDDPRRFARSRTVRAHFGLTPRRHQSGTSIA

SEQ ID NO: 261397 - protein, 355 aa, unidentified
MTVTIVEEARPVTCRTAITGGVDTHADTHVAAALDPVGGLLGVEEFPATAAGYARLLGWLGGFGTVCLVGIEGTGSYGAGLARHITAAGIRVVEVDRSDRQDRRRHGKSDPLDAVSAARAAQSGRARGAPKGRDGAVEAIRTLMVARRSAAGERTRTINQARALVLTGPDDLRARFARHTPAALITGLAALRPRPGDVAGHATRIALRELGRRARFLDGQLVRLDELIVPLVTARAPGLLDVYGLGPRTAALLLIAAGDHPERLRSEAAWAHLCGAAPIPASSGKVTRHRLNPGGDRQANHALWRIVFTRLGSDPATRAYAERRTAEGKSKAEIIRCLKRYVAREVYRQLRLAAG

SEQ ID NO: 261398 - protein, 338 aa, unidentified
MKITTIGLDIAKSIFHLCAVNKMGRLVKKKQLKRKQVLAYMANLEPCLIAMEACGGANYWAREFIALGHEVKLIAPQYVKPYVKGNKNDYNDAEAIAEAAQRPNMRFVPIKSVEQQDVQNFHRQRERVKKERTALVNQIRGLLAEYGVVINQGVAAVRKSLPEILEDAENGLTARSRELFAELLEELWALDQRFELCGQRITSLSQENAVCRRLDGILGIGPITASATYAAAGDGKDFVNGRHYSAWLGLVPGQHSTGGKTTLLGISKRGNAYLRTLYIHGARAVLRHSTNKTDRFSLWAQAVLARRGHNRACVAVANKMARMAWVIMAKGETYRVAI

SEQ ID NO: 261399 - protein, 480 aa, unidentified
MAKRAVQHADLKAVPMLLNESLYVGIDIGKAKHVAGFLSKTLLERHERFEACPALVFENSREGFRLLIERIRSLAPLEHIFVLMERTGHYHRTLEQYLQELDITVYVMHVQSRSTGMLKTDKRDALTLANQLYNQLELGVQVPNKLQLIRRVVPPTQAAAELRGLIRHRYELIHESTRRKNKLTAICDELFPELVRVVKDPNGQVALALRERFPTPAALATVSLTTLQQIRGGARSFSDAKLVELQRQAAQSIGIKEVARLRGLVLEQTQLIKELQMLQEHIQQLDKEIGGIVEHAREGQILLSFPGIGPIMAATSIAAIGSIHNFPSAAALKSYFGWAPVVAQSGSTLDHTRLTHGGARTMKHMLFLAVFQAIRLKDNEWARLYERLVKTKCPFDERTQSYLGKTRVIGRVAGQMTEAIYALLKRDAELLSKVPPSQDPPPPLLYDPEVHRQHHLGHYRPLKSTPPPNTITLLHPLPAQ

SEQ ID NO: 261400 - protein, 388 aa, unidentified
MTQAPVPHSVPTAPDYDRTLVLAIELSTKSWVLAAQVPGLPRVKAKRTIEPTAEALLAAIQGYRERAHAAGRYIERMVATYEAGWSGFWLARWLATHGIETHVVQPSSVPVDRRARRAKSDGIDAELLLRTLLAWLRGEPRVCSMVPVPAEADEDARRCIRERAELVAERVALVNRIGAVLATLGVADYNPLLRNRRERLDALRTALGTSLPPHAHAKISRMLDRLDLVRAQIADLEQERDAVLEEEAPSRAGAMIQQLATLRGIGVQSATVLVREAFVREFANGKALGSYAGLTATPYSSGGTEREQGISKAGNRRLRTVMVELAWLWQRYQPGSAEVSWFRERVSGTGARMRKVMVVALARKLLIALWRFATQGVVPGGAVMKLAS

SEQ ID NO: 261401 - protein, 289 aa, unidentified
MKITTVGVDIAKTVFQVHGVDEQGAPVLRKQLKRGQVLSLFANLTPCVIGMEACRGAHHWARQLQKLGHTVRLMAPQFVKPYVKTNKNDMADAEAICEAVSRPTMRFVPMKNGEQQAVLALHRARQGFVRARTAQANQIRGLLEEYGTVIPQGICQISKRLPVILEDGDNDLPGLFRQLLQRLGEHLKQLDLQVKELDSQILLWHRQHEGSCRLAQIPGIGPLTASALVASIGDARSFENSRQLAAWMGLVPRQHSSGGKTLLLGISKRGDGYLRMLLVHGARSVLRVA

SEQ ID NO: 261402 - protein, 310 aa, unidentified
MENFYFIGVNVSKKKLDFCVMFEGKVVHEEETANHQSAIMSLLHHFEEDYGIDNTRMPVCAEHTGQYTFPLACACKTVECKLWLENAAEIKYSSGVQGGGKNDKVDAKRIAIYASRFQDKVRYYEHPTEDIERLKQLESERTLYERKMKRLQALMDDLKEAIQAITDEMDEVIASCPVLFRQQELLMSIDGVGRVVATNMIIATEAFTRFDDPRKFNCYAGVAPFSYSSGSSQHSKARVSHRADKVMKRLLHLAAVAVTHRVGGELKKYYERKVAEGKNKMSVINALRAKIVARMFAVIKRNEKYKPILS

SEQ ID NO: 261403 - protein, 370 aa, unidentified
MSNATTFVGLDVHARPVKACAFVPETGETIRKSFGYEPGEIASWVSSLPQPARCVYESGVTGFHLCRELNAMGAACVIGAVSKMHKPAADRGRKTDRRDAQFLAVQLALGVVTEVHVPDAECEGARDLARALVDARDDAVRAKQRLSKFLLRHGLVYDERNAAGQRRNRWTGDFWAWVGRIDLGDAAAMATLDHYCERVREADAAKAALEAKVKSLAQQPRWKPTCDALKCLKGIDAVTAASIACEADGFARFATASGFAAWVGLVPSEHSSGESRFRGGITKAGNKHLRKLLVEAAWHYKGASRSPKDLAKGQVVDAATRRHANAGVRRLVDRRRSMDDAGKQSSVVNVAVARELACWCWAVGRMAEGA

SEQ ID NO: 261404 - protein, 379 aa, unidentified
MYRILKIGMDVHSTSYTLCAVEPRFGTEDRVLANIDIGPDYKLIVDFIKKIKLKMDPGNKDEIDVECGYEAGCLGYSLYYQLKGCKVRCTILAPTTMLTEKGSRIKTDHRDARNIAFCLSNGGFHPVHIPTPEENAVKEYIRMRDDHRDALKKIKQQIGALCLRFGQCYNGSYWTGKHVTWLRELKLSTMIRETLDEYLSTYDDLTARIKRYDERIQEIAGQKEYNEKVRKLECFLGIKTHTALSLIVETGDFNRFVKGNIYAAYLGLAPGEHSSGESTGRLGITKAGNSHLRRLLIEAAEGICKGHIGQKSKSLVARQKGNPGDVISYADKANIRLRSKYYRLINHGKKRNIAVTAVARELACFVWGMMTDHIHGKEA

SEQ ID NO: 261405 - protein, 406 aa, unidentified
MAGAVCAGVDWAKDAHEVLVQDADGERLWGETITHDEAGIIRLCRTLVTLKVARVAIERPDGLLIERLLDAGLTVLAIHPNKVAAARDRFRAAGGKSDRFDAFVLCELARTDSHRFQPLVPDSDQTKALRALTRGREVLVEQRVALCNQLRAELERFWPGATEIFRDLDSPISLAFLERYPSPADARGLGEKRLAQFLARHGYCGRKDPAELLARLRNAPSGRAADLEADARRSLVLALVAALKPIVEQITLLTSEIAHAIHAHPDGHIFLSFFKHPKSVITAATLLAEIGDCRARYPTAEHLAADAGMAPVAVESGRRKVACFRRGCDHRLRHATSTLADSTRHWHPWAHRNYADARARGHDHPRAIRTVGRAWTRVLWRCWQDHVPYDPERHNTLQRQLLIVKG

SEQ ID NO: 261406 - protein, 387 aa, unidentified
MQPADSLLEFVLLSSLTARFAGLNEMVTLHPISDYAGRVFLPGAETIMDDVALIGIDLGKHSFHLHGQNRHGKAVFRKKFSRKQLIEFLATFHPCTIVMEACAGSHHMARHLTSFGHDVKLINPQFVRPFVKSNKNDFIDAEAICEAASRPNMRFVTPKTETQQILGALHRTREALVREKVKTTNQMHGFLLEFGISLPIGDAVIKRLPSVLAEHPLPARLASLLERQHAHFKYLLEQIKEVDWELAWQLGEDELGQRLLKVPGVGPITASLLAAEVGDGKQYRCSRDFAASLGLVPRQYSTGGKNTLLGISKRGDKTLRRLLVQCARAYMQRLHLQSGRVAEWVREMLTRRHSNVVACALANKLARTVWAMATRHTEYRNEAAMPA

SEQ ID NO: 261407 - protein, 400 aa, unidentified
MKFVGWDWASTSHDVTVLDEQGRVVERWALRHTEQALAETLARLARHGQPAEVPVIIERSAGLVVDRLLAAGHPVVPVHPTAFHAARPRWGAAGAKSDPGDSYKLADYLRTDGHRLRRLQPLDPGLRELQALVRLREDHVRARTAASNQLGALLDAYWPGPKAMFCKLASDIALAFLSDYPTPQAAARLGQARLAAFCRRHAYRGGKPPAELLARLRTAPIPPVGLSPAVLAQLIGAQVQLLRSLQATIGELETAIKQRVAQHPRAKLLRGLPGVGTINLAQLLAEVGPILDRVSTAEQAAAECGAAPVTRASGKTSGVYFRWAANPRARTALTAFAHNARMQSAWAGRLYADARARGKRNPHATRIVARAWLRVIWACWHTNTPYDPCSHLAEQRLTAA

SEQ ID NO: 261408 - protein, 334 aa, unidentified
MSDYSYFCGIDLAKNHFSLHAVDQNGKVILHKSVTRSKLLTTIANMPLMRIGIEACGGAHYWARTLNKLGHDARIMAVKYVIPYRTKGKNDLNDAVAICEAVQRPSTRFVPVKSPEQQAILSVHRMREHWVREHTALMNRMRALLSEFGLIISVGRSSLMKDAENELPHLARMIIADAYHHLGELNQRIADTEQVFDSLTKVSENVQRVMKVRGVGPQTATAILASIGNGSQFDKSRDFSAWLGLVPKQYSTGGKPRLGRITKHGDKYLRTLLVHGARTVVANLGDKQDKLSQWCRGVLERRGMNRAIVALAAKNARIIWSLLHNQTDYENYAA

SEQ ID NO: 261409 - protein, 431 aa, unidentified
MNTSHPYDLVIGLDRSDRKADLYLIDTRTGQRRSATIDTAPEALWEWLLELRQQHPQARVALCLEQPAVHLIAFLEAYEWIGLYPINPLSLQKFREAFVTSRAKDDAKDALYLAELLLTHHDKLKLWAPEDSQTRAVQQRVFHRRAIVDERTGLTNRLQALLKQYFPQALVLCGENLWRPLATRFLLKWPSLQAVQKAKPATLKQFYYLNGSRSTKLLEQRLALVTKAVPVTDETGLIQSFVLRVQLLCRQLQLVQQTLHQYEKQIAQTFTEHPDHLIFASLPGAGPVLGPRLLSSLGSQRERFEQATNLQCYTGVAPVTKQSGGKCHVHRRYLCPKFHRQSFHEYANVSILWSRWAAAYYLQQRTKGSHHHTAVRALAFKWQRIIWRCWQNHKPYEEKIYEAALRKANSPLVGLLDKIQLGKSPFKTLAK

SEQ ID NO: 261410 - protein, 439 aa, unidentified
MAVRKRDDEVFPNAAGIDVGASSHWVAVPPHCTDAPVREVGTMTDDLNALADWLLGCGVDVVALESTGVYWIPVYEVLESRGLTVWLVDARQVKYVPGRKSDVQDCQWLQKLMSHGLLRSAFRPSAEVCAIRAVARSREVLLTQQASWVQRMQKALVQMNIQLTEVISDVMGQTGQAIIRAIVAGERDARVLARHRHWRIRASEEEIVRALTGNWRDEHLFVLGQALGMYDDIAKHLAECDRKLLSLLGAQSAGEVAVGKQPRQGTKVRTDFDARQALANWAGVDLTRINGLGLDSVMKILSEIGPDLSRFANVKHFCSWLGLCPSTKISGGKVLSAGTRRSANRARQAFRMAAMALSRSDSALGAFYRRLCARMDKPRANTATAHKLARMVYFMLTRGEAFVDQGQQHYEQQQRLRSIAALKRRAAALGFQVNPLAAA

SEQ ID NO: 261411 - protein, 336 aa, unidentified
MNFIGCDLHKKSISFCVVNQDREILGRRRILCEHPEEMVAFLESWRPFQFVVEATSSYPWFVQLAGPLSERAVLAHPKKLRVIAESTRKSDKIDAQVLAEFLAVNMIPEAYRPTPRERALRRLVRQRIHLSKGVKCVRSRVRAILAEYNADRKGLFTAEGLKYLGTVQVSAEDRLVVRQSVAEWKFLQGQIKALDKKLEQFAESAPAAEAEARDLLDTIPGVGPVTIDVLISELGKVERFRSQKKVAAYAGLNPGSRESAGKRHELRITKEGSPLVRWVLVEAAWRLVRQSKRWGTIFEALAKRRGKKRAIVAVARRLLCVIVAMLQRGQKYHVAA

SEQ ID NO: 261412 - protein, 366 aa, unidentified
MKKVSTVATKQSRNFSQHKLTIGLDLGDRSSCYCVLDESGRIVMEQKVATTPKALQAAFGAMPRSRIALETGMHSPWVSRLLSALGHEVIVAHARNVRLIGESRRKDDRLDAQTLARLARIDPQLLCPVKHRSAKAQADLTVIRARAGLVRARTALVNTARGLAKSYGERLRGCNVRNMNPEKAEGLSPELQSALKPLLTALESLSEQIREYNERIEKLACESYPQAALLKQIKGVGTLIALTFLLTLEDPHRFRKSRDVGCYLGLQPGRRNSGQSEPQMHISKEGDPYLRTLLVQGAQHILGPFGPDSDLRRWGLKLAERGGRNGKKRAIIATARKLAVLLHHLWVSGELYEPLRNSQPAIAAAA

SEQ ID NO: 261413 - protein, 355 aa, unidentified
MTNTKYIGMDVHKESISIAVMNSTGKFVMECVIETKGSMLLQFIDGLRGDVRITFEEGTWAAWLYDLLKPHVSEIVVCNPRKNALLKDGSKSDRIDARKLAELLRGNHLKPVYHGEQGLRTLKELARSYLNISKDVTRVMNRLKALYRSWGVACAGTQVYARRHRSEWLGRISEAGVRQRAEHCYQQLDVLRLLHQQVRRDLLLESKKHQAWRLLGLIPGIGPIWAALLIAQMQTPHRFRSKRQLWTYSGLGLETHDSAQYRVVEGQLQRSKKPVKLRGLNQDHNHDLKDIFKGAATTASSSSGPFHDFYEHLLAQGRKPTMARLTLARKIAAITLIVWKKEVRFDASYLKSQAA

SEQ ID NO: 261414 - protein, 339 aa, unidentified
MKKYYMGVDLHRNCFTVYRREEDGSGKSQEWSIRSLKAFAKTVKAKDEVAVEATGNVRLFCEALKGRGCRVVVVNPHQFQVISRSVKKTDEHDAKVLAEFLSKGMLPEVRMKDEEHARVASLAQTRDKLVKLRTTLKNKVNNLLAARGILIRKESLSSEKGLAEVLASGVSELERMELEILVGEIRHLNESIKKLEELLRDRGSKLPGWKNVRSIKGIGDTGGSILLSTIGNIEDFEDEGKLAAYFGIVPRVSNSNETQRSGRITKRGCKLGRTALVQCALIAARYSPYLQKYYRRIAAARGTGKAIIALARKFLGIIYKTLKNNWIFEDFPQFVLANG

SEQ ID NO: 261415 - protein, 349 aa, unidentified
MNDSNITDHTVYVGVDLHKRYSTVVKKDHQGKLLERRRVAHDVPEQLARFVQSLDANCRVAIEATGNWYHFYETVESSGARVVLCHPLKTRAIASARIMTDEISADVLADLLRADLLPRAYIPDRKTRDLRELLRYRAALVAMTTQVRCRLRAVLAKDGLDCPYTDILSHASRQFLATAPLRDSYRLEVDGFIQIGRHLVAETERIQALIDQQVQLNEQARLLDTIPGVGPYTALLILAEIGDINRFPTAGHLASYAGLVPSVHSSGGHTRLGHITKQGSKWLRWVLVECWWKLINKSLRFRRYYERISHRHGSKAARVAVARKLVHVIYRMLKERVPFCESGAAPVSS

SEQ ID NO: 261416 - protein, 368 aa, unidentified
MNTKQISPTSSTAEPNKLGGVIKLGIDVHIEKYVVVMKIDGSAPQRAKRFTPAEFIEWAQALSTQCDELHSCYEAGPFGYTLHRRLTQMGVTNHVIRPINWDEHAKNVKTDARDATQMVLCLDGYLRGNPRSFSTVRIPTETEEQRRSTTRQRQSLIKERQRLAAKARGHVMYYGGRLQGEWWKPRRWRDLSEQLEPHLLELLSALRTIMVVVEEQIVRLEQCLEQMTEVALPKGMGPVIFQQMEREVCDWSRFETRKQVGGYTGLCPSEDTSDKRRFQGSITKHGNPRLRHMLIECVWLLIQWNPDYRGIVKWREKLLEAKLTKASKKKIIVAIARQFAVDWWRIRTGKVTPDQLGLTMKALPAMSA

SEQ ID NO: 261417 - protein, 345 aa, unidentified
MKITTVGIDLAKSVFQIHGVDARGKAVLRKQLKRSEMAMFFANLPPCLIGMEACSSAHHWARKLIAVGHEVRLMAPQFVKPYVKTNKNDRNDAEAICEAVARPNMRFVPVKTPEQQTVLALHRARAGYVKARTAQANQMRGLLSEFGIILPQGIGQVYRRVPDILADADNALPGPMRALLRRLLAQLKGLDQQVAELKGEIVTWHLHNEDSRRLEHIGGFGPLTASALVASLGDAKSFKNGRQVAAWLGLVPRQDSSGGKTKLLGISKHGDVYLRTLLIHGARAVLRHLSHRAHRTDDWLRRLLARRNMNIAAVALANKNARIAWALLAHQRDFAPDYVSSAPSR

SEQ ID NO: 261418 - protein, 259 aa, unidentified
MMIIGCDFHPSFQQIAYVDQETGEYGERRLNHREEAVGLYRSLAGRKVVVGLEATGNDRWFRKLVVESGHELLVGDASAIHAAAPREQRTDKRDARHILRLLVENRFPAVWQASVANEEQRQLLMHRCRLVRMRTRIKNQLDSIAKSEGLTGSRSWSGQRRGQIEALPLAGWYSQRRADLLQLLDGLELRIKPLDRAVEVAASQDAEARLLMTHPGVGPVVSLAYVLVVGDWRRFPRGKQVGSYLGLIPSEASSGKRQQ

SEQ ID NO: 261419 - protein, 459 aa, unidentified
MKQRGGRGKRVVVKRAEGSLSVVRAKVAGIDLGSVEHYVACPPRDGQANVKSFGTTTAELSALADWLQAEGVESVAMESTGVYWIPLYELLDQRGLEVVLVDARQMKHVPGRKTDMIDCQWLQLLHSCGLLRGAFRPADAFCQLRALVRQKATLIDEQADWLNRMQKSLDQMNVRVHRAVADISGTTGMAMIRAIVAGERDPKKLAALRDERCARSGRQMVEELTGNWREDHLFNLARALAMYDFILTQIAAYEAEIQRILKELASNPALGPAPEPTSPNKKKLLRARGQEPLRQALYGACAADMTSIDGVNVATAEVILSEIGPDLSAFPTERHFVSFVKLSPKLAISGGKPLYKRPKGTASTRVGAALRMAAVSLRNSKTALGAYYRRIARRKGASVAVFATARKLATLIYRMLRHGTAYVDEGMHAYEKRFQTARLQMCEQIANQFGYKLIQQKTA

SEQ ID NO: 261420 - protein, 403 aa, unidentified
MKYCGIDWANDHHDALSIDEQGRQLGSIRVAHTPEGLSRLNTYLEGIVGESGHSSVACIIETTHGLLITFLLEHQWPVYPVNPRTVDRHRAPSGAKTDTIDAYLLAKTGRADIHDLRRLNPDSQLVQELKELTRDQDTLIRAQTRLLNQLTACLKAFYPAGLTAFSKVEQPCTLAFLRAYPTPQQAQQAGVADLTTLLKKVRYPGAERKAKELAVALRQPQLAASEITTRTKARLLLALLDQLEPLMRQIADYDQEIERLFLTSEDHELFQSLPGAGARLAPRMLAEIGDDRSRYLSAMSLQALAGTSPVLFQSGMYSKAHRRLGCIKPLRNAMQQFAFQSLREPWAKAYYQRKRTEGKSHTVAVRALANVWVRIVFAIWQKKEVYQTTTFEAAQLTHARRVA

SEQ ID NO: 261421 - protein, 358 aa, unidentified
MKIVGIDVQKSMCQAAILDEDGKLLDEIRFANDLESIEEFAGKLTTFHDEVKAVVESTGNLWIQIHDRLEEHGFDVALSNPSKTRLIAEAKVKTDKVDARTLAALLRADMLPTCYVPGEELRSRRELLRHRLNLVKNRTEVKNRIHGLLDKHGLRMPGTTAFSKENISWLRGLSLGFMDDAIPRSDLVVLEAVDGQVTLIEGKIAALAAEDRRVRLLMTMTGVGYFTAMLVVSEVGDVGRFRGDKEFASWMGLVPSVHQSGERTRIGGVSGPGNKRLRWALVEYAQAAVRYDPRLGGMYERVSRRRGSGCAIVAVAHEMARIMFFMLSRNEPYRDADGGLVERKLKNMGKRALDGLRN

SEQ ID NO: 261422 - protein, 321 aa, unidentified
MTYIGIDVSKDSFVVAYSPDKNSKTKTFKNTTRGIHEFIRTISKEEHHCVMEATGNYSALLVYLLSEAGITTSLENPLKVKNFARAMLSTVKTDEIDARLIALYGEKMQPAPYKLRSDAILTLKQKRTVIRQLKKQLIATRNLKGSMEALPFFDAKCRKSVEKTIAFLEKQVKDLEEDLASLAKSEYKKQMDLLTSVKGIGITLAAALIMATGGFTYFDNAKQLTRHLGLSPTYQQSGTSVNFKGHINRNGDSSLRSQLYVAAFSSIRCNTECRACYDRLRSKGKPGKVAVIAVANKLIRQAFAVVTQEKPYVDGYISSKK

SEQ ID NO: 261423 - protein, 409 aa, unidentified
MQFCVGLDWASREHAVCVVDAAGAIQAHFTVEHSAEGMAKLAAQLRKLAPPDELAIAIERPTGLIVDTLVEGGFQVVPIHPNVVKASRPRYSAAQGKSDLGDAYLLADLLRTDGHRFRVLTPQSDETKALRGLVRLRDDLVGQRIALANQLRNLLDQFWPGAAAIFADVDSPIALEFLERYPTPQAAVGLGEKRLAAFLGRHAYCGRRSAAELLERLRSAPVGRNGELEAEAKGECVRALVAVLKPLVGQVQVMTAAVEHAVTAHPDGLVVTSLFRTGRVCAAQILAELGDDRARFVSAEHLAAEGGVAPITRESGKHRAVGFRWACNKRLRAALTCLADASRHTSPWAAALYQRAKARGCDHPHAMRIVARAWCRVLWACWQKRVAYDPGKHAAALKFTPRIVGKEAA

SEQ ID NO: 261424 - protein, 409 aa, unidentified
MLYFVGLDWASREHAVCVIDERGRVLDQFTVEHSASGMKELSARLCKRAPAAELRVAIERPTGLIVDTLVEDGFLVVPIHPNVVKATRPRYSAAQGKTDLGDAYLLADVLRTDGHRFRVLTPLSDETKALRGLVRLRDDLVGQRVALANQLRCLLEQFWPGAAAVFADIDSTIALEFLDRYPTPSSASSLGEKRMAAFMGRHAYCGRRSAAELLGRLRAAPVGMSGELEAEAKGECVRALVAVLRPLVVQVQTLTAAVEHAVEAHQDGHVVTSLFRSGRVCAAQILSELGDDRARFASAEHLAAEAGVAPITRESGKHRAVGFRWACNKRLRSALTCLADISRRTSPWAAELYQRARDRGCDHPHACRIVARAWCRVLWSCWQKGVAYDPGKHAAARRFTPRIVDQEAA

SEQ ID NO: 261425 - protein, 371 aa, unidentified
MRRQEAALARRDTLAADMKSKIPAFTIGLDLGDKKHAICVLNHAGEIVEERSITNHPEALKRLSQKYPKCRIAMEVGQHSPWTSRCFEALGHEVLVANARKLRAIYTSTRKSDQSDAYMIARLARVDPSLLHPIQHSTEQAQRDLLQVKLRDNLVRQRVDIISSIRFTLKSMGVRVASPNTDCFAKRCRTTLQSQDTVLLAMCEPSLRVVDEITKNIRELDRRIEELCVESYPETEYLRQIAGVGTLTALTFVLTIGDPQRFESMRDVAPYLGLVPRRDQSGETDKQLGISKAGDAYLRRLLVSAAHYILGPFGPDCDLKRHGLQLAGRGGRGAKKKAVVAVARKLAVLMLTLWYNEDIYEPLRNNDSLAA

SEQ ID NO: 261426 - protein, 335 aa, unidentified
MHYLYYVGLDVSKETFDASLVAFEDANEMAHRKFANSRKGICSCLHWVEKRHGIRLDDVIFCAEDMGSYISEMAVCASDRKLNFNFSLISPLVIKYSMGIARGKTDRVDARRIAEYAITHYRKIALYLPAEKELCQLRTWLILRAHLAKQRVAKLVLLEKLDYKEKFADVSIQRSMLQEEIAYAETHMKTIEREMKELIAADSNICRNYKLLTSIKGVGPITAIVMLCSTLNFTKITDHRKFACYCGLAPFEHSSGTSVRGGCHTSSMANRDIKVQLNRSALIAIRCDPQLKAYYERKVAEGKHKFSVLNAVRAKIAARCFAVVRRGTPYVALQI

SEQ ID NO: 261427 - protein, 415 aa, unidentified
MTNERRWYAGVDWASESHHVFLTDDDGAKLGEKIFKHGGEGLAEMAAWLIAAAGAEPEQVHVAIEVPHGPVVETLIERGFSVYAINPKQMDRFRDRFTLAGAKDDSRDAETMASALRTDPRCFRPLAAMDPIVIELREWSRIAEDLGAERIRLTNRMREQLWRYFPAMLELESDLAAPWLLDLWEVVPTPDKARRIRETTVARILKQNRIRRLDAAQVLEVLRKEPVTVADGTVTAASAHITTLIARIRLLNRQIDDAHRRLDRLTTELASSQESEPGQVKQHDAEILASLPGVGRVVLATLLAEAWDALQRRDYAALRSLTGVAPVTKRSGKSLIVIRRQACHPRLSNAMYHWARVAVQHDRTSRAKYAALRGRGHSHGRALRSVADRLLNVTCAMLKTGTTFNPSLAAENAPC

SEQ ID NO: 261428 - protein, 387 aa, unidentified
MPQLNDLSRSLVALDQNSTIIAVIEMSQSSWLVAGMLPGIERQPRKKLEPNPERLLGLLHRWRDEAVRAGRTITRIAVAFEAGRDGFWLARWLAARGIEAHVIHASSVAVSREHRRAKTDRLDTELLKRGFLGWLRGERGHCSMARVPTIAEEDAKRPNRERNCLVGERTRVVNRIKSTLARLGIRNFKPTLRKAAERLASVHTPEGMPLPPNTLAELHRDMARLGFIVSQIRQIEEARQKRLEQQHETGPHAMVRLLARIVGVGVETADMLVHEVLSRPMRDRRAVARYAGLTGSPDESGARRREQGLARAGNARVRRGMIQLAWRFLMFQKESALAVWYRARTADSRSGTRKTMIVALARKLIIALWRFVTIGEPLEGVVLRPAS

SEQ ID NO: 261429 - protein, 403 aa, unidentified
MSVFAPEVARPTLVFRGLLGRAEPILITGGRAVADYREAFVGIDVAKLKNAIAVAESGRDGEVRYFGEVDASDASMRRIIQRIAAKFDHVHFCYEAGPTGYGLHRLIQSLGHECMVVAPSLIPRKPGDRVKTNRRDALALARLLRAGELTAVWVPDEGHEAMRDLVRARAAAVETLRVHRQQVSAFMLKHSRIYPRKKGWTMRYLCWLQEQQFDHPAHQIALQEMVEAVRLSKERVERLEKVIEEFIPTWSLAPVVRALQTLRGVDLIVAVTFATEVGDVTRFESPRQLMGYLGLVPGERSTGETVRRGSITKAGNGRVRHMLVESAWTYRHPPKVGARKLYRMEQAPPKVREIAWKAQSRLTARYRTLTGRGKRTTVVCTAIARELSGFMWAVAREAQSIRS

SEQ ID NO: 261430 - protein, 315 aa, unidentified
MSPIFIGIEVSKARLDVAIRPSGQTESVSNDTAGIEALVKRLSERRPALIVLEATGGVERSVTRALASAELPVVVVNPRQIRDFAKATGQLAKTDGIDALVLARFAEAVRPAIRPLPDEVSFELRALIARRRQITQMIVAERNRLSGASKAVRKRIEAHIRWLESELDRADKDLDQSIRQSPIWQENQDLLKSVPGIGPVISRTLLAELPELGHLNRKQIAALVGIAPLNRDSGTLRGRRTIWGGRASVRAVLYMAALVASRRNAVLCAFYERLRTAGKPPKVALVACMRKLLTILNSMIKHKTRWSENFSVQTS

SEQ ID NO: 261431 - protein, 447 aa, unidentified
MANENQKVSLNSGLPIQNLHAAGIDIGDTKHDIAILDKSGNHIVREYGTFTRDLRDIIDWLLCNQITTVAIESTGIYWLNLFLMLEEAGIEPYLVNAKFAKNVTGRKKDDTDAIWLQKLHSCGLLQKSFQPEGDYRVLRTYVRQRKKALQLGSDSVRRMQKALELMNIKIHTVISDILGKTGMLIVRAILSGERKPENFLQYKDRRIKASDSEFVLAMEGLWKEEYIFTLQQAHDAYVFYQKQAKACDERIAEILTNQAAKVLDGDITDVPYGIKKGAPKKNQYNFHAQKLLHIIVGVDLCKIDGMSEISAVELISEVGVDLSKWKSCKHFAAWLNLVPNTRITGGKIISSRMQKRKNTAGRTLRQAASNMSKSKSALGDYSRRIRSKIGKKGAVVASAHKLSKIIYTMIVSQREYDQTVLIEQQDKWKERRIRHLERQLDQIKNAS

SEQ ID NO: 261432 - protein, 392 aa, unidentified
MAICIGIDAAKVVHWAVGIDDGGRVVLDRAVENNPAAIDGFISDLRALKNDVMIGIDVVGSFARFIEASLLAEGFALVHTPGIAVNRAGQGFAGGERKSDPRDARTIAELVRTRDLRPVLADDDTRVALRLKVGRRRDLIQDQVRRIARIRGLLCGIHPGLEQAFDLCCKGPLALLTRYVTPAEIRGAGQARIVAHLKKTPHLRGSDALARRALDCAKAQRITVPGETATADLIRELASEALEARQKITRIENDLEKILSDHPDCPLILSLPGMGVVLTAEFLAAIGNIGRFASANALAAAAGLAPVQRQSGKRAGWRRAYGGDKALKRVFYQSAFCAVTQKDPLSKAFYDRKRKEGKHHTQALIALARRRVNVLWTMLQRREAFDPNRKAA

SEQ ID NO: 261433 - protein, 372 aa, unidentified
MGEHSEVFVAFDTAKLKHAVAIAEAGRGGEIRFLGEVENQPATVERLIKKLGRRYRKLQVCFEAGPTGYGLYRQIQALGYACLVVAPALIPKRSGERVKTNRRDALTLARLFRAGELTAVWVPDDVHEAVRDLVRGRMTAAEDLRRKRQQLLSFLLRHGRIFTGGDHWTRAHHRWLAAQSFVHPAQQIVFQDAVAAIEDAVERLRRLEEQLVAIVPKWSMAPLVAAYQAMRGVSFLVAVTFAAEIGDVRRFDRPRQLMSFLGLVPAERSTGKTVRRAGLTLAGNRRARRVLVEAAWSYRHPARVSETLRARLEALPKTARDIAWKAQVRLCSRYRRLGAAGKKLPVIIAAIAREMAAFLWAIGRQVEPAAVT

SEQ ID NO: 261434 - protein, 457 aa, unidentified
MMETKRRREQRSMLPVHPDAAAIDIGATVHVAAVGPARDPEPVRSFGTFTGDLHRLADWFAQCGIKTVVMESTGVYWIPIYEILEQRGFEVRVVNARDAKHVPGRKTDVSDAAWLQRLHEFGLLRGSFRPQGAIAALRAYLRQRERLLDYAAAHIQHMQKALTQMNLQIHHVISDITGATGMRIIRAIVAGERDPDTLASYRDIRCHSSAETVRQALIGNYREEHLFALAQAVELYEVYQAKVATCDEKIEGVLERLKQPGRAPAKPLRAARHKTRQPNAPAFDAREALYAVLGVDLTQIHGLGPYLALKLISECGTDLSAWPSAKHFTSWLSLAPGNKISGGKILSSRTRPSGNRAAALLRLAATTVGRTETALGAFYRRLSARIGKAKAVTATARKIAVLFYNAVRHGMDYADPGASYYEERYRRRVLTNLQRRAKAFGYVLQPTEIKVVPMAVS

SEQ ID NO: 261435 - protein, 460 aa, unidentified
MPPKGQADQKSKRRNFPTFTRDLRQLRNWLKNCGVTEIALESTGQYWRPLWNILEGEFEKLLLVNPQHIKGLDGRKTDRRDAQWIAELLEDGRLKGSWVPPRAIRELRDLTRQRVHVLEDRTRVRNRIEQLCQSNNIKVSSVATDLFGLSGRSMLKALVEGKRDAGWMADYARGTLRNKKRALESALDGTFTAEQRWLLGRELAQMEWLEKQLEAMEAEIERRTAAFSEELTRLVTIPGVDRITAWTIVAEVGVDMQPFEDARHLASWAGLCPGNRESGGQRMSGRTRKANGYVKRALCQAAWAASHTKNNYLAAFYRRLCIRKGAPKAVMALAHHIMTIVYHILAHRTEYVELGADYYDQRNKPRVVNRLLKRLQNLGFEVSLKPSSPLLIETATANTSPSVLESSRPSPDRPLSASPLQKRGRGRPCKCIERGISCKHGTAADPKSLIPQPSATEEFS

SEQ ID NO: 261436 - protein, 348 aa, unidentified
MHIAVLGIDLGKNSCSVAGLDASGRVVLRRRLHRDSVVKLASRLPACVIAMEACCGAHHLGRLLQAYGHVIRLMSPEYVQPYVKAQKNDERDAEAIAEAATRPTMRFVDLKSEDQLDMQTLHRARSRLVGQRTALINQLRAMLLERGIAVAQGRHRLARYLAQALDDGNAEPVPLSLRIRLLIEDMRAQWSEVDRRIASFDAEFVAATRSDEAARRLSTIPGIGALNATALVAAVGDARSFARARDLAAWLGLVPRQATTGGRPRLLGITKRGNKYLRTLLIHGARAALPSLATTEGALGNWLRGLSARAHRNTVIVALANKLARIAWAVLRSTAIYSARISDRPTAV

SEQ ID NO: 261437 - protein, 486 aa, unidentified
MAKRKESTFERLQKGESLNRRERRELAARLNSADPGFEIVHQHAAGIDIGNESHYVAVPPGRDEQPIREFGSWTADLERMAQWLKACGIESVVMQSTGVYWMSVYEVLQSHGFQVNLVDARGSKNLPGRKSDVQECQWLLRLHTYGLLRSCFLPPESIRPLRTAWRLRDQHVKEAGRCVQHMQRALTEMNVQLHNAISDLSGVTGQAIVRALLAGERDPVRLAALRDRRIQASAEELQHSLRGNWKEEALFELQQAVEAYDFYGRQIAACDRRLQGYLATLPSRESIAKAWAAETPTRSDPDPKPEVPHPVVKRKGNEPPFDIESEQRRILGVDATTLDGIDVMTVQTVLSEVGSDLSPWKSEQHWSSWLNLAPKRDVSGGRVIRHTREHRTNRVGNAFRMAAQSLLRSQSYLGARFRYLRAKLGGPKAVKAMARVLACLFYRLLTKGQTWVDRGTAQFELRRQQREFTALERKARNFGMKLVPTA

SEQ ID NO: 261438 - protein, 339 aa, unidentified
MGEVNTIGLDIAKNVFQIHGVDRTGGVVVRRALRRRQVLAWFSQQPPCLVGIEACASAHFWARELRKLGHDVRLIPPAYAKAYVQRNKNDPADAAAICEAVGRPSMRFVAIKTERQQAAVGVHRVRELLMKQSTMLRNQLRGLMAEFGIVAAQGRRGFNELLAILAEAADQRIPRPLREALASTANTLRDIEGRLAAIERQLVAAGRADPTYRHLITAPGYGPILSSAMAAIVTDPAAFRSGSDFAASLGVVPRQEGTGGKVWLGPISKRGNGYLRRLLVNGATALLNSKWAKQDPWLARLLATKPRKVVAVALANKMARIGWALMTRQEDYRNMSAAA

SEQ ID NO: 261439 - protein, 411 aa, unidentified
MEQNGVVDESTRFVGLDVHRRYATVAAVDSKQQVVLTARRIDFNDFDEWVRKHLRRTDVVTLEATSNAWHLYDMLVPLVASVTVANPIQVALIAKARVKTDPRDALTLARLLAVGMLPSVWVPPVEVRELRALGGHRRRLIKQRTQARNRLRAVLFTHNLFPPAGEAFGPANRPWWEGLDLPASEKLRVRHDLSILDCLEPLVKGVDAELVRQSSLAPWAEQTAFLVQLPGIGVHSAMQLLAAIGDIERFDGPHKLVGYAGLGARVHSSGEEHYGGRITKQGRRDIRTTMVESAWVAVESHTYWKALFERLAVRVGRLKAIVAIARKLLVVVWHVLAKQVADREAVAEQVAGKFLEWSWKLGRVNRDGLTSGAFIRRELCRLQLGDKVTAISRGKRKFPIPLSEHADQAVG

SEQ ID NO: 261440 - protein, 400 aa, unidentified
MTESLIVGIDPGRYGHGVVVLRPDGEEALRERVANEAAAIEALVDRVVELAGGPGRALWVIEADGGDGAVLIGELLARDELVATLTPTEVAVRRKGRRQIHKSDLIDAELCARIGREEQATLRRLVAVPEAVAEVRVLARYQEGLIRDRTRLINRLRFLLSQYWPEFLAARAFAALDGDAVTALLAELPTPSAVRSKTPLELARFLAAQRYRRRPLERAEQILAAAQVGTRPQEAVYGRLVVEVAHELRALKQRIEALDVEIRDRFSLQPEAPIILSLPGMSHRTGPRFLAEVGALARFGSPDALAAYAGLTPTLWQSGRSSGTHFLSRRCNIHLRQACWSAALGSLKTPASRRFYDRKRSEGKSHHQAVIALARTQLRVLWTMLRAGTLFSAERALEAA

SEQ ID NO: 261441 - protein, 316 aa, unidentified
MARNQAAAVNVGIDVGKAQLDIHIYERNITFSVPNNPPGIRRLTGRLGRYRLERVVVEATGRLEHAVVGALMDKQLPVHVANPIRVRRYAGAIGQVAKTDPIDARVIAEYGAVVQPDVRHPIPKSVRQIKDLMARRRQLQEMIVMEKNRLQIMPKPLKTDIRRHIQHLQRQVEKLDGLLASAIEQEADWQARRTIVMSAPGVGPVVANTLLADLPELGQLTTKQVAALTGVAPYNRDSGSMRGRRRIKGGRASVRTALYLGVLAAVQHNPVMRAFYQRLVAAGKHKKVALTACIRKLVTILNAMVRDGTLWEEKYA

SEQ ID NO: 261442 - protein, 351 aa, unidentified
MIIIGVDYHPSDQYVAFVDTETGEYGERQLNHSAGEAEKFYRELATGGARVRVGMEATGYSRWFERLLAELGMELWIGDAAEIKTKRVRKQKTDREDARLLLRLLRENNFPRIWVPSPENRDLRQLLWHRHRMVQMRTRIMNQLQALAMNEGQRRKKKLWSAQGRAQLEKLALGTWASRRRKDLLELLDRMNPTIEELTRAVEQEGKKWPEVLRLMTHPGVGPLTALAFVLIIGTPQRFRGGKQIGSYVGLIPEEDSSAGHQRLGHITKQGSSLLRFLLVEAAQAAARCDADWRRRYLRLAVRRQRNIAKVAMARRLSVRLYRMWRNGWEYAQWVKFSSHAGPLGIGHGVK

SEQ ID NO: 261443 - protein, 343 aa, unidentified
MDYYAGIDVSLEQCSVCVLDATGGIVREAKVVSEPEALIGWLADLGLPLARIGLEAGPLSQWLHAALVRAGHQVVLLETRHVKAALSAMVVKTDRKDARGIAHLLRMGWFRPVHCKAPPAQEVRALLVARKQLQAKMRDVELSLRGLLRGFGLKVGEISKGQFAARVRTLVAGHMMLERIAEAMLQARDALRTEFGKLHRAMLAIVRGDEVCRRLMTVPGVGALIAVTFTSAVDDPQRFARSRAVGAHFGLTPRKYQSGETDITGAVSRVGDAMVRTALYEGAHILLTRAVRFSALKRWALEVAKRRGMKRAKVALARKLAVILHRMWIDGTTFRWSRQTAAA

SEQ ID NO: 261444 - protein, 357 aa, unidentified
MQTQVNDLNFNGENIFVGIDTHKKNWKVALYSNDIALKTFTQNPEPGLLVNHLRKNYPNANFSCAYEAGFGGFWIQKQLAAQGINCIVVNPADIPTTSKEKEFKTDPRDCRKIAKSLRSQLLTPIYIPSDRGLAFRSVVRLYNDAVKNQTRQKNKIKGLINFYGIKYPDEFKLETSHWTKSFCLWLSELKLDCEENTWTFQFYVQEYLKAQGEVTEVTKKVREIAKKAPLSKSVNLLISIPGIGVLSAMKILTEIEDIQRFKSLDQLCGYIGLVPTTKSSGEKENVGEMTNRGNKHLKTTIIECAWSSIHHDPGMSQKYFELIKRMDSNKAIVRIAKKLVARIIFVLTKEEEYKVIK

SEQ ID NO: 261445 - protein, 338 aa, unidentified
MNNGLKLLGIDIGKNSFHLIGHDAGGHQVLRKCFNRNRLLQFAAQIEPCTIAMESCGGSHWLARKLASLGHRVKLIAPQHVKPYVTGNKNDFIDAEAICEAASRPRTHYVAAKTVEQQVLSVQHRLRESLVCHRTEAINRVHGFLLEFGIALPATKAAIAKVPELIDNSRSDLPLQLKRIMEHLLEDIRRLDAEIKACDVQIKQQLAQDDAGTRLMTIPGIGPITASALVADLGDASNFKTSRDFSAFLGLVPRQFSTGGRPVLLGISKRGDRRMRTLLVQGSRALMIRIDRREDALGQWVRNLLARKHPNKVACALANKLARIVWAVLRRGGTYNAS

SEQ ID NO: 261446 - protein, 343 aa, unidentified
MQAVTTIGLDIAKSIFQVHGVDGEGNVVVRRKLKRRYIVAFFQKLPRCLVAIEACASSHHWARELQALGHTVRLMPPAYVKPYVKRHKNDAADAEAICEAVTRANMRFVATKTPEQQSCLMLHRTRHLFIRQQTAVINAIRAHLAEFGIVAPVGRNGVEALLNVVADTSDNRIPEIARACLVALGAQLRALKAQILEFDRRIMAWHRSNEASKRLDEIPGVGPALATALVASVGDPRAFRSGRDFSAWIGLVPKQSSSGGKEKLGNISKRGDRYLRSLFTTGALAVIRYAKLHGTKHRPWLTALLARRPTKVAAIALANKLARMAWAMMAKGERYKEPIALAA

SEQ ID NO: 261447 - protein, 352 aa, unidentified
MEIIGLDLHKRETQLCRQQPDGHIVDERIPTSRVRFTQTFGGVAPARILLEASTESEWVATHLERLGHTVIVADPNFAPMYATRSRRIKTDKRDARALMQACALGAYRPAYRLSAPRVHARAALAVRDTLVRTRARMITLIKTLVRRDGLRVPTGTSRTVVQRVATLELATTAPALGAELAPLLAMLPGLNAQIATLDATLAAVAADDPVVARLATAPGVGVVTAVAVVATLDDITRFRSAHAVEAYLGLVPSEDSSADRRHLGHITKAGNARARWLLVEAGWRILRSKQPEMAALRAWGRAIAARRGARIAAVAVARRLAGVLYAMWRDAVPYDATKLQRRARRAGAPPGP

SEQ ID NO: 261448 - protein, 412 aa, unidentified
MQAIIERCCGLDVHQETVVACLLVGAPGAQPTKEVRTFRTVTRDLEALRDWLKEAGATHVGMESTGVYWRPVYAVLEGCFELIVGNARHMRNVPGRKTDVKDSEWIADLVRHGLIAKSFVPPKPLRELRELLRYRRKLTESQAAERNRLLKLLETANIKLASVASDVFGVSGRAMLRALIAGEASPEAMADLARGQLRRKRADLILALDGRVEEHHRFLLAMQLRRLETIEADIAALDLRIDERLEPYRAPHALLMQIPGVDWVVAAVLIAEIGVDMSVFLSVYHLAAWAGVCPGNHESAGRQKTGRARKGNIHLRAVLVGAAISASKTKGSYLKDKFHRLKARRGGLRAALAIAHKILVSAYHMLAKNLPYRDLGEAYLDQINQTRTVANLKRRLERLGYRVILEPNAQAT

SEQ ID NO: 261449 - protein, 361 aa, unidentified
MNVIHYIGLDVHKKTISYCIKTADGRIVREGQLQATRLALRSWAEGLREPWCGAMEATLFSAWIYDTLKPYAEKLVMGHPARMKAITAGKKKSDTIDARTIADLLRCDLLATCYVLAPELRDLRRLLRYRNLVVHQSVRMQNRMAGLLMESGTSFHKTKLHGKKYFTELMGSLEEVPESVKDLLRMSRSTMEMFESTQKQIVKRLLLEPALQQRVERLKSIRGVGAITALTWALEVADPQRFSSIGDAVSYCGLTSAFRSSAGKEQRGPISKQRNAWLQTVLIEAAKLAPRWNPQLAKVHARELELGHPNRATLQVARKLVAYLLAVDKSGQPFQVLTPPPTVETSTKTKRRKRVSMAKVA

SEQ ID NO: 261450 - protein, 432 aa, unidentified
MRNRNNERLEAITATTLVVGVDISKVVQWARFVDYRGREAGKAVSFRNNRKGFESIVARIQQICNTNFMRQPFDDVVIGMEPTGHYWKPLADYLLKVGYKVVCVNPYHTKKAKELDDNSQTANDKKDALTIARLVKDGRYFNPYMPQNVYAELRVLANMRVSVMSRSNAVKNTITAILDEYFPEIREVFKNPLKGKASRQILKECPFPVQILTLSETQILEVIKRGVKKTVGIAKARALIEIAKTSIGVRYGITSAKMRLGMLIDELELIEKHVANVESSMEEMLNATGYSEKLLSIKGIGVVTAASFLGEVGDPLRFQNARQISNYAGYNLVEDSSGESKSGTCISKRGRSQLRSLLYQMAFTMVAKNEEMKALHKHLTSRAKNPLKKKQSLVVVSKKIITIIYSLLKKQEIYNPTLVLGTVRREMMAIAA

SEQ ID NO: 261451 - protein, 313 aa, unidentified
MDETLFIGIDVAKDTFHVASCPASINISLPNSSTGTKQLIKTLQPHSISLIVLEATGGYERPIVAELLEANLKVVVASPRQVRDFARGIGEFAKTDPIDAAVLARFAQVVQPKPKPPADPKTDELADLVRRRRQLTDLRVQELNRSQLALHPKVRKSVRKMIKTLDYQIAELDELIEQHISSDDNFRKKDEILRSTPGIGPGTSATLLAQLPELGQLNRQEIAALVGVAPYDFSSGRFAGKSRIWGGRKEIRSILYMAALTAMRCNSTIRRFANRLSEQGKVFKVVITACMRKLLIILNTMIRNQTLWRTEKI

SEQ ID NO: 261452 - protein, 346 aa, unidentified
MEHYAGIDVSLELSSVCVVDAQGKIVKEAKVASEPEAVVAFFEALGFAVKRIGLEAGPLSQWLHAGLKEAGFETVLLETRHVKAALSAMTVKTDRKDARGLAQLLRMGWFQQVHAKSMASQEVRALLVGRKQLLGRLIDVELSIRGILRGFGLKVGAVTRKGFEARIRELVTGHATLERIAEAMLSARAALKAEYEKLHKAVLAIVREDAVCRRLMTVPSVGPLVAITYKSAMDDPSRIAKSKAAGALFGLTPKKYQSGEKDVTGGITRTGDEMVRTALYEAANVLLSRITRFSKLKRWGMDVAKRRGSKRAKVALARKIGVILHRMWIDGTTYRWAEAKPIAAQG

SEQ ID NO: 261453 - protein, 360 aa, unidentified
MTRVSAKETGLEAQERRPTVENCGIDLHQKSSQVTVVDGEGEVLERAAIPTTGVALRRWFGKRARMRILLEASGSSPWVARLLNELGHEVNVIDPKRVRWIAQSTLKTDRIDADTLAEIARLRTRLRTLVWQRSERSQRQRGHLRARRALVEARARFIVTVRGLLRSFGVRVASCRSDRFVARCQATAIPTELVEVIAPLLAAIRDLDARIAEMDTVIEGVGQLYPAVESFQAIPGVGPVVALAFVLSIEDPNRFSRSRDVAGYLGLRPNLRASADTVRRGRITKEGDADVRRLLVQAAHAHRRSRTDTALKRWAEGLVPRIGKRKATVALARKLAVLMHRLWITGEVYQPFPKDQAKAA

SEQ ID NO: 261454 - protein, 388 aa, unidentified
MQVAADRTDASTAIQTDLPAIFASLELSRSTWLITSLSPGAGEKMSKHSIRAGDVAGLLMRLAQLKEKARGRTGRDFPIIAIQEAGLDGFWIHRVLQSEGIESHVVDAASILTSRRRRRAKTDGIDGETLVRTLLAYKRGEPRVCAMVKAPTPEEEDRRRICRERKTLVGERVEHVNRIKGLLFAQGVSDYEPLKRNRRARLEELKTGDGRPLPAHLKAQISRELDRLELVLPQLKAVEAERDALLKPVSEGCPAPAAMLAQLKGMGPEFTAILWSEGLFRSFSNRRQLAAYAGLAPTPWQSGSIAHEQGVSKAGNPRLRTTMIQLAWLWLRHQPTSALSVWFQERVQSNGGKMRKTMIVALARKLLVALWRYSTSGVVIEGAVMKTI

SEQ ID NO: 261455 - protein, 420 aa, unidentified
MLAESEDEEQIIERVAALDIGKAEVVCCVRIPGPGKKRLQEVSTHSTMTRSLSELANHLVTLGIERVVMEATSDYWKPVFYLLEAHGLAPWLVNARDVKHLPGRPKTDVLDAVWLCKVAERQMLRASFVPPHPIRQLRDLTRYRIDVIAERGAEKNRVEKLLEDACIKLSVVASDIFGVSGRQMMAALIAGERDPKVLAQMARSRMRTKISQLEEAFTGHFDNHHRFLLTRMLARIDAIDADIAAIDAEIEAHLAPFASAAARLDDIPGIGPVAAAIIIAEIGTDMTRFPTAGHLCSWAKFSPGINSSAGKTKGNGSTGHGNRYLARVLGEAAVGAARTDTFLGARYRRIAKRRGKKRAIVAIGRSTLTIIWHLLNDDTATYADLGADHYTRHANPDTKKRNHVRELQALGYKVTLEPAA

SEQ ID NO: 261456 - protein, 344 aa, unidentified
MDISVLGVDLGKNVCSVVGLDASGAVVMRRKVRRETLIALAEKLPPCVVGMEACCGAHHLGRVFAAHGHDVRLMSPEYVRPYIKAQKNDDRDAEGIAEAATRPTMRFVELKSQDQLDMQTLHRSRDRLVGERTALINQLRAILLERGMVAPQGKRKLEQFLAVLMDEQGGAGLSSRMIVLVADARTQWAEIDRRIAAFDGEFVRWVKENEEARRLMTIPGVGAIVASALVAAVGQAESFERGRDLAAWLGLVPRQFTTGGKPKLLGISKRGNKYLRRQLIHGARAALPYVAERDTPLGRWAKGLASRAHRNVAIVAFANKLARIAWAVLRRGERFAVTGMPVAP

SEQ ID NO: 261457 - protein, 355 aa, unidentified
MFNHSNRVGASTKKATTIGIDLAKNVFQAHGVGEHGKVALKKQLKRHQVAEFFANMPPCLIGMEACGSAHHWARKLQALGHTVKLMAPQFVKPYVKTNKNDAADAEAICEAVARPNMRFVPIKNVEQQAVLALHRARQGFVKARTAQGNQIRGLLAEYGLIIPKGIAHIAQRVPELIEDASNELPGVFRLLIQRLMDHLKELDRQARELEAQIVAWHRESELSSKLAAVPGIGPITASALVATVGDAKNFTNGRQLAAWMGLVPRQHSSGGKNVLLGMSKRGDTYLRTLLIHGARSVILRAGKKVGGWLPTLIARRNPNVAAVALANKNARIVWALLAHDREFRPDYKAAASFVG

SEQ ID NO: 261458 - protein, 443 aa, unidentified
MAESILSTAEAEFAAFVAIDWADKKHFWRLLEAGSEKPEHGQLDNQPEAVDVWAAMLYERFQGRPVAVCLEQSRGSLVYMLAKYAHLTLFPVHPKTAAQYRETFRPSGAKSDSGDTASLLDLLLKHRERLRSLQPDTPETRLLGLLVEGRRLLVNEKTRQKNRLTACLKMYFPQLLQWFDAVDSPLVGAVVERFDSLTEMQRVHAGTLKKFFQEHNCRSEERIGERIAAIQQAMPATQDAAILEGEGFRARALVALIATLRSQIEKFDGRIAELVSQHPESSLFASLPGAGPALVPRLIVAFGTRRERWETAYQMQCFSGIGPVMEASGGNSWVHFRQACPRFLRQTFHEFAGQSIKFSEWSRAFYDAQIDRKKSHHAAVRALAFRWIRVIFRCWKARTPYDEQTYKRSLQRRGSPLVGSFLPTTNVEWKAEAGFQKLSALPS

SEQ ID NO: 261459 - protein, 425 aa, unidentified
MNYKQNEKINQVKESTLVVGIDIGSTTQYARAFDWRGIELGKVFTFSNSREGFESFKAWMQHLQDKYRKSDVIVGIEPTGHYWFDLGAYLEDEGILLVMVNPYAVKQTKELDDNSQSKNDRKDPKVIAKLVTEGRYSAPYTPDGVYADLRIMVANRKRLIREMTQIKNRFARWFAIYFPEYTDVFGDYEAQSSMLLLKKVCTPEAIVELGAEKINQIWRDAKLRAVGMKRATTLCETAKRSIGLKKGSSAAQYEMKLLLEDYEYKKAQLDAVMEEIEKLCRKIPESEQMLAIKGIGVITVAGFLAEVGDVRRFESPRQIQKLAGLSLRENSSGKHKGQTTISKRGRSNLRAVLFNAAIPLIAKNPEFKSLHEYYTTRANNPLKKKQSVIAISCKLIRVFYAILANGVTYDAQKMLSDIHRQPQAA

SEQ ID NO: 261460 - protein, 343 aa, unidentified
MQTITTIGFDIAKSVFQVHCVDAAGQVVIRRQLKRRYVLAFFQKLPPCLIGIEACASSHHWSRELQALGHTVRLMPPAYVKPYVKRHKNDATDAEAICEAVTRANMRFVATKTAEQQSCLVLHRTRHLFIRQQTAVINAIRAHLAEFGIVAPVGRHGVEELLNVVADPNDKRVPEIARVCLSALGAQLRKIKEQILGFDRMITAWHRSSETSRRLDDCPGVGPALATALVASVADPKAFRSRRNFSAWIGLVPKQHSSGGKDRFGSISKQGDRYLRGLFVAGALAVIRYAKIHGTKHRPWLAALLARRPTKVAAIALANKIARMAWAMMAKGERYKEPVALAA

SEQ ID NO: 261461 - protein, 390 aa, unidentified
MIYVGIDVAKDKHDCCILGPDTEELFQVFTIRNNSDGYGELFHKIESVSMDKSQIKIGLEATGHYSYNILGSLLDHGYHTFVINPLHTNLYRKGQSLRKTKTDKVDARSIAEMLVTDKTLKPYTGTSYHNEELKSLTRYRFELVKERAKLKTSVSRLVNILFPELESLVPTLHMNSVYRLLQELPGAYFIASSNLTHLKALLADASKGHYGREKAIEIRETAKSSIGSLMPAKSMELRQTIRRIDILTSDIKEVEQSIQKIMDECGSPITTIPGIKYRMGAMILAEIGDFTRFSNADQVLAYAGLSPSTYQSGQLISSYARMEKRGSKYLRYALFNAAIYASVWDERFRLYLSKKRAEGKHYYVAISHVVKKLVRTIFRMEITHTSYQPL

SEQ ID NO: 261462 - protein, 363 aa, unidentified
MLGVDVSKHTLAAAFVDPATRKLQWELTVPNTPAGILRLLGRTPVSAPWVLEPTGRYSLGVVQQARAADRTVLLAQPRKAKAFLSGLHPRAKTDRLDSQGLAVYGSCAELRPYPVKSEAMDQLDQLLTARRGITQALMQLRQRQAELPYAGVQLAPAIASLTAQQRELDRQIAAHAAALPAPALPAVPPVPVCTPAAAPSVPEPAATGAAVVPPPAPAPAFSLVAALDRVPGIGPVTAAALASCLAGKTFATPDAFVAYVGLDVRVRESGTLRGQRRLSKHGDAELRRLLYLCAQANLRRKDSPFLPQYEQERKKGLSSTAALCAVARKIAKLAWSMVRHQTEFDPNRLYAKPEKRKVPSATP

SEQ ID NO: 261463 - protein, 337 aa, unidentified
MKVIIERVCGMDVHKDNITACVMTPEGKEIQTFSTKTVFLVKLVDWIKSHGCTHVAMESTGVFWKPIVNLIEAEEIEFLVVNAQHMKAVPGRKTDVKDAEWIAQLLRHGLLKASFIPNRNQRELRELVRYRRSIIEERARQHNWIQKVLEGANIKLGSVVSDIMGVSSKDMLRAIADGEDDPEKLSNFARGTMKKKKDELELALKGYVNPHQRMMLNTILTHIDFLTERIEKLDHEVAQRVSSHQEDIERLDSIPGIAKRMAEQILAEVGTNVEKQFQTAPQLCSWAALVPGHNESAGKRKSTKSKKGNKYLKSALTEAAHSVGASKTTLEHYIDEH

SEQ ID NO: 261464 - protein, 341 aa, unidentified
MTEVSTIGLDLAKNVFQAHAASASGAILFRKKLRRDQVLAFFATQPRCLVAMEACASAHYWAREIAKLGHAVRLIAPTYVKPFVKRQKNNAADAEAICEAAQRPTMRFVAVKSEAKQASVVVFRTRDLLVGQRTQIINAIRGHLAEYGLIAPQGPSHVDQLIAQIEDPNSGIPDPARSCLAVLVETLRALQGKIVALDTEIAARAKRDDGARRLMSIPGIGPLIATAIEALAPPVETFRSGRDFAAWVGLTPLQRSTGAQERLGKISRMGERTLRRLLIIGASGVVRWARRKGVPAGSWLARMLARKPPMLVIVALANKMARIAWALIAKGGSYRAPAVAA

SEQ ID NO: 261465 - protein, 330 aa, unidentified
MYLGIDTHSRYSQVAVVDDDGNLQDEIRLPNDRLDELAEEYTGGEAAIEASGHYRPVYEMLDEHLDVTLVNPSKNRLIAEATVKTDRIDAKRLAHMLRADMLAESYVPSDEIRTLRDLVRTRKSLVEERTAEKNRVRAVLKRTNNAYDSELFGPTGREFLAELSMSEADRTIVEAHLSVIDEYDEQIERLETKIEEKVFESPAAQRLLSIPGVGQSTAALIVAEVGEIDRFDRHEELVSYAGLDPQVHQSGDKEVHGSISKEGSGALRWALVQCSHVSVRHDDYLGNFYTRLKRRKNKQIAIVATARKLLVSIFYMLKRKEPYNPPEVSA

SEQ ID NO: 261466 - protein, 316 aa, unidentified
MYLGIDVSKLTIDCCLIADGQNHQKKFQNNKGGFEQLIKWLQSHKVSDKLHCVCEATGTYYEALAEYLYLRYTITVENPRKIKGYAIAELQRSKTDTQDAKLIAQYCQDRKHKLKAWQPPLKEQKQLQEIARYLDYLKQQRATEKAKQHEAPDYIKSHIQTTISNLTAQIQTVKKQLLQFYKDNPSYNILRKRLKTITGIGEQATAVLLSTYKRHEFKNAKQFTAYLGLDPRKYQSGTSVNGKSRISKIGSSEIRKSLYMPAVVAYRCNAFPEFVGRLKNKGKHIKLILIAIMRKLAVIAFTLLQNGQDFQVERYK

SEQ ID NO: 261467 - protein, 352 aa, unidentified
METSTAMKTVTTVGIDLAKNVFQVHGVNARGNPVLQKQLKRAQVLTFFSNRTPCLIGMEACGGAHFWARELAKLGHTVKLMAPQFVKPYVKTNKNDARDAEGICEAVSRPSMRFVAVKSPEQQALLSVHRARQGFVDARTATANQIRGLLTEFGLIMPKGIWNIDKRLPDILEDAENNLPPMMRELTATLRAHFKHLDSQVKALDAVIARAHREQPASRQLAAIPGIGPVTATALVATVGDARQFKSGRQVAAWLGLVPHQNSSGGKERLLGISKRGDVYLRTLLIHGARAVVREASKHPESDTWLMRLVKRRHPNIATVALANKNARIAWALLAHPERKYQTDYTALQAAA

SEQ ID NO: 261468 - protein, 426 aa, unidentified
MRSLALDVHQSFCEVAICEQGKVRSAGRVKSERAALELFAESLDPTDQVVMEATGPAMEIARIVEPHVARVVVANAQDVRAISHARVKSDRFDARTLARLLDADMLEAVWVPDEATQELRRRVARRAALVRQRTRAKNEVHATLARCLLGRSPVSDLFGKGGRAWLARQDLPAAEVETVAGCLRQIDFLGEEIEAIDARLCEWVSASPEAKRLMTIPGLGVASAAALMAAIGDISRFSSPRKLVAYLGLDAKVRQSGESAAQHGRISKRGNAQARAVLVEAAWIAVRSPGPLRAFSERLRARKHSGVAAVAVARKIACLCWQLLTKEEDYAFGRPSLVRAKLRRAELDSGAAKLSKRHGGRRVSATPKEREAERELVERAEAAYRRLVDDWHSTGPKGAGATGGRASSGPSTGQAARQAKAPGPAL

SEQ ID NO: 261469 - protein, 434 aa, unidentified
MSSPFGFYFEGSFFEMKVVYSICCGVDVHKTFIIATIIKTEGITPKYARKRFSTFNNDILRFKQWLLENDCRDVCMESTGKYWVPVYNLLEDEINVVVASPKWVRAVKGNKDDKKDSKWIGDLFRLGLVPGSFIPPKPIRVLREHTRYRYKLVSCKASEKNRYQNSFTVCNVALDSVVSDMFGKSATLITDYLIQTDDFDPEHCKSLLQRSLKKKADAVIDSIAGYKIDPAQKARMLMVKSHLNYVEKAIETVDTGIDALVEPYENHISLLCSIPGVDRRSAITIISEIGTDINQFTHSKRLCCWAGLTPGNNESAGKKKSVLITRAGVYLKPALVQVAHAAVKSIESPYYKNKYQRISKRRGKKRAIIAIARMILTAAYHMLKTGELWNPTDLFKVDLPPVLVERQKQKAIQNALKLLASEGITLTPNKHPAA

SEQ ID NO: 261470 - protein, 354 aa, unidentified
MAVASIAHAHDSVRVTVGVDTHKDSHVGHAKDELGRDLGHLEVQTTARGYAALLAWAKSYGEVVAFGVEGTSSYGIGLSRYLQNEGHLVLEVIRPGRQDRRFRGKSDPIDAEAAAAAVLSGKARNLPRASVETVEMIRSLRIARASATKARTQAINAVKALIVMAPESLRDALRNLPTAHLMNTCARFRPGHVVDPTAANKIALRSLALRCQALEAEARELEIQLDQLTSETAPVLRSRFGVGSDSAAALLIAAGDNPARLRSDAAFSMLCGSSPLPASSGQTKRHRLNRGGDRQANAALHRIVMTRLRWHAPTKAYMARRLAQGKSKPEVIRCLKRYVAREIYAVLASARNRA

SEQ ID NO: 261471 - protein, 390 aa, unidentified
MSNVIMIGCDLHDRNMLLRYAVGTGEPQQLAYDNDSSGRRRMIGRLKSLAQKNNSGRIVFAYEASGLGHGLSDQLHNEGIECYVLSPTHLPKTPKSARLKTDAKDAQMLLEQLRGFVLAGNDLPVVWTPPQRLRDDRELVRARIDVADELTRVKLKITTLFKAREIKITSPSKCRWTKVFVAWIRDEVIPGLDQFVGVKLKLLLDRFEMYRKEQAELDKALGRLSKEPRYRVACAEIRKLPGVGLLVAMSFLTEMGDLNRFSNRRQVAAYMGLCPSSNESGQKNDRKGRITRQGPARLRKVLCQAAWVSVNRCEDAAAEYHRIKQNQKNRSKKALVAMMRKLGIKMWHRALACGVPAELKGRDRPHETYRAGVPEKAPVDGSPQPLGCAG

SEQ ID NO: 261472 - protein, 474 aa, unidentified
MLPGGKMSKRAISKRAQSAKRKPRKIKAQGVAVLPVFRPRTAGIDIGAMEIFVAVSPDLDAEPVRSFGTFTRDLEAITEWLEGCGVTSVAMESTGVYWIPLYQILVDRKIEVCLVNARHFHNVPGRKTDVLDCQWLQYLHSVGLLRGSFRPEQVICAVRTLLRHRQNLVQMAAEHTLHMQKAMEQMNVKLSHVISDLTGVTGMRIIDAILQGERDPRRLAELRHERIQADEETIIQSLEGDYRAEHLITLEQSVEGYRFYQKQMAELDQKMEGFMEALPAKIDLREHPLPASTKKRKRQHNAPAYDLRTHCYRAFGVDLTEIPGFDGPTVQVMLTEVGPDLSKFPNGSAFANWLTLCPNNVITGGKILSAKTRKGKSRAALALRQAAQTLERSENHLGQFFRRMRAKLGRAEAITAVAHKLARIFFALVSQGQAYDESALVTADARQRLRQEAKLRRQAHQIGFQLVPLEAAHA

SEQ ID NO: 261473 - protein, 424 aa, unidentified
MNMETIIKPAPSDHPGFVAWIGLDWGHDTHAFALTEPSGQIQEGTLTHSAEALHDWLQQLAVRFGGRPVALAIEASRGPVVAVLLAYPWLTVYPINPVTSARYRQAFTPSGAKDDQPDARVLLELVRDHTSKLRPLELQDADTQKLDGLAQIRRDLVDRRTQLLNQLTALLKTYYPQALELVGNLNTELAADFLSRWPDLLTLKTARPGVLKRFYHAHNLRRPELLEQRLAFIRQAVALTTNDAILHVAVLQLRCLLDQWRVFHRHIPRLDAEIKQVFGEHPEVDLFRDLPGAGPALAPRLCAAFGTIRTLHPDPASLQKLAGVAPVREKSGHHLWTHWRWQAPRFLRQTFVEWAGQTVVYCPWARAYYQKMVAKGKTHPVVLRALAFKWIRVLWKCWQTRTPYSDARYLQQLRKRKSPHALAA

SEQ ID NO: 261474 - protein, 366 aa, unidentified
MGWMAPLRHLSAKLLSDRISSEWEPSMGEVTTIGFDLAKHVFQVHGVDAEGATVLRKQLRRAQVLAFFSRLPPCLVGLEACATAHYWARELRALGHEVRLMPAQYVKAYIKRNKHDAADAEAICEAVGRPTMRFVPVKTADQQAAVLLHRGRERLVRQRTGLVNALRGHLAEFGVIAPQGLRNVGKLIAIVRDEGDARLPDLARQVLQVLAAQIEQLEAAVAAIEKQLMAWHKSNPVSQRLASVPGIGPIIATAIAATVVEPSGFRSGREFAAWLGLVPRQNSTGGKHRLGGISKRGNQYLRRLLINGASANLRRSKATNADPWVIGLRRRRPPLVVAVALANKTARIAWAVMNRHENYQCVAAAA

SEQ ID NO: 261475 - protein, 351 aa, unidentified
MEKFIGLDVHAASTTFAVIGQSGRRLGTQVVETSGQALVAQLKAISGKKHVCLEEGEQSAWIYEILSPWAERVVVATVPQNRGQKSDERDAYRLAEQLRIGALKNWVFKEPGAYGTLRELGRTHAMVVQDVVRVQNRIKALYRSRGVAVSGTSVYSQKSRKQYLDKLPHASRGAAETLYAQYDAVEQIRRQAEKDLVTEAHRHPISRVLETGPGLGPIRVAQLMPVVVSPGRFRTKRQFWSYCGLGIVMRSTSDWVPKKGGGWMRADVQQTRGLNLNHNHRLKWIFKGAATSIITQLETDPLHQDYKRLTAAGTKPNLAKLTIARKIAAITLSMWKSKEKYDPTKHRKPSS

SEQ ID NO: 261476 - protein, 285 aa, unidentified
MNVTTIGIDLAKMSFSLHGVDARGKEVFRKNLNRTKLLPFLASQPASLIGMEACSGAHHWARHVAALGHRVGIMAPRFVAPYRKGGKNDGNDAEAICEAVARPGMRFVAIKSAEQQAVLCLHRIRHALIKERTAAINQLRGLLAEFGLIMPKGRYGAQHQIPRILEDAENGLPMLASVGDPRQFRNGRQFAAWLGLTPRQYTTGGKIRLGRITKRGDVYLRTLLIHGTRAVLAKVKDKPDRLSAWARSLIERRGYKRAAVALAGKNARILWAMMMRGTTYQVKTA

SEQ ID NO: 261477 - protein, 420 aa, unidentified
MVDVLIERCAGIDIGKDEVVACVRTPAPSGRGRRKQTRTFSSFTGSLEAMADWFTAEGVTDIAMEATGSYWKPVWYVLEERSFALKLVNAHHVKILPGRKSDVLDAEWLAELLEHGLLRGSFVPPPAVRELRDLTRYRKRLIQAHTSECQRIQKALEDAGIKLDSVASDVLGVSGRAMLAALVAGERDPKVLAELAKGILRRKIPALRQALRGRFTDHHALLIGLSLDHTAHLEAAIARLDKRIDTVFTTHTSEASVPFARARDRLDTITGVGKRAAETIIAEIGVDMSRFPTAAHLASWAGVAPGNNITGGKRGSGKTTKGDVWLLDILVQCAWAAARTRDTYLSAQFWKLARRIGKKKAAVAVAHSILVICWHLLTHDCDYNDLGGDYFTRRNTDRQRDRLIQQLHGLGYRVTLDKTA

SEQ ID NO: 261478 - protein, 530 aa, unidentified
MGREGRLTIGAYCPCRSLVSGVSAFATGDVLIRESGCDPDKELAAISHPCAHNLLGPFSVTPERENKIISPQAKKQSAKANEFTVADLPRHLRHINVNAAGIDIGSDRHLVAVPEGRDVVSVREFKAFTADLHALADWLSQCGITTVAMESTGVYWIPLYEILEQRGFEVYLVDARRVKNVSGRKSDVLDCQWTQELHTYGLLVQAFRPPEEVCVLRSYLRQKEMLVQAAAEHIQHMQKALQQMNLLLHNVVSDITGVTGMKILKAIIAGERNAQVLAALRDPHCQNSVETIAKSLVGNYREEHLFALRQALELYETYQVKIADCDAAIAAYLLRQEHHTDDEPPAPQKPIPARNRLRAGVDVRDQLYKMSGVDLFRVSGLAADTLLTLAGEVGFDMSPWQSVKHFTSWLALCPGTKQSGKRVLSRKTKPSANRAAQAFRMAAVTQARAKTALGAFYRRIRGRSGGREAVTATAHKIARIFYSLLKHGSAYVEQGEAAYEQQFKERRLKALKKQAIALGYQLSPLTATSF

SEQ ID NO: 261479 - protein, 336 aa, unidentified
MEVTTIGLDLAKHVFQVHGVDASGSVVLRRRLRRRELLTFFAGLKPCLVGMEACATAHYWARELRALGHEVRLMPAQYVKAYLRRGKSDAADAAAICEAVTRPSMRFVPVKGEAQQAALMLHRVRDLLVRQRTQLINAIRGHLAEFGVIEAQGPWNVGRLLAGLEQDGSVPGLVQELAHLLAAQLQEAEERIAEVDARILAWHKADAVSQRLAAIPGIGPLVATAIAATVPDPSAFRSGREFAAWLGLVPRQNSTGGKTRLGRTSRQGDAYIRRLLVIGAQSVLYCSKAARANPWIQGLLAKRPRMVVAVALANKTARIAWAVMARGTTYRIAAAA

SEQ ID NO: 261480 - protein, 337 aa, unidentified
MKDAAVVYIGIDVSKETLDIDAGDLGVSRTGNTPAEVRKALKALARKAQGKGLHACFESTGRYTDALVAECRRAGVAHSVLNPYKVACFAKSVAHAKTDAIDASLIRRYAQVRRPEPAPPPSKAAADLDGLLLLREAIVKATVALRSTLETVKRPAAARPMRRAIAYNEKRVAEYDRLIAGAVEADAEASGLVGALSAVKGVGALTAAKVVAWMPEIGTLGRRKAAALAGLAPRTRESGRWKGLSRIGGGRKGVRDALFMPATVARRHDPHMRRAYDGLMAKGKPHKVAQAAIMRMLLCRLDSVARDYRTKHKETQDSAPPSFLPPSPPAPPLPPVL

SEQ ID NO: 261481 - protein, 409 aa, unidentified
MRIIGLDIHRAFAEAVAWDDGKLRRLGRVDMRRELLTAFAEQLSQDDVVVVEATGNAAAVAAVITPHVKKVVIANPKQVRVIAHAKIKTDTIDAGVLAQLYASGFLPEVWIPDEPTQALRRQVTRRNQIVRQRSRLKNIIQSILHGHLIPSCPHADLCGPKGRAWLIDQVVPEDERLAIERHLREFDRLGEDLKVIERDLARSALADEGVKRLMTIPGVDMVVALAMKAAIGEITRFDEPQKLVSYLGLNPSVRQSGPGPAYHGRITKQGRGHARGMLVEAAWAAARAPGPLRAFFLRIRARRGQHVAAVATARKLTVIIWHLLTKGESYVWARPSLHAKKLRDLELKAGHKAARGQKGAAYAYNIKSHREEERRWVEQAETAYARFVTGWNPRGPKKLRTGTETEVRR

SEQ ID NO: 261482 - protein, 408 aa, unidentified
MEVLHPRCAGLDVHKDSVVACIRIQQGPQAIHEVATFGTTTEMLLKLSDWLGERQVTHVAMEATGVYWKPVWHVLEGTFELVLANAMHIKNVPGRKTDVNDATWIADLLAHGLIRASFVPPTAIQDMRTLMRTRKQLVRERAQHVQRIQKTLEDANLKIASAVSDVMGTSGRAILQALIDGKTNPEELLAETTGRLRAAPATLLQALRGRIRPPHRFLLKLHLGQIDALEQSIADIDKEVGALLDPFRAKAQRLMTIPGIRDVAAQVLVSEIGVDMSRFPTVGHLISWAGLCPRNDESAGKRRSTQLRHATSWLKTTLVQAAWSAARCKTGYLPAQFRRIKSRRGPQKAIIAVAASMLTAAYYILRDDVDYRDLGSDYFDFADRKKAASRLIKRLSNLGFTVEIKEVA

SEQ ID NO: 261483 - protein, 421 aa, unidentified
MEDITEETAELVARVAALDIGKAELTACVRVPHEDKPGRRQQEVRTVATTTRSLLELRDWLICQGVTLCVMEATSTYWKPPFYLLEDAIECWVVNARDVKNVPGRPKTDRLDAVWLAKLAERGMLRPSFVPPPWQRELRDLCRYRRTLVQERTREKQRAEKLLEDTQIKLSSVISDIFGKSGRDMLDALIAGQRDPHVLAELARGSMRGKKSVLQEALTGHFRDHHGYLLAMMCDRIDALTAQIEELTGRIDEAIAPFAHQVAQLDEIPGVGKTGAQELIAEIGTDMARFPTAAHLVSWAKFAPRAKQSAGKSKPAATGKGSPWIAGTLGEAGIGAARTKTFLGSRYHRLARRRGKQRALVAVGNSILTITYYLLSDPAARFTDLGPDWHDRLSPLRRKRQLIAELERLAGKKVLLQEAAA

SEQ ID NO: 261484 - protein, 412 aa, unidentified
MKDLLEISCGLDVHKEKIVACILTGPLGKPTRSEIREFSTLIPDMIALRNWIVSKNCHHVAMESTGIYWMPIYEILEDAFYGDITLLVVNARHMKNVPGKKTDMRDSEWISTLLRAGLLNGSFIPEKRIREFRDLNRYRKSVIRDITSQKNRIEKFLQSSGFRLSSFISDIFGASGRNIILHLIEHGQIDKTALDSCLKTKTRNRIDEILMSVNGTLSEHQKAFLRILMTHYDSLKKHLAEIETSLEEDMAPFALQVEQLNSIYGISTTASCAIIAEIGIDMKPFKTAEHICSWAGLCPGNNESAGKRKSTSVTKGNPYIKSMLCEIAWVIAGKRNTYLSAWYWRIKQKKGAKKAIVALARKLLVIIYTMLKQGTLFDESCFETRRKHCEQKQLSRYIRESEKHGYHVEAQS

SEQ ID NO: 261485 - protein, 347 aa, unidentified
MKYYAGIDVSLNSSNVCVVDASGKIVREGKVASEPVTLITWLGSLGVNLERIGLEAGPLSQWLYGALREAGLAVELLETRHVKTALSTMPVKTDRNDARGIAQLMRLGWFRPVHCKSMAAQEVRALLTARKLVQSKLYDIEMSLRGILRGFGLKVGPTTSQSFAARINHLVDGQTSLEAVAAALLSLHAVALREFKSLEKSVRQISRADARVRLLMSTPGVGPLVALTYVAAIDDPARFPSSKSVGAHFGLTPKKYQSGETDVSGRISKMGDGSVRTALYEAAHVILTRPIKGGALKSWAMKLARRAGMMKAKVALARKLAVVLHRMWVDAIKFVADKASGCVRVAA

SEQ ID NO: 261486 - protein, 347 aa, unidentified
MDHYAGIDVSLEASSICVVDGAGKIVREAKVASEPEALIRWLGSLGLDLARIGLEAGPLSQWLYGAMKEAGLAVELLETRHVQIALKTMPVKTDRNDARGIAQLMRRGWFRPVHCKSMAAQETRALLTARKLVQSKLHDVEMSLRGILRGFGLKVGPTTPKRFARRIEELVAGHPTLEFIAKALLAAHAALLRELDMFEKRVRAMAREDKRATLIMSAPGVGAIVALTYVSAIDDPARFSSSKRVGPHFGLTPKKYQSGEKDVTGRITKIGDAGVRTALYEAANVILTRPVKGGGLKSWAMKLAKRAGMKKAKVALARKLGVILHRMWIDGTPFDARRAACPAPTAA

SEQ ID NO: 261487 - protein, 354 aa, unidentified
MKRTTKYVFLDVHQATTFAAVREENGRIIARAVLPTEEQPIVEFMQGMRGSRHVAFEEGTQAQWLHALLGPVVDQVLVCNRRGKKRAGNKGDKLDAEQGSELLRQGSLRAVYHGGQAGSGLKEYARTYDNVVEDGTRVMLRVKALFRARAIKAPGKGVYHPRERSEWLGKLEDVAVRFRAELLYSELDVLRRLRPQAKQALIAEAKKHSAYRLLRTVPFFGPVRVAQLLAVLQTPWRFRTKRHLWAYAGLAVVTHSSSDYEWESGRIRRRKRAPLTRGLNRNHNRVLKSVFKGAAQAAIGRPGALQDFYQGMIQRGMRPELAVVTLARKLAAVVLHVWKTGEDYDPSKLTKQVR

SEQ ID NO: 261488 - protein, 359 aa, unidentified
MFKDSTTYIGVDLGDKESHVVILDSSGEMIEAARLPTTRSAFQRKFSSLPGCRVAMEVGAHSRWASHLLEDLGHDVLVANARKLRAIYSNPRKGDRADAETLARLGRLDPELLSPIHHRSPRAQADLAVLRSRDAVVRSRSLLINHARSIVKSCGARLPSCSADSFAHKVAPDIPESLRPALAPILDTIACLTQQIRGYDRTIETVCSERYPEAKQLRRISGVGPLTALAFVLTLEDASRFRKSREVGPALGLVPRTDQSGDRDPQLRITKTGDSYLRRLLVGSAQYILGPFGPDCDLRRWGLKLAERGGKNAKKRAVVGVARKLAIVLHHIWKSGETYDPFYQSHASALNPLPASKAA

SEQ ID NO: 261489 - protein, 345 aa, unidentified
MLYAGLDLSRKRLDFHLLDGEGTTVDVGAAPPDDGLHGLSERLAGRGEPIRAAIESMNGARFVHDRLELHGWQVEVADAQKVKGLAPLACKTDRIDAWVLAELARRDLVPAIWLPDPQVRAERERARWRLHLVRHRSSLKQRVHALLLTHGKPCPVSDLFGLRGRQLLATLGLPEPWQGTIEASLRLIDELEREIGECERELRRLGADHRYVPLLCTVPGISWVLAYTIAAEIGDIGRFPSPRKLAGYSGLCPRVYQSGQRDLRGPLSKQGPRYLRWALVEAATHACTHSAYRDRYQHTKTRIGKQRGAKVAQIDLARRLSEAIWHMLSRGESFAPKGATDPLAA

SEQ ID NO: 261490 - protein, 414 aa, unidentified
MNEDIAAYVGVDWASATHYAYALDAQGAKLGHRSFQHSGDGLAELADWIQRTTGAEPGRIAIGIEVPHGPVVESLMDSGFLVHALNPKQLDRFRDRFTMAGAKDDRLDAFVLADALRTDSRFYRFLEPVHPTIIQLREWSRMTEDLSAERNRLANRFRHQLWRYFPQMLELAEDWSQQWILDLWDLIPTPARARAVRTSTIARRLKESRVKRWTADTLLNHLRSTPISVASGVTEACVAHCELILGRLRLVMQQMKLAMKELERLCSAVAELPSATGIAPHADPEILRSMPGIGTIVLAALLSEGHDAIVRRDAQALRGLSGVVPVTRRSGKQIVVVMRQSCPHRLRTAVYHWARVAVLHDFQTRNRYAALRKRGHSHARALRSIGSRLIGVACAMLRTGELFDNGRPPQSAAA

SEQ ID NO: 261491 - protein, 314 aa, unidentified
MNEQQSVAVGIDVAKKHLDVAIGSEAPMRFANDEGGIAKLVAELRTRNVSRIVLEATGGYQRTLLAALLGAGLPAVAVNPKQARDFAKAIGRLEKTDEIDARVLALFAERIAPEVRPLPDEETQDFQALLARRRQLTEMLVMEKNRLHQAKGAVHRNIREHIEWLKKQLRDTDNDIETRLRNYPAWDARVEVLETLKGVGRVTSMTLLAELPELGRLDRKKIAKLAGVAPLNRDSGSRRGRRVIWGGRSSVRAALYMATLVATRHNPLIRDFYVRLVSRGKLKKVALVAAMRKLLTILNALLRDHARTALGPAN

SEQ ID NO: 261492 - protein, 373 aa, unidentified
MKKDTLFVGLDTDKKHIDVAVAEPLPGGEVRYWGKIANTAPSVDRLIKKLGQGGRPLMVCYEAGPCGYGLYRQLSAKPGVTCEVVAPSMIPRRSGDRVKTNRRDALALARLRRAEELTAVWVPDEAHEAMRDLIRARAAAVSAMIRCQQQISSFLLRQRIAYVDGKPWTRKHRQWLGTLQFDHAAQRLMFAEALLALDQATARRRRLGEHIEELVPSWSLGWLVQALQALRGYQTINAAVLVSEIGDPRRFESPRKLMGFLGVNVSEHSTGDNTRRGHLTKTGSKRGRKALIEAAWTCRTVARHAKPQAASQPAAVQQIADKAGHRLSRRYRHLVARGKPPQVAIAAVARESLGFIWAIAHAAAPQHQSAVAP

SEQ ID NO: 261493 - protein, 343 aa, unidentified
MKRNTIGLDLAKNIFHAVGFDHRGEQIFRKQLRRNQVTNWFAQQPVSLVGIEACGGSHYWARTLTALGHEVKLIAPQHIKAYLRAQKNDYNEAAAIAEAVTRPRMRFVPIKSAAQLDLQALQRLRTRLIRERTGQGNQLRGLLAEHGIVIPRSLAILRRRLPELLEDADNGLSALFRRLLHTGWQHLLQIEDQVKILDRELDIAVAEDEDCQRLMTIPGYGPVVASGFSVAVGDGRCYRRGRDVSAVLGLVPRQHTTGGKPKLLGISKRGDNMLRVNLIQGARSVLMHAKGKDDPLCRWALKVCAKRGFNKATVAVANKLARIGWAVLRNQVTYQPGYRLHTA

SEQ ID NO: 261494 - protein, 392 aa, unidentified
MVISVGIDVSKDKHDCFIVSSEGEVLADVFTVPNNMDGFHCLLQRIQSCAVSQDKIKVGLEATGHYSYNLLGFLLDNGLTTYVLNPLRTNLYRKSLSLRKTKTDRVDARTIASMLLSDAGLKPYTSTAYHNEELKSLTRYRFDKVKERAKLKSSVSRLVCILFPELEKLVPSLHIASVYALLEAFPGAKQVASVHLTKLKALLEAASKGRYKRDMALEIRDAARNSIGSRMPAKSLELQHTIRLIRELDAEIAETEEQIQSILDELHSPITTIPGLGFRMAAMILAEVGDFARFDSPDKLLAYAGMSPSTYQSGQLKNCYPHMEKRGSRYLRYALYNATKYVCQWEPGFSAYLAKKRAEGKHYNVAISHAAKKLVRLIFAMEKSGTPYHLTV

SEQ ID NO: 261495 - protein, 498 aa, unidentified
MSRNIFPERSQAAAELLAGTDPARLLAVPVDFAKKAHVARIVRGTGEYLQERPLTVRNDAAGGAYLVGRIEAACARYRIPKGNVLVGGEDIPEYAWNFVLSIQAAGYRFVRVNAKEAKKHRTNSRATSDALALDGIAQVMLLRRGYDLQAHDGLCGALKMAERARRSLRTQVTATRSRIHRDVDLLCPGLLDERRSGLFPFGPGSLALMEDGCSVERLRRMSPASLAKRLARAGTPTPGSVAAKLKALAASALPPDPGLVPYRQGSLARKVGLLRALDAALADEENEMARCLVRTPGFVLTSIAGLGVVLGGGIVAEYGDPQLWPDPDRMMSYAGLAVRQHQSGGPGSPPVAGNLPIDANHHLKDILLQAAFHVGTTPHPVWRELGLPGDHPLREHYLRIEQRGGRSRLGTAKKLLRTVRAMVREQRVYLPADALRHPAAADAMPADRLLEYRRAVGRMLLAKWRRYDLGGIPDDDNQLQLWLRETDQLEHFLNNPTK

SEQ ID NO: 261496 - protein, 539 aa, unidentified
MDLVYKRCAGMDVHKKTIHVCIRIGRGKKLEVLTRVFGTFTADLEQLREFLRTNKVRRVIIESTGVYWMPVRNVLERSDWKFDLVLVNPQHVRALQGEKTDDKDCRRLAEFGQHDLLRGSFLPPVEIRDLRDLTRRRSQMQSDRNRVINRIGRLLETANFKLGSVASNIVGKTGWLILNAIANGETDAKRLAEQAQGSLQLKMAELAEALRGYSREPFRWLLSQLIEDLSRLDSKLNEIDLRLREQMKPYEDLIGRLCTIPGVKEITAWTLIAELGTDMSKFPTASHAASWAGLCPGNCESAGKRQTGRTRKGDRYLRRMLIQNGWAVAHKKDCFLTALFYRIAARRGSKRAAMAVAHRVLVIAYYIIRDGSVYAELGGDHYDQKNPERTARRLTERLERIGYEVILTKANVAALETTNKPIRNGTTRWIMSSPKIARTRLRIPGPVATPDVCGKCAAKKIPCIHDPSERRPRPTLSGGKPKPGRPCKCAERGLVCKHQIDSEIQAGKNICARNVIDLAGQFSKEGAPRAARNLRCYLS

SEQ ID NO: 261497 - protein, 346 aa, unidentified
MKRNPVNKVVKVLGIDLAKQSFQLHGVDASGPTVLRRKLSRKQLSAFVAQLELCLIGLEACGGAHHWSRVFKSFGHTIRIIVPQFVKPYVKSNKNDAVDAEAICEAVQRPNMRFVPEKNIEQQDMQSLHRIRSLVVARRTAQANQIRGLLLEYGIMIPQGIHCIRQQIPEILDSADNGMSSLFRDGLNELYRELPHLDERIVIIEKKLQRLGEQYEDCQRLMTIPGVGLLSATALLAAIGDINAFKNGRELAAWLGLVPRQHSTGGKPTLIGISKRGDSYLRMLLIHGGRSVVRVTHRHNDRRNSWIDALAQRRGVNIAAVAVVNKNIRIVWALLNKKTTYQAMLI

SEQ ID NO: 261498 - protein, 401 aa, unidentified
MESPIVSIDVSNGNSHYMCFIKNNKRFGKVKKIDHDIEGFKRLLEDIQKLEAETNEKVCAVFEATGVYTKPLERFLSKNSIKTYIINPLESARKRKEEIHNKKTDKLDPISISKVYYDKEEMMELTKKDETHNWLRKKNRLYEDQLNHLIKYKVTFQNQLSICFPGYLDLFKDGYSDIPMTILKKYPHPDLLKNKKAETVARYLEKNTCHTHKVSLEYALKIIEFAKKTYPGCEKDDVEVEIFKILLDKVIETQRECEKTLNEMITVASTLEEYRYISSIDGIGPNLAARIIAEIGDIEEFKSREALVAYAGLDPHIYQSGDQDGKHLKISKKGNKYLRCLLFLAVGCSIRGAKDNPVNRFYQKKKQQSNPLNSKAAKTACTAKLLKIIYGICKNKTTYER

SEQ ID NO: 261499 - protein, 456 aa, unidentified
MNERSKKQRRRKSSPKHFPIVHRNAAGIDLGSRSHFVAVPEDRSQESVREFGCYTPELHRMARWLRDCGVETVAMESTGVYWVPVLELLEDYGFEVLLVDARQVKSLSGKKTDVLDCQWIQRLHCYGLLKGAFRPQAEITSMRAYWRQRSGLVKECARHIQLMQKALEQMNVQLHKAVSDISGKTGMNIIRSIVKGERDPKVLALHRDRRLKASYDELVQALTGNYREEHVFALTQAVQGYDFFQQQMENCDRQLESYMQRLPTKKPSQAPSPTRRGTRRKNQPYFDLRSEVVRIAGFDATLIPGIDALSAQELICECDIDMKSFPSAKNFASWTTLCPNNRKTGGRIRSRNTRSGANRAATVFRRGAQSLHRSQTALGAFHRRQRARHSGPEAVTATAHKLARMYYRLAKYGDEYVEQGQRAYEEQYKRQSISALKRRARHMGFQLLQPETGEVL

SEQ ID NO: 261500 - protein, 376 aa, unidentified
MNEKLRFLGLDVHAETIAVAVAEPNGEVRSLGMIANREDSIRKFIRKLGSPEHLRACYEAGPTGFVLYWQLTQLGVKCDVVAPSLVPKKPGDRVKTDRRDALKLARSHRSDDLTAVWVPDEGSEALRDLVRAREAAKQDQLRAKHRLTKFLLRTGQRPPLGVKAWTEKYVEWVQQVRYTHPAQEATLLDCLNEVQHMEERVKRLEQSIVEVIQLAPAPMQEVVRGLQALRGIAHISAVTIAVELGNITSRFESARDLMGYSGAFPSEDSTGKRIRRGGITKSGNAHRRRIVVESAWSYRHRPAIGARLRRRQEGLPAEITEIAWKAQNRLHKRYMTLMARGKEQRKTMTAIARELLGFIWAIGIKAEAACKQQMAA

SEQ ID NO: 261501 - protein, 455 aa, unidentified
MYLPDWKWIPIRKELLLMSNKVIFNLDDLFISVGIDVGADFSWMSIALPNQQFVGKPYKILHNSIDSLTTAVSKIKEAEELYSLESRIFLESTGIYHYPLFCYLRDKGFNCSVINPIITKNSTNINIRKVHNDRFDSKKAALVGLKPDLKVSLMPSDLALNCRNLCREYYDLMDNRSAYVNKLQGELRMVFPQYLDIFSKVTINTSLTLLETYTSPSAFLKADKQEIIDIIKSTARFGLTYAQNKYNAIIQAATDANQFGYIIDSNIKRIRLYISFIRKYDEEINNILESLHELVDANEDADFVKQIHLIETFKGAGFLSAVSIMGEIGDFSAFSKPKQLFAYFGLDPAVKQSGKFEGTKVQMSKRGSAIARRVIHTLTLQSISISRNGEAKNPVLREYYLKKCDSKPKLVAMGAVSHKVCNMIFAILRDNKPFKIIAPQEHIKQYNAAKCDIAA

SEQ ID NO: 261502 - protein, 315 aa, unidentified
MSESGRAVFIGIDVSKEKLDVAVRPTGEFISFSNNEDGISCVVDFVKSFSPNLVVLEATGGLETAAVGMLADKGLPVVVINPRQVRDFAKATGKLAKTDAIDAHLIARFGEAVRPELRLLKDQEAQKLTALITRRRQIVEMITAEKNRLHAAPKWTSKDIQTNIAWLEKCLKKVDKDLKNLLKKSPVWREKDEILQSTPGVGPVLSMTLLSGLPELGNLNRKEIAALVGVAPLNRDSGLFRGKRMIWGGRANIRSVLYMSATCAMRFNPTIRIFYERLRLAGKLHKVAITACMRKLLVILNTMIKNRTYWSTVQP

SEQ ID NO: 261503 - protein, 370 aa, unidentified
MARKLWAGLDVGVETTSICVISDTGEVLQEATCPTHVKSVHSEIRWLRRRRFARVGLEGSCGLTLARGLRSLGYCVDLYETRQLSKFLRARRNKTDAGDANGIAQAGRIGASLVSRVYLKSLECQSLQSRLVVRRHLVRARAAAVSLLCRQVEAYGGRVRSANHSMQLGLKVNAELSKLFGRSPNPLVSELRTLLVHCEQLISYQRSVDQDLRRVACDNEVCRRFMEIPGVGPLCALTFFAAIGDPKRFRRSVDVGSYLGLTPKIHQSGLSLRRGRISKMGNSEVRGLLVQAATAFMRWEKDGSRLRAWASDIEQRRGRGKSRVALGRKLAVVMLAMWKSGERFEARSSEQDQAPQGPAADSDPVKPQAS

SEQ ID NO: 261504 - protein, 445 aa, unidentified
MGTYAGVDWASEKHDVLVADAAGERLLSTTFAHDEQGLRSLCRQLVRLEVELVAIERPDGLLVERLLDAGLRVLALHPNQVAAARARFRVSGGKSDRFDAFVLCELARTDHHRFRVLEPDSDATKALRALTRAREDLVGTRTALSNQLRAELERFWPGPLGLFTDLTSRISLAFLERYPSPADTHGLGEARLQAFLARERYTGRQKPAQLMAKLRRAAHGPIGELELSTRRQIVLSLVATLKTLNVQIKQLERQLATAVREHPDGAIFLSLFKKPDSVVCAAELLAEIGDCRARYPSRDALAADAGQAAVAKESGKRKAATFRWACNKRLRQAFHTLADSTRHWHPWAQDLYAAARARGHDHPRALRTLGRAWCRIIWRCWQDRVPYDPARHRALQRHITVTIPTPSGPRPDIAATQRIAGRRCHQRPSAKRLTTSRQPLSGARG

SEQ ID NO: 261505 - protein, 353 aa, unidentified
MTFYIGVDFHPYQQTLCWCDEETGETGCLKLSHDIEKVREFYSSIERGAVIGVEASSRAGWFERILLEAGHKLLVGNPVSIRKTALSRHKNDRVDAEHMLWLLMRDEFPAIWRRPPESNEVLEVLRLRSSLVGQRTQVYNRLSAIARDTGMPRALMRTVAVQQVLKRIVMCESSGLCRDQLFSTLSHLRERILELEAWLKQKAAADDRVQLLMTQKGVGYLTALTFVHTVGDVTRFDKGPKGVTRFAGYDPVERSSAEKIRFGPISKAGPWLLRFHLGQAAQMAARSDAKLKAFYKRLAKRKPKALAKTATARKLLVKLSIMLRDNITAEEFDLRGRTVGNARRIAGSEMTAA

SEQ ID NO: 261506 - protein, 338 aa, unidentified
MNIVFLGIDLAKNVFQLCGLNQAGKPVYTKRTGRKELLQTLANIPACLIGIEASTGAFYWQREFEKLGHKVKVISPQYVKPFVRGQKNDGNDAQAIAVALMQPTMQLVPPKSPEQQDIQALHRARQRIVNHRTATVCQIRGLLLDRGIPIGSAVSRARRAIPLILEDAENGLSSRMRRTIAELYDLFNDLGRRIHFFDKEIETVFRQSEACQRIAKVKGIGPETATAVVAAIGKGTEFKNGRHFAAWLGLVPRQHSSGDRQVLMNMTKKGDRHLRTLFIHGARAVVRVATNNNDDHMNQWVNQLKERRGFNKTTVAVANKNARIIWSMLRNETGYQVV

SEQ ID NO: 261507 - protein, 505 aa, unidentified
MERLCKGRRPGRAELNSPWKISMKPKQQEKNKKAICRPTQNNWHAMNRKQRRELTRKLQSEDLSLEVVHPDAAGIDIGNESHYVAVPPTRDSQSVRRFGCTTSELKEMAVWLKQCAIRTIALQSTGVYWIAVYDILEEAGFEVYLVNARETKNLPGRKSDVQESQWLMKLHTYGLLRNSFRPSQEIRTMRTYWRQRNDLVRSAGRHIQRMQKALTQMNIQLANVLSDVSGMTGQAIVKAILAGERDPYELAALRNWRVKASEEEIARSLEGNWQEDLLFVLQQEQDGYEFCQRQMAECDQRLQQYLQQLEDRSHGAGLPEEKRKERLRKKKKGNAPQFDLRAELFRMTGTDLTQIDGIDVTTTMTILSEAGWDMSKWKTEHHFVSWLRLCPDNRISGDKIIGKGRLPTNNRVTNALRMAASTLRLSNTYLGAQFRRLRTKLGAPVAIKAMAAKLARLVYRMLRYGMTFIDRGAQFYDAQHRKLQINYLKRKAANFGFQIIEVPAA

SEQ ID NO: 261508 - protein, 367 aa, unidentified
MQNTIVHYEGAASLEAVATKVKPSGARIKIGLDVHARLYVAVAQYDHLLPKAARRLRPGEFVPWVEALLGQGHSVHVVYEACGFGFSLYRQLIAAGAHCYVIAPCKLDEECSRVKTDPRDATTLCQRLSRYLEGNTRELAVIRVPSQEQEQARHVSRQRTQLVCHRQKLEAQGRSLLISHALPAPAHWWKEQTWTRLGQHLPAWITTRLQMARPALLSLQEQINALTNELEGSAPSTLPRGVGKLTSVMLTREICDWHRFNNRRAISSYTGLCPGERSSGSKRVPGSVTKRGNARVRAALVECAWRMVRFQPQYPPVQKRLGILAKGSRALGAVRKKAIVAVARRLAVDLWRLHTGRCTAEQLGLKL

SEQ ID NO: 261509 - protein, 379 aa, unidentified
MTLDKYFRQCVGIDISKDKFTACLYMYDMASDAGCCTESIDFPNNRTGFNQMVKWSRKESQKGFPLVYLMEPTGSYYEPLAYHLHKIGQTLYVVLPNKARKFCEYEGIKTKTDAMDARCLALMGCKNRRLRPWEPPLPIYRELRQLTRLRADLVKMQTQMLNHMESIDHMEDVAPEVRKSYEKLLDTIEKQLEKNEKDIAAKLAQDKELETKVKRIATAKGIRVGTVTCIVAETQGFHLISNRKQLTSFAGLDVKARQSGKDDPRHHITKKGNAHIRAALYMPALSAAHCNRQMAQAYGRICAKHPDVKMIGVTAIMRKMLLLVYSLWKSGEEYDETRDNTHTPRKKEPQPTNSPEDCLKPNAEPPDWNAADKEGNPPF

SEQ ID NO: 261510 - protein, 344 aa, unidentified
MPTEASPTLYAGLDLHKSNVFCAIKDQDGKPIYRHRLPTALPTILQALDPYRAQLQAVAVESTFNWYWLVDGLQAASYPVRLANPAAMQAYNALKQTDDESDALWLAELLRLGILPEGYIYPKAERPIRDMLRRRLLIVHQATQTLLSLQSMVTRHTGQSVSGRKLEDWTLVEVRAAFADEYSQQTAAAMLELLREQRRLQHSLEKQVLAVVKLHGPFQRLLTIPGIGNILGITITLETGPIARFAGAGQYASYCRTVESRCESAGKKKGENNRKNGNKYLAWAFVEAANFAQRYSPKAQAWFARKTARAGRVVAVKALACKLAKAAYYVLRDAVDFDEKKLFG

SEQ ID NO: 261511 - protein, 391 aa, unidentified
MIYIGIDVAKDKHDCFITNSDSKVLFKAFTIFNNLDGFNDLYQKIESVMDDVTKVKVGLEATGHYSYNLLGYLIDKGLPTYVINPLHTNLYRKSLSLRQTKTDKVDARTIASMLMSDVNLKSYSDTSYHNEELKSLTRYRFDKVKERAKLKTSVSRLVCILFPELEKLVPTLHMASVYALLSEFPSAKHVATAHLTRLTNLLSESSKGRYGKDTAITFRDSARASIGSNMPAKSLELKHTIKLIQELDSEIDEIENEIKIIMDEINSPILSIPGINYRMGAMIIAEIGDFNRFDSPDKILAYAGFSPSTYQSGQLDGAYAHMEKRGSRYLRYALYNATKYVCHWDPTFAAYLAKKRAEGKHYNVAISHAVKKLVQVIYHLEKTKQQYIKAA

SEQ ID NO: 261512 - protein, 387 aa, unidentified
MPQPNDLSRSLIALEQDATLIAVIEMGQSSWLVAGVVPGVERQPLKKLAVDQAGLLQLLHRWRNEAVRAGCSIKRIAVAYEAGRDGFWLARWLRAHGIEAYVIHASSVPVSREHRRAKTDRLDTELLKRAFLGWLRGEPNHCSMAAIPTLEDEDAKRPSRERESLVRECTRIVNRVKGNLARLGIRGFKVSLAHAAERLGALRTPEGATVPPNTLAELRRDMAHLRFVKQQIKEIEAARAERLEQGSAQGRNGMVRLLARVVGVGIESADMLVQEVFSRELRDRRAVARYAGLTGAPDESGKKRRERGLAKAGNARVRRGMIQLAWGHLLHQKDSVLAEWYRRRTADARGGTRKTMIVALARKLLIALWRLVTTGEAPAGLLLRPAT

SEQ ID NO: 261513 - protein, 353 aa, unidentified
MQKEKVIKQSVGIDCGKVELVVAFGVMQEGFEEKIISNTAFKNTSEGFKKLQKWASKLTDPAVELVYVIEATGVYHEKVSLHLHNEGCKICVMLPNKVKSFSQTLTVKTVNDKTSSQAIAYLGLEKRLDAWQPPHPVYRELKQLTREREQLIEERTLCKNQLHAEESGAWPNTGSVKRIKQRVKLLNKQMTEIDAEIVAIVTKHEWLKKKLEYICSIKGVGLLSAVIIVAETNGFNLVRNKKQLVSYAGLDVVEKESGISVKGKTKISRKGNKYLRKSLHFPALVAIRHNEQMKAMYSRLLSRHGIKMKAAVAVQKKILEFVYVLWKKEEMFDQQYLKNKGQQLEVATLCELA

SEQ ID NO: 261514 - protein, 353 aa, unidentified
MEILAMDLGKVKSVACDYASQTGEHAFEACRTAPAVVEGLLVRRRPDRLVIEVGPSAGWIADLAARLAIELQVANPSHQGWRWRSVKKKTDRVDALKLAQLSAVNQLPLVEVPSKEVREWRSLIQYRQGLVARRTAIKNSIHSILHRQAIERPPGKSGWTNAFRKTLDHLAGAGEDMAVFWASLEPTAWWRGQLAEELRQLREVECSISSVEKQLDAYAAKKQAIKRLRSAPGVGPRLSETVAAIIDDPHRFKNARQVAAYAGLVPRVFQSGSVDRKGRITGAGNRYLRSMLVEVAWLGLRTNPWMRQVFERVCRGCPSRRKIAIVAVARRLLIWCWAMMRDEQEWKPKALAA

SEQ ID NO: 261515 - protein, 418 aa, unidentified
MDEDGNTRGSRRYVALDIHKHYCIIAAADREGRVVLHPVRVEHADLEGWLKKNLRASDHVVIESTTNAWHVYDLLEPWVERVVVANPIKVKQIAQARVKTDIRDTLILTRLLAANLVPDVWVPPAHVREMRQLLSQRRQLVESHTQIVNRMHSVAHRHHLKHERGKRFNEKTTLWQRDNRLSKVEQFQLELEMENRGYIEKQIRRIGKEVAKMSHQKPWAESMTYLMQLPGFGVITAMTILAAIGEVQRFETAKKLASYSGLTGGVDQSGTHLVQKGITKEGRKELRWAMVEVAQRAVTSDPRWTRKFQELHKRMHRNQAIVAVARQLLELVWYVLTRRQPYRHFSQERIAYKYLTWAWQMEDAARDGLTRQQFARYYMMRLGIGQDLTRIALDPKHPRKIASEAELLALRPDLKHIE

SEQ ID NO: 261516 - protein, 377 aa, unidentified
MEKDSRFVGLDVHAETIAVAVGEPGGEVHSLGTIPNTPEAVRRLVKKLGPPETLRVCYEAGPTGYVLYRQLTALGVPCAVIAPTLVPVKAGDRVKTDRRDAEKLARSYRSGDLTPVWVPDPGHEALRDLVRAREAAKKDQLRARHRLGKFLLRQGRRAPTGIKAWGVKHRAWLQTIRFAHAAQDATLLDYRTEIDHAADRIARLERAIATAADLTPAPVRAVIAGLQALRGIAKLSAVSVVTEVGTLSRFAKPRQLMGYSGAVASEHSSGPHRRRGGITKTGNAHLRRIVIEAAWAYRHRPAIGGTLRTRQEGLSEEVKALAWKAQHRLHGRYVRLIAKGKAPTQVVTAIGRELLGFIWAIGVHIEQHTAGGAPAAA

SEQ ID NO: 261517 - protein, 347 aa, unidentified
MNFYTQQHKHYCGIDLHAKAMYVCILDHNGTKLVHKNLPTTPDAFLRVIAPYRDDLVVGVECIFTWYWLADLCQKEGIAFVLGHALYMKAIHGGKAKNDKIDAHKIAVLLRGGMFPQAYVYPPEMRATRDLLRRRCHLMRKRAELLAHIQNTNSQYNLPEIGKKLAYKANREGVEEHFPDPSVRKTIEMDVALIDHYDKLLGEVELYITRAAKGHDAQSFARLQSVPGIGQILALVILYEIQDIARFPRVQDFLSYGRLVKCAKESAGKRYGLSGKKIGNPQLKWAFSEAATLFLRQNQLGKEYFAKLERKHGKGKALTVLAQKLARAVYFMLTRHQAFDLQRFVTT

SEQ ID NO: 261518 - protein, 332 aa, unidentified
MYYLGFDVSKDTLDGVLTNLKTKTEYFQIDNTKESINKWLNEIELPKKVLVGCESTGNYHLMLQNIFVRSDFLFKVLNPLLVKQFTRTTIRKKKTDMSDSLIIAKLLAQKEGRVVKENELDVTLKTLQRTLKKISNEKHKFALIRKSLKYLESNKDIEYLDKLLCDLEENIYNKVVEYVHYLKNRCSDNKDIQLLESIIGISFRLALIISTEIGDINRFNDPKELIAFSGLDPKIRQSGHCLNSQGRLTKRGSPHLRTALFIAASVARRFDPELKEYYEKKRKEGKRYTVAVCAVARKMSNRVYAVLKRKTPYVKKESSPIVLTKELSTIDV

SEQ ID NO: 261519 - protein, 357 aa, unidentified
MGYFVGLDVSLKSTAICVLDGDGAVVWRGSADTDPAMILDALERWLGKIVRLGLETGSITPWLARELRARGLPVVVMDAGRAADALKARPVKTDRADARALAEMLQTGWYTEVFVKSEDSHRIKALLSARDQLVRNKRSFFGQIRGMPRPFGIRLGGRMGTSKFDAAARAAVRHDDLLYLSVNALLEALAAIAAQIAALDKAVKRLSERSSACWRLMSVPGVGPITALAFEAAIEDPARFRRSRDVGAYLGLTPRRYQSGARDVTGAISKRGDAMARHRLYEAANRLLTTWSGRSALKSWGLKSWGLKSWGLKSWGLKLIKRVGPKRARVAVARKLACLLLRLWKDASHYQEEMRMA

SEQ ID NO: 261520 - protein, 370 aa, unidentified
MKEYSEAFIGFDTAKKKHAVAIADVGREGEIRYLGEIDSSPLTIERMIRKLAGRYEKLHFCYEAGPTGYGLYRQVRGLGHDCSVVAPSLIPKKSGERVKTNRRDAVTLARLFRAGELTSVWVPDTVHEAVRDLVRARETASQDLRRKRQQLLSFLLRHGRIFSGRQHWSRAHLRWLAQQKFDHPAQQIVFQDAVDAIDDAAARLRRLDEQVAAIVPSWSMAPVVEAYQAMRGVSFVVAVTFVAEIGDLRRFDNPRQLMAFLGLVPSERSTGERVRRAGLTLAGNKRARRVLIEGAWSYRYPARVSQTLQARLEGLPKAVREIAWKAQIRLCARYRRLNAAGKKLPVVIAAIAREMAAFLWAIARHVAPAA

SEQ ID NO: 261521 - protein, 340 aa, unidentified
MDEVTTIAVDIAKRVFNVYWVDTNTGEIGSRTLTRAKFEEFMREREPSRVVLEAGGGAHYWGRWLARLGHEVRLIAAQHVRAFVRTNKTDGADARAIWEAARRPQMKWVVVKSEASQAVLALHRMRAQLRDMRRMQSNQLKGLLYEFGIVVPAKLTPAMLEEWVGAGRVPRLLQESLREQIERIARLKGEEVEIKRRIERHNASDPLALELLAVPGIGTLTASALAAELADGARSYSNGRQYAACKGIVPRLSGTGGKVRAGAISKRGDPYVRTLLIHGARSVITHQRRAKRLSPWLKGLLERRPLNVAVVALANKMARTAWALAAHGRSYQQNYGAQAA

SEQ ID NO: 261522 - protein, 346 aa, unidentified
MQNDTLVAVDIAKEVFEVGLSDRPGHVARRRRLARSEFLEFFAQLPQATVVMEACGSAHYWARRIEELGHVVVLLPPQYVRPYVVRNKTDRKDVDGLLEACRNDRIRPVPIKSVTQQVLGTLHRLRSGWLADRTRAINALRGLLRELGFFIPEGRKHVLPDAWEIIQDPDSGLPDALKPSLGSLCEEIVSLSTRIEEIEAQLEALAKQLPVVARLRSVPGVGLLTATALYAFVGDALRFPSGRHMASFLGLTPREYSTGLHRRLGRISKRGDVYLRMLLIHGARSVLWHAKRMKQPDRLRAWALRLERRLGHNKAAVALANKLARISWAVWKNDRHFEPMPELQAA

SEQ ID NO: 261523 - protein, 367 aa, unidentified
MKKLITTMMQRTLNKQDGCLTVGLDLGDRSSFYCVLDEAGDVLLEQRVSTTPKAIKEMFGAMPRSRIALETGTHSPWVSRLLSELGHEPIVAHARSVRLIGESRRKDDRLDARTLARLVRIDPQLLCPVKHRSAEAQADLTVIRARAALIRTRTMLVNAARGLTKSYGERLRGCNARGMKPKAAQDLSPELKRALEPMMGEIESVSERICEYDQLLESMARNRYPEAEQLKQIKGVGTLIALTYMLTLEDPHRFHKSRDAACYVGLQPGRRNSGQSEPQMHISKEGDPYLRALLVQAAHHVLGSWGVDSDLRRWGMKLAEHGGKRGKKRAVIAVARKLAVLLHRLWVSGEVYVPLRPSGRATLPAVA

SEQ ID NO: 261524 - protein, 344 aa, unidentified
MSQVTTIGLDIAKNVFHAHGADERGAMVFSRKLTRAKLLEFFAGQPVCIVALEACGGAHHWARQLQTMGHDVRLIPPSYVKPFVKRNKNDAIDAEAIAEAAQRPGMRFVAVKSEEQQAAGLVFRTRDLAVRQRTQLINAIRGHLAEYGWVAPRGTAHMTMLADLLEDEEMTSSLPAAARPMFKLMVDMLADLDKQIAVLDREIARRAKEDEAARRLMTIPGIGPIAATAIISLAPPVETFRKGRDFAAWLGLAPRQHSTGGKQRLGSISKMGERTIRRLLIIGGSSMVRQACRFGAPAGSWLERMLARKPRMLVSVALANKMARMVWALLTRNEDYRAPAAVAA

SEQ ID NO: 261525 - protein, 342 aa, unidentified
MTITRIGLDTSKHVFQIHGVDENEQAVLRRQLRRGEVAKFFAKLPPTRIGIEACGAAHYWARVLRDLRHEVMLMPPQYIKPYVKRGKNDAIDAEAICEAMSRPTMRFVAIKSADSQAALMMLKVRDLLVKQRTMLINAMRGHAAEFGVVAAKGPKQVMEMRRRLADDAAVPALAREMIDVLAAQLDAVEAKLKAIEGRLMAWHRQNQTSQCLATIPGIGPIGGVSFALRVPDPKAFRSARHFAAWVGITPRENSTGGKQRLGKISREGDEGLRRLLVLGATAVIQQAEKGRRGKKGQAVPWLSKLLARKPKKVAAVALANKMARIIWAMMVSGETYRQPQEA

SEQ ID NO: 261526 - protein, 343 aa, unidentified
MQTITTIGLDIAKSVFQVHGVDVGGQVVIRRQLKRRYVLAFFQKLSPCLVGIEACASAHHWSRELQALGHTVRLIPPAYVKPYVKRQKNDAADAEAICEAVTRANMRFVPTKTPEQQSGLVLHRARHLFIRQQTAVINAIRAHLAEFGIVAPVGRHGVEELLNVVADPNDKRVPEMARACLLAFGAQLRGIKEQILEFDRLIRAWHRSNEMSMRLDEAPGVGPVLATALVAAVADPKSFRSGRNFSAWIGIVPKQHSSGGKNRLGNISKQGDRYLRGLFVAGALSVIRYAKIHGTKHRPWLTALLARRPTKVAAIALANKIARMVWAMMARGERYKEPVALAR

SEQ ID NO: 261527 - protein, 328 aa, unidentified
MIQLGIDVGKSKIDLCLRPDGSEGRQKTKTLTNGPDVAISVLEWLAKQKVGPSDVQVVMESTGTYHEYLAYGLYERSVRVVIANPARIRAFAQGIGILTKNDTVDADVLARYGAMRQPDVWQPPSPAIRELKALISRRDALVHDVGREQSRLEKLLSTRRSLLVEASVRKILQVLNNELQVVQALIDNHIDKHPELKRDMEYLTSIKGIGSAVGSTMLVVLRGNHFISAEQAASWVGVVPKEKRSGSSVRGRTRLSKNGPPEVRAKLFMAAIVAVKHNPLLKQFYDRLLAAGKAKMSALGGVMRKLVHICYGVVMKQQKYDENYATAA

SEQ ID NO: 261528 - protein, 478 aa, unidentified
MKADRRWHTRKEKKEWARRLQSNDPGLDVIHPQAAGIDVGNASHYVAVRPDRDEEPVRQFECFTTDLHRLADWLKSCGVRTVAMQSTGVYWIPLYDILEERGFEVYLVNARHTKNLPGRKSDVQECQWLLKLHTYGLLNNSFQPASQLRVLRTYWRQRAEHVQAAASCIQRMQKALTQMNVQLANVISDLGGLTGQLIVRAIVRGERDPQKLAALRDRRIQASPEEVAKSLEGNWRPELLFLVKQEVDTYDTYQKRIAECDEQLQQQLASLASVAPGVATPPVTQLQGDEQPKKSKAKRRKLAKNAPQFNLQQELQRVAGVDLTRIDGIDVMVAQTILAEVGLDMGRWETEGNFVSWLGLCPDNRITGNKVVGRGTRHVVNRAATSLRMAANALLRSQTYLGAQYRRLRTKLGAPKAITAMAHRIARLVYRMLKYGQRYVDKGAEYYEQRFRNQQLQFSRKKAAQLGFQLTEHEARTA

SEQ ID NO: 261529 - protein, 400 aa, unidentified
MLKINPLSTLYVGIDVSSKSNYVCALDFYKNKYINSSFANNQPGAEELAQKLLECLKKHPDLNTVVAALESTSVYSIHIANYLSSCEELMPFKPYVFVLNPKCTANYKKSYIGLGKSDPIDAFVIADYARAGNIETEPWRGSQFLALKRLTRHRLHLVECITREKTYLVSNLYLKFSELQMLDKDDQPFCDIYGATSSSVLTEYLSPEEIIEASEEELVSFLANKSRNRIKDISKTAELLKKAARDSYRLDKALYEPLNVSIASSFNCIETFKKEIKAIDAAIEREIKGLNPNAFIILQSINGIGPVFAGGIVAEIGDISAFTSSDALAKYAGLCWRSNQSGDFDGEDTPMIKAGNRYLRYYLGEAANSMRKHNVEYGAYYRKKFNEVPKHQHKRALALT

SEQ ID NO: 261530 - protein, 346 aa, unidentified
MDITTIGVDIAKNVFQIYGVDAKGNKVLSKRLRRDELLPYMAQLPCCLVGVEACGGAHYWARAFTQLGHTVKLMSPRYVKPYIKTNKNDANDAEGCCEAVTRPTMRFVPIKTIEQQDILVLHKVRSRLVAQSTELQNQMRGLLAEYGIVIAKGESHLRNGLAKLLDPDNNQLTARAKVLFTELQQELFDLLKRVEHCDTALVEVVKANDSCKRLKTIPGIGDITSSALVATIGDAKNFKKGRCFSAFLGLVPKQSSSGEKTRLLGISKRGNTYLRCLLVHGARSVIYQVMKQQKDDKRSRWLRQLVERVGQNKAIVALANKNARTAWAILAHETSYQINYQEASAS

SEQ ID NO: 261531 - protein, 387 aa, unidentified
MQASHTSAPIAADHGTIFVAIELSQKMWLVTLHSPDRDRLSRHRLEGGDHAGLVALIDRVRSRAARAVGGVPAVVSCYEAGYDGFWLHRVVTAAGIRNYVFDPASIAVERRGRRAKTDRIDGELLLRTLMAYCRGEPRVVRIARAPAAEQEDARRDSRERERLITEQTAHTNRIKALLRLLGMAVGNPRRGDWLEWLSAQHDWEGQKVPPRLMRELAREHARLMLVVRQLAALEQASVEKAPIKGAAAVMTERRDLLLRLKSLGPTFATTLVNEVFYKDFRNRREVAGYLGLAPSPWQSGGTDHEQGISKAGNRRGRHKAIELAWLWLRHQPDSALANWFQQRIAQASKRHKRIAIVALARKLMVALWRYLTTGLVPEGAKLKATAA

SEQ ID NO: 261532 - protein, 356 aa, unidentified
MKHFVGMDLHSNNTQVGIINQADRKVINQKLPNNLDLILAFLEPYRETVSGIVVESTFNWYWLVDGLIDAGYKVHLANPCAIQIYNGLKYSNDSHDAYFLAKLLMLGILPEGYIFPKKERHLRDLARKRLMMVQNRTQHILSLKSMVARNLGYSMGAYEVKTMSPSKLGSIFDDQHLILAGKAHVETIQGLTSVINELEQEVLDNMNLKPEFSKLLTVPGLGKIIGLTIALETGDIKRFKKVGNYASYCRCVESKRYSNGKAKGQNNRKNGNKYLAWAYMELAHKMKRYCPEAKAFFEKKARQRNKMVAAKALAHKASRACYHIMAEQADFDVSRIFGRPKNHNKGGGSEPTEGLD

SEQ ID NO: 261533 - protein, 453 aa, unidentified
MSEPSNESKGTSLEIVHPNAAGIDIGNAAHYVAVPPDRDPQAVRRFECFTEDLKKMADWLIQCGIDTVAMQSTGVYWLPAYEILTERGLRVFLVNAAHTKNLPGRKSDVQECQWLMKLHTYGLLSNSFRPTEEICVLRTYWRQRDEQVKAASMTIQRMQKVLTEMNVQIANVISDISGVTGMAILDAILQGERDRYKLAELAHPRIQASKEEIAKSLEGNWRSELVFVLRQERDIYREYQKKIGECDEAIQAHLKTMEDKAEPGSKPGTPKAGKRAGGNAPRFDLRGELYRISGIDLTRIDGINIMVAQTILAEVGLDMSKWPTEAHFASWLGLCPNNQITGGKVYHRGSRHVENRAATAFRMAATSLWRSKTYLGAKFKRLRAQLGAPKAITAMAHNLARLVYRMLRYGKEYVDKGMEFYQQRYQQQQIKWIEKKARDLGLVFTLTPESDVS

SEQ ID NO: 261534 - protein, 420 aa, unidentified
MERLIARSCGLDVGKKSVHACALLEEGGRKPCIERREFATHGDGLAELRAWLFELEITHVALEATGVHWMPIYAALEDVASVIVANARHISQVPGRKTDVTDAEWIATLLQHGLLKASFVPPKEIRPLRDLTRYRRSLVHARTRLRNQILKLLDQVGIKLSSVASDAFGRSGIDMLNALVEGTKSPKELAMLARKKMKQKHAELERAFRASLGEQHRFILKQQLARLGSLDEDVRAVEAEIRTRLAPYAEEVALLTSIPGIHETAAFDIFAEVGGDLSCFDTEAKFGSWAGMCPGNNITGGKARHARRRAGNPYIQSTLFECALGAVRTKGSYFRARHARLARGRSKKSSIFAIAHKLARAVHRVLTKRVGFADLGEHYLDRRDTEATAKHLVKRLAGLGLTTEAVNALFETCTIATARA

SEQ ID NO: 261535 - protein, 416 aa, unidentified
MEFAAFVGWDWADQKHDLCLIDVASGKKERSVIKSTPEAIDEWATSMRKRFSGRPVAVCLEQSRGPLIFALLKYDFLILYPVNPTTLAKYREAFSPSRAKDDPTDAEYAAELVMQHRDRLKAWRPDDEKTRTLQYLVEHRRRIVSDRTRVSNRMTALLKLYFPQVLDWFDDVRTDLVCDFLLQWPTLEEVKRVRRPTLEKFFRSHHSVSTKTNEQRFASIKEAVPLTNDVAVIAASVVMSKVLANQMKVTIAAIREFDKRIEELCAAHDDFHLFASLPGSGTVYSSRLLAAFGTDREKYESADEMSCLAGIAPVMERSGASCWVRWRYFCPKFLRQSFVEYAGESTKHSFWARAYYEQQRAKGKSRQAAVRALAFKWIRIIYRCWQTRTEYNEVKYLESLRKKGSSLLGFAASHAA

SEQ ID NO: 261536 - protein, 342 aa, unidentified
MEHYAGIDVSLEYSSVCVVDASGKIVREGKVASEPDALTIWLRSLGYELSRIGLEAGPLSQWLFAAMRKAGLAVELLETRHVRKAFEAMPVKSDRNDARGIAQLMRLGWFRPVHCKSMGAQEVRAVLTARKLVQTKLLDVENSLRGILRGFGLKVGKTTARSFAGRIQELVKGHPNLEAIGEALLSVRAVLLREFNAFEKRVRAMARSDARTKLLMSTPAVGPIVALTYASAIDDTARFKSSKQTGPHFGLTPKRYQSGETDYSGRISKIGDASVREALYQAAHVMLTKPVKGCSQLKSWAMRIARRAGMSKAKVALARKLAVILHRMLANGTPFNAAAAAA

SEQ ID NO: 261537 - protein, 401 aa, unidentified
MKRLSGGIDVGSAFHHITILDEEDHILYNQKVAHKLNEFTESIKQFKKIEKKEKGEISFALEGKNGYSAPLDKILLDQGFTLYNVDNFKLKRFREAFAGEWRDDERDALMLSKMLKLKEHINSPREKVFIKIEKPSLLTESLKLLSRHQQTLIDERVRLTNRLGKKLLEVCPQILKLGKLKNKKIIAVLAKYPDFSKYKRITLCSLLKIRGIGKKGAFFLLKRLNNIEYMPGLTDIYQTIISSYAKRIIELQEEIEDIDKKLDKIGEKSKDVKHLKTIPGVATKLASRLIGEIGDIERFPSEKQLAVYCGVACVDNNSGKVTKAKAVYKANKICKQTLITMAGGSIRFSFQCKDYYLKKRAEGKSHNHTLRCLARQLIKVIYKMLTEDRDYMVRKELRKVA

SEQ ID NO: 261538 - protein, 355 aa, unidentified
MQKYKLSFKGQNIYVGIDVHLKTWHVTTITESGCKYSFAQHADAKELFDRLNKKFPEAHFMSAYEAGFCGFSAHYALTEQGFENIVVHAADIPTTGKEKAMKTDAVDSEKIAWALKRGELTGIYVKDKRYMDDTNLMRLRQRFIADLSRQKNRTKHLLYTQSVTYPERFRNSRTHWSRNFMKWLREEVELLSEQKLSLMLLCEQVENTRMAILKVTREIRRLSATDRYKENYDLLTSVPGFGFTTSMMILTELDNSIMRFPNERSFVSMLGLIPTCHDSGEKKVSGEKINRGNKHLGPLIVEASWVAIQRDIELGAYYSNCCQIMKPHKAIIKVARKLACRAYAVLKTKTRYVLP

SEQ ID NO: 261539 - protein, 380 aa, unidentified
MVMIGTDSHKRTHTVVALDEVGRRLGIKTVCTNGEGHLALVEWSAQFADHDEHGVRFALEDCRHLTRRLESDLLAAGQRVLRVPTRLMAGARRSSREPGKSDPIDAEAVALAALRHSDLPVAELDGPAREVKLLSDHRHDLVVQRSRIAQQVRWHLHELDPDLMIPSRGLRRQKVVRELLVELERFDGVVARLARRHLLRCQELTTQINELERELRDLVRRLAPSLLQIPGCGVLSAAVIVGETAGVHRFRDKDAYARFSGTAPVPVWSGSSAGKVRLNRGGNRSVNCALHMIAVTQARGVGPGRPYLDKQLARGKDRVAALRLLRRRLSMSSSPRSALTYERPRRPAIRATFGWPLDIGASGNSTPATDDHRVHRRAPR

SEQ ID NO: 261540 - protein, 279 aa, unidentified
MVSSPSQPPYRCFVGIDIAAASFTALWTTDGRALSRAVTFSQSPTGFAAFQGQLQATGVAPAQTLIVLEATGSYWVTLAVTLHEAGYAVAVLNPAQLHSYAQSLPRRGKTDALDTQVFVRFASERQPPPWTPPPAVYHELRQRLVARDGLLSMRQQARNQRHALEQWPVVVSSVLTQLDGVIADLDQRLVSLEKEIAETLEHGAWAPSAALLSTIPGIGLVTSAWLLVSTLNFSLCATPQQAAAYAGLVPLQRESGTSVRGRGSWGTVEMGGCARRCTG

SEQ ID NO: 261541 - protein, 336 aa, unidentified
MFQLGIDVSKKTLDLCLLREGVKGRVKTRKLQNDINAVSAVIAWLSKQHCKPEDVHIIMEATGVYHESLAYGLHKAGGRISLANPHRAREFARGMGMLTKNDWVDAYMLACYGVLKAPEPWLPPPEEVRHLSALLRRRDALVADSTREKNRLEKYLATDTPSVIAESVEAMIGQLNAEIKRLDRLIRSHLNQHPELKKDFDLLTSIKSVGYQLGLNMLVILRSHDFATAEQVAAFLGVVPVEKYSGTSVRGCPKLSKIGPPEIRAKLYLASLCGLRFNPLMKAMYERLCLRGKAKMCAIGALMRKLVHWCYGVLKTQKPFDVGYLPSYARSACKAA

SEQ ID NO: 261542 - protein, 354 aa, unidentified
MNATTVAVDLAKNVFEVAVADAHWKIVDRARLTRAQFERWFDNRSVSLVVMEACGSAHHWARTIRARGIEVRLLPAQYVRAYVKRNKTDAADAQALLEAARANDIRPVAVKSIEQQALQALHRTRSGWMSTRTRRINTLRGFCREFGLVVPEGAATGLACMARYLADDRSGLPELLRPSMRLILDEIRLMEARIGQLEQALSQISKHSPACQVLQSVPGVGLLTSTAMVAAVADPRSFASGRRYSSFLGLTPREYSSGNTRYLGRISKRGDRYIRMLLTHGARSILRAATVARRAGRQIDRLKSWALAVQARTNHNKAACALANKLARIAWAVWVKHEKYRAEPAPATPSSFSD

SEQ ID NO: 261543 - protein, 405 aa, unidentified
MEQSRTNGRDLEGSGALQLNNNEQTNTPMKKELYLGLDVHKDCIITAVAEEGRKGEVRDTGVISNDLHALEKWVGRLRKAHGRDVILRACYEAGPCGFGIARRLKQLGVECEVVAPSLTPKRAGERVKTDRRDARKLARLLRAGELTPVYIPEATDEAIRDLCRARTDAVDDRRRSRHRLKGFLLRHGYRYQGKSSWSAAHERYLRELVLPHPAMKVILEEYLQGIAAAGERIARCEVGMRALLEQWRLAPAVRALMALKGFQTVAAMIVVSELGEVDRFAHPRQVMAYLGLVPTENTSNDKRRQGRITKCGNAHARWLLVECAQHYATPPKVSQHLSRRQQGQPAQVRAISWRAQNRLHSRYTRLLGRRLQRNKAMVAIARELCGFIWELLHTQSCYHVQATSV

SEQ ID NO: 261544 - protein, 413 aa, unidentified
MDKIYDICCGIDVHKKLIVACLNHKRKKELREFGATTRELMELAEWLQKNECEIVAMESTGSYWKPLYNIMESYGLHAIVVNPAHMKAVPGRKTDVKDAEWIAELLQHGLLQPSYIPSKDQRELRELVQYRKSLVGERTRELNRLQKMLEGANIKLSGTVTNINGKSARKILEYILSGNEIDEKKYDEMYEEKLIAHNLKASKEQILDDLKGFMSPLQRRMLKELLQHLDELNVHIENLNDEIDNFMKPEEKQASQVIQDVTGIGNTSAQTIIAVIGTDMERFPSDRHISSWAGLCPGNNVSAKKRKSGKIRKGNALLKSTLVLCAHAAVRHKSSYFHAQFKRISTHRGKKRAYVAVAHSILIAIYHILKDGVKYQDLGAEYYNQFNAERKIHAYLKKLKALGWEPPKEAVPA

SEQ ID NO: 261545 - protein, 348 aa, unidentified
MLIIGCDFHPAWQQVAWMETETGETGEGKLVNGTGEAERFYRGLAEPALVGVEACGNSQWFIELLQRLKHEVWVGDAAQIRASYVRKQKTDKRDAAHILRLLVEGRFPRLWVPSPEQRDVRQLLIHRHKLVEMRTRVKNGLQHLALNRGMQKKHKLWSMAGQQALRELPLQGWASRRREDLLQLWKSLNRQIEELDKAAEEECQRDKMALLLRTHPGVGAITALAFVVTIGDASRFRRGKQVASYLGLIPREHSSGGRQRLGAISKQGNRFLRFLLGEAVHNVIRLDEGFRKQYRQRCHRMAKGVAQVAAARQLAVRLYWMLRTQTAYPEIVRIESSPAVALVSRQNG

SEQ ID NO: 261546 - protein, 466 aa, unidentified
MTPRHPATGLLVQRITQYVMKALPVLDTRAAGIDVGSEKLHVSIAGDTPKVFGTFTGDLERLRDWFREQGVHSVALEATGVYWLYVYEVLEAAGLEVVVVNGRHVQNVPGRKTDMADCQWLATLHAHGLLRGGFVPPADIRQLQDYQRLRADHLIGAASQVQKMQQALERMNIKFHDVISDLVGVSGLKVVRAILQGERRPGELLALCDVQIQKQKADRVKESLRGCWKKEQLFALRQGLELWETYQQKIADCDREMAGWLHAMTGSPPSAGGRGNAVGMGPVALAPAKSPGKNAPVIERLQELVARLCGGRDVTQIPGMSVYLVLQLISEVGTDMARWPSEKHFASWLGLAGGRKQSGKRKGRVKAHRNRAGRMFCAAARALGQSVDKALGGFYRRLRGRLGGLAANVALARKLALLFYRLLRYGMDYVEKGLKSYEAKVLETETRLLSKLAKKQGFTLIPTILN

SEQ ID NO: 261547 - protein, 444 aa, unidentified
MARKSKKQRLTIVHPRCAGIDIGSREHWVAVNPEHSDQPVRCFTSFTDDLQVLADWLQSLAVKVVAMEATGVYWIPLYELLDARGFEVHLVNSRATRQVSGRKSDVLDCQWIWQLMSYGLLRGAFRPGEAVCALRSFVRQRDSLVEGRSRSVAHMQKALTQMNLQLDNVVSDLMGQTGTAILRGIVAGERDPQQLATLRDRRLKADEATIARSLHGNWRDEHLFALTQALAHYDFLGEQIAACDQQIEQALSRLPKLTEESTEAVKLLRSKHRSDTLQKQLHQALHTVMGVDLCAIPTIGVDTALVLAGEIGADLSRFPSEKQFCAWLSLVPPTNISGGKRLPGRKPKVFNRAGQALRQAAANARRSESFIGANHRARLARMDTAEAIKATAHQLARLIYAMLTKGQPYVEKGMKTYETLSKDRQLRALQRKANKFGLTLAEAA

SEQ ID NO: 261548 - protein, 359 aa, unidentified
MYLIGIDISKYKHDCFIATETGEIIKDTFSFTNNQQGFSEFLDVLQNLDPNQTKRIGLEATGHYGRNLKVFLDKQGYTYMEFNPFLVKKFATGLTLRKTKTDKVDSKLLSMILLSVEYKVYPVKSYHMEDIKSLTRYYKTLTKNRSKEIVNLTNILDYIFPEFKPFFHNKFSKTALFILENYQTPEKISNMNSKSHEKLNSISRGKFSYARFIRLKILAKETIGSSSLVLDSQLQSSMRVYRVLDQEINTTFDQLLELSKNIDSPVFSIRGIGPISALSIISEYNNFISFNSPAKMLSYAGLEPSVIQSGTMEQTGKMVKRGSGYLRETIMNTTPFFTCIIQKYMIIITRNVMKESLIE

SEQ ID NO: 261549 - protein, 424 aa, unidentified
MRLIDGIQNQEVSALQREYSWYLGIDWGSEKHRACCMDASGKVLEWRWAEHSGAGLIGLVDWLLDVSQQQPTSLAVGIEVPRGAIVETLVERGFAVFSINPKQLDRFRDRYSPAGAKDDHRDAMVLADALRTDQHCFREVRLDDPGVIRLREISRLEEDLSLDFYRLTNQVREQLWRYFPQLLQLAASPEEPWIWELFELAPLPQKAARLSLSKITRVLKKHRIRRFDAGQVHDIVAVAPVFVVPGMAEAASEHILILLPRLRMLHQQLSDVAKRMERLLEEMAAAGPDCQPGEHRDATILLSLPGVGRKVSATVLSEAAQALADRDYHGLRCLAGAAPITRQSGKTKVVLMRYACNQRLRNALHYWASGSIQYDPRSKQMYQDMKARGLHHNRALRGIADRLLEMMISMLRHRTMYDPQRRVA

SEQ ID NO: 261550 - protein, 457 aa, unidentified
MNKKKSKPKIDRQMPMVHPNAAAIDVGATMHMAAVRADRTPKPVRSFGTFTTDLHRLVDWFTECGVETVVMESTSVYWIPIFELLDARGFAVFLVNARDAKHVPGRKTDVSDAQWLQRLQSYGLLRASFRPKGQIAELRAYVRQRERLLEYAASHIQHMQKALTEMNLQLHHVVADITGTTGMRIIRAILAGERDPKVLAGLRHYSCHSSTETIEKALTGSYRAVHLFALEQALGLYDAYHEKVFACDVRIEAVLKELSVCRERTSDSLPSSRRRTDQANGLAFDARAALFALLGKDITQIDGLGAYLSLKLIAECGDDLSAWPSTKHFASWLCLAPGNKISGGKILSSRTRRSGSRAAALLRLAAVTVGRTDTALGAFYRRLSARIGKAKAVTATARKIAVLFYNAVRHGMQYVDPGSSFYETRYRKRVVDNLHRRARAFGFVLHPMEPAPSVSVS

SEQ ID NO: 261551 - protein, 315 aa, unidentified
MKKFSGIDLHSDNSLVVVSDEQDRIVYQRRLANDLAGIVQALEPHRAELIGVVVEATYNWCWLVDGLMEAGYCVHLANTAAIKKYEGLKYSGDAADVAYLAQLLRLGLLPEGYIYPREARAGRDLARKRTRLVQSRTAQILAIENILARQTGARMKSQEIKRLTAEGVQALGFSADVTLALQAKVAVMHTLESQITVLEERLQERVRLHEDYALLTTVPGIGKSLATTIMLETGSIGRFAKVGNFSSYCRCVDSLRESNGKKKRRGQRQEWQPVPGLGLRRGGALCAALLPASQAFLRAQETTAECDCGHQGAGA

SEQ ID NO: 261552 - protein, 400 aa, unidentified
MISVGIDVSKEKSTVCILKPYGEIVSKPFEVYHVEQELSELATMLLRLNDEVRIIMEATGIYHLPVLSYFKERGFFVAVINPFEMKEYRCQGLRRVKTDKQDAITISHYGIDHWYRLKEYKAQENIYTELKLLGRQYCHYMRMRVESVLELTHLLDYTMPGIKTLLQGWNERNGKDKLGDFAEEYWHYDNITKKSEKQFIDSYLKWAKKKGYHQNQDKAIKIYALAKEGIPTVSSNTPSTKMLVQEAVRVLREVDHTLMTILTQMRSLAKSLPEYPIVRAMGGVGDVLAPKLIAEIGDVRRFHSGKALIAYAGIDAPPYQSGRLVGTERKISKRGSSNLRKIGYEVMRSLKTHKAPEDAAVYEFILKKEREGKSKRAAKIAGLNKFLRIYYARVMEVYRK

SEQ ID NO: 261553 - protein, 347 aa, unidentified
MTLYIGVDFHPHQQSVSYSESGTGKMFQTKLRHNPELVRRFYEQFKGAVVGIEASGMACWFEQLMHDLGHELRVGNPHLIRARARSRHKSDRRDADLILDLLVKDEFPALWRRPPESQAILELLRFRRAIVTQRTGVCNRLQALAHAAGLPKRKLQSKRARRALLEAALSETQSFQRAQLFELLDELTARINLVEQLLKEQAETDERVRLVRSHTGVGLLSGLAVVHTLGDVRRFASSKHAVAFAGLDPLERSSAGKIRTGAISKAGSPLLRELLGHAMHAAVRFDGELKAFYKRLARRRSKSIAKVAATRKLLIRLFIMLRDEIDYQEFKRRGSAVGIPVVSQGLR

SEQ ID NO: 261554 - protein, 367 aa, unidentified
MKKDNTVKKSTRNRKGVHRKRTVGIDLGDRSSRYCILDEQGEVLAEGSVATTQKGFAQVFGSKLRSRIALEVGTHSPWVSRHLAELGHEVIVANPRRVRLITDSSRKDDRLDAKTLARLARIDPELLSPIRHRSEQAQADLMVIRARAALVEVRTMLVNSARGLAKSYGERLRSCGSGQVSEELAESLSEPLQNALNPLLAEVESVSQRIRDYDEQIENIGRSRYPEIEVLKQVHGVGTLTALTYVLTVEDPHRFRRSRDAGAYFGLRPRRRESGNSRPQLRITKEGDAYVRKLLVQCAHHVLGPFGPDCDLRRWGLELAERGGKNAKKRALVAVARKLAVLLHKLWVTGEVYEPLHVRRDGKAVAA

SEQ ID NO: 261555 - protein, 406 aa, unidentified
MNQSTLQRPNSFWCGIDWGGRFHHLCVLDGTGQQLLSRKVAHTVDGLAVLVGLIASFTGAVRIAIERAEGLLVEYLQHHCDAEIYCVSPKISARARERYRMAAAKSDEFDAYVLADTLRHQYAQWRPLAVPSPLLAELTAVSRDRQRILDMQVDTENRLRSILDAYHPCPLHLFSALDRDITLSFIRSYPTPVQAGRITAARMGAFTSRHGYSGRHKPETLVARMQPHLLSASDGTVAGKALAAKAFTEQLALLNTHLRAHDKRLGELLEAHPDTPIFTSFPGIGPVTAAVLISEMGEERSRFPSAPSLLAETGLAPVTKVSGRTRQVRFRYAANRRMRHAIDWWMFVAVREDLWSADIYQHARAAGQPHHRALRGLGARWCRILWRCWHDHNPYDPAIHHRATAA

SEQ ID NO: 261556 - protein, 429 aa, unidentified
MNCNTQNAKIASITEKTLIVGIDVGSETHYARAFDWRNYEYTRKPLEFSNTEAGFQTFKAWMEDIAEKHGKTAVIPGMEPTGHYWFALGKFLQDNGMKPVHVNPHHVKKSKELDDNNPNKNDRKDPKTIAALVNEGRFSYPYIPIGIYAEIRSLSNLRFQTQEELTRIRNRIARWFAIYFPEYKDVYGDYKAVSGRMVLKVAPLPEDIVKLGVEGVNQIWRDAKLRGAGMKRAQTLVSAAEHSVGSKEAPGAARLELKNLLSDMDAYMSRMEELLRRIEEKLKGIPHIDKLMEIKGIGLATVSGFIAETGDIGRFDNPKQLQKLAGYAIVANDSGKHNGESRISHRGRKRLRYVLYEAAISLIGKNAEFRAIHEYYRTRRDNPLKKMQSVVAVACKVLRVFYTILTKGVDYDAGKLMGDIRRPQIVAAQ

SEQ ID NO: 261557 - protein, 347 aa, unidentified
MDQQCHYVGLDVSLETTSICVIDDAGAIIWRGKCSSDPDTITATVRQHAPGAVRVGLETGQLSNWLTLSLRRRGVPVVCMDARHAKAALSLQINKTDANDAFGLAQVVRTGWYREVAVKSMDAHTLRMLLVARSRLVSQRQATANTIRGLLKTYGFVVARGSKGLFPVRVREQIAGSPALIAIIEPLLTVWYAIRDQVATLDRQMLARARNDQVARRLMTIPGVGVVIALAYTAVIDDPARFRRSVSVGAYLGLTPRRYQSGEVDTTGHISKCGDSLLRGYLYEAAAVLLYRDGRASILKSWGLGLAKRIGMRRAKVAVARKLAVIMHRIWSDQSEYRWTAIPPTAA

SEQ ID NO: 261558 - protein, 314 aa, unidentified
MSEPTLFVGIDVSKASLDVAVHPTKEDWTVSNDPAGLQELLPRLQALQPQIIVLEATGGYETLLVAALLAGGLPVAVVNPRQVRDFAKSIGRLAKTDRIDAHVLARFATAVELKVRPLPDAQLQELSDLLARRRQVVEMLTAEKNRFKMARGPVQADIREHIAWLERKLDQLDDELRQRLRSSPVWREKEDLLRSVPGVGPVLSVTLLAELPELGQLDRKQIAALVGVAPLNRDSGQHQGKRMVWGGRAAVRSALYMGTLVATRHNPVIKRFYERLLAAGKARKVALVACMHKLLIILNAMIKHRTPWRCPSAT

SEQ ID NO: 261559 - protein, 402 aa, unidentified
MNAVGIDVSKGKSMVAVMRPFGEVVLSPFEVPHSSSELSKLARLLKSLDGESRVVLESTGNYHTPVAKMLHDAGLYVSVVNAMLVHDYGNNSLRRAKTDKKDAVKLANYGLDHWLSLPGYVPEEDTRLLLKNCYRQYQQYAKVQTMMKNNLLSLLDMIFPAVNRLFSSPVRTDGSEKWVDFIDAFWHVQCVSGLSANAFSAKYLKWCRKHGYNFSEEKALEIHRTARDHVAVMPKTDTTKLLVKQAVAQLRTVSSAKAALQNEMDALAASLPEYPVVMDMFGVGPKLGPQLMAEVGDVRRFHSKKALVAYAGIDAPPYQSGQLNVHSRSISKRGSPALRRTLFLVMSVYLQCSPADEPVYQYMAMKRAEGKPYLVYMMASANKFLRRYYAAVKAYLNALEQG

SEQ ID NO: 261560 - protein, 347 aa, unidentified
MLHAGLDLSRKKLDVCLLSEQGEHLDQLGVPPDVDSLRRLARRIDEVHAEPVSAVVESMTGARIVHDTLEQEGWEVEIADAQKVKGLAPLACKTDRIDSLVLATLSQRDLVPAIWLPDPRIREERELARFRLHLVKHRSMLKHRIHSTLINFGRPCPVTDLFGVEGRRLLERLEVPEPWRGNVSASVVLIDDLERQINEINRRLRQGHTEHPYIPLLMSAPGIGWVLAFTIAAEIGDISRFSSPEKLAGYTGLCPRVNQSGDSDRRGPLSKHGPTYLRWALLEATMHALKHPAYSERYQRNKRRLGKQRGAKVAQIDIARRLAQAIWHMLTRNQGFAPRGAALRLAA

SEQ ID NO: 261561 - protein, 358 aa, unidentified
MADKVTEAAVVGGVDTHKDLHVAAVVDQNNKVLGTQYFATTRQGYRQMLAWMTSFGALKRIGVECTGTYGAGLLRYLQNAGLEVLEVTAPDRMERRKRGKSDTIDAECAAHAAFSGIRTVTPKTRNGMIESLRVLKTCRKTAISARRVALQIIHSNIISAPDELREQLRNMTRMQLIRTLGSWRPDASEYRNVTNVYRISLKSLARRYLELHDEIADLDVMIAAIVDELAPELIKRNAIGYESAAQLLITAGDNPQRLRSESGFAALCGVSPVPVSSGKMNRYRLNRGGDRTANSALHIIAIGRLRTDDKTKEYVARRVAEGHTKMEAIRCLKRYISREVYTLLRNQNRRVKSIPIMA

SEQ ID NO: 261562 - protein, 428 aa, unidentified
MKVLHERVAGIDVHKDMIKVAIRSPGEKPWTRKTEILEYRTFYGVLQQMAADLRKRGVTHVVMEASGVYTEPVYYALAEQDFAEVAVINPAHAKALRGHKTDAKDCARLAELFECGLLRGSYIPAPELKEVRDLTRYRMKTVQARTSEIQRLAKALESAGIKLGSVVSSITGASATAMIEALIDGERRGGVLADLARGRMREAGKLADLSMALTGRFTGHHALLCRLHQDRVAGFDAAVAGLDERIAGKVTRWQREADLLTSVPGFGDVVAQAWLGEIGPAPHRHFATCEKLASWVTLCPGNNISARKRKHGRTGDAGTYIKPMLVQAAWSAIRVRGRLQARYNRLVRRFGGDKNPAAKKKAITAIAHTLLKIAYQVLKSGTPYQEPDADFYTRRESPEHKQAWLERQLQRLHPGCTVTITISPPEAA

SEQ ID NO: 261563 - protein, 354 aa, unidentified
MKGELRNRNVVVKGKDVFIGVDVHKVSWHITARAGGEEVFNGGIPGQYLALRGILDRFKGCPMKLAYEAGPCGFWLHDKLAKDGIEVIVVPPSLIPIESGNKVKTDKRDSRKLARLLESQMLKRVYVLTEEDRADRELLRTRRQVLEHRSDVARQIKSKLLFHGIASPFSTKTWTQGYLRWLKDLTFEREVLRISFNFLIELYDYLTAQLIQLRKKIVELSRSDKYRHKLNLLKSVPGIGTLIAMELLVELSDIERFARADELASYIGLTPSEFSTGEYVRQGRITRCGNKRVRTCLVESSWLLIQKDPWMRSKYDRLKRIKGGKRAIIAIARNLIIRIRRILLNNEPYVVGVC

SEQ ID NO: 261564 - protein, 407 aa, unidentified
MSTKVAGIDVHKKVLMVVVNEPGAAEQDWNRAKFGTTTAELRRLAAWLGERHVEEAVMESTAQYWKPVWYELEPHIRLHLAQAHSNKARRGRKHDFADARRLVRRFLAEELILSFVPGTEQRAWRTLTRTKVQLTEDQSRLHNQMESLLEEMRIKLSSVVSDLLGVSGYRMLRTLAGGETDPALLAALADGRLQCSQAELIEALSGQPHPIHLQLLGLFLDRYDVVAKQIAQLNQAIAEALRVHQQAVMRLSEVPGFGADSAQQVIAEVGPQASTFDSAAQLASWVGVCPGLKQSAEQNHSGRSAKGNRFLRRILNQAAQAAVRKKGGYFQALFQRLLPRLGYKKAIWAVAHRLCRLVWKVLHQAVRYIEYGTELDPIQQRKRALRLLLNLRRLGYDVTLKPNQELA

SEQ ID NO: 261565 - protein, 332 aa, unidentified
MSNCIGIDVSKATINVHIPKSNQDLVLDNNLKSFRSLFSKLKKIYKKEIEDIIFIFEPTGSYSEALRKFCSERTIKCFIINPKQFSNYAKALGVEVKNDIEDARVLSKALTLAKDEQVKVPIFNEDVEKIKELMSFYRFTKKQTTQQKNHLESLTSKDGDKFSIKELKKSIKESQEKELRIIEQVQTLIDSTDEYRIAYENINSIKGIGQIGSIALLHLFLKYPEANQKQITSLTGLNPIYRQSGSSIQSGYKIAKSGAAFYRGVIFMAAFSAVQHDKNFKAFYERLKANGKHTTSAQIAVMRKMILVAHSLYKNNRKYDENFNSQEAFIMQ

SEQ ID NO: 261566 - protein, 512 aa, unidentified
MWGKLSPAPRDFAESKMNSGENVLRPRHPSSGRIALKGARSFESHPSRITHSSPAPLAAPVLTSERTIAHEAPYIRSTHDGATMHGKKGHLMKEWKSISHYAGFDWARDHHAVVVVDREGKIVADIEFKHSQEGWKQFQEQTSGWPDLAVAIETNRGAAVDQLLQRGYAVYPVNPVASESYRKRKAPSGNKTDHLDGWGLADALRVDGHGWKQLQAMDPLTQQLRLLCQDEVTLIEQRTRLVNQLQQALVEYYPAALEAFDDWTSPSTWDFVIAFNTPQALVKAGKRRWEKFLHTHRLWRTETAEKRLALFAQADQFKGSDAITQAKSQLAVSLCKLLQTLQQQLDEYRKQIEALFKSHPDHDIFGSLPGAKAVLAPRLLAAIGNDPQRYGSQEVLQSFAGTAPVSFQSGQINKAKVRWACDKFLRSTVYLWANCFRRASNWGQVYYEKKREQGMSHACALRCLGQRLLKIVFRMLCDKKPYDAELHARNQRAHGSWVLTLGNPTLAPKPSE

SEQ ID NO: 261567 - protein, 427 aa, unidentified
MPYKIAGIDVHKRMLHVVVSDVQVDGEYDFTRRIFGSLPEALRSLAAWLVEQQVQEVVMESTAQYWKPVWGALERYWKPICQTREGALATSGTLHLAQALSNRGRRGRKKDFRDAERLVKRLVAHELVLSFVPDVEQRLWRTVVRSKYQLTRNRVQLQNRLEALLEEAHIKLSSLVSDLLGASARRMLGAIADGETNREALAALADRGLRATQEQLQDALGVCQELNPVYRRLIRMVLDEVASIDKRIEQLNQEIANLLRPHEDQVKRLAEVPGLGVDTAQQIIAEVGATAATFPSEKHLSSWVGACPGDEESAEVNRSRRSPQGNRHMRRILNQAANAAAKLKGSIFDILYRRYVPRLGHNQTIGIIAHKLCRLVWKILHRGIRYEERGPEVSKASKQRRTRKMIQALRRLGYRIEPSPSQSAIPA

SEQ ID NO: 261568 - protein, 335 aa, unidentified
MKQYAGLDLSMETTHVCVVDADGRKIGTQCVESTPEAIAAALEQYGPIERAVIETGRMTPSIALGLRELGVAIVCIDARQAHQSLKAMKANKTDPHDAAGLAQLARTRFYKEVHVKSPAAHGVRSVITARGHLVEARVRLDNTIRGLCATFGIRLGVGQGERFLARMRLAASVPGLGEAVASLLRARERLVVEIGQLDRQLKAISTASPVCQALMSIPGVGVQTSAAFAAAVDDASRFKRSRTAGAYFGLVPRRHQSGELDWTGRITKQGDSTVRKLLYEAANSILTRTKQSFALKTWALKIAKRRGLRKARVALARRLAVIMHAMLRDGTLFEA

SEQ ID NO: 261569 - protein, 410 aa, unidentified
MAERFVGLDVALREHRIAVLDRDGEAVGPSFTIAASRDGVATLLRTLDARDTTAAQTLIGLEASGHLWENLEAALVGAGYRVIVLNPLQTRRYRDVVRRKAQTDDIDAHVIAGLLRSGAAQASYVPDEQIQSLRELARLRARLMADRQDYQRRLIAQLDVVLPEHHVVLGDLLTARARGILAQFPTAQHLAHANPRAIRRAAEDAGARGFSLDAATGVRDSARRSLYSGKAAAARAHVVRTLVSQLERLTSAIDEVDRAATALLPPSEPGSGPSDAELLQTIPGIGPQTAATLLGELGALTRFTDARALVAYVGFYPVIHESGDRAAPPHLSPVGSRIARHSLYLAAVNAVRRSGEWRTIYLRKKAQGKTAKQALVVVAVKLLHAVYAMLKHRQPYNPSRLLVASATIGS

SEQ ID NO: 261570 - protein, 326 aa, unidentified
MHTQFLGIDIAKSKFDCALILPDGKVRNKVLTNNALGFAQLLTWLDAHGVPSSELAQLHVCMEATGIYWEALAEFLCDQAIVVSVINPAQIKSYGASRLMRSKTDKIDARLIAHFAKERRPEPWTAAAPHERVLRSLVLRLEALQNMLTQESNRLQVANPAVQPQIQNHIDWLNAEIKALAKLIKDHIDKHPDLRQKRDLLDSIPGIGERTLAIMLAYFGSAEQFDNARKAVAFVGLDPRQHESGSSVKGKPRMSKVGHAFVRKALYMPAMAALYKTEWGKRFRERLANAGKPPKLIIGAMMRKLVHVAVGVLKSNKPFNSTLHCA

SEQ ID NO: 261571 - protein, 343 aa, unidentified
MQAVTTVGLDIAKSAFQVHGTDTDGMVVLRQQLKRSRVLGFFKKLSPCLVGIEACASSHHWSRELQALGHTVRLMPPAYVKPYVKRQKNDAADAEAICEAVRRPNMRFVATKTPDQQACLMLHRTRHLFIRQQTALTNAIRAHFAEFGIVASVGRNGIKELLDVVAGPDDGRLPMIARQCLAALGDQLQRLKAQILEFDRRINAWHRSSETSRRLDDLPGVGPALATALVASVPDPEVFRSGRDFSAWIGLVPKQNSSGGKERLGNITRQGDRYLRSLFCAGALAVIRYAKIHGTRYRPWLAKLLERRPTKVAAIALANKIARMAWAMMARGTSYREPVALAR

SEQ ID NO: 261572 - protein, 369 aa, unidentified
MLVSNHPERNALFMTNSTKYIGMDVHKESISIAVRNSAGKIVMESVIETKASMILEFVEGLRGDVHITFEEGTWSAWLYDLLKPCVTRLVVCDPRRNALLQEGNKNDRVDARKLAELLQNNQLRSVYHGDHGLRALKELVRSYLTITKDLSRVMTRVKAIYRSWAIPCNGKQVYSSRHRSEWLGKIQEPGVRRRAEIYYQQLDALRALRQEVRRDLLAESKKHKVWKRLCQIPSIGPIRAATLLGILQTAHRFRTKRQLWTYSGLGIEVHSSADHHAVKGQLERKKKHIEIRGLNENCNHDLKNLFKSAAVLASSKPGPFEEFHAALLAKGMRPEMARLTLARKIATIVLIVWKRGVCFDANHLKPQTA

SEQ ID NO: 261573 - protein, 310 aa, unidentified
MTRPYVGIDVAKATLDVAIGSDGEVVQVENSEAGIAQLVKRLGEAAPALVVLEATGGYESLVAAAVAGREIAVAIVNPRQVRDFAKATGVLAKTDRIDARVLARFAEAVRPEPRPLPTAEAKELEEFLGRRRQIVDMLTMEKNRLSIASTERMKKSLKKHIAWLEEALRRANDDIDTAVRNSPAWREQEDLLRSFPGIGPVSARTVLGELPELGALNRKKIAALVGVAPLNRDSGTLQGTRTCWGGRANVRQVLYMATIAAVRCNPVIRRVYLALRARGKKHKVALVACMRKVLTILTAMVRDQRRWSPS

SEQ ID NO: 261574 - protein, 378 aa, unidentified
MVVPLSLMLLYAEQFVRPVEPVFRIDSDTSLIVSYPQLLFLLTFLSDKAMNSANQNQTERRYVGIDISKDTFDLAFAVPASQQHKFPNTAAGFDQLLDLLTQTGPEHGWPCHIVMEASGPYYQQLAAFLHANQIAVSVVNPLIIRRFAQMRMIRAKTDKKDAQTIARYGEAEHPAPWAPVPHREQELRQLRSSLELLEAQRIALSNHSHAQQQGNCLNVCAGQVIADTLAVVEQQIQRVQQQMARIAQAAYGQSLTVLESVPGIGRKTAIVLLSATGCFSRFSSARQLCSYFGICPRVYESGTSVRGKSRITKMGMGGVRKLLYMCAISAARYNESCRELYERLKAKGKATRAALMAVANKLVRQAFAVVTTNTPYKP

SEQ ID NO: 261575 - protein, 340 aa, unidentified
MQVSVLGIDLGKNSCSLVGLDGIGQVVVRRRMRRETVIAFAAKLSRCIVAMEACCGAHHMGRALAAQGHTVRLMSPEYVRPYVKAQKNDDRDAEAIAEAATRPTMRFVELKSEDQLDMQTLHRVRDRLIGERTSLMNQIRSILLERGHVVPQGRAKLKVRLGELLCDATALSPRICDLVADMQERWQRLDQRIANFDDEFMQQARTDEHARRLLTIPGIGALNATALVAAVGNARTFARGRDLAAWLGLVPRQATTGGKPHLLGITKRGSKYLRKMLIQGARAAMPTLRNSDTRLGAWLRGLLSRAHPNTAVVALAAKMARIVWALLRHQRTYQATVVAA

SEQ ID NO: 261576 - protein, 346 aa, unidentified
MTIVEATRSVTGGVDTHLDIHVAAALDPLGGLLGVESFATTLAGYRKLLVWMGAFGSVALVGVEGTGAYGAGLTRYLRRHGIDVVEVDRQNRQARRARGKSDTADAIEAARTAQSGRASGAAKTRDGNVEAIRALVVTKRSARDVRIKTLNQIRHLSFTSPDDLRGRLKGVSAKMLAAEAAALRPRTGSDPVMFATKLAIQTLGRRVLDLEDETARINAVLSELVTATAPSLLALHGVGIDTASALLVAAGDNPERLRSEAAWAHLCGVAPIQASSGKVTRHRLDRGGDRNANQALWRIVMTRISCEPRSRAYMERRTKEGRSKREVIRILKRYVAREVFKHLPRG

SEQ ID NO: 261577 - protein, 422 aa, unidentified
MHKERRWFVGIDWGSQEHVVSLCDDVGKRIGQRKFAHGGTGLTDMIAWLLKESGGKPGEIHVAIETPHGPIVEVLLERSCNVYSINPKQLDRFRDRFTVAGAKDDSRDADVLADSLRTDMRAFCKLSSVDPTIVELREWSRIDEELKAEHVRLTNRLKHQLWRYYPQIYELANDVGAGWFLDLLEALPTPEKAAKTREKTVARILKQYRIRRFDAAHVLGELRKPALTVAPGTVEAATAGIRILIARLRLINSQLVDAEQQLDRLCKKIVGPVAGEEGENTPGQKNELRDAAILDSTPGIGRTVLASLLTEASDALQRRDYHALRALCGTAPVTKRSGKSCLVSRRRACNRRLRNAVHYWAHNAVQHDATSRAKYEALRAKGHGHARALRSVADRLLNVVCAMLRSGTSFDSSLASKKQAGT

SEQ ID NO: 261578 - protein, 453 aa, unidentified
MARRNAKVSLPTGRTRPALTITHPHAAGIDIGSRSHFVAVPPDRADVPVREFPCFTVDLHALADWLTACGVDTVAMESTGVYWIPVYELLASRGFTVLLVNARHVKHVSGRKSDVLDCQWLQQLLTYGLLRGAFRPTEPVCVLRALWRQRGMLLRHQSRFVQHMQKALTQMNIQLAHVIADVVGETGQRILRAIVAGERDGAILAAMKHPRLQASEADLAKSLQGTWRAEHLFALKQALNAFDFVGTQLTECDHEIEAQLHTLHAHDGEPAKGKKRGRPRNAPPFDLRTRLFQMCGVDLTRIDGIDVTTALAVVSETGTDMSRFPSAGHFASWMGLCPGTKITGGKVLSGRTTRCANRAAQALRLAAAALRTSRSALGAYFRRLCARMDKPKAITAAAHKLARLIYTMLTKGEEYTDQGQDYFEARYRERVLRQLSQRAQTLGMRLVVAEQSA

SEQ ID NO: 261579 - protein, 452 aa, unidentified
MDQQLGKSNGLSLERIEPNAAGIDVGATEIFVAVPPDRDRQPVRSFKTFTDDLRQMAAWLVQCGITTVAMESTGVYWIPPHEVLEEAGIRVCLVNSKHVKHVPGRKSDVSDCQWLQYLHSVGLLRASFRPESEIRAIRALSRHRSSLIEIASVHVQHMHKALTQMNLQIHHVLSDITGLSGMAIIEAIVAGERSPVRLAALCNQRVRSDQETVIKSLVGNYRSEHLFTLKQSLTAYKHYQELIADCDREIERLMRLLNGKIDPPPSSPATPPDPRFQKRSKNQFRFDMGSELNRVFGVDLTTIPGISGLTAHTLLAEIGPDLSRFANVAAFASWLALCPANKKSGGKVLSSRTRQTNSRASHALRIAAQTLARSKSHLGNFYRRMRARLGGPQAITATAHKLARIVYHLITTGQHYDETVFVREDQKQAQRQEKRLRKQAKSLGFQLIPIAA

SEQ ID NO: 261580 - protein, 417 aa, unidentified
MNIPNTLFIGIDRSDKQLDFTVLDGAGGLIERGKVSTDPAALHPWIEGWRNRGAANTRVVIAFEQPAPNLVVFFGQFEGIVIYPLNPATVRSYCRSFAVSNAHSDRTDAAMIARYTFHYHGELRALEQASGPMRHLRSLVEHRRTLIDERTVLTNRLQALLKLYFPQALKLLSEDLWRPMDCDFLLRWPSLQALRKARPSTLDAFWAAHGSRSEKRLRERLDLLAGARALTEDADTIAPFVLRVESLVRQLQVLAHSLEVVERRIEELAPTFVDYAFFRALPGAGRAFAPRLLAAYGEDRSRWTSASALQCYCGIAPITRQSGNTRCVIRRLHCPNFLRQSFHEWSAESWKHSRWARAFVRYHQSHGKSFHTIIRMLAYKWIKILTRAWHDRELYNEERYLQCLIRRGSPICKHLGE

SEQ ID NO: 261581 - protein, 349 aa, unidentified
MQISTIGLDIAKNVFQVHCIDAAEKVVVRKQLRRGQVMKFFEALPPCLVGMEACATAHYWARELTKLGHEIRLMPAKDVKAYVKRNKNDAADAAAICEAVRRPTMRFVGIKSADQQGRLMQHRTRDLLVRQRTQVINALRAHMAELGIVAAQGHEGLKKLVAIIADEKDERLPADARASLIVLTAQLQALQTMIRVIEKRIIAQHRASEASKRVATIPGIGPLGASAIIATVTDPSAFRSGRDFAAWIGLVPRQDSTGGKPKLGPISKQGDRYLRRLLVVGAHSALRRAKQSPQNYPWLVQLLARRPFKVVAIALANKMARVAWALLARGGRYRAGGGSTYRAPQLAAA

SEQ ID NO: 261582 - protein, 352 aa, unidentified
MKEFIALDAHKRYSWMEREEIKSCKVWHARIDHAPGAIRQSLEGRAKGTAVAVEATGNWYWIVDEIEQAGLEPKLVHPRKAKLMMGMINKTDKLDAHGLNQLQRNGTLPTVWIPPRELRDLREITRARMVLTGQRTRLKNRIQATLNKYGLVPEGEASDPFGKKARLSLEEAVQKLPLQTAQVTEMLLRQLDFVQKQIEELERKIRALVKDTVEMDRLRSLPGIGWILSAVIALEVGEMTRFASAERYASYSGTTPRVHASGDKTRYGRMRTDVNQYLRWAYMEAAHSVSLHRKTYPERQVSCLYERIRGRKGHGKAIGAVARHLAEATFHVWRKGEIYRDPGLQQGQSREV

SEQ ID NO: 261583 - protein, 436 aa, unidentified
MTLINFVAANQKYYAFNLLSVFIMVFWSVQYLLQHLLVQTQVSHQLLQPLILILQLPQTPQFRHARPGKFFLPVNGMDYFLPLRLTVRNVLTRRITMNIVFLSIDLAKNVFQLCGLNQAGKPVYTKRTGRKELLQTLANIPACLIGIEASTGAFYWQREFEKLGHKVKVISPQYVRPFVRGQKNDGNDAQAIAVALMQPTMQFVPPKSPEQQDIQALHRARQRIVNHRTATVCQIRGLLLDRGIPIGSAVSRARRAIPLILEDAENGLSSRMRRTIAELYDLFNDLGRRIHFFDKEIETVFRQSEACPRIAKVKGIGPKTATAVVAAIGKGTEFKNGRHFAAWLGLVPRQHSSGDRQVLMNMTKKGDKHLRTLFIHGARAVVRVATNNNDGHMNQWVNQLKERRGFNKTTVAVANKNARIIWSMLRNDTGYQVVCN

SEQ ID NO: 261584 - protein, 405 aa, unidentified
MDLIPLCRCAVGMDIHLNLIEVCVIAEDPGGEPQVHRRRFGGFRRERLAMAEWIAGFDPDTVVMESTGIYWKSPYAYLERLGIRALVVNAQHVKKVPGRKTDVADAEWLAMLARAGLLRGSFIPPERLRNLRQLSRHHQRLTALLGAEKNRLVRVLGDAGIRLSAVVSDPHGVAARAMIDCLLDGGTPQQALLHAGRLKAPREELAAALEGELSAEHLFVARMLRRHLDTLETDLGALERELVAAMAPYQPAMDLLLTIPGIDTLGAAKLLVEIGDDMTAFGSAGCLAKWAGICPGNDQSAGKRRSGKTPKGNRYVRALLCEIAWSAARTASQFKSRYQGLVIRRGAKRAIVAIAHKLLKIVYVLLARRVPYRDDTVDYEALAVQRKAPRWIRQLKKFGHLPQTA

SEQ ID NO: 261585 - protein, 426 aa, unidentified
MEVLYRCCAGLDVHKKTVQACVRRMSEGGQVRTETRLFGTMTRDILALGDWLAEAQVTHVAMESTGVFWKPIWNLLEGRFELVLCNAREVKQVPGRKTDVKDCQWLAQLMQYGLLKASFVPSRPLRELRDLTRQRVQLVNEHTAAANRVHKVLEDANIKLSSVASDVLGASGRDMIQALIAGEQDPEQLANLARRRLRDKLPELVAAFEGTLDDHHRFLLQMYYSHLQHLETMIAQFEARIDAMLQDPALNAACAGEDVLPFPVAVQLLTTIPGVDECAAKAILAETGTDMSRFPGPDNLCSWTGICPGNNESAGKRRSGKTTQGNRWLRRALTQAAWAASHTKDTYLSALFRRLAARRGKKRAIVAVAHSILVAIYYMLTRHETYQDLGSDYLNRLHPERLAHSLTKRLETLGYAVTLEPLQVAA

SEQ ID NO: 261586 - protein, 367 aa, unidentified
MQKVRFVGLDVHKESIAIAVADGEGGAPAPVATVANDATLLVKRLRKLGQGARLRCCYEAGPTGFTLQRALQAAGIECSVVAPSMVPRTAGDRVKTDRRDAVKLARFLRSGDLTDVHVPDASTEAMRDLERCRDDAKRAERTARHQLSKFLLRHGRIYDGKGAWTGMHLDWIRRQVFEHEAHNRVLVDCVQAVENATSRVERLTQDIVELVETWSLRPLVKALQALRGVQVISAVILAAEIGDFARFASAPALMAYLGLVPSEHSSGETKKRGRITRTGNGHVRRILVESAWSYRHRPAMSWAIRKRNEGVAPQVKAIAWKAQHRLHGRYKKLLGRGKNKQQTVTALARELAGFVWSIARQPQLLAS

SEQ ID NO: 261587 - protein, 465 aa, unidentified
MSRSRRTKRQKRKQEIDELEVPKLEALEQINLNAAGLDIGDDEIYVAVPERRDDVSVRVFQTFTRDLYALANWLETCGVETVAMESTGVYWIPTYEILEERGFEVYLVNARHVKNVPGRKTDILDCQWIQQLHTYGLLRASFRPPEDICALRALVRHRDNLIRSCTAEIQRMQKALQLMNVKLTNVISDITGVTGMKIIRDIVAGERDPHKLAQHRNPHCAKSEAEIAKSLEGNYKPEHVFALKQTLEAYDFYQQQIKDCDVEIEKRYAAFAPKVDIAEKPLQPRKRKRNKPEGNEPDFNLRQYLYQMAGVDLTQIDGVNALTVQKVLSETGVDMSPWPTVKHFTSWLSLSPHNDKTGGKIIRSRTKKTQNRAAAALRMAAQSLAHSQSALGGYHRSMKAKLGKPEGVTATAHKLARIIYAMLKNQTEYRDAGEGYYEEQARQRAIRSLKRKAKKLGFGLVPNTT

SEQ ID NO: 261588 - protein, 319 aa, unidentified
MHCIGVDVSKQELVTFDGTTERVFANTPGLHAFRRFVNEVSDPVLVFEPTSTYSRRLETFCCTERIACCLLNPRVVPHYRQVGKGRSKTDKSDAELLYRYGIERGVAEAKQLSYDELAHALAARLACHRVVQKARVAYQGLLDALAHDPGTEREILRDLRHAIGELKAKEKAQLTEAQQALEADDETAGRFRVLLSIPGVGPMTALTLFTLFRKYPGVNRRQLVALGGLDPIEVQSGSSVRGKSRISKRGSREVRKCLFEATLSAARYNPSIRAIYRRLKDQGKPDKVARIAAARKLLLLAHAIYRSGEPFRVTAEEAT

SEQ ID NO: 261589 - protein, 351 aa, unidentified
MQYIAFDSHKHYTLASVEAVTGPGVIQERRITHERGAIRQFLSQWDASSPVAVETIGNWYWIVEEIEQAGMRPRLTHARKAKLMLGTINKTDTLDVRGLNRLQRNGTLPTVWIPPAALRDERELPRTRMVLVRQKTQLKNRLHATLAKYALTVTGVSDVFGKRSLELLRRHVQQLPEQTRFATEQVLEQLAFLNQKIAAFEARIHQVVAETPTSLRLRSLPGVGPILATVIALEVGDVARFPEAPRLASYAGCTPRVSASGGKVRYGSLRPDVNRYLKWAFIEAANICCLLHRRYPERHVSRLYARLARRKGHQKAIGAVARHLAEATYWVLTKRTVYHEPHEQAVLSTKA

SEQ ID NO: 261590 - protein, 449 aa, unidentified
MNKHDFKQRGLPVIHDRAAGIDIGSRFHVVAVPADLAKESVQTFQAFTADLERMANWLVNLGITTIAMESTGVYWIPVYEILEAHGLQVILANARDARAVPGRKTDVNDAQWIQRLHACGLLRASFHPDREISALRSYLRLRERHLDYAAAHIQHMQKALTHMNLQLHHVVADIAGLSGMRIIRAIVAGERSPSSLAALSDKRCKAGIDVIEASLVGNYQPEHVFALTQALSMYDAYQAQLLVCDQQIAQVLLKLSQEKVSSVEPLPKPRHNTRQPNALNFDVRTLLYQLVGVDLTQIHGIGPYLALRLVAECGTDLSRWRTCHHFTSWLTLAPGCRISGGKVLSAHTRKTKNRVTAHLRLAAVTVGRTNTALGAFYRRLAARIGKAKAVTATARKIAILFYNAMRFGMSYQDPGADHYEQKYRERVVKGLYRRAAEFGFTLQPASGVS

SEQ ID NO: 261591 - protein, 520 aa, unidentified
MATTRARKRPSSRRPATSVGKPRGILHPRVQLVGPEHFGIVCFDCAKVRSKFLLADFYGRVLIPPTTVAHNRPDLDAAVAQVRQAFATHQLRDGLVAIERTGRYHRLVQRTFAAAGFETRIIHPFVTKQYRQPVDPGNKTDDTDLSAIHRATVTGCALLEASRDEAWTTLLLLIRHRRDLVRKGAALNCQIRDHLEAALPGFAACFNKLWDNPVAWHLLDHFATAERLRDAGVTTLCQSLRQAGIRFQHRTVQTVLDWAGQAAPGDVAADQHRRIALAYYRDRLQKTQEIHGLERDIAGRLVQTPYVLLLSFPGLNVVSAADFAGEMGPIEHYRNAKAITGRAGLRPSRYQSDSVDQANGPLVRNCNRSLRAAILGIADNLLVCNHHFGVLATQWAAQGKDPRHTRVKVALRFCRIAFQMVAGRQVFHHPSIQGRHYILDKLSAFHRDHDTSMPEVLRDLQAAVGQVPAREHAAEAAPLHEELRKIQDGHRRGPQPLGDILPIVLARLGVGAVQSDESGE

SEQ ID NO: 261592 - protein, 410 aa, unidentified
MTEIIVAQDAPVLVAIDIAKARHEVLIAIPDKKRRRRLTVLNELADFNRLIDTLRDYGCPVRVAFEATGNYHRALGYHLATAGFEVKLVSSVALARTREALNNSWDKNDPKDAQVILHMMEIGNEQFYHDPLVHGTNDIQELSKTHDIVSKSKTELWHRVLTHYLPLYFPEADRFHRSSRSDWFFAFLERYPSPHFITAMGKDAFTADAWDVIGRKVAKERLLSDIYETAKKSVGLPVTPESDAIRMFRLVLGEGRSLIAQRNQIEDRAVALLKDLPDYQLLTSIPGIGPINALTILAEAGDLRRFGHHRQFLKFCGMDLATIQSGTFRGQTKLSKYGNARLRRTLWMAGQVAILQRTNSFRDKFERYIAKDRQNTHLRRKAYTAIAAKMARTVHGIIKHGEPYRPFFEG

SEQ ID NO: 261593 - protein, 346 aa, unidentified
MAAFAALDVSKKSTSIHIVDEKGVCLWRGKTLTDPDALAEALSPFSDDLALVGLETGSWTTWLWHELTERGFPMVCMDARQAHAALSVTINKTDANDAQGLAHLLRTGLFREVRVKGWEDMQKRTLLRARSTMLRCVLDLANAIRGAMRTFGISLPAGTGNGGAKTFERRVVACLTARADLAIIIVPLLEAWRAGRTQVARHERAIRAIVRSDPRCQLMMTVPGVGYLTAVGFVGAVGDPETFRSGRTAAAWIGLTPRRYQSGTINQQGRISRQGDKLLRAYLYEAAAHILTRSSKDSALRRWGLKLRDRIGFKRANVAVARKLAVVLHAMWRSGRRFEAEGCATG

SEQ ID NO: 261594 - protein, 352 aa, unidentified
MNQLKYIGMDVHKAMTVISVLNSEGKELAQAIIETKSTTLIDFIHGQRGTLHVTFEEGTQAAWLYDLIRPHVASVLVCDPRKIVTRGNKADKIDARRLAELLRTKGLTAVYHGEHSTRAVKELTRNYQEMMEDSTRVKNRLKALFRARGIDCTGSAVYSPDERKTWTDKLEQAAVRARAGRLWEELDALEKLCEQAEGDLKTEARKHAAIKILQGIPGIGPVRAAVILGIAGTPHRFRSKKQFWTYCGLAVTSKITSEYQMVDGRISRSKKQPLVRGLNRNYSRTLKDVFKGAAKTAAAGAWKFHFDAMVANGQGPPLALLTIARKIASITLALWKRGERYDQKKVEILHAA

SEQ ID NO: 261595 - protein, 344 aa, unidentified
MLYVGLDLSRKRLDFDARLGDGELVERGAVPPDADGLAGLVRRLGDVQVLAVIESMNGARYVHDRLELEGWDVRIADAVKAKGLAPLACKTDKIDARVLAELARLNLVPEIWLPDPAVRGERERARFRLHLVKHRSALKNRIHSILIAHGVASPSSDLFGMSGRRMLERLGLPEPWRSTTVASLALIDTLDEEIERCERELRLLGADHRYVPLLMTCPGIAWILAFTIASEIGDIARFPTPVKLVGYSGLTPRVEQSGESDRRGPLRKNGPDHLRWALVEAAHSASRHQLYRPILEHNRDRHGRKRGTKIAALTIARKLAEASWYMLTRNQPFAPAGATRPLAA

SEQ ID NO: 261596 - protein, 412 aa, unidentified
MDAAYYVAGIDVHKKMLAVVVANARDRELQFECCRFGTTVCELQKLSTWLQEHAVEEVVMESTAQYWKPVWLALEGQFQLWLAQARSNRGPRGRKTDFRDAKRSVSRLLSDDLILSYVPCAEQRYWRTLTRTKYQLTRDRVRLQSQLESLLEECQIKLSSVVSDLLGASGQRILRAIAAGETDPVRLKELGDRRLRATDEELRDALNGQPQPLHRTLLQLYLQRLDLIEAQIIEVEGMIAEAMKAHQDAVVRLSELPGVGVDSAQQILAEIGPAAESFPSAGQLASWVGVCPGRQESAGESSSNRSAKGNRAMRRLLNQLAHAAVRKRDCYLQIVFQRLSVRLGYAKAVWAIAHRLCRLIWKVLHEGVHYVEYGPAVTALTLKRRKQRLVTQLKKLGYSVQLTPITASETGQ

SEQ ID NO: 261597 - protein, 480 aa, unidentified
MSRQKKHPKKPGKQKSAVGQGKPGGKRKGMCLEDRPILEPNAAGIDIGAREIYVAVPPDRDEHPVRVFSTFTEDLHKMAQWLVSCGITTAAMESTGVYWIPPHDVLEQHGVKPCLVDARGMKNVPGRRTDWHECQWLQFLHSVGLLRAAFRPNAEVCAVRSLMRHRGDQVMMANQHIQHMHKALTQMNLQIQHVISDITGLTGLAIVDAIIGGERDPTVLAELRDPRIKASEETIRKSLEGNWRPEHLFTLQQSRKSYQHYQEQIRACDEEIEKLLLAFESRVDPKERPLPPDRKRKQRGRKKKNVNPKTGFDVRTESYKLFGVDLTQIPGLMAMVLTLFSEVGRDMTRWPTAGQFASWLGLCPDNDISAGRVWRGMRRVHNRAGELFRIAAYTLHHDQTPLGDYLRRMKSKVGPAGATTATAHKIAVIFYTMVKKQVEYDASIWAERDAEREKRFEAKLHRQARQRGYKLVPIEEKPAA

SEQ ID NO: 261598 - protein, 351 aa, unidentified
MFDIALDLHKENTYGVVLDDKSGEIVWEGNFASNIKAAKEVLEPYFVHGTKIAIEATSCFYPMHDGLKSIKEIEVSVVNTVKLEKPAVKTDRRDALRIAHLLRRNELPIAFIPEKRLRLQRDLCSLRIRMVHSCTQCKNRISSILHKEGMRVVGVKDTFSQKGLKQLDQMKKHISRRDELEEELDLLKIFQKKQARIEKQIDETIEKDKELKKTVELIDSIPGFAKILSFVCATEINPISRFKDAQSVAAYAGLYPCIDSSGGRMKHGKIRKVGRKLLRWALIEGAHCTGRTKSTLSRYYHKKAKQKKSNHAAAVATANKLAKLIYSILTKKEAYNPGMEQQVQSLQPHAS

SEQ ID NO: 261599 - protein, 428 aa, unidentified
MYYTQNEKILQVGEEKIIVGIDVGSEKHYARAFDWRGMEYSKKAYVFTNDAEGFAGFFEWITGIMEKSGKETVMPAMEPTGHYWFDLAKFIQDNGMQPVLVNPLHVKRSKELDDHLPSKNDRKDPETIAKLVIEGRYAYPYMPEGIYAELRNATVLRFQAEAELTRIKNRIQRWFAIYFPEYKDVYGSFSAVSSMMILKKAALPCDIIALGEEKINEIWREAKLRAVGKKRAKTLVEAARRSIGHTEGHETARFEITLLLEDYDRLQNRLEQIMELIETLVSKVPYAKKLMQIKGIGIKTVSGFIAEVGDVSRFNDPKQIQKLAGQAIVANSSGKHKGQSRISKRGRKRLRFLLFEAVLSLTATNPEFKEIHHYYTGRKTNPLKKKQSLMVLSNKLIRVFYAILKSGADYDPEKLLRDIRRPEELQAA

SEQ ID NO: 261600 - protein, 344 aa, unidentified
MNYCAGLDVSLRSTHICVIDDDGELLAEGKTDSEVADIIAFLDELEVGITEVGIEAGTLTQYLTYGLQFAGYEVVCMEARQVKAALSAMRNKTDKNDARGIAQLLRSGWYSRVHVKSIESHQVRALLSSRKAVLTKCIDLEQEIRGLFKVFGIKLPPRLGHGSFDPKVRPLIEADETLSHSLLPVLDARLVLYHTYRELENRVRNLAKNDPVCRLLMTAPGVGPITALTFKSGVDDPERFKRSRTVAAHFGLTPRRFQSGEIDFDGHISKAGDANVRSTLYVAANSMLTRSSKWSPLKAWGVKLAETRGHKKAVIAVARKLAVILHRMWIDDTQFRWSTEAARS

SEQ ID NO: 261601 - protein, 431 aa, unidentified
MKSCTNQRIEEITSKTLVVGVDIAKDLHWARFVDYRGKEVGKAISFKSNRQGFESIISKIQEIINNKLLRQTFDTVIIGMEPTGHYWKTFANFAAKRGYRVVGVNPYHTKKAKELDDNSQTKSDKKDALTIARLVKDGRYFDPYLPQDVYAELRALTNARISVTKQAVKSKNTITAILDEYFPELFTVWKKPLKSKAARQILRSCPFPSHIVEKSEDELLTEIKKGAKKTVGIKKVRQLTEAALDSVGADYGLEATRLRLNYLLDSLEQAERYLYEIEFSMEDMLLKTGYAEQILSIKGIGIVTAAGFLGEVGDPLRFSNARQISNYAGFNLIEDSSGKNRSGTCISKRGRSQLRSLLYQMAFTMVGHNAEMKELHHYLTTRATNPLKKKQSLVVISKKITTVIYSLLKNQATYDPAKALGAVRREMIAAA

SEQ ID NO: 261602 - protein, 312 aa, unidentified
MSKTTIGVDVSKDTLDAVRYPHGDHLHFSNDAAGFKTFMTWLGTEPIERIVFEATGHYHRAFERAIDQAGLPMAKVNPLHAKRFAQALGALSKTDRIDAKMLARLGIAVQPQTKPAAPQIMWDLKQLHVARTALIKARTAVKNRQKNLSLPLLKRQANQQLKQIETQLKQIDTAMLDLIKTDQDLARRLDILISIPGLATTSACALIIDMPELGTLDNQTAASLSGTAPRTKQSGKWKGKAFVHGGRPHVRQAMYMPALVASRFNQDMKRKYDQLIDKGKPPKVALTAVMRKLVILANALLRDQRKWQPNQT

SEQ ID NO: 261603 - protein, 445 aa, unidentified
MNVYVGIDVGSEEHAICAIDKEDDNPVYQTTVTTDKDGFNQLEEFLSEHSTGSIHLGFEATGNYWKPIFDYLMDLREKLDITLSLINPNEIHQFKKMDLCRVKTDTVDAKAIARYVLRFKPKSTPRTNERLRSLRKLCRYRSSRVEEKTRLLQQLDGVLIGVFPEYSDCFSKLSAVSSLAILSKYPGPKEIAQLDVDGLASLRYGKANHKLGKEKAEKLIELATDTVGEGYGPEVEITISHLAEQITIVKREVEDLDERIEKSFTEIAPNKLESVDGIGPVNAAVMTTEIWDVNRFATATKLNGYVGAYPELSESGNYKNPHPEMTNKGNPRLKSAVFTSTMSAVTCNPVIKRHYQKQLAKGKDRMVAIGSCMRKLVHIIYGILTSGEKFDPNYEQNREEKDKDEERTRKPQSGSYPEDERSSGLSPKTNIGKKIPNYQLSGGET

SEQ ID NO: 261604 - protein, 336 aa, unidentified
MRYIGLDVHKTNIAACVVADNGKPVKHIELRNRNFLHEITDYMGDQKYCVMMESSTYVYDVYRFFLDHGVEAHVAHAKALKMITSSDKKTDKNDAEALGRFLRLWKRGEIELSISYIPTEEECELRDICRLKEEISGKIGDESRRIKSHMSRNMQPFPDGNGNLAVKGVINTIKETYHDDAVLMFRISELEHLREEGDEIGETIKKKLPGDVNVELLCSIPGIARLTAVQMMSMIIDIGRFGDPEKMCSYFGLVPRVRDSGGKERHGKMTKNGDKMMRAIMERVTLSHITHCDSTIKEFYHRKVSEMGRKKALISASRKMLTMIHSILRTGKPFKA

SEQ ID NO: 261605 - protein, 337 aa, unidentified
MRKETVAGIDVSKDVLDVAVRRDEQRLETARFDNDVGGHRTLVAWLTKRGCTARVVLESTGTYSLDVALALHRARGIAVMVANPRAVKQFAGALMQRSKTDLTAAAALREYAARMPFVVWQPPAAEVLALRGIARRIAALVVERTRERNRLHAVRATAEQLAIVVNDIEVNIRHLERRIELLTADAVALLREHPQLHHAFERLTSVPGIATHSAVQLLPELLVLPDDMTVRQWVAHAGLDPRACQSGTSVDKPARISKVGNAHIRRALFMPALVAVRHEPHVKAFFDKLVARGKKPIQASMLPSCGSCSTRSTGCSRRRRPSPETSSMLPLDNRESI

SEQ ID NO: 261606 - protein, 450 aa, unidentified
MVRPQVIDDEERERVYEKVAAVDVAKDSGMVCTRLPHPSRPGARQSTVWTVQARMGAIRTLGRQLARDGIEMVTLESTSDYWRIWFFVLEGCGLAVQLVNSSQAKNLPGRPKTDKLDAIWLARLTEMGLLRASFVPPAPIRALRDYTRARTRLTQERTRCWQRLEKLLEGALIKLSSVASKLTTLSAQDMVRALIAGERDPQVLAALARGKMKAKHDDLVEALDGMFGDHHGELAQLLLDQIAFLDGKIAELTARIEEQAAALPGAWGVNADGTTGPDAGTAPGDPVLPVVQRLAQVPGISEDLARSIVAETGLDMSRFPDAAHLVSWAGLCPRAHQSGTRARNGKKGRGNGYLRGYLGQAAIGASATATFLGERYHRIARRRGKAKAQVAVARSILVIIWHLLASPEARFTDLGYGYYQARTDKDRKIKNHIRQIEALLGHPVTIAKAA

SEQ ID NO: 261607 - protein, 310 aa, unidentified
MATSYTFIGIDISKKTFNAAYLNEKDQWLEKEFTNNAGGRKALLQWAPKEASFETAKYLFEKGHIVYVQNPLRVKRFSQMKLERTKTDRTDARMIARYARANVEDLTVWVPAKANLSKARCYQKQITQTSNCMEALHQLSWAREAERELKKVLMMLENALKRLEKEALNLVMESEGDLYHRLVSVPGIGVKTAVSLIVCTHGFAHFDNSKQLCAYVGLSPRIYESGSSVKGKGHLCKQGNPYIRRNLYLCAVSSMTCNPVCRSYKAHLMDRGKPAKVALVAVANKLLRIAFAIAKSGCSWNPDRLHNEIA

SEQ ID NO: 261608 - protein, 340 aa, unidentified
MSGAQPIYQLWCGIDVAAKTFTVSWTLDRSTYAQPISLPQTPEGITALQQHLSELKLPPQQTLIVLEATGSYWIRLAVALHAAGYVLSVVNPMQVHHWAKSLPRRGKTDPRDARMLTQYAVERQPRRWSPPPEVYHELRQRLTAREGLMAMRHQARNQLHALDQWPVQIIAARQAIEQVVAELDKQIATLDAAIVQVLRDGAWAASAELMQTITGIGPLTTAWVLVLTVNLELCPTAEAATNYAGLSPLERESGTSVRGRAQLGRGGNARLRTAFYRATINAARFTPIIKAFYERLRAAGKPRKVARCAAARKLLHLTYAVVRKGQPFDPAYAAQRTVAG

SEQ ID NO: 261609 - protein, 317 aa, unidentified
MEKVYIGIDISKGSLDVAIYASSKQWSFANDTAGIARTCKLLVKLEPALIVFESTGGYEMPLYVALSEAGLPAAPVNPRQIRDFARSMGKLAKTDAIDARIIAHFGHTASDLKPKPIPDTQELKEIQTRHNQLVEMITMESNRLRGAGQALREGIESHIAWLKQELEGVDGKLRKRIEQDPVYQEKDSLLQSTPGIGPTVSAALVAGLPELGSLNRRQIAALVGVAPLNRDSGMFRGKRTVWGGRGRVRAALYMATLTATRFNPVIRSFYTRLLIAGKAKKVALTACMRKLLTILNAMLKHHTGWSNSYSLTLASCY

SEQ ID NO: 261610 - protein, 344 aa, unidentified
MHITSIGIDLGKTTFHLVALGEHSKVLVRKKFSRAQLLAYTANLPSSLIGLEACAGAHFMGARLREQGHEVRLIPAQFVKPYRKSNKNDFIDGEAIAEAVTKQNMRFAQLKTAEQLDVQAMHRVRDRRVQRRTALINEIRGFLLERGITFAANPIHLRKNLPGVIEDAEQNLSPRLRWLLERLWQEWKQMELDIQAITDELERISKENALCRRLRQIPGFGPLVSTATVAAIGNGAAFRRGRDFAAWVGIVPRQYSTGGKQKLFGISKRGNVYLRRMLIHGARAVLLRVKYDTGGFGQWVHQLAQRAPRNKVIVAIANKLARIAWAVLSRGKDYQHQSLQMTAA

SEQ ID NO: 261611 - protein, 324 aa, unidentified
MQVTTLGIDLAKNVVQVHGVDAKRHVVLRKRFSRAKVLPFLAQLPPYLIGIEASGGAHHGARELSKLGHTVKLMSPQFVRPYVKNQKNDANDAEGICEAVSRPHMRFVPMKSVDQQDMQALHCIRERQIKARTALVNQMRGLLAEYGIVIAQGVSKVRHALPALLEDADHALTWNGREWLSALAGALRLLEQHITETEQKMQRVFERDEACQRLAQLEGIGPLTATALVAAVGTATTFQNGRQMAAWLGLVPRRHASGGKPTLLGISKRGDSYLRKLLIHGARAVIRQVDKKKDPCSRWLQGVRERRGTNRACVAQANKTARIA

SEQ ID NO: 261612 - protein, 351 aa, unidentified
MQVSTIGVDLAKKVFQVHGVDSAGKAVITRQLRRKQVIDFFSKIPACLVGMEACGTAHHWAREISKLGHTVRLMPPSYVKGYVKRSKNDAADAAAICEAVTRPSMRFVPIKSADQQALLMLHRTRDLLIRQRTQLINALRAHLAEFGLVAETGREGLAQLAEIITDESNREALPSAMKQALQAIVDQLAALELPIGALDRAIHAHHRANDMSCRIETVPGIGVIAATAIASTVTDPSNFKSGRDFAAWIGLVPRQHSTGGKERLGGISKQGDRYLRRLLVIGATAVVQHARRHPQKHPWIIRLLARKPAKLVAVAVANKMARIAWAIMARGGYYGAPELAAVTSRGSAMGA

SEQ ID NO: 261613 - protein, 339 aa, unidentified
MRYTPVGVDIAKHLIQVHFINEHSGEVVEKQIRSKDFLAFFSNREPCLIGMEACGGSQYWARELEKQGHKVRLMQGRFVKAFVMGNKNDVMDARAIWMAVQQPGKAIAVKTEEQQSVLVLHRSRRQLVKFRTAQINALHGTLLEFGETIHKGRAAMDRELPAALERLKTKLPPYLITVLEDQYHRLNELDTLIEGLEKQLNSVARQNETCKRLMEIPGVGPLIATAAVATMGEASAFKSGREFASYVGLVPKQTGSGGKVRLRGISKRGANYLRTVLIHGSRADWVVAKEPGPWITELKKRRPTGVAIVAMANKLARTVWAIAAHDRKYDKNHVSIRPY

SEQ ID NO: 261614 - protein, 357 aa, unidentified
MTQVKKLDFTGTIIFCGVDVHKKNWRVNIQDSEFELEDFSQNADVVLLHKHLNCKYPGATFKVCYEAGFSGFSAQRWLSNHGINCQVVNAADVATSDKEKRQKSDKIDARKLCEHLQSKKMKGIYVPLLRWEHGRSLVRARAKIVSDQTRCKNRIWQLLHFSGLVLPKDYEAGQYWSSHFIKELQAIDCGTDELKITLSLYIKDYQQTRTLLLEATRAIRKLCKQSGYQKEITLLRSIPGIGEINAAVILFELQDVNRFKSFDNLCSYVGLVPNTSDSGETKKTKGITNRSNHYLRTALVESSWSVVRKDPALLMMYKKYCRRMEKNKAIIRVAKHLLSRINYVLKNKKEYVTGVVG

SEQ ID NO: 261615 - protein, 424 aa, unidentified
MNLTQNDRLKQVTSDTLIVGVDVGSQTHFCRAFDWRGFELSRRVFKFSNTGMGFLTFLRWTEEIMNKTEMKKVIVGCEPTGCYWLTFQKFLQDHDIQLVTVNPFTVNRSMELDDNSPEKSDLKDPKTIALLVKDGRFSTSYLPSGVYAEIREASVCRDQIMKQHVRLSNQIQGWLQKFFPEYFECYADWDSTSGLMLLREAPLPQDILKIGAGGINQIWRDAKVRAAGIKRAQTLVEAAQNSVGLEAGEAARLEIWVLVNDYILKAEQLKRLDEYLEEKVKEVPNVEKLLAIKGVGMSTVIGFIAEVGDIGRFTDPKQIQKLAGLEIVKKSSGKKKGQPRISKRGRRKLRRTMYESAKALMLWNPAFQDVFLYYRNRTKNPLGGMQAKIAVACKAIRVFYVVLQTGCDFDEEKFRKDIIRPEAA

SEQ ID NO: 261616 - protein, 451 aa, unidentified
MSKKKMSLEVVNPNAGGIDVGSRSHWVAIGQDAEDIREFGVYSQDHQELCKWLSENGIESIAMESTGTYWQNLFSALAAAGFEVILVNGRQTKNVKGKKTDIKDCQWIQKLHCLGLLSHSFLPDSTTEIIRAYSRHRQNLIKQSGRTVLKVQKYLRLMNMRLDVVVNDVVGLTGTKIISAFIAGETFGKNLAKYRHYNCRKPEGEIAKALQYNGRVDYLFALKQEWETYLHTQKQITEVDGQIKKLLEDIIDKDDNKKQHVANKKPYKRKNKNTIRGTDMNQISYKYFEGIDLMEIEGVNDATIMAIISEIGLKGIEKFDSAKQFTAWLRLAPNNKISGGRVLAHHIPKGSSRLKIALRNAANAIGNLKEGHLADFFKRINYKKGRATAINATARKLAVIIWNMLAKAQNYNPPTQYMFLDEKRRLGIVKRLKKQITKFEIKPEQLGFITP

SEQ ID NO: 261617 - protein, 383 aa, unidentified
MSTVRPTPRFRLYVGVDSAAGTFTAAWMAPGPNATPGRAATFDQAPQGFARVQARRRASGQQPADILVVMEATGSYWIALATTLAQAGFVVSVVNPAQAHHVAKALLRRATTDAIDARTLTPLAALLQPAPWTPPPAVYADLQPRLAQRDTLIGLCQQVRNQLPALTHLPVVIAAVRARMEALIATLDAQIEAVEGEIAEAIHLDEGWAATATLLLSSTGIGLVTAAWLLVSTLNFTVCATAEEATADAGLAPHPRESGTSVRGRAVISGGNKRLRTALSMATLSAGQHNPPIRDVYRRLRTAGKPKKVARCAAARKLPHLAWAVVRTGQAFDPLHAHRHRGSRGGFPLVGRSPTRHPASPAPPLAQRTHDYHKLALDNQYRI

SEQ ID NO: 261618 - protein, 438 aa, unidentified
MSMTFARLLDPCLEDDNDPFRYYDYQGEPLEDRLYLPCGIDPHKKVCHAAFVHPLPHRQDILSHRQVRNQHLPDALWLVEEGQRLAEPFQATPLYIFEASGPYWRPYRLFFHQLSCPTATVSGRQTRRAGGTGTRKRRNDLQAAFLVAKVFKQGESHASRIPPEPLATLREYTRLHLFFVEQSVALQNRMFDLRYQIHPGFDDLFSKSIMPTTLALAQEELVHPVKLRQADLQTLTEVISQASRGKLGAPRAETILRSAQHTFYLPYAPEAQSFNLKLMAQAHAYIVDHLLPPLRARIEEGLHQIPFPQHLNEIPYFGPVVTATFLAELGSPSWYRTVDSVVAWFGLDPSVSESADHTTGISHLTKRGTKYGRRMMWLVARNWSRYVSQGRRLYRKEREENKLSYDAAICVIAAKLVRIAFAMARDGSHFDMDVAFPS

SEQ ID NO: 261619 - protein, 351 aa, unidentified
MPHKLNSAIAVIGIDIGKNSFHVVGHDKRGAIMLRQKWSRGQVEARLANLPPCLIGMEACVGAHHLSRKLQMLGHDARLMPAKYVRPYSKGQKNDFRDAEAITEAVQRPTMKFVATKTAEQLDLQALHRVRERLVSQRTGIINQIRAFLLERGVAVRQGLRFLRNELPHILAAPCDALSPRMLRVIEDLAGDWRRLDERIEGLSSEIEALARQDKGCERLMTVPGIGPIISSAMVAAIGTGDAFSKGRDFGAWLGLVPKQISTGDRTILGSISKRGNRYLRALFVQAAWVVLVKVGPKHWARYGLKSWIEAAKKRLHHNVLAIALANKLARIAWSVLAHGRTFEASKIQAA

SEQ ID NO: 261620 - protein, 374 aa, unidentified
MKKIYVGIDISKEKCNLCYRSGLKIVREEEISNEVKALKKAFKAALKALGASVEEVLVCAEYTGRYIYPLTVACQELDIFLWMDDPTRIKNSMGLTRGKNDAIDAARIAEYAFRYSDKAVRYAIPDAAIVSMKNLLADREFLLIDRKRYQSQLTDQKKYMAPGDFKHKNSRWKKVIKSIDEQIAAIDAEIESLIATDPVLARQKELLVSIDGIGDRIAINMIAITGGFTRFQNARQFCSFAGLTPYKYDSGTSVRSKAKISKRANQTMKALLHMSAVNVATRMKAREYKDYYERKLKEGKHVMCILNVLRAKLVHRMFSVIKRDTEYTKEYKPQRNINLHVRRAPGVAARPGAGRPYERNKYPQTTPLNRSDDL

SEQ ID NO: 261621 - protein, 341 aa, unidentified
MTVSMIGLDIAKQVFQVHGVDEAGEEVVRKRLRRSALLGFFASLPPVLVGMEACATAHHWARELRALGHEVRLVPPRYVKVYVRRNKTDAADAAAICEALRRPGLHAVPVKSTAQQAVLMLHRTRELLVEQRTMTANALRAHLAEFGIVAAQGLGGLTQLKTMVSEPGTLDVPPEAGAALALLAAQCRELELKIRELERRIVLWHKNDATSRRLATIPGIGPIIASALSARVADATVFRTGRHFAAWLGLTPREWSSGMKRRQGRISKRGDAYLRRLLVLGAHAVMRHSGRAGPHTDLWLQKLRARRPPAVAAIALANKMARIAWAVMVRAEIYHRRAAMA

SEQ ID NO: 261622 - protein, 345 aa, unidentified
MYRTRVGVDLAKKVIQVCIYRNKKVQSNIEMTPDEFLSWLVNQKPLTIIFEACSMSNYWKQKATEAGHEALLISAKLVSVVRQNQKTDKNDALAIVQATFLPGVTFIGGKTIEQQQIQTIKRLRELAVKHQGACQKQLVSLLLELNIRIGNRQGGILCAIDAVLEDATNGLSDECRRAIYIGKGQLAISIEAVEHYGKCLEKVVSINKECKKLLRLEGVGTTNAINLYLALGCWDIGVFSKGKDASACIGLTPIQHSSGGLVKLGAIGKHCKNSILRSQLICGAMAVVRQLATREAKTKKDVWLKGLIERRGKKCAAVALANKTVRTAFAMLTQGTEYKAELLTA

SEQ ID NO: 261623 - protein, 406 aa, unidentified
MYVGIDVSKDSLMAHAMDQDGKDIFHSFKVRNNKPGCNKLIDFIYKHAKQSDFELIKVGMEATNVYWEHSHRLINNSEKLNSNFKLITYILNPKVVKKFKDAYNSLPKTDSIDAWVIADKTRFRVPKPTIPKEVYRPLRELTRFRYKLVKNIRSEKNRALSLVFLKFSDLKEDVPIDIFSEASMTILESFTLEEIADKDLEELAAFLHENSNNRLGGSTPLNKIITDLKKAARNSYRLKPKMNQAITQTLSMTFDNIRFLQSQLNRSKKVLARELKAIPQTLDTVDGIGVILTSGIIAEIGDIDRFHNQAALASYAGLTWTKHQSGSFVAEETSMTKTGNKYLRYYLVEAANSLRVHNDEYRSYYYKKYHESQKHKHKRALVLTARKFVRLVFALLSKGEIYQPRR

SEQ ID NO: 261624 - protein, 346 aa, unidentified
MLYAGLDLSRKRLDFHLLDADGATIEVGAAPPDADGLRGLSERLARHGEAIRAAIESMNGARFVHDRLELAGWKVEIADAQKVKGLAPLACKTDRIDAWVLAELARRDLVPAIWLPDPLVRAERERARWRLHLVRHRSSLKQRVHAVLLTHGKPCPVSDLFGVRGRQLLARLGLPEPWQGTIEASLRLIDELDREIGECERELRRLGADHRYVPLLCTVPGISWVLAYTIAAELGDISRFPTPRKLAGYTGLCPRVYQSGERDLRGPLAKQGPRYLRWALVEAATHACTHTVYRDRYQQTKTRIGKQRGAKVAQVDLARRLAEAIWHMLTRNEPFAPAGATDPLAA

SEQ ID NO: 261625 - protein, 337 aa, unidentified
MEREYVGIDLHRRRSVIIRKNAAGELISKVHIDNSAEALVAAVAAAGPGPEVVIEATFGWYWAVDLLQEMGAHVHLAHPLGNNWGNRRVKNDERDAADLVDLLRLGRLAESWIAPPEVRELRELVRYRHKLVRLRAGLKAQVHAVMGKHGVLPTRVDMFGPGGTAQLDALELPDGYARRLASLRALIKTYDKDIAELDRTIATCLVNHRGYHVIQSLNGVGPIVAAVLVTEIGDIGRFPSPDRLCSWAGMTPRHRESDTKVKRGSITKQGSRLIRWAAVEAVSKNHGDDIIKAAYRRIAERRGANIAKIAAARRLLTLVYYGLRDGEIRCLAGPARG

SEQ ID NO: 261626 - protein, 341 aa, unidentified
MTTALPRRYVGIDLHRRRSVVATMNDEGELLGCVRIDNGPLELVKAVTAHRGEIEVALESTYGFYWAADVLAAEHIPVHLVHPLGLHWESRRVKDDERDAAELANRLRRGDLPEARIAPPEIRERRELSRYRLKLTAYRTSAKAQIHAIMAKEGILPELDGMFSPAGQRLLDKMPFSGAYAIRVESLRDLLEIVDREIAMIEGHIARRLKGHQGYQAIRALNGVGPILAAIFVSEIGDVTRFSSPRHLCSWAGLTPTHRESDQEVHRGHITKQGNTYVRWAAVEAVARYHGGSPVAPTYERVVKRRGAMIARVAAARKLLSLVYYGLRDEEIPCLADKEAG

SEQ ID NO: 261627 - protein, 429 aa, unidentified
MNYNTQNAKIASITEKTLIIGIDVGSETHYARAFSWRNYEYSKKPFAFSNDEIGFAAFKEWMDDIAEKLEMEVIIPGMEPTGHYWLNLGAYLQEQGMKPVHVNPHHVKKSKELDDNNPSKNDRKDPKTIASLVNEGRFSYPYIPTGIYAEIRNLSNLRIQTQEEITRIKNRMARWFSIYFPEIKDVYRNPDAVSGLMVIKQAPLPCDIRELGVEGVNKIWRDARLKGAGIKRATTLVTAAEHSIGNTEAPRSARKEIRNLLNDYEIYKNRMDELMEEIKETLSEIPYIDKLMEINGIGIKTVSCVIAEVGDIGRFDNPKQVQKLAGYAIVADSSGKHNGESRISHRGRKRLRYALYESAISVIGKNKEFKEIHSYYRTREKNPLKKMQSVIAVACKLIRIFYTILTKGVDYDGQKMLNDIVRPEIQPAA

SEQ ID NO: 261628 - protein, 375 aa, unidentified
MIAAVRSEVSVNEPVLHVAFELGKKSWKLGMTSGFGVAPIVRTVVSSDWRAVEQALGIARRRFGLPAETRIVSCYEAGRDGFWIHRALLTRGIANRVVDSSSIDVKRRHRRMKTDRIDAVKLVHMLVRACAGEAAVWSEVHVPTLAVEAARHGSRERSALTQEQTRLVNQLRSWLATMGATLPKQRAAGWWQTVRDWAGAPLPVALQQRLARVHARLRLVADQIATLETEQAQRVARAPADSAVRRLVSLKGVATTSAAILIDEGLVWRAFTNRRQIGGLLGFAPLKYESGETSRDQGISRSGNDRLQATMVQLAWSWVHWQPHSVLTRWYLARFGTGKRARKIGIVALARKLLIALWRWATAAVLPTGAVLTPA

SEQ ID NO: 261629 - protein, 433 aa, unidentified
MLYLGIDQHRKHLTVCVRDEQGSVLLGRQVSTEWERVRAFLAEVQRWSGVAGFAVILEVCGFNDWLVKLLAESGCRETVLVQPEKRSKRKTDRRDAATLSEILWINRHRLGGGERIQGIRRVEWPGAEEAADRQVTMLRKRLGQARTRTINRIKHLLRKHNREQECPTKGLKTQRGRQWLREISLEGVDRQELDLLLEQWELWDAQIERVEEEIRRRQARHPTAPIVATLPGGGAYSSLAVASRIGRIERFARPGSLANYWGLTPSCRNSGEATDRLGSITKQGSAMVRFMLGQWVRHVLQKDGAMKAWSQRIKRRRGAKIARVAVMRRLATIIWHMVKYRQPYQIGPGGHGKKSAPLPAKPPSGKPAAEKPGDVASASQPGGHGKTKRGGFGASVQGFRRPRAGDQGDAAPPPGPPPLFSVPGTPVPSPGKE

SEQ ID NO: 261630 - protein, 344 aa, unidentified
MDHYAGIDVSLECSSVCVVDANGKIVREAKVASEPEALIGWFGSLGFGPARIGLEAGPLSQWLYAAMKEAGLAVELLETRHVSDAFKAMPVKSDRNDARKIAQLMRLGWFRPVHCKSITAQEIRAMLTARKLVQSKLLDLENSLRGILRGFGLKVGKTTRTSFAGRIEELVKGHPNLQTFGEALLRVRAVLLAEFNGFEKRVRATSRLHEKARLLMSTPAVGPIVSLTFACAIDDPSRFTSSKQVGPYLGLTPKKYQSGETDYTGRISKHGDASVREALYEAAHIMLTKPIKGCSELKSWAMRIARRAGTNKAKVALARKLAVVMLRMLKDNVPFNPAAKAATA

SEQ ID NO: 261631 - protein, 335 aa, unidentified
MVYVGVDLHRKRSHVAALGQDGTQVLSRRIPSTPEEFLRVFGELGPGQLEVAFEATYGWGWFADLLADVGIPAHMAHPLGTKAISSARVKNDSVDARTLAHLLRTNLLPEAWIAPPEVREARRAARGRTALVRMRSRLKCQTVAIVADHGFIPEVSDLFGKRGRALLARFDLPSVSRSRVDANLRVIDQITEEIEVADRELRQLFRADDRIRRLTAIPGIGFTTAAVVTAEVWDVSRFPSPDKLCSWAGLTPLERSSSESLRRGHISKQGSRWLRWVLVEAAASGPHDPTLRSFFGRIARRRGVKIARVAVARRLTLCFYALRDETGCRAFPVAG

SEQ ID NO: 261632 - protein, 399 aa, unidentified
MLERIPLEVRVSVDIGSRQHRVAIGLSSGEVLEEFDRVHQAEGFEHFFARLATYEQQYACSVAVAMEGFNGYARPLDTMIRARDYRLANINNLKRARFKAIFPGAAKNDILDARKGLELFQLRDHLPLAKDVLQEVAATPEENDILKRLTRRRRQLVREKGRVLNRLQSDLQVVCPGLLEITNDAGNLWFLRFLTRRPELTQVARMRLRSLLNIRGVGATYARAIQSWQSHAVFSHEVAWVGEMIQADATRILELLGQVKVLEAKIDAVAQESSVASILDSIPGFGQVCSAELAGEIGTIERFRSDASLGLYVGMSNLDHSSGKFQGSKAPKHVNTRAKAAMMIAVDRHRKCVPESQKYYAKKRAEGKSHNQAIRALGRHLCRVIYKLLKEERDYEIRD

SEQ ID NO: 261633 - protein, 405 aa, unidentified
METQHTLFKEMLLMLFVGIDVSKSKHNCYLVDSEGTVYENNLQILNNCQGFKTLSQTITSICQTQNHKKVKIGLESTGHYSTNITNYLYSEGFEVIIFNPIITNNKRKGNTLRKTKTDKTDAMVIATMLFTDSSKSYSPISYQIIELKSLTRHRHRMVNQRSKFKLSYTRLITIIFPELVANVSSLHQKSVQSLLFDLPSAKEIANCHLTKLTNLLKNNSKGKYRKDKAIELKNLAAESIGSSNRANAFELQQTIKFIRFLNDEIKIIDQKIKELVDEIQTPLITIPGIGYTLAATIIAEIGDIHRFANPSKLLAFSGLDPSVYQSGKYNATHTMMVKRGSKYLRWAILQAAKTVTMRDKTFKDYLNKKLSEGKHYFVALSHVGKKLIRVIFHLLKSNISFEPQT

SEQ ID NO: 261634 - protein, 450 aa, unidentified
MAKRKKKGKTVKTLHTLQPNAAGIDIGATEIYIAVPEDRCSETVRHFGTFTEDLHQAAQWMKQCNIESIAMESTGVYWIPVFQILDRYGFDVSLVNARHVKNVPGRKTDVQDCQWLQYLHSVGLLRGSFRPGQDICAVRSLLRHRDTMVKSASSHVQHIQKALTQMNFQIHNVISDIVGVTGLAIIDAIVAGERDREKLADLTNPRIKADRQTILKSLEGDFRPEHLFTLKQALSSYRHYQQMIRDCDLEIGNHLNSFDSHPDFDETSLPPSNRSKRKSKDTEPAFDLKSHLHRLFGTDLTQIDGVSTLTGQVILTEIGPDLSMFPTANHFCAWLGLSPHNKISGGKILSSKTRPGSNRAAHALRLSANALFRSKSYLGNYYRRMRSRHGAPKAITATAHKLARIIYHLIKNRKPFDETVFAEQERKHQERMKRSLIKRAKSFGLQVVPA

SEQ ID NO: 261635 - protein, 427 aa, unidentified
MAARCIFAVLNSEIMAAVEFTQVVSRGCGMDIHKEVVVATVRGEGIQKEARSFDTFTSSLTELREWLVSLGITHVAMESTGVYWKPIYNVFEGHIPHVWIVNARHIKNVPGHKTDKNDSEWICQLLMAGLLKPSFIPPREQRELRDLTRYRRKVIQMVSANKNRIIRTLEDGNVKLSSVLSDTSGKTGATLIEMLCDGKELTLQDIEDVRHGRCHHTSEEMLEACTGYMNDHKRYMLQRIRECNRKLTVEIVELDRRIKEIVTPYAEVMDRLDEIPGLHDRTLEDLIAEIGLDMTVYPSAESLCKWAAMCPGNNESAGKKKSGKTNHGDKYVKATLVEAAWAASRTKGTFYKERFERLSKRKGGKKALIAVGHSILKAVHYVISTGGRYHELGEQYVPSKIEKKRRDYLKSELQKLGYEVSIIKKKD

SEQ ID NO: 261636 - protein, 413 aa, unidentified
MIYCGIDWAEHTHDVALVDDSGQLLAKRHITDDAAGYRILLDLLAEYGDTEENPVPVAIETSRGLLVAVLRAGKRKVFAINPMAAARYRDRHSVSRKKSDPGDALVLANILRTDMHAHRPLPQDSELARAIAVLARAQQDAVWNRQQIANQLRSLLREYYPASLTAVEAWKRGLCRPEARELLRLAPTPRRAAKLSRTQLQAALKRAGRQRGIEAEAERLRGILRADWAHQPQLVEDALGKQMLALLLQLEAATKAANDLEEAVAEAFPQHPDADIILSFPGLGTQLGARVLAEIGDDRQRFADARGLKAYAGASPITRASGKKSSVTRRWVKNDRLNHVGYLWAFSAPNASPGAKIHYRRRRDEHGDWHASAQRNLFNRLLGQLYHCLQRSQRFEESIAFPSFSEETCTAAA

SEQ ID NO: 261637 - protein, 408 aa, unidentified
MEVLYERCCGIDVHKKILVCCFKCGKKQEIRTFGSNNDDIRELARWLLDSKCQMIAMESTGSYWKPLYNIFELSGLDVIVANARDIKNVPGRKTDIGDAEWIADLLKHGLIRASYIPSREQRELRELSRYRVSLIQERARELNRLQKMLEGGNVKITNVVSDINGRSSRNLLKALLENDEPLTEERVQGMVHGKMAHKVDAILKAMNGFLTPLQKQLIRKVVDHIDDMTKRIGEMDDMLTQYLEPYQEAIEKLDELPGVGKRSAETILIETGLDMERFPTDKHFSSWAGLSPGNNESAAQKKRCRTVKGNKTLKTTMIQCAKSAKRCKSYFRAQYERLVVRRGANRATVAVAHSMLIAIYHILKNGSRFVDLGEDFYARFNREKKISHHLKQLTKLGWLPNAAEAALA

SEQ ID NO: 261638 - protein, 415 aa, unidentified
MAKVMEAIFRCCSGLDVHSKTVAACVRRIDDQGKIHAEVRTYGTMTRDLLALLDWLVSEGVSHVAMESTGVFWKPIYNILEGQFQILLVNARHIKNVPGRKTDVIDCEWIAQLLQCGLLRGSFIPPRPQRELRDLTRMRAQLTHEMSSVANRIHKVLEDTNIKLGVVATDILGVSGRKMIRALIGGETDTVKMADMARGRLRDKIPLLEQAMVGKVTEHHQFILKALMDHLIYLESQIKMFDQRIHEAARPFEQAIAALIPMPGYERVSAQSVIAEIGPDMNPFLTDAHLCSWAKICPGNNESAGKRKSGASGHGNRWLRAILVQVAWAASHKKGSYFQAQYRRLAGRRGKKRAIVAVAHSILTVTYYILKEQRTYKDLGGDHFDRISRDRICRYHVKRLQDLGYNVELAERPAA

SEQ ID NO: 261639 - protein, 427 aa, unidentified
MEILYKCCCGLDVHKKFVVACLLMIDDNGEEIRQVRRFQTDTAELLRLLDWLVTAGCEAVAMESTGVYWKPVYNLLEGGPMELLVVNAQSIKGLPGRKTDVQDAEWIAELLQHGLVQGSFIPSRFQRDLRDLTRARTTLVQERAGVVNRLQKVLEDANIKLAGVATDVLGVSGRAMLEALVAGQTDPQQLAELAKGRMRKKMAQLRQALAGRFGPHHRFLISEHLSHIDFLDESIERLSQEIAERLRPFEEELQLLDTIPGVNRQTAEELAAEVGLDMSRFPTGHHLASWAAMCPGHHESGGKRYSGKTRKGNRWLKLTLTEAAHGASHTKNTYLSSQFHRLVGRRGKKRALVAVAHSILVIAYYVLKRRQPYQDLGSNYFDELHRQTLQRNLIHRLEKLGYKVTLQTLAPAGIFMGAIHAGWRHHQ

SEQ ID NO: 261640 - protein, 408 aa, unidentified
MEILYPRCAGLDVHKDVIVACVRCVSEPLHHEVRSFDSTTRGLLELADWLALHACTHVAMEATGVYWKPVWHVLEGSFELILANAQHIRNVPGRKTDVNDATWIADLTARGLVRSSFVPPAPIQQLRDLTRTRKQLVREISQHSLRIQKVLEDANLKLGSVLSDVLGQSGRAMLKAIVAGQTDPQRLAALAQGTARKKTAELREALRGHITAHHRTLLKLHLDVISALEHTLAELDAAVGKSLTPIRQRVRLLTTMPGISDLTAQVLVAQIGVDMTRFPDAGHLVSWAGLCPRNDESAGKRRSTRVRKSGTWLKTALVTAAWAAVRVKTSYLHAQFLRIKARRGAKKAIVAVAASMLTAAYHMLRDGVAYEDLGADHFSRHDTSKTIRRLLKRLAALGCNVDHFAHAT

SEQ ID NO: 261641 - protein, 315 aa, unidentified
MTASPMVGVDVAKDRLDVAVRPSGEAWSEANDDAGVRALVARLRPLGPALIVCEATGGFERAAIAALAAVGFPVVVANPRQVRDFARATGQLAKTDQLDAAILALFAERVRPTPRPLPDAAAQLLDAVLTRRRQLLEMLVAEKNRLGFAPKPLHRGIQAHIRWLERQLDDVTKELAGLIEASPVWRAKDDLLQSVPGVGPIVSPTLLGELPELGSLSHKQIAALVGVAPLARDSGTLRGKRLVWGGRASVRTALFMAALCGRRWNPQLKVFYERLKAAGKPTKVALIACARKLLTILNAMMRDQSRWTSNLQYSC

SEQ ID NO: 261642 - protein, 384 aa, unidentified
MHKEKHCAVVIDCWMEKNGEVNFENRPSKFPAFVEDIRKICGTRNFVFGLEDTRGFGRNLASYLTGRKFEVKHVNPAYTSAVRLSNPIVYKDDSYDAYCVARVLRDMVDTLQDAKHEDVYWAIRQLVKRRDMIVKNNVMNKNQLHSQLSYSDPSYKKLFAQVDGKSALCFWENYPSPEHIWSTTPEKIYETIKPVHQALKIERIHAIIDMIKKDGNTQKGYQEERDSIVRNIVKDIKNNQELIKDIEEQLRKLLPQTGYKLQTMPGIDLITESKIVSEIGDINRFPDSDKLARFMGLAPVHFSSAGKGRDERCRSGNRELNAIFHFLAIQMVVISPSGKPRHPVFREYFEQKVKEGKNKPQALICISKKACKDNLRYDEDKDRV

SEQ ID NO: 261643 - protein, 316 aa, unidentified
MSKLVSQITLGIDVSKDELVICDWDTEELTVLENQDNTIKSWLKSLYGPVRIAIEPTSRYHLEVVEQAHQFGFEVYLINPRQLSHYRVAIGQRNKTDPADAWLLARYLDREAGSLRPFKPLCAKAQRAWSLLKRRAAVTKARSQLDQSFRGIKLSTKALKSEIQRLLDRIDTQLQALVRALGWLADYQRCLTIPGIGPLNAVALVCVFHRGAFAGSDAFIAFIGFDVRLRESGKHKGKRKLTKCGEAEIRRLLFCAAQPARCYAPFDDYYQQQLTKGLSNIAAKVTLARKLARIAFTLLANQQSFKKQEIAYSVSP

SEQ ID NO: 261644 - protein, 440 aa, unidentified
MDKLKNSSACGIDISVKEHVVAVPQDRDRQSVRTFGSFTQDLHQLAQWLLQCKVDSVVMESTGVYWYHLYTVLLEYEFEVFLVNAQHVKRVPGRKSDVSDARWLQQLHSFGLLNGCFQPDNLTRELRDYVRLRKSIIRDMSKQTQRAQKALELMNIKLNLVISDITGKSGSNIIQAILNGEKDPHTLIKYADGRLKASREALLKALEGNWREEQIFNLKVAWEHYKFLSAQLEQCDQQSENTLTKFQTIEDKQLPDSKTRSRNQPKFNVRNYLFAVLGTDVMEINGFKETSALTVFSETGPMLQKKFPTDKQFCSWLNLVPDNKISGGKILSSKVKKKKNNAGQSFREAAFTLWKSNCPLGDYLRMKKAKSGAKAAITATARKIAAIYYKMVTDKVAFDNAVLIQKSRVDLLKKVMALERSLSLAKIQLAGTLLFVSFVI

SEQ ID NO: 261645 - protein, 311 aa, unidentified
MYYIGIDVSKKDLSVFDGKDLNFINKEGLKSFKKYLKKKYRFSEIAIIFEPTGIYSLYLKEFCAENSIKAYIVNPKQSHNFARALGIRPKTDKIDARILYQFHKLIEAKDIKVPKIDQQAKTLASYLVSYEFALKQRISLSHHLEGLRDKRLITLMKKEQKRAKKLEDKIFNDIKEYLKQNQNLEEDYQRLLTIPGIGEKAAIALLTLFKTYQGTNRAQITALAGLDPIKRESGTSVKHKVKISKNGKGIYRKILYLPTLCATVHNQKIRVFYQRLLAHHKIKKLAVIASMRKILLIAHAMYRDKTEYVAV

SEQ ID NO: 261646 - protein, 455 aa, unidentified
MSNRSRRGLSRGDRRRNEKLARLREIITRETAVLAFDLAADKQVCALTDPDSRVLARRTARVRAWQLAQTLDWGLAAAAEAGFTSVVVACEPTGHRWRVLDQLAAERGVVLVCVQPLLVARAREAEDFTRNKNDDTDAMIIARLVTELRCYLPERADPAWARLRHLGARRARLVVEVGAARQQVRDLLECAWPAVLDAAGKPLDSANWLTAVATGLDRIGATGELSELGQRGWEDFAAAVRAELAPTRWYSAIVRAVFDAATDPAAAAVGVVDQRAGALERVRFALADLAHLRARIAEVETRMTRVLDTLGVTELVTGIPGVSAVGAATILAEAGDPIRFSSARALVKHAGLCPRANESGKYTGTTSISGRGRPELRLAAWRAVFTALQHNPVLAARHAHLTGRAENPLTDTQARIAIAASLLRQLHAVIVTRTAWDPAVAAGLDRREDGAATAA

SEQ ID NO: 261647 - protein, 314 aa, unidentified
MDHVSPLKVVGVDVSKDLLDAYWLPEADGRCAPNQAEAVQSFVAECLRRGIELVCVEATGGLERLLVKACHAAGLPIAVVNPRQIRDFAKAMNRLAKTDQLDCQTIALFAARMRPPATLASSENADKLGALTTRRKQVSDMLIQEKNRLHRTYDTHVEGLIRQAIDWYQQQLDQIEREIEALIRQTAEFQAKVDLMQTVPGIGATTAAMLVAKLPELGHRTNNQLSRTVGVAPLNRDSGQFRGKRMTGGGRSELRQQLFMPTLVAVRHNPKIRAFYQRLIQHGKPKMVALIAAMRKLLTCLNAMLKTGQPWKYA

SEQ ID NO: 261648 - protein, 331 aa, unidentified
MKISETIGIDISKLDFDIRIYSNQKYEHFENNVQGFNKMIKWTYKNSSFLKEEILFVFEHTGLYSYQLSVFLTDQDIPFIMVPGLEIKRSMGIARGKDDKIDATKIARYGYRLRDEIQPYKLPSEQIRSLKSLLSLRCRFVKQRAGFKASLKEQELILTKKLNKILFETQERTFNYLSKQIKRIDDEMERIIKNDKELKGQFALIISIKGVGVQTALFMMAYTSAFTKFKNARKFASYCGIAPFPNSSGTSIRGRSKVSNLANKKIKSLLDLCAKTAIQYNPEMKLFYNRRIEKGKNKMSTINIVRNKIVARIFAVIERKTPYVDFMKYAA

SEQ ID NO: 261649 - protein, 284 aa, unidentified
MPPAASVFVGIDVAKAELVMAIRPSGERWTATNDDAGIQRLLPRLREAAPALVVLEATGGYERAAVAALAAAGLPLIVANPRQVRDFARATGQLAKTDRIDADTLALFAERNRLEHAVPAVRRGIVQHIRWLERQLHDVDDDLDRTIQASPAWRAKENLLRSVPGVGPVVSRTLIGDLPELGTLPGKQIAALVGVAPLARDSGTLRGKRLVWGGRAPVRAALYMAALVATRRNPVIRAFYQRLLTAGKPKKVALTACMRKLLTILNAMLHANTVWRHPAQTATT

SEQ ID NO: 261650 - protein, 382 aa, unidentified
MEATTIGIDLAKSIFHLVGMSQTGKVVWRKALTRARLLEFLVQHQRAVVGMEACATAHYWAREIQKLGHEVRLMNPSFVTPYRKSGKNDFNDAEAVCEALSRPTMRFVEVKSLAQQDLQSLHRVRRLVMKQRTQTANQLRGLLAEYGLVVRRGVAALRREVAALSDDPQRLTAVLRQVAAANLDILAVLEQQLKALDLRIAQACRADERCRRLAEVDGVGPLIATAMVAKVGNAQQLPNARALSAYLGLVPRQHSSGGKSVLLGISKHGDRYLRTLLIHGARAALRVAHRRRDQRSLWVSRLKLKSGPNVAAVALANKNARVIWKLLTSGQRFTPQPGAPEVERAQAAQRLASEKRAGLSAAVRLEPELKTPGFFRRPPEHV

SEQ ID NO: 261651 - protein, 403 aa, unidentified
MEKTAGIDLASEEHRLVVVEQDGRRLDERCYSHSEEGIAALVRRLLELGVQRVAIERPNGLVVDRLLTAGIVVVPVHPNQLAAARDRYRSGGGKSDGFDAYVLAELARTDMHRLTTLQPDSDETRALRALTRAREDLVEQRVALANQLRAQLDCFWPGASRVFADVDSPIGLAFLERYPCPEDARSLGAKRLAGFLARHGYSGRRSPAELLARLREAPRSKVGPLECEARRTVVLALVATLKPLVEQTRLLSSQIAGALTAHPDGQIFRSLFRDPKSVVTAAELLSEIGDRRERHATSSSLEAIAGQAPVAVESGKKKVATFRWACNKNLRSAVSVLADSSRKHNPWANDIYQRARARGHDHPHALRILGRAWLRIIWRIWHDHTPYDPARHGNLNRLLTTQG

SEQ ID NO: 261652 - protein, 357 aa, unidentified
MRCIPTDAAGITLGVDTHKDFHVAVALDGLGRRLGTLSIPTTPAGYEELVDWANGFGPLEGVGIEGTGSFGAGLARLLQAEGTKVFEVVRPKRRDQYRSGKSDPIDAELAARAVLAGTATAQPKGADGKVEMIRTLRVTRRCAVKARAQSVNQLKNLLITAPEKLKSELWGLSTAKLVAKVSAFRPGANPSDVQAATKFALRSVARRHQRLSEEISELDEQLDRLVTEAAPELVALEGVGTDTAASLLIAAGDNPERLKNEAAFAHLCGAAPIPASSGKSVRHRLNRHGNRDANRALHVIAVCRMSRDERTRTYVAKRTAEGKTKKEIIRCLKRYIAREVYRILASLSLNKPPILAP

SEQ ID NO: 261653 - protein, 350 aa, unidentified
MDSLSEIVDVVIGVDTHVASHSAAVVSAHTGAVLAEITVEATPEGYEELVEFANEHSGLRAWSIEGTGGHGAGLARHLAKNDELVVELDRPVRQKRRNGAKSDPLDAIRAAREALSRTKLGTPRSTGERQALSVLLAARSSAVGAAKVAQQQLFSLVIAAPEQLRSKLRGEGTLAMARTASRFRLQTHWDLETRTTAAVLRDLAQRALELRVEADRHEKAILAIVRAWRPEMLERKGVGPIVAATVLCAWSHPGRVRSEAAFAMLGGVAPIPANSGQVTARFRLNPYGDRQLNRAFHTVVLSRLRWDEETKAYVKRRAAEGKTPREIKRCLKRYVARELFRLLENEPSRT

SEQ ID NO: 261654 - protein, 320 aa, unidentified
MPSLFVGIDVSQAHLDVHAVPGGQRTRLANTPAGHRQLVAFLRPLAAAPAEIRAVVESTGGLERACALALEAAGVEVAVIQPERARHFAKAVGQLAKTDAIDAGLLARFAQSVPLTIHPLPPEEIRHFRDLLDRRAQLVEMRSMEKNRRDTTALPKARKSIDRHVAWIDREVKGLDGELARRVADNATWKELDAVLQSIPGVGPQTARTLIGQLPELGHVDRKVIATLVGLAPIANDSGTTEGPRHIVGGRKQVRNVLYMAAAVASRCNPLAKALYARMLAKGKPAKVALIAIAHKLLTIANAMVRTKTAWRHSNVAIST

SEQ ID NO: 261655 - protein, 398 aa, unidentified
MGLLPVALSVLCIRVGMNAHPNVMDSTLLLTASLCQACQIGWHAKTRGGVTVNASAKVVGLDIAKEIFVGVGQERNGKRVWNCKLKRGEVLQTFRKMPPAEVGIEACAGSHYWARELIALGHDVKLIAAQHTRAFVTGNKNDTNDAAAIAEARSRSATKYVPINTPAQQDLQMLHRARSALMSERIGMINRIRAFACEYGQVFAQGVARFRDGFMAWLADPENGLSGSAVTTFRELKEQLDDKEQRILAYERRLNQAAKDEVARKLMEVPGVGPLTATAVMASVADPHHFRSGRDFAANLGLVPREHSSGGKQRLYGITRRGDSYLRTLLIHGARSALRCAGNKNDRQLRWASSLAVRRNFNVAAVALANKMARVIWAILAHGRTYVPVWSNSTTRPA

SEQ ID NO: 261656 - protein, 310 aa, unidentified
MADKPVVGIDVAKDWLDVDGAGMAERIANTAAAVLAWLDRVRPGLVACEPTGGCERTLLAALKDRAIRFVRVHPNQLVAFRKSQGLRAKTDRIDARLIFAFVCHRLAQRGLQTAILGNPALAALAARRRQLIDSLHAERCRLAMARLDVLRDSHQAVIAALRHSLDRIERELAAAIAGNPQTAKLAMLLQTIFGIGPAVATALIADLPELGLLSVKQIAALVGLAPHTNRSGKAQYREPTGHGRPGVRRALFNAARAAIRHPSPFRNFYQRLVTQNQRPGKVALVAVMRKILVCANAVARDQQPWKLAKT

SEQ ID NO: 261657 - protein, 332 aa, unidentified
MHMLAIDLGKQSFHIYGISDDGEVVSRKVGRAKLVDAVTRLQPRLVAMEACASSHHWGRTFEALGHEVRLIHPRFVKPFVKGSKNDAVDAEAIFEAATRPTMRFVPLKSVEQQDLQALHRTRDRLVVQRTALINHTRGLLAEYGIVMPAGASRFRLQIDKMIETAELSDLAKPLFRQLVEEYRDLDARVSALDDMLVKICRTDDRCKRLTTLPGVGPIVATSLVAAIDDGQHFKSGRALSAWIGLVPRQYTTGGKPRLGGIGSRANHYLRRQLIHGARSALLRISKHEDRRSKWAQDLLSRAGHNKTLGAMANKTARMAWAILRSGESYKIA

SEQ ID NO: 261658 - protein, 311 aa, unidentified
MTQHTIGVDISKAHLDAFRLEDGAAHRFENSAAGFRALRKWLGRAPIARIVFEPTGPYHKAFEAAFSKTFPLVKVNPLQARRFAEARGTRAKTDAVDARMLARMGAAFDLEPQAPCSKQTLVLRDLHVARAGLIKDRTRLRNRAQTQGIALLKRQTKARLTQVERQIAELDAEIAALIEAHGATARNRDSLCSMPGIGAVTAAAMLTLLPEIGTLQRKQVASLTGLAPITRQSGQWQGKSFIGGGRKPLRDALYMPALVAMRFNPDLKAKYDALRTVGKPAKVAIVVVMRKLIEMANALVKADRMWTPKTA

SEQ ID NO: 261659 - protein, 391 aa, unidentified
MNYFVGIDVSKEKFDACCIGEQGEKVFSLTCSMDRGGFEKFILQLPEDKVSLFLGMESTASYHIALFSYLTAKGYRVLVLNPLLINNFAKRSLRKTKTDKKDALTIAQFMMREKDVLSTQTPSHLTTELKDLARRRERLADYVTSLKSNMKRILSVTFPELEHITGVFTQSTLRLLAEYPSAHALREADYSHVADIFITKSRGRKSHASVKELMATAGRSVGVVSRAKELVLKQEASLLLHVQKQVKETTNLLMSLANERMKQDMEILCSMKGIGENTAVNFLIEMGGEVEMYENDKKLIAASGLDPSTYQSGKYEGTSRISKRGNRHLRRVIWLMATKVIINNTLFRTYFYKRRKEGLPYKKAVLATAHKLIRVMFAMLSRKTCFVEGGN

SEQ ID NO: 261660 - protein, 433 aa, unidentified
MNENAGGVDGGAEYHYGAVPEDSTDGPCTRKFLTNTRGLYELADWFVECGVKSVAVEATGVYCIPLLEVLEARGIEVLLAKPSSLKWVNDHQKTDMLDCQWIQLLHTFGLLRGSHRPTAVAAYRTYNRHRQGLIAQAATEIEHMKKALTEMNVRIDQAVTDVTGKTGMRIIRAILAGERDPEELARMREDGCAKSEAAIAEDLRGKYTDQHLFTLEHAVRTWDYLQKLIGECNQQLEKQAQMYEKKASREAIPKARRVEKARKQSLTFEARELFYEVFGQDLTQIDGIGTSTLSVLLAEVGTNVDAFKSEKNFCSWLRACPGLNKSGGKNRSGKNRATTNRLWTALRIAAQTLSSSKSALGAFYRRKRAHIGPQKAINAAAHKLARMIYFTLKHQRPYVDPGPDHYVKTHHDRIVRTMEKRARQLGYTLIKAA

SEQ ID NO: 261661 - protein, 347 aa, unidentified
MDKVTIIGMDLGDKNHKAVGLSASGEVISRDEVPCTADGVRSYLARHPGALLVVETGAHSRWVSRIALGLGHEVLVGNARRLRVIWQSSRKNDWRDAEMLARVARTDRSLLHPVALRCDGDQELMRMVKARDLLVKTRTAVVNQIRGFCKSDGARLRKCSAASFASLEADVPPSVREIAKPMFEVLSKVSEKIGLYDVMIADAVGRLHGEEAALLDPVAGVGPVTAAAFLAAVGDAEAFGRARDAGPYFGLVPAQDQSGARDPQKRITKEGNALVRRLLVTAASYIMGPFGPDCDLKRHGLRIAERGGKNSRKRARVAVARKLAVLMLAILRDRSEYRPLKEAGGAA

SEQ ID NO: 261662 - protein, 397 aa, unidentified
MIAVGVDVSKSKSTVAILNGDGSIRAKPFDVHHVADELQALVDYIKRMSEPPTILMEPTSHYHYPLLKVFQKADLPVCLINPYQMKKYGDTELRKAKTDKRDALRIAQYALEKSYSLVPYTPQDQKYEDLRFLSRQYNQRISTLTVAKIQLLSLLDETMPGITAILPLKSRDPDNCVLLRFIKRFKSFDVIRKMGKTRFLDSYQVLVKKTRDRFAGAKGLAIYELVLNSVTTNGENPLSAMTQEQCVDLVSISQKAADEINLQMRIIAETIPEYKVLRSMAGVGDRLGPIILGEIGDIRRFHSGKALNAYAGNDAPPYQSGQFESRNRHISKRGNPALRKACFEVMQALKLTKPQDDPVYLFLLKKEQEGKPYNVAKMAAVNKFLRIYYARAMESYK

SEQ ID NO: 261663 - protein, 356 aa, unidentified
MSEKLNSKIAVIGIDIGKNSFHIVGQDRRGALVLRQKWSRGQVEARLANLPPCLIGMEACTGAHHLSRKLQALGHDARLMPAKYVRPYCKGDKNDYRDAEAIAEAVQRPTMKFDATKTADQLDLQALHRVRERLVSQRTGIINQIRAFLLEREIAVRQGLRFLRAELPDILAKRTDVLSPRMLRIIEDLSGDWRRLDERIEGLSSEIEALARQDQGCARLMSVPGIGPLISSAIVAAIGTGDPFSKGRDFGAWLGLVPKQMSTGDRTILGSISRRGNRYLRTLFVQAAWVVLVKVGPKQWERYGLKSWIEAAKKRLHHNVLAIALANKLARIAWAVLHNGRTFEYVKTNATASRSA

SEQ ID NO: 261664 - protein, 376 aa, unidentified
MEDDSTLYVGLDVHKDSIMVAYAIGMGDVELLGKVGTTQIEVDRLCKRLQSKARHIRVVYEAGPCGYGLYRRLVDKGFDCMVCAPSLIPRKPGERVKTDRRDAIKLVRTLRAGDLSAVHVPTVEDEAFRDLARAWSAAREDLKAARCRLKSFLLSHGVHYLGRPDWGPTHRRWLSTFSFDSAWQQLAFDEHRRTIEDRLAQCERLEMALREAVSNWRFYPVVLALQAMRGIQFTSAVGLVSELGDLSRFEHPRQLMAWIGVTPSEHSSGGKRRQGSITKTGNSYARKLLVESAWSYRHPARVSIDIQRRHEGIPKPIIDRAWDAQLRLCKRYRKLVARGKSAHVAIIAVSRELIGFIWDIGRLGLTLAASPTVQAA

SEQ ID NO: 261665 - protein, 423 aa, unidentified
MMKLKYSICCGLDVHKNVIVATIVTTNKDGISEYKQKSFSTINSDIQKFHNWLIENNCYHVCMESTGKYWIPIFNYLENDIDVCLTHPKYVKAIKGKKTDKKDSKWIADLYKFDPVRCSFIPPKDFRQLRELSRYRFKLVCMKSSEKNRIQNCMTVSNVGIASVLSDPFGKTATEIISYLLEHTADSMDEKAVRKLIKKGAKSKSDEIIEAIKGYTIETDQAKKLELARGHLEYLDDMITQTEVELYVRIKPYYEFVEFVSTMPGMTELSSTIVLAETGVDMDIFDDAKHLCSWCGLSPANNESAGKKKSVRIAKAGDYLKPMMVQCALAAIKSKKQPYFAIKYGRIKKRRGHKKAIIAIARMMMVCIYHMVSEKKPFTPTDYEELMNPQNHVERVVLNENNVFAYLESLGYDSSKLVKRNDN

SEQ ID NO: 261666 - protein, 401 aa, unidentified
MQDTQQRDAVDVFVGVDVGKGHHHAVALDRNGKRLYNKALPNDEAKLRALIAELKTHGRLLFVVDQPSTIGALPVAVARAEGVLVAYLPGLAMRRIADLHAGEAKTDARDAAIIAEAARSMPHTLRSLRLADEQLAELTMLCGFDDDLAAQVTQTSNRIRGLLTQIHPALERVLGPRLDHPAVLDLLEHYPSPAALAGTSEKTLANRLTKLAPRMGKGLAAEIVQALSEQAVIVPGTQAATIVMPRLAQQLAALRKQRDEIAAEVERLVLAHPLWPVLTSMPGVGVRTAARLLTEVAHKSFASAAHLAAYAGLAPVTRRSGSSIRGEHPSRRGNKVLKRALFLSAFAALRDPVSRAYYSRKIQQGKRHNQALIALARRRCDVLFAMLRDGTIYQLKSAPSA

SEQ ID NO: 261667 - protein, 332 aa, unidentified
MQGRALKEEKLMEKEKVYVGIDVAKASIDMAVHQSKQRWSFTNDDEGISQAVSCLQELAPVLIVLEATGGIELPLTVALAAAGLPVAVVNPRQIRDFARATGKLAKTDALDAQVIAHFAAAVKLTPRPLPDAQAREFSALLTRRRQVVEMITAERNRLRSTYSKVVRKFIKDHIARLERELAKLDDNLRRSIRGSSVWREKDDLLQSVPGVGPVLSATLLADLPELGTLDRKQIAALVGVAPLNRDSGNFRGKRTVWGGRAKVRATLYMATLAATRHNAVIRAFYQRLCAAGKDNKVALTACMRKLLTILNAMLKHRTPWRYEAAFIIGPCS

SEQ ID NO: 261668 - protein, 343 aa, unidentified
MTQYVGLDVSLKETKLHVLDEAGNRVWRGGCATDPAAIAAAVRRYAPTAVRIGLETGPLTTWLWTALTAEGLPMVCLDARHAKKALDMKVNKTDANDAEGLAHLVRAGWYREVRVKGRSAMLAKALLGARSQLLNMSLALENQIRGILKTFGRIVPKGGGGLFEKNVRALITDDAEIAAVIMPLLQARQVARGKCAALDHRLIRSVQGDATCRMLMTMPGIGPITAVAYVAALEKPDTFKRSRAVGAWLGLTPRRFQSGEVDYDGHISRRGDRQLRALLYEAAAVLLTWVRRESALRRWGLMLWKRLGFKRAATALARKMAVVLHAMWKSGTPFNPTLSAVTP

SEQ ID NO: 261669 - protein, 428 aa, unidentified
MQSSTARKLAQIPGKSLIVGVDPHKRTHAAVMITQQAEVCARLKIENTRVDFEHLVKRAQAERIKAGADSIIFAIEAGSHCWRNLAYYLHEQKLVFRLISPYTLKRQREGEDLTRRKNDYRDAMMAAELLRTGKFTETRLLEGGYAELRARHQCYRRLRSVHSRIRNQIRALLDGVFPEFCSEFSDPCGQTSAAVLSSGPLPSVIASQNSMAFIATVRQAYVGQRLAIGKLEALHALAASSVGIEADAKAVAEELGLLVQQQRLVAGQLERVEHELREMLHTFEESQYLLSIDGLSALTAAGIMAEIGPFGNYRDAKDLVKLAGVNPTQSESGGKSQSHTPMSKKGRAGLRGCLWQGAVSMLRANQEYREWAEKMQNRSAANHPLHRREVLGAAMNKLLRLCFALVTKKQMYRRPEAEPKSVPVAVAA

SEQ ID NO: 261670 - protein, 433 aa, unidentified
MVKINYMSTLFVGIDVSSKSNSVYAMDFEENKYLSTSFGNNQPGADELVNRIAACMQKHKNLDTLLIVLESTSVYSVHISNFLASSEVLMPYKPYVFCVNPKTTANYRKSYIGMEKTDPTDAYLIADFARVGRTKKLEPWRGGQFIALKRLTRHRMHLSECITREKTYMVSNLYLKFSELQLLEGDDKPFGNLYGATSSAILTEFLSPQEIIDMPEEDLLAFLAQKSRNRISDLSKTSELLRKAARDSYRLDKCMYEPLNISLASSFNCIQAYQKEIRLIEQAIEKCIKGMNPNALIILQSIPGIGPVWASGILSEIGDISAFHSSDALAKYAGLYWPEGDSGDFISEDNQMSKAGNPYLRHYFGEAANSIRKHIPEYADFYARKYAEVSKHQHKRALALTSRKFVRLVFGLLAKNQLYTGEKLDAEYNIEPN

SEQ ID NO: 261671 - protein, 346 aa, unidentified
MILGVDTHLDIHVGAVISQAGKQLGTHIIQTNQTGYLELLDWDRSFGILERAGIEGTGTYGAALTRYLIKNGIYVVEVNRPDRSKRRLEGKSDPLDAENAARTVLSGSSKAIPKMQSGACEALRIISVARRSAIKARTQAINQLRALLVSAPQDVRDKLWKSKPHECVTACLNSEVSEYSPLRIALCSTLRSLAKRWKALTEELNKLDESLDKLTRKDASNLRSQFGVGPQTAATLLAVAGDNPERLKNEAALASLCGVNPLPASSGKTVRHRLNRGGSREANNALWTIALVRMRSDPRTRIYVDRRTGEGLSTKEILRCLKRYIVRELYPLILSDLAYANRPLLT

SEQ ID NO: 261672 - protein, 316 aa, unidentified
MNNKRVIGVDIGKSCLDAAIEGSHRVQRYDNNAAGIAALIECFDPAEALVVFERTGGWERNLEVALADRAITWSVVHSQGVKAFRQAQGIKAKTDQIDARLLRDYGRDRLNAGKLRPGHREDVTLDCLMARQRQLKAMRHAESCRLATAALGVVRSSIERMIADLDAGLAAIAAELVRHENEHMDLAFKEEVLCGQIGVAEQTARGLLAELPELGRLDGKAITALGGLAPRVHESGSIRKRRGLAPGRTSIKVILFNPARTAMRFDPQIKEFCSRLRARGKPGKVIMVAVMRKMLVRLNAQMRDAMARAPTAAAVH

SEQ ID NO: 261673 - protein, 348 aa, unidentified
MLHAGLDLSRTRLDYCLLDAVGDRVEVGAAPPDGDGLRGFARRVALRHGPVEVHAAIESMNGARFVHDTLERQGWEVEVADARKVKGLAPLACKTDRIDAWVLAELSRRDLVPAIWLPSFELRAERERARFRLFLVRKRSSLKHRVHAQLPAFGHRCPVSDLFGRRGRELLARLDFPEPWRSGVLAAVAMIDDLDRQIAGIDAELRALGADHEYVPLLMSAPGIAWVLGYTIASEIGDIHRFASPKKLSGYTGLCPRVHQSGATDRRGHLTHAGPKYLRWALMEAATHACRHPVYRARYQRNKARLGKQRGARVAQVDIARQLAEAIWHMLTRNQSFAPAGATAALAA

SEQ ID NO: 261674 - protein, 330 aa, unidentified
MKTILVGIDVASKTLAIALEHPGRSSRVFEVPNTPGGHRRLIRRITARKIPARVCMEATGVYGFELAWTLHRTPGIEVQVANPRAVRDFARAWLQRSKTDAIDAQVLLEFARRMPFAPWRPPSLRILEIRAITRRIEVLTRARTREKNRLHMVDRCREISAVVRQDILQHIEQLNRSLRHLQQVASSLVRKDPVLARRFEFLQSVRGIAETSALHILAELATLPEDMSPRQWVAHAGLDPRQYESGSSVSRPARISRVGNSHLRRALFFPAMVSARSEPHVRAYYEHLLARGKKPLQANVAVMRKLLHAIHGMFSSQSTFRGEKFYAISA

SEQ ID NO: 261675 - protein, 321 aa, unidentified
MNKSTIFIGIDISKDVFDVYSPDQGHSQFPNNVKGFNSFKKELSLNHWCVMEATGCYHQQLALYLFDEGIRVTVMNPLVIKRFIQMKLNQVKTDKSDAKMICHYGQEQKMQLWQPSPEYVEECKQLQTITQLYFKQSTAIKNKLHTLQTRGYKRSKMISSLKRQLKSLQKEIQLLETEMELLIKTNQQELYTRLKTIPGIGKKTAILLIVTTNGFKDFESSRQISSYLGLAPNERSSGSSIRGKTRISKTGNPIVRNHLFLCSFTASIHNPQCKALYERIVAKGKSKKLALIAVCNKLIKQAYGISKSGLPYDKNYVSKLV

SEQ ID NO: 261676 - protein, 310 aa, unidentified
MGATYVGVDVSKDRLDVHVRPSGEVFVVSRDGQGLEELVERLRQLSPALVAVEATGGFEIIVAAAITGAALPLAVVNPAQIRHFARAVGKRAKTDPVDAGVIAHFAEAVQPAPRAVPDEAARVLGELVGRRRQIIDMIVAERHREKRATNIRVRKSLARHIAVLEKELREIDGDIDTLVRGSPVWRAKEDLLASVPGVGKTIARTLLAELPELGTLGRREIASLAGLAPYTRQSGRWRGKSMIAGGRAAVRSAAFLAALVATRHNPPLRRFYKNLLHVGKPKMVALIAVARKLLTILNAILRDNRPWQNA

SEQ ID NO: 261677 - protein, 358 aa, unidentified
MSEITRVGVDLAKNVIQVHAVDAAGKVVTNRQLKRDKFIEWCMQLPALCLLAMESCTGAHHWARKLAILGLDARIIAAHLVTPYRQQGKGGKNDANDAAAICEAASRPSMRFVTIKTTTQQGLLSVHRLREGLKADRTACINRIRGLLAEFGLVFPQSPKELREQLSSTIEDASNELAGMARLVIERAQTQWQEFDDHIAWCDQRIAAHLKEDEQARQATQLMGIGPITASAVVATVGDFKQFKNGAQFGAWLGLTPKQNSSGGKNNLGSITKHGEKYLRMLLIQGARAAVLTAHRRDDPISKWVYQLREKSGWQKAAVALANKNARILWTVFTKGKPFDARHVSVKPGVPQVAMSVA

SEQ ID NO: 261678 - protein, 420 aa, unidentified
MTVFCGIDWAERHHDVAVVDDTGTLLAKARISDDAAGYSKLLDLLAEHGDSPETPIPVAIETSRGLLVASLRTGDRKVFAINPLAASRYRDRHGVSRKKSDPGDALVLANILRTDMHAHRPLPADSELAQAITVLARAQQDAVWSRQQVANQVRSLLREYYPAALHAFQGKEGGLTRADARVILALAPTPAKAAKLTLAQLRAALKRSGRTRSFDTETTRLREIFRSEYARHRPAVEDAFGQQLLALLKQLDAACQAADDLTTAAEVAFKEHADSEILLSFPGLGPLLGARLLAEIGDDRTRFADARALKSYAGSAPITRASGKKHFVGRRFVKNNRLMHAGFLWAFSSLTASPGANAHYRRRREHGDWHNAAQRHLLNRFLGQLHHCLQTRQPFDEQRAFAPLLPAQLEGVTGARKPSH

SEQ ID NO: 261679 - protein, 355 aa, unidentified
MEYFKDIKTFVVSKHVFCGIDIHFGHWNLCFVCDGEVVEKTKIPNSYETLNMRLSKYSQARKISIVYEAGFSGFWLYRRLISDNYDCIVTPPSKMPKSDNKVKTDKRDAQKLAFYLSAGLLKVVYVPPPDIESDRRVVRRRAQLVKKQTRAKNHIKSFLHLHGLKTPEDIKTNWSKLYLAWLEGLIFDYESDIFTLSQLIRNYRRIREDLAEVTRYLRMFSRSEKYQENYKRITSARGVGLITAMTFLLEIFDFGRFAKEDDFSSYLGMTPSQFSSGDKVRLGHITRQGNSNLRRVLIESAWTVIKHDPHLREKYDRIKARGTNGKKAIVAVARSLAVRLRRCILDETEYVIGVC

SEQ ID NO: 261680 - protein, 311 aa, unidentified
MNSEAYVGVDVSKVSLDVKVLPTNDTLQISNDDVGINKLIKRLTQIDPTLIVFESTGGLEMLAVGNLIENHLPVVVVNPRQVRDFAKATGRLAKTDAIDADTIARFARDIRPEVRPIKDEHAQLLSALNARRRQIVDMLVAEKNRLSRAPKPNRKSIQKHIQWLERSLTDINKDIDKTIKKSPTWRENDRILQSFKGVGPVVSATLLCDLPELGTLNRKKIANLVGVAPLNCDSGHFRGRRRIKGGRANVRRKLYMAAVASLRHNPLMKDFYDRLVEAGKPPKVALTACMRKILTILNAMMRERTYWNAIW

SEQ ID NO: 261681 - protein, 426 aa, unidentified
MIAARFCPSGPPSPTWGRWAKISPLSTPFWITLEQAPSFQRGSKKTKASPRFSAIILLPNKIQPEERRLAMNKRSKLNFSGQAIYIGLDVHKKSWSVSVFSQQGEYKTFSQTPKPEALVQYLQHHFPGAQYHSVYEAGVLRVWIHDQLREKGIQNIVANPADIPTQDKERRNKRDRVDCRKLARGLRSGDIKGIYTPPRWKLEDRSLIRARLGMGRKQARCKNQIKSMLLFYGVEIPEQKEMGHWSRRFIRWIEEIRMERTSGDIALKIHLEELCHLRQIIAKLNRAILALARTDEYRSWICLLKTIPGISTLAAMILLVELYEITRFRSIDKLCSYVGLIPDTHGSGDKEHVGGVTDRHHSYLRWLLIEASWIAVRKDPAMMEAFNEYCKRMRKTKAIIKIARKLLNRIRYVLKNQAEYVTGVIE

SEQ ID NO: 261682 - protein, 332 aa, unidentified
MKKIIHFIGIDVSKETLDIALIRNNDKSNIYSSKVTNNKTGFKKMKQWLKAENVSLQEAVFCIEHTGMYSKPVGQFILSVQGNLWMEMSLKIIRSMGVQRGKNDKIDAMRIALYAQRCQDEMKLYEPPRPIVEKLRTLLQLRKRLISSRNSLQVPCNELTTIDEQAGKEATSLIRSSVSALEKNIDVINEEIDELIASDEQLAHEFEIGTSVPGIARITLAYIICFTNEFKNYSGGKQLACYCGVVPFEHTSGKSVKGKPHVHNMANKLLKRLLHMGAIAAVTYYDEFKHYYERKVEEGKPKMLVLNNVRNKMVLRLAAVIKNNKPYQKIAA

SEQ ID NO: 261683 - protein, 495 aa, unidentified
MIGEATRLAIPFRRLLQNLTRLSPTLHRHKESEVMLSRKSGYGKREKRKGVKGQIELVSANAAGIDIGSEKHFVAVPSDRAEEPVRSFGCYTADLREMALWLLECRIETVAMESTGVYWVPVYLILESYGIDVKLVDARHAKNVPGRKTDVCDCQWLQQLHSYGLLRGCFIPDRRTRTLREYWRQRQSLVESASREILHMQKSLEQMNIQLHKAISDITGVTGMLMIRAIVRGERRPIVLAGMRARGIKKSEAEIVKALTGDYREEHLFTLKQSLELYDILQQKIAECDRKVQEHLSTYEAKVDTDSLKALEAKNWSRRKNQPYFDLRQELYRVTGVDLTRIDGISSLTAQIIISEIGLDVSAFASEKQFASYLTLSPENRITGGKVRRRSTRRSSNRVAASLRLSAQSLERSDSALGAYYRRMKARLGAPKAITATAHKLACLIYRALRYGMEYVDIGQNEYERRFREQQLKSLNKRASALGYDLVPTAVGVVS

SEQ ID NO: 261684 - protein, 318 aa, unidentified
MRRVVSIGIDISKQTFDCAFSLDEKIWHHQVFDNKPKGFEEFMKVLGNHKVSSFHAVMEATGRYGEDLAEFLFAKGHTVSILNPAQIRYYGKSCLIRSKTDKGDAKLIADFASKQEVNPWKPLSDEKKKLRALERCLESFKQDKTQVTNRLEQEKDKAVRTLLEQRRDFIDQQIKSVKASLKDLLKPEGPLKKSVTLLESIPGIGLTTALALLAELPDLSTFQSAKQLSTYAGLNPSIRSSGSSVRGRGSLSKMGSSLLRKCLYFPAMVAMRYNPALKVFADRLREKGKKPMVIIAAVMRKLLHIIFGVLKKQQPFHA

SEQ ID NO: 261685 - protein, 430 aa, unidentified
MSYRIAAIDVHKKMLAVVVADVAGEGEYQFERRKFGSTAGELHLLAQWLGQREVEEVVMESTAQYWKPVWAALEQYWRPARQKREGAGKMCGTLHLCQAKSNHGPRGRKNDFGDAERMIKRLVAQELILSFVPDPEQRLWRTVTRRKHQLTRAKVSFKNQLESLLEQAHIKLSSYVSDLLGVSARRMLKAMAEGETDPAVLAAMADPGLKATPAQLCDALDASRQLSGVYRRLLKMTLDELQLLETHIEQLEREAMGLMQEHQEAIRRVAEVPGFGPDSALQMIAEVGPGAASFPTAKQLSSWVGVCPGNEESAGESKSTKSPKGNRHMRRLLNQAAQSAVKVKGSIFELTFHRLLPRLGYKQAIWAISHRLCQLLWLILHKGVRYEERGPAVSAKSKRTRAARMIRELKKLGYRVEGGPAPTRKPAMRR

SEQ ID NO: 261686 - protein, 375 aa, unidentified
MLRFRLMIKRGLNETATKHQKVKRSMKYYAGLDVSVKETSVCIVDESGKLCREKKVVTHPDDLVAVLSDPAFNFERIGLEAGPLSQWLFEGLAKAGFAVVCIETRHTKAFLKAQQLNKSDRNDARGIAHMMRVGLFKDVHVKTLTSQKRRALLTARKLLQEKAIAMENDMRGLLRNFGLKVGTIRAFKFDERIRELVEAAPDLAEIIESLLAARQKLREEFVKLDRKVRGEARVDPVCRQLMTVPGVGPIVALAYTSTIDIPSRFRHLRAVGAVLGLTPVLNQSGESSRIGHVSLCGDGMLRGLLYEAAQVLLIRVKKWSWLKAWAMNVAKRHGIKKAIVALARRLAVVLHRMWVDRSEFRWTREATPTTTDATA

SEQ ID NO: 261687 - protein, 403 aa, unidentified
MNAVGIDVSKGKSMVAAIAPGGKLLARPFEVLHTKSGIKQLVSFVHTLGADTRIVMEHTGRYYEPLLQRLAKSGLFVAAVNPKLIKDFGNNTLRKVKTDKADAKKIARYALDNWCDLRQHTGMDTTRTQLKTLNRQFAFCMKQKTACKNNLIALIDQVYPGANTYFESPARADGSQKWVDYIATFRHVDYVCAMSLSAFTERYRKWCHRHGYNFQPDKPRMLWEKAKDLIAMLPMDKTTKMLVQNSIAQLNVLSKTVEALRTQMIELAEQLPEYPVVIDMNGVGPTLASQLIAEIGDITRFPRRGSLTAFAGVDPGAKQSGTMQLRSNKTSKAGSPHLRRALFQIVSGLLMRAPDDPVYNFMDKKRSEGKPYYVYMTAGANKFLRIYYGRVNEYLASCPKDHE

SEQ ID NO: 261688 - protein, 359 aa, unidentified
MRYVGIDYHKRYSVLCATDERGQELKQRRISGNSATGFAQFFSELGEESKVVMEACWNWGWLYDLLAKIDGIDEVMLAHPYKTRLIAEAQIKTDRLDAQMLAKLLRGDLIAQSHAPSAATRARKHLLRQRLFWVRLRTMLRNRMHAILDRQHGLERPQLKNFFSRRGQTWLEEVQLPCAEDQPLLTQDLEVAELLEEKIKQLDRSIGQSQSEEEKLLESIPGIGPLFSSVIATEIDGVGRFNSATKLAAYAGVVPTTHASGGRVFNGRLLWQCNKWLRWALIEASWSAIQFSGYFGSIYRCARARGKNKNIAITMVAHRMIKIIWLLLTERRPYTETLPDRSEDGMTVVVRRKVLGLAS

SEQ ID NO: 261689 - protein, 419 aa, unidentified
MDALNTSAFTAFIGIDWADAKHDVCIQGADGDEPEFDVIPHQVERIDEWAQALRQRFGSPMAVAVELSKGPIVYALQKHDCFVIFPVNPSTLAKYREAFQPSRAKDDPTDAEIAVDLIMRHPERFKPLQPQSVEIRMLASLVEQRRHLVDDKIRITNRLRVALKQYYPQMLEWFDHIDTPLFCDFLTRWPTLVQVKRARKSTLRKFFHEHNMRFEYVLERRLNAIKTATPLTLDEAVVVPHRLQALVYVEQLRVMLNAIKRFDIEIESVAKQHEDYALFTTLPGAGPSLAPRLLVAFGEQRERYKSAAEIQKYSGVAPVTERSGKKHWVHWRWQCPTFLRQTFVEWAAQTINKSYWAGEFYRQQREKGSTYQAAVRALAFKWIRILYRCWQTRVPYDEVVYLKALERRGSPLLTAAKVT

SEQ ID NO: 261690 - protein, 370 aa, unidentified
MKKPATLFVGLDVHKDSISVAHVPDDRCAEVTYLGRIGTRPADIDRLLRRLQDKADRLIVAYEAGPCGYVLYRHLTRRGITCLVVAPSLIPKKPGDRVKTDRRDAVQIARLLRSGDLDSVYVPSVEDEALRDLCRAREAAVVTLKAAKFRLKSFLLRLGLHYTGRANWNDAHLRYLAKVVCPTPAQQIVFQESLRAVDEQVERLKRLEAELADHVPGWRLAPVVRALQALRGVQDTVAITVVTEIGALTRFDNPRQLSAFLGLVPSEDSTGDSRRQGPITKSGNGHARRALVEGAWAYQYPAKVSPHIRKRLEGLPKPIQDIAWKAQVRLCKRFRRLVARGKHPNIVVTAIARELAAFMWAIAREVPITA

SEQ ID NO: 261691 - protein, 432 aa, unidentified
MRPNAGGIDIGATEIFVAVPADRDTETVRSFPSFTQDLHALADWLQHCRVDTVAMESTGVYWIPLFQILEARKIEVHLVNAQHVHHVPGRKSDVLDCQWLQYLHSVGLLRTSFRPEQAVCEIRSLMRHRESLVQMACVHVQHMHKSLDQMNLQIHHVISDITGVTGLAIVDAIVDGNTNPEELAKLRDYRIKASVETVTKSLVGDYRPEHIFTLKQSLKAYRYYQQLISDCDQEVQQRIESFKTKDDGSANTGDACGSTDSAAPPFDLRTHLERIFGVDLTAIPGFDVLRVQTIFSELGADLSDFPTPASFSSWLNLCPKDGTSAGRRIAGPRLKTKNRVTQVFRMAGQSLHNNKSFLGDYYRSQRARFGPLKAIKNAGHKLSRIVFHVVTTRQPYDETVFAKLEARHQHRRLRKLQNVAKQMGYSLVPTQA

SEQ ID NO: 261692 - protein, 348 aa, unidentified
MAHFVGLDVSVKETSVCVVDDAGRVILEQKVPTEPADIIALLTSLGVAYGRIGIEAGPLSQWLVTALTAVELPVICVETRHMKALLTAQQINKTDRNDARGIAQMMRVGLFKPVHVKTLVAQEQRMLLTSRKLLQRKLLDLESDLRGTLRNFGLKVGVVSGSRYEARVRELVLGFPRLAAIAEPLLNVRRVMRQQFAILHKMLLDTVRDDPVCRRLMTAPGVGAVVALTYRATVDQPQRFVHSRAVGAHAGLTPKRYQSGETNYDGRVSKCGDALLRTMLYEAAQVLLTHSGKWSWLKAWGMRVAQRRGIRRAIVAVARRLAVVLHRMWVDGSEFRWSKDSVLAPTAA

SEQ ID NO: 261693 - protein, 340 aa, unidentified
MQVTTVGLDIAKNVFQIHGVDAKGRAVLRKRLRRSQLTDFFANLPVCVIGMESTRGAHFWARVLGSFGHTIRLIAPQFVKPYLKHGAKNDPNDAAAICEAVSRPHMRFVPQKTIEQQDLQCIHRVRSRLIGCRTQLCNQVRGLLSEYGIDIPLHLSQLRKALVEIIDEREQRLTDSAKSLFAALYEELRALDARIDELERRVNQAFRRDPLCQRIAEVEGVGPVTATAVVAAIANGRTFDNGRQFAAWLGLVPRQHSSGEKQRLFGITKRGDPYLRTLLIHGARSVVFRCSNKSDPRSRWISEKTKKLGVTKACVAVANKNARIVWGLLAKDEPYRRAAA

SEQ ID NO: 261694 - protein, 411 aa, unidentified
MQLLRQAVPATALVVAVDPGKVSNRVWLTSGERGLIGAPVSLPVLREGVDRLAGLIAASGVAGAPTIAVEATGRLHQAWTAELERRWPGSVRLFAPSETQAARTQLGWRRSKTDDRDCAALVWLARQGAGRPAATDTVDALLGAVRHRRGLVTDRKALQQRLHDQLQALCPGLSAPAGHGRALALEDPIGQAVLACAAAFAGRPPTMRSLQARAPGRLTQTTARFWVDRWRRLLPPPNDAELRAERLGRDLARHQALQADIAAVEAQLTRLLAATAGQILTTLPGVAAVRAASFAAHSLPIDRFPTPDHLYAATGLAPAAWQSASLTRRGRISRQGLPEHRDALMGIAWGLSQYSGSFQERDRELRGRGMRPIQARVALARHACRLCHALLTTQQPFDEARYRSARHSRGR

SEQ ID NO: 261695 - protein, 453 aa, unidentified
MPLQRMPGHLTGLLAVCSSCRKGDILCPIVSHKSADFGLFFPDGRPLDPHQAFDNSRTGYSLAKRLLQDALDTYTFDGLDVSGEATSYYWLPFFLQLAADPDLAPHDLNLFLLNPRWVHWFKKCFPQDDKTDAKDPFYIAERTRTHRPSATWSPCLGTLPLRFYTRLRFHLIEDLAREKCYLSAFLFLKASAYRRLKPFADVFGVTSRLVLGEWPTLDELAALPVADLAQQLHELSGHHLREPLDNAGKLHQVAQESFRLPTTLVLPVQRVLDLTLAHITFLEDQVNTVDAWITAEAQPQRDVSILSTTPGIGPVFSSGLVAEIADLERFLQGRKWDKPRKRFRPKNLRDAEDAVAKTAGLWWPRTDSGDFEAEDRRMAKTGNRYLRYYFIQAANRMRQCIPEYADFYARKYREASKHKHKRALVLTARKSVGLVVGLLHRHEAYRPRQAHAV

SEQ ID NO: 261696 - protein, 367 aa, unidentified
MNDTITYVGLDVHKETIAVALADGGGRGDVRAFGQIVNTPAALSRLLAKLTQPDRTLKFCYEAGPCGYGIQRQLSDAGHDCVVVAPSLIPRKPGDRIKTDRRDANNLARLHRAGELSAVWIPDPAHEAMRDLVRARLAAVRSLRQARQQLSGFLLRHGCHYGRPAWTQMHRRWLAGLRFEQPVHHIVIEDHIATIEAATERRDRLTKQIEIMLSDWSLAPVVHALQSLRGMALVTAATMIAELGDLSRFTNPRQLMAYLGLVPSEHSSGGTRRQGGITKAGNTTARRMLIEAAWSYRFPAKISREQLIRQEQLPKPIRDTAWKAQLRLCSRYRKLAKAGKPATTVTTAIARELSGFVWSIACQASPR

SEQ ID NO: 261697 - protein, 372 aa, unidentified
MAPLKGIDILFKKKEVHNENSGKDGKGVSVVGKRVYVGIDVHKESWQVTVRTEGEEIFNGRIPGQYQSLKRLLERYQGSWMKVAYEAGPFGFWLSDKLVEDNIEVMVVPPSLIPVESGNRVKTDKRDSRKLARLLESNMLKQVYVLTSEEREHRDLLRTRRQIVDHRKDVARQIKSKLLFYGIASPFSATPYWSLKYIEWLKALSFATDYLKESFHLLIDLYEYLTRQIARINRKVVLLCREAKYLDRIKLLCTAPGIGKLTAIEILVELQDISRFENGEELASYIGLTPSEYSTGEKTRQGRITRCGNARVRTCLVESTWTLIKKDPVLRAKYLKLKNARGGKRATIAIARKFILIIRRMLLDNTPYRMAA

SEQ ID NO: 261698 - protein, 354 aa, unidentified
MGKMLNHVQQGQKVFVGLEDSKRSWKLCIRSEGMVVQELSMGARYEDLRRFFEGQYPRCDIGVIYETGFRGFTLHDRLVADGYGCVVTPAHTVVDEKGNKVKCDKKDARRLALNFEKGDYTKCDVPDEELRQDRQISRTLIQIQKDISRTKNRIRKFLDFHGYDEAFAPGRWYQRDYHNLDPADLSEPLECCMDIYREQLKMLLEMKRRLRRKLRALSKKERYCKQYDIFRSAPGVGWFTAIRLVLEWGDDLSRFQTAKQFAGFTGLTGSEFSTGETVRRGHINRQGRPHVRAWLVECAWTAYKRDPVLLKKYQAVYRSSGSAKKAIVAVAHKLAVRLRAIAIRGETYQIGLIQ

SEQ ID NO: 261699 - protein, 393 aa, unidentified
MLAVGIDISKSKSVAAILNQDGSMHTSPFEFHHTQPELDAFIKYILNSNQSATILMENTGHYHYPVLKAFREAGLPVCMVNAYQIKKFGDMDLRKAKTDKKDAVRIARYALEKSYSMEQKYEDLKFLARQYNQRMLTLKTNKVFLLNLLDETMPGITNILPLTTRTPETSLSVLFINRFKSYDHIKKMGKSRFLDAFEKIARKSRNRQTKTYGLAIYEAALRNITTRGENEYTLAAQDQCLELVCESQKAADSIILKMQTLAETLPEYAVLRSMAGVGDRLGPLILAEIGDIRRFHSGKALNAYAGNDAPPYQSGTFESHNRHISKRGNAALRKYCFEVMQALKLTQPQDDPVYLFLLKKEQEGKPYNVAKMAGVNKFLRIYYARAMETLKQQ

SEQ ID NO: 261700 - protein, 359 aa, unidentified
MDGSRSEPKMTAGLDIGDKYSYLCLIDTESGEVVEEGRLRTNPKAFRRRFASEQPMRIAIEAGTHSPWVSRLLEECGHEVLVANARKLRLIYANKRKTDEMDAENLARLARVDPKLLYPLKHRGQECQTHMAIVRSREALVGTRTQLVNHVRGTVKSFGGRLPKCPARSFHKRASEHIPEALLAALGPILEQIGSLTERIRQYDRQLEAISKEHYPETDLLRRVEGIGPLTALTFVLTLEDPHRFEKSRSVGAYLGLVPATDRSGDSDPQKRISKEGDQMLRKLLVSSAHYILGPFGSDSDLRRHGEKIASRGGKNSKKRAAVAVARKLSVLLHRLWVTGEIYDPLYNTRRRAQQGEAA

SEQ ID NO: 261701 - protein, 401 aa, unidentified
MNCVGIDVSKGKSMIAVMRPLGEMVIPPFEVGHTDAELCELSRRLGGLEGETRIVMEATGNYHLPVASFLYDSGFYVSVVNAMLVHGYGNNNLRRVKTDKRDAVKLANYGLDHWLTLPRYIPEDEVRLMLKTTYRQYQQCTKVQTMLKNNLISLLDTAFPDANRLFTSPTRADGSEKWVDFISTFWHCECVCGLSEKAFTAKYQKWCKRHGYNFSQDKALDIYASACGHFSVMPKNDTTKILVEQAVSQLQATSAALAALRNEMQSLAASLPEYPIVMGMFGVGPALGPQLMAEIGDVRRFHSKKALVAFAGIDAPPYQSGQMEIRSRSISKRGSAVLRRTLFLVMSAILRCSPADEPVYQFMDRKRTEGKPYRVYMMASANKFLRIYYATVKQYLDSLEA

SEQ ID NO: 261702 - protein, 356 aa, unidentified
MQTQVTKKIDFKGKDLFIGLDVHKKSWSVTILVEGMEHRTFTQPPDPRILYAYLQKMFPGGTYYSAYEAGFCGYGIHRTLNDLGIKNIVINAADIPTSQKDQIHKLDPVDSRKIARALEKGLLRAIHIFDRDREELRSLNRTRFYLMRDLRRSKNRIKSFLQYYGIPIPPEYDNNLWTLKYIAWLKQIKMKTSSGQDAFSNLISSYEYHREQILILSRQIRIRMREYDNELYKLLKTVSGIGPLTSSALITELGDINRFPHINHLSSFVGLVPRVKQSGETSYNAGMTFRCNEYLRTLLIESSWQAIRLDPALMQYYHQHVINNKGQKVIIKVARKLLNRIRYVMRNRQPYVTGVA

SEQ ID NO: 261703 - protein, 344 aa, unidentified
MTKYAALDVSMEQTAICVVDENGRKIVEGKVPTDPGAIAAWLAEKVGDVARVGMETGPLAVWLWNELVMRGMPVVCLDARHANAALSMMPNKTDRHDAAGLAQIVRTGWYKEVRIKSHGAYVVRALLSARDALVGIRGKIENEIRGLLKTFGVMFGKKVGGFTRRAEEIVAGELTAAPEIKRVVEVLLEARRSILDRLKTLDARVHAVAKQNAMVRLFMTAPGVGAVIALSVASAYDDASRFRRSSSAGAYLGLTPRRYESGEVSRNGRISRRGNKLTRTHLYEAANVILTRQTTFSSLKVWGLRIAKASGFKKAKVAVARKLAVILHAMWKTNKPFRFGAAAA

SEQ ID NO: 261704 - protein, 436 aa, unidentified
MRGCRCSMIMGFTKPIEHFNLQRKKVITMNTLYVGIDVSSKSNVVYLMLPNGDKHSNFSVANSHEGSTLLVKKIYSALTSHSLDTVLIGLEATSVYGDNLVYFLREDATLAPFNRKIHVLNPKQVKKFHDTYNDLPKNDYVDSFVIADCLRFGRINKEVYMGEYRYKALQNLTRARFFAVQNLVKEKQRFMNVLFKKYSTMTQEKVFSDAFSTTALAVYDEFESAEALANMDLHELTDFIIEKGKNRFPDPDAVAKAIQKAARSSYRLPKTVNDSVNQVLSISITSMKALESQIKEFDKAIIALMELLPNVLISIPGIGPVYSAGIMAEIGDINRFDNQASLAKYAGLAWKQHQSGGFEAEVTRLIPSGNRFLKYYLCESAFSLVRCDKKYSDFYHLKYKEINRCQHKRALALTARKFVRLVFRLLKDNRLYCPAK

SEQ ID NO: 261705 - protein, 463 aa, unidentified
MSKNHRITKTGRGARQRAVIEGSLQLLRQHAAGIDVGSEEHYVSVPPDRDPEPVRHFGCYTSDLHRMAEWLKSCRIETVAMEATGVYWVPVFEILEEYGFEVYLVDARQTKNVSGRKTDVVDCQWIRQLHSYGLWTAASRPEQEIAAMRAYWRHRQGLVESCSRQIHLMQKALEQMNVQLHKAVSDVAGMTGMSIIRRIVAGERDPVALAKLRQKGVKRSEAEIAEALNGNYRGEHVFALAQALESYDFFQGQMERCDRQIQQCMAGIASKTSPTESEQVLRRRWKNQPHFDLRAELHRICGVDLTRIESIDAVTAQTVISECGTDMARFPNDKHFASWLCVCPNNKKTGGRIRSTRTRGHRRNRAADALRRAAQSLHHSKSALGAEYRRKRARLGAPKAITAMAHKLARLIYRLLKYGEAYVSEGLEQYEARHRERALRGLRHQAQNLGYLLVVQATGEVVS

SEQ ID NO: 261706 - protein, 347 aa, unidentified
MRFYTKPHQFYCGIDLHARTMYVCILNQDGEIVLHRNMKTSPETLLRNIAPYRADIVVAVECMFTWYWLADLCAQEGIPFVLGHALYMKAIHGGKAKNDKIDAHKIAVLLRGGMLPQAYVYPAAMRATRDLLRRRTHLMRKRAELLAHIQNTNSQYNLPEIGKKIAYKANRDGVAERFPDPAVQKSIEVDLALIGHYDQLLRDVELSILKTAKQHNAQTLYLLRTVPGIGEILSLVLLYEIHDITRFPRVQDFLSYCRLVKCTKESAGKRYGTSGTKIGNAHLTWAFSEAAVLFLRANPAGQKYLTKLEKKHGSGKALALLGQKLGRTVYYMLQRQTAFDMGKFLNG

SEQ ID NO: 261707 - protein, 350 aa, unidentified
MLHAGLDLSRRRLDVCVLSDEGELVEEVPAPPDVEGLRYLVGKVARHRQPVRGVIESMTGARFIHDTLEQLGWDVLVADAQKVKGLAPLACKTDRVDAMVLAVLSHRDLVPAIWLPDPRVRSEREQARFRLHLVKHKSILKHRIHSTLMTFGHPCPVTDLFGLEGRKLLQKLEIPPPWRETLDASLYMIDYLEAEIDQIERELRATGADHQYVPLLLTVPGIGWVPAFTIAAEIGDITRFPSAKKLVGYTGLCPRVRQSGESDRRGPLSKQGPKYLRWAMLEATMHASRHPAYSERYQRNNQRLGKQRGARVAQVDLARKLTEAIWHMLTHDQSFDPAAAAGGAARRLAA

SEQ ID NO: 261708 - protein, 309 aa, unidentified
MKVSTLGIDLAKNVFQLHGVGCNGQTVLKKKLTRDKFLPFLMQLEPCLIGMEACASSHHFARVLRQYGHEVKLIPPQYVKPYVKTNKTDAADAEAICEAVARPNMRFVQIKTAEQQAILVLHTERNILIRERTACANSMRAILAEFGIIMPRTLSQLYKKIPEILEEYDNELSPFVRCSVARQLEHLQGVEDQITLIEQELSRWAKTQPACQRVMKVPGVGLMTATYLVASVGNGQQFHSAKQFAAWLGLVPREFSSGGKQRLGRISKRGDRYFRYLLVHGARAVAAVIERHKDNMPWLYRLLNKRPIT

SEQ ID NO: 261709 - protein, 364 aa, unidentified
MDEFTHIGLDVHKDTIAVAVLRSGTTTCDERVIPNTPEAMRKLLARFPDQAALRTCYEAGPTGYDTHRLISSLGIACEVIAPSLIPRRSGMRVKTDRIDARNLARLQRAGELTAVRVPMPAEEALRDLVRAREDLKNDRRIARQRIRSFLLRYGKRYPSPGARWSFRFEVWMRALRFDEPASQAAFDHLVSAYSVRDAQLAAIDKQIEEAASVDPLAGAVARLRAFRGIDTLTAVTLLTETCDFQRFATAGSFMAFTGLVPAEHSSGASRHQGSITKSGNAHVRRVLVEAAWAYRHRPAVRGAHAKRLEGQPPDVAAYSWAAQCRLNSTYRKLAARKGPNKAVVAVARELSGFVWGAMTERMAV

SEQ ID NO: 261710 - protein, 344 aa, unidentified
MNKLSRVGIDLAKNVFQLHGVDRHGKAVWRQRLARNNWLKVLIKTAGSDCEIGMEACAGAHHWARQLQAQGFTVKLIAPQFVKPYVKSNKNDANDAEAVCEAMSRPNMRFVAVKTVAQQDIQAAHRIRSELISQRTAKANQIRGLVAEYGLVASQQLARLRAVVPVWLEDAENGLTDRFRKLLSGLWDDLKTLDRRVAELDYEIKMIAQSDPVANRLQQLRGVGPLVATALLATVGNAEQFANGRQMAASLGLTPKQHSSGGKDRLLSISKRGDAHLRSILIHGARSVIRTAKPKDDRLSRWVTSLAERRHPNVAAVALANKTARIAWAMLRHGMDYEPDYIAA

SEQ ID NO: 261711 - protein, 364 aa, unidentified
MVIIGCDFHPSGQQVFGLDRESGEVVADRWIAHGGEGVDQFYAQLPAGAVVGVEASGNLLWFERKLAEYGHRLRIGDAAQIRAQETRRQKHDRRDAELIAGLLVRDQFPDLRWRPSLAERDPRQLLIHRDKLVRMRTQVKNQLQHIAMNQGQQKKRQLWSKSGRELLEQLPLEPWTARRRDDLLRWLDQRNQECASLDEAVQQAAEANPEARRLMTHPGVGPVISLGFVLTIGPMARFQRSRELVSYLGLNPSEQSSGERRRLGRISKQGSVFLRRLLIQGAQTAVRGDAELARQYRRLAAKKHRAVAKVMVARKLAVRMFWMQKTQQTYPELVRTRGSSSHFGVRKTDRLSERPASPQGIALS

SEQ ID NO: 261712 - protein, 377 aa, unidentified
MSNVRFIGLDVHAETIAVAVAEPDGEVRSLGVIPNRSESIRKLVKKLGPAAQLRVCYEAGPTGYVLYWELTALGVTCEVVAPTLVPVKAGDRVKTDRRDALKLARSYRAGDLTPVWVPDAEHEALRDLVRAREAAKKDQLRARHRLSKFLLRQGRRPPTVVKAWTQSYLTWVKSAVHFEHQAQEATLLDYIHEVDHVAARIERLERAIDEAVKTAPVPMRAVIAALQALRGIALVSAVTIAAEVGDLSRFVKPRQLMGYSGAVASEDSSGSRIRRGAITKTGNAHLRRIIVEAAWAYRHRPSVGPTLRKRHAPLDEEVIAIAWKAQHRLHGRYRSLTARGKTKQSVVTAVGRELLGFIWAIGMTVNAKQHHAPRKAA

SEQ ID NO: 261713 - protein, 383 aa, unidentified
MSKVSGNNRLIIHSNHYFMIDSVMSYCVGMDVDKNTFKACMVARLTSGQTLVKASKTFPNKEIGFKELLRWKEKYYKHQVACSFLMEATGVYHEHLAYFLYQKDQCVHIVLANKAKRYIQSLGIRSKNDKIDAQGLAIMGVQQCLEQWKPISLALYSLRSLTRQVESLQNSKTVFKNQLEAASHSAFADKSVIKSLKSIIKKIDKEILACQKKVEKYIVEDQELNSKYKLFANLKGLGLMTFAVIVAETGGFELFKSQSQLVCYTGYDVVQNDSGKRKGRTKISKKGNTHIRRILHMAALNMVRYDIPVFKNLYERIYDRTKVKMKGYAAIQRKLLCLVYSLWKRNEAFELDHQTKNTSLEKEPKHLFSVSSERTENKKAVPV

SEQ ID NO: 261714 - protein, 405 aa, unidentified
MNAVGIDVAKGKSMVAALRPLGEVAIPPREIIHNTTALKRLGTHILALGADTRVVMEATGRYHEPVAQMLCEMGIFVTVLNPLLIKQSGGGSVRKVKSDKADALKIAKYGLDNWNDLRQHTIMDTMRQQLKLISRQYNLYMKTQVALQNNLISLLDKTFPGANKLFSSPERADGSRKWVDFVATFWHADCARGTSGKAFAGRYQKWCKRRGYHFSVSKAEEIYAAALEHFTTLSKNDHTKLLITTAASELASSLKMLVALRVEMIRIAQQLPEYDTVLAMYGVGEITAAQLMAELGDVRRFANRGSIVAFAGIDPEVNESGSYQKQSTKATKRGSPHLRRTLFQIMMAYNMHSPLDEPVYRFLDKKRAEGKPYYVYMTAAANKFLRIYHARVKECLNALDGVSEA

SEQ ID NO: 261715 - protein, 316 aa, unidentified
MTQIKYFVGIDIASRTFTAAAGAMPWKVICTPQEFENEEDGFQVFVNWLIQHQLQADHTIICMEATGVYGECLAYFLHVKGYPVCVEPPLKVKRAFKPNGPKTDAVDSLQIAEYAGRYFDQLTWWQPNSDVLEQIKVLLATREQFVVQRTTHKNALQAIQRKVVKTPFAEQAHLQMMEQLKKQIHAIEQEIRRLIESDSTFKPMLLLLLSIPGVGFLLAAHLIVLSQVSLNSRQIASYLGVAPNEYSSGSSVYKHATSRHFGPQTIRKLLYLAACSVRTHRSEFRTYFQRKTAEGKSARLVLNNIENKLLKIICAV

SEQ ID NO: 261716 - protein, 335 aa, unidentified
MAIIRVGIDTSKHLFQLHGVDESEQPVLRRQVRRGELLKVFAQLAPTRVGLEACGGSHHWGRELARLGHEVVLLPPQYVKPYVKRGKHDAADAAAICEAMSRPGMRFVAVKSAEPQAMLMLLGVRDLLVKQRTMLINAMRGHAAEFGVISAKGPSKVGDLLPRAAAAGVPALAQEMLALLAGQVEAIAARLKELEAKLIAWHRQDPVSQCLVTQPGIGPIAAVSFALKVPDPNGFRSGRHFAAWIGITPKENATAGRHRPGKISRQGDEGLRKLLVLGATAVIRAAKPGRAAPWLLQLLARKPKKLAALALANKMTRTLWAMMVSGEVYRRPMPA

SEQ ID NO: 261717 - protein, 381 aa, unidentified
MTNATHGNQTSQVTVYAAIELSKKSWVISIARPDRDQPSIHRITGGNFSELVGRLRTAAKNFGRILVCYEAGYDGFWLARLLTKVGIECRVLDPASLQVNRRARRVKTDRIDALALLRALIAIDRGDRHVCAVVRVPTLEEEDARRSHRERQRLVRERTAHINRIKGLLFGQGIRGVEPKLRLSRIDFAALTTSEGHPIPDRLRRELEREYVRLNLVEQQLRTVEKERDTADRQDPAVDRKRQMLCALRGIGQASAAILAREVFVRSFANRRQLGSYLGLTPSAYDSGSTSRCQGISKAGNSWGRRVLIEIAWLWQKYQSGSSLSRWYEARAAGQSPRIRRIMLVALARKLAVALWRYVETGLIPDGAVMSDAIVPRATAA

SEQ ID NO: 261718 - protein, 358 aa, unidentified
MQRNKKTFKGQNIYIGIDVHKKNWQVAVITESGYTERISTAADAKALFKFLKSHYPDGNYRAVYESGFSGFATHYAISELGVSCVVAHAADIPSSQYELTMKSDRIDAEKLARALRAGLVRGIYVRPKDNLDDRGVLRIRKTIQIQVGGYKTRIKHLLHSNGVELPERFSRSGTHWSRAFIAWLREDVRLLSDTRRSLDLLLLQVETLRANLLEATRRVRALSMTDRYREDCALLMGIPGIGLTVAMTILTEVCDIGRFGNERQFASYLGLVPTSHSSGERVSHGEMTFRGNKHIGPLLVEASWVLIVRDRELGRMYTEYRWRMAGQKAIIKIARKLSNIIFAVLKTRKAYEPYRRDA

SEQ ID NO: 261719 - protein, 400 aa, unidentified
MLSIGIDVSKGKSTVCGMKPGGEIVYTPFEIQHTREGMSELLSLLRGSGEEVRVVLESTGSYHCPVVAALLENGIFVSVVNSLRMKRFCSQSIRRVKTDQIDAMQIALYGLAYWQELQPTRLPENTYRELQLLARQYYQMTSILIKAKVDFNALCDQVLPGMQELMNDHAGRHKLSDFVLRYRHTTHILEMGETRFRKDYCKWAEKKGYRNRERMAALIFATAQNGIPVLPNAPSTQIVITEAIRVLHTVEASRDAILTQMQALAKTLPEYSLVREMPCIGDTLAPRLIAEIGDVRRFHSKRALIAYAGIDAPPYQSGKFRANNRHISKRGNRYLRKTGYEVMQSYVMHKPANDPIFTFIEKKRGEGKSGKLAMVAGLNKFLRVYYGKVTELYRSLPAIE

SEQ ID NO: 261720 - protein, 352 aa, unidentified
MNMKTSTANAGLYGGLDLHGDNVFCALLDAGRNVVFEKRLPNDIDTIRLALEPYKERIRELAVESTYNWYWLVDGLRRLGYAVRLANPARMQENIGLKHANDKTDARYIARQLTFGCLPEGYIYPEETRGVRDLLRHRMHMVSHRIAESNRLAALAARQTGRKPRIAKTAPKELLGLFDGHAPSVAIAEAGLRHIEYLDGEIKALERSVAAQIPDKAAYENLTTVPGIGKILASCILLETGPVARFKSAGHYASYCRAVPSEHTSNGKKKGEGNGKCGNKYLAWAFVEAANFAVRFDPAINAWFQRKQARSRGLRVVAVKALANKLAKACFFILRDNAPFDAARLVGKPAPA

SEQ ID NO: 261721 - protein, 388 aa, unidentified
MNYMGIDISKYKHDCFVLSDFGEVVNEGFSFANDAEGFRKLEQELHLYGKGNVRIGLESTGNYGINLKLFLEKIGFDFMEINPLLIKEYIKGNSLRRTKTDKLDSKAIAGYLLEKGYRPHRTEFYSKFALKQLTRLRSRLVSIRSSYLVRMTNVLDCIFPEFKPLFAGKFSVTALYILAHYPTPEAISNMNSRSYDILRRKSRGSFSMDKFVTLKEMARNTVGVYEKCYGVELETLLDLHSQIDCKIDEVEAEITQIVEELNPPTLSIKGVGTASAAVIISEFGDFSRFDNPNQMLSFAGLEPGYFQSGTSEHNGHMVKRGSPHLRNALLSCCRPLRLHNETFAVYYRKKISEGKHESVALSHMAKKLVRLIFALETKGILFDPEKLR

SEQ ID NO: 261722 - protein, 391 aa, unidentified
MIFVGIDVAKDKHDCFITNSDGEVLFNAFTISNNLEGFDNLYLKIKSVMKDVSKVKVGLEATGHYSYNLLGYLIDKGLAAYVINPLHTNLYRKSLSLRQTKTDKVDARTIASMLMSDVNLKSYSDTSYHNEELKSLTRYRFDKVKERSALKVSISRLVCILFPELEKLVPTLHMVSVYALLYEYPGAKHVSSAHLTRLSNLLEDASKVHYRKDVAITIRDVARRSIGSNIPAKSLELKHTIRLIQELDSEIDEIEDQIKIIMDNINSPILGIPGISYRMGAMIIAEIGDFSRFDSPDKILAYAGLSPTTYQSGQLNSSHSRMEKRGSRYLRYALFNATKYVCHWDPTFALYLAKKRAEGKHYNVAMSHAAKKLVRVIYQLEKSKQQYIKAV

SEQ ID NO: 261723 - protein, 343 aa, unidentified
MQQQLSVVGIDLAKRVFHVAGMDDKGKIVLRKRLTREALLPFITRLSPVVIGMEACGGAHYWARRFREHGHTVKLIAPQFVKPYVKSNKNDPADAEAICEAMTRPTRRFVPIKEVEQQDLQALHRARERVVKARTALVNEIRGFLGEYGIVLPQSVTKFRSGFLATLEAERAKLTALGQELFGQLYEEFGALEKRLAYYTAKLEAISAAHPVCQRLETIPGVGPLTATAMVAAVSDVTHFQHGRQCAAWIGLVPRQHSTGGKPRLLGMSKRGDVYLRTLLIHGARATLRWIGLKTDRRSQWVRGLIDRRGKNKAAVALANKNARIAWVLLKTDAVYIAEDAAA

SEQ ID NO: 261724 - protein, 390 aa, unidentified
MAPGDKIIRRPFDVKHTKEELQPLVDEIRVQAKYDEIKVVMESTGVYHLSIAYFLQQNGIFVSVVNALKVANFNKAENFRHTKTDSIDSTNIARYGIAYWAKLPQFDLNGDKYFLLKRLCDAYLNFSEERSRILLQLQSQLEQTMPGIFDLFGGFDINSGKDKLLDFLEKYCHIEDIIAKSEAEFVASYREWAKEKGYRSNESKAATIYAQAKNGIPSIPNNPIVRETIMWYVGLLRRADEALMASLTRMEDIAKDLPEYELVGEMGGVGRVTRVALIAQIGDVRRFKNKHSLICFAGLTPSIHESGKFRASQNHIVKKGPARLRKVLYQVMMSLVMHKIPKDDAVYRFIKKKEAEGKYKKVAKVAGMAKFLRIYYGRVMHLYRDLGLAA

SEQ ID NO: 261725 - protein, 415 aa, unidentified
MKVVFPTCCGVDVHKTFLVATIITTPADSVQPHYQKKRFSTFNSDLNRFADWLLEHNCLDVCMESTGKYWVPVFNILEKRGIRVVIANPKWVKAVKGNKDDTKDSKWIGDLFRIGLVKSSFIPELNIRILREFLRYRYKLVSMKSSEKNRFQNAFTVCNVALDSVVSDMFGKSATAITDYLTSDKSFDPDHCVSLLQRSLKKKAEKVLESIEGYSISDEQKARIKIIREHYDFVEKLVAKVDTCVNEMVEKYEGEINLLCTIPGIDRRSAITIISEIGTDMGQFGSSKRLCCWAGLTPGNNESAGKKKSVHISRAGVYLKPALVQVAHAAVKDKANPYYALKYERIAKRRGKKRAIIAIARMILTAIYTMLCTGEVWNPADLFKIDMPEHLKEQQLAKAIKQATRFLEKQGLTVA

SEQ ID NO: 261726 - protein, 426 aa, unidentified
MNERGGSRQHKKRCWAGLDWGGSGHAVSVVDDRRRVLASFAVGASLEDLESLSQRLRACGEVAGVAVEATRHPVVGHLLSAGFTVYAVNPKQSKNWRGCASVSASKSDARDGLVLAVELAGRHESLRPLRREDPAVAELAGLCEKVRDLVDERTALVQRLKATLGQYYPGALCFFSDWTSPVAWRFVKRFPRPKTLAQARKQTLCAFLKSNRVGLRPVWLERIEARGDAARWPLPADSEALEAVALATVAQLLALQPHIDKMDRLIAEQSKKVPQTTLMKSLPGAGKRLAPALAAMAALTTTAKRQNLEALRCVSGVAPVEDKSGKRQRVRARRRCNRHWRDVLYLFAHCSINCCDWARAFYDMHREQGDNHAGALRKLADKWLKIIHHMVEANEPYSDVRHVQSLRKHASWFPPEPGGKPGGKLH

SEQ ID NO: 261727 - protein, 358 aa, unidentified
MNNLQTENNEVILGVDTHLDVHVGAVINSSGNLLGTRAVSVSTHGYLDLLEWAESLGKLKQAGVEGTGTYGAGLCRFLTSRGIVIIEVNRPDRSNRRRQGKSDPLNAGNAARAVHSGTATATPKKQHGACEAIRIISVARRSAVKAKTQAMNQIRGILVSGPQDIRELVWKTKPHDCAKACIEMISSDSSDLLESMTETLKLLGQRWLILTDELALLDKKLDKLTNEHCKQLRTRMGVGPYTAGILVTVAGDNPERLRNEAALAALCGVNPLPLPASSGKTIRHRLNRGGNREANNALWTIALVRARSDPRTRLYVARRTAEGLTTKEIYRCLKRYIVRELYPLILSDLKRINFSGLT

SEQ ID NO: 261728 - protein, 421 aa, unidentified
MLYKIAAIDIHKKVLMVVISSMAAEVEDATGAAVEFEYRKFGTGASERNHLVGWLQQHQVREVVMESTAQYWKPVWLDLEPHFPKLHLAQAQSNRAPKGRKNDFQDAKRLGRRLLAGELMLSFVPEPEQRAWRLMTRGRLQLVRERVRLQSQVECLLEEARIKLSSVISDLFGVSGRRILQALSKGETDAVKLAELGDDRLRCTKEQLADALAGPPEPGHLQLLKLHMERLKLLDEQIDQLSQMSATALKKHEDAVVRLAKVPGLGVESSQQMIAEVGVDAEAFSSAGEFASWVGVCPGSDVSAEENHSSRCPKGNRYVRRLLAEAAHAAVKKKGSHFQNVFRRFLPKLGYKGAIAVVAHRLARLVWKILHDGVSYIEQGQDTNPRAKKRRAQKLAQALRKLGYSVTLTEVNPGPVPEATS

SEQ ID NO: 261729 - protein, 505 aa, unidentified
MAAPTTGHQPASSLPPTGQPAQAQAHRQAYNRRKTRAKVRSEAFRQREAAQVEALPVQHPHAAGIDIGSRSHWVCVGFTTDAASCLIREFPAHTAGLKAIAAFLREHQVTSIALESTGIYWVPLYELLQAEGFEVLLVDPSYSHQLRGRPKTDRRDCQWIYRLHSVGLLAAAFRPDEQTCQLRAYLRQRGNLVRQASRHVQHMQKALEQMNLKLTEVLSDITGKTGRAILRAILRGTRAPEKLARYRDKGCKASEAEMAQALTGTYREEHLFELKLAYEAWQFTLGQVDKVDGQVALQLGRMKGDRALPPLKPKARPKRRANSPRFDVRAALYYVVGLDLTEIEGVSELTALTVISEIGPGVSQFATVKKFCSWLGLCPNWQKTGGQIKSSRTRRGVNRAAQALRLAAQSLHHSQGALGGFLRRMKGRLGTQPALTATAHKLARIVYLALRHGLTYVRQTQEEYEAQMKEKQLKALRRKARQLGLEVVEKPSVSGAPAAAGPAQG

SEQ ID NO: 261730 - protein, 463 aa, unidentified
MAARKPKRMGAQTVEDEDYQLRYERVAGIDVAKGSAMVCLRLPPGPGKARRTSRTWEVTARVPDIEALAAELKAAGVERVSMESTSDYWRIWLVVLEGAGLDVQLVNSSQARNLPGRPKTDKADAQWIARLTEMGLLRGSFVPPPEIRALRQYTRQLVHLSQDRTRYWQRLEKLLESALCKLTSVVSGLAGSASCLAMLEAMIAGERDPQVLAGYARGPMKTKHAALVKAFTGMQFGPEHAFSASSDLRMIKMLDAEITGLEQQVRDHLAAIPAAWGTDADGVTGPGAGTGPDAAVLPAVDRLAEIPGVGPATAAGLIAEIGLDMPRFPTPHALVSWVGMAPVPNQSGPRKGRGKKGHGSSYARRYAGQAGNGAARTDTFLGQRHRRIRSRPGGGGWKKANVAVGRSILIIVWHLLKDPATRFTDLGPDHYARHTDTNRKARNHKRQLEALGYDVILTPREAA

SEQ ID NO: 261731 - protein, 411 aa, unidentified
MEVFVARCCGLDVHKRVVVACVRLAEATGCTEVTQSFGTTVAALRELAAWLASYGCTHVAMESTGVYWRPVYQVLEGLFELWVVNAQHLKQVPGRKTDVQDAAWIAKLMQHGLLRPSFVPTGLQRALRDLTRSRARRVQERVRVLNRLQKVLELANIKLASVLSDIAGKTGRAILQGLVDGVTDVTELANRARGRARAKRAELAEAVAGTMTATQRLVLQELLTQLEEVDASIGRLGTAVAAHTTDWTAAIARLQTIPGVGLRLAEVLLAEVGIERLTERFPTAAQLVSWAGLCPGLLESAGKRRPTRTRPGNLWLKQALIEAANAAARTDTYLGAQYRQIARRRGRKKAIVAVAHSILVIAYYVLTREEEYKDLGANYFDERDREAVTRRMVRRLQSLGYDVTLAKPEAA

SEQ ID NO: 261732 - protein, 353 aa, unidentified
MDKYIGIDVHAASCTIAVVDARGKQTGSHVVATNGQEIVECLRAIPGQRHVCFEEGTQSGWLYEILEPHAVEVVVAGVGAGSRGPKDDKRDAFGLAEDLRQGAIKTRVFKNGGPYKALRELARTHRMVVRDVVRTKNRIKSMYRSRGVAVAGKSVYSSAGREPWQEQLPEACRGPVRTLYAELDALEEVRNDAEKALVQEARKFPITKLLSTCPGLGPMRAAQLVPIVVSPHRFRTKRQFWSYCGLGIVMRSSSDWVRDKNGQWQRAQVQQTRGLNLTHNYHLKAIFKGAATTVIAQHPDEPLNAAYQRWLAAGTKPNLAKVSLARKIATIALVMWKTEEEYDSSKHSKTVSP

SEQ ID NO: 261733 - protein, 357 aa, unidentified
MKMVGCDLHARQQTIAMVDTKTGEFTEKTLSHEGDAVRAFYAALEGPVVVGIEATGSMQWFLELLEELGIQCRVGHPAEIRAKETRKQKHDRRDARLIWELLIEDRFPEIGMPSSEERDLRTLLRDRHQWVKMRARLQHTLQAIALNHALRQGHALWSAGGQRPLEALPLPPYTSQRRDELLALYAQLQKRIQELDQEVEGQARQRPQARRLLTHPGVGPVTALATDAFLGDPSRFATANQVASYIGMIPCEHTSGKRQRLGKMSKQGNALLRYLWTEAAMSTVRKDLELQRFYRRKLIQKGMGKARIATARKLGIRLWIMMRDQIDYEEFCRRGKLRQTGKAHAGMPDFNSGPAPQ

SEQ ID NO: 261734 - protein, 461 aa, unidentified
MPDGGGENSSPKRTKQIEGLPVIRRNVAGIDLGSERHWVCAPVAGSISREVADFGATTPELIRMTKWLQACGVESVAMESTGVYWIAPHEVLEAGGLEVLLVDTRQLARVPGRDKKTDPSDCEWIQRLHSCGLLRGSFRPREEVCMLRTLVRDKANLVAECSDWLRRMQKSLDQMNVRVHRAVSHLDGITGMAILRAIAEGERDTRKLAKLRDTRCHKSEEEIAEQLSGHWREDHLFSLRQSLKMYDAIQQRLADYDREILQRLAAMQREEFRQQPPPPVKNPHKAKNMKKRGEEPMREALFRMSGVDLTGIDAIGVETVQVVLSEYGPDLSRFPTEKQFVSHVTLIPHKPMSGGKPVRKKRRSSASTRVAAALRMAALSLRNSATALGAYYRKIARRLNGDVAVFATARKLATLIYRLLRWGQPYVDEGAEAFERRYQETRLKTLKAKAKDLGYQLVASN

SEQ ID NO: 261735 - protein, 371 aa, unidentified
MKTGSKLSEDEIQLYNAFVASKKAQPVAVDLAARVFQVCYIDKDTGRLYNRKLSRADFFKFITEHKDKVIWGFEACGACNFLARKVAEHGHDSKIMPAASIKSFLGIDKSDKIDAMGIFRALITPTIREIKPRSVGNQMLLWLFTAREQLNKQMVQTINVAHAILYEFGTVADKAYTKNVKVLKDGFAEMRDKYRQLPEYLHIELTLNAVEEQLDAISKKLEQIDDRLETIGKTDSVCRTLCSIPGIGPKTAAAFVAYAGDIGRFPSSRHFCSFIGVTPRITGTGGKIITLGLRKSGIKTLKRMLYMCAFSYFGYSVRKGVMSSWLKSRLNRKGYSKRKIICAIMNRLCRIAYSVMKNGKTFEPGRCSMIA

SEQ ID NO: 261736 - protein, 351 aa, unidentified
MMIIGVDYHPSFQTIAFLMEETGECGEQELNHSDGQAEKFYRDLKQRGICVRVGMEATGYSRWFERLLAELGFEVWMGDPAEIKAKRVKKQKFDREDARLLRRLMLENNFPQIWVPGPENRDLRQLLWHRHRLVQMRTRIMNQLQALAMNEGYRWKKKLFSEQGRAQLEKLALAPWASRRRQELLELLDRMNPTIEELTAAVEQEARKRPDVLRLMTHPGVGPLTALAFVLIIGTWERFPRGKQIGNYVGMIPSEDSSAGKQRLGHISKQGNSLLRFLLVEAAQAAARSHPDGRRRYMHLAMRRHKSIAKVAMGRRLAVRLYWMWRNGCEYSQSLKFGSYAGQLGTGHGVK

SEQ ID NO: 261737 - protein, 529 aa, unidentified
MAALSSRKRGRKARPDVLQKPRGVVHPRVQAVGPEHFGVVAVDCAKARSKWMLADFYGNVLVPPTVVEHNRPGFDAAVVALKQAVEQRQVADLLVAVERTGRYHHPVQRAFAAAGFEVRTVHPFTTKQFRQPADPGNKTDDTDLAAITRAAINGFALAEPALDESWRQLQLLTRHRRDLVAKASKLCCQIKEHLDAALPGYAACFPALWEHPAAMTLALTVGGAGAFRRAGRGALRALLDEAQVRFQDRTLGRVLEWAESAGPPDVAASHHRRVAADLEADRRRKEQEIRGLEREIASLLAATPYVLLMSIPGVNVVSAAEYAAEMGPISHYANARCITGRAGLYPSRYQSDQVDRSGPLVRCANRRLRFAILQVADNLVTCNHYFAKLAAVWRERKDDPRLVRVRVAMRFCRISFQMVAGGKVYDHPAARQRDYVLQKLVAFHHAHETPALAVQADLRRAAGQLPAGEHAAEAKPLQEELSMIQAGRRRGPQPLGEILPAVLAALGAAVAPAVPPVVQSPPSGTSGPT

SEQ ID NO: 261738 - protein, 327 aa, unidentified
MIEHYIGVDLHQAFFQACAVDGAGTRLWEDRFPRTDAGMSALIARCDRRTAMAVEASTPTWHFADAIGDRVDDLRIVDPIKTKLKAGYAAKTDRLDARRLADALRRDSVVGIYYPPLAIRELRELCRYRYAVVQVRTAVINRLRAVLLRHGVVDGRRLARTRSDAWLATLTLPPRATASIEGLRRLLTAVRTEAAAADREVLTAAAVDPVALSLQAIPGLGPVLSLMVRAEIGRLERFPTPGHLASYAGLVPRVDASARRIRYGRITRRGSPWLRWALVEAAIHGTRRRDRIGRWGRGLAVRKGALKARVALARRLCEDIFRHWPIG

SEQ ID NO: 261739 - protein, 428 aa, unidentified
MNNFKQNQKIAQVKNCTLVVGIDIGSTKHFARAFDWRGTELGKVCIFSNSREGFNALSAWMQRISAKHNKSNVIVGIEPTGHYWFNLDAYLEDEGILLVMVNPYAVKQSKELDDNSPSKNDYKDPKVIAKLVIDGRYSKPYIPEGVYADLRIMVSNRMRVNKELGAIRNRLARWFSIYFPEYCNVFGDYEAIGSMLVLNVACTPQKILELGPEGVNNIWRAAKLRAVGMKRATTLCETAKASIGQRTSAVGAEYEMKILLQDYAYKKAQYDAILEEITRLCNEIPESKQMLAIKGIGILTVSGFLAEAGDLRRFESPRQIQKLAGLSLRENSSGKHKGQTTISKRGRSRLRAVLFNAAIPMVAHNAEFSALHNYYTTRANNALKKKQSIIAICCKLIRVFYAIFTKHVAYDGQKLLSDIHRNFEPQIA

SEQ ID NO: 261740 - protein, 314 aa, unidentified
MSSFTCYLGVDVSKDILVVASQNRRWQFANTKEGHRKFIVQIQKLSASGHVVCESTGSYHLPMCLALQEAGIAFTIANAARIHYFGLSEGIIAKNDPIDAELIARFAQAKRPPADPPLCREQLALSENVTHRQQLVEMIKVLRTHRQQVLHAALVAEIDKSIVALEKRLAALERQLRAKIDAHPLWKAKLALLTKTKGVGFVTALTLLAKMPELGTLNRGQCAALAGLAPYDNDSGKHAGKRTIRGGRQQVRTALYMAALSAATSNPILKTFYQRLLAQKKLFKVAITAVMRKLLLHLNTLLKTPTPSPQTAPS

SEQ ID NO: 261741 - protein, 331 aa, unidentified
MADAKRFVGIDVAKAQLDVALGPKGERFAVANDERGISALLKRLEPADLVIIEATGGLEVPVASALAMAGIGVAVVNPRQVRDFARATGQLAKTDALDAQVLVRFGEAVKPQLRALPDAQAQALEALVNRRRQLVEMLTAEKNRRANSPQVIHKSIDEHIRWLEKRLAGFDDELAGLVRETPIWRERDELLRSVPGVGKVLSVTLLAHLPELGALNRKQIAALAGLAPFNRDSGSLRGSRCIWGGRAQVRRVLYMAVVSAVRSNPVIKNFYAQLRARGKYPKSALTACMRKLLVILNAMLHNKTHWHATALTSSTSALSPLLGAVSEHGCC

SEQ ID NO: 261742 - protein, 348 aa, unidentified
MNLKRIGLDTSKAVFTLHGVGEDERAVLRRDMRRAEMEAFFAKLPPTHVALEACGGSHHWGRRLAALGHTVQLIPPQYVKPFVRRGKNDRNDAEAISEAAARPDMPSVPVRSAEQQAEAIVLSARELLVRQRTQLVNAVRGHAAEFGIVAAKTISQLPGLLEAVAAAETVPATAKEMLAFLGEQVAQLDDQIAELERRMKQQHKANPVSQLLAEVPGIGPVSALSLALTIDPGRFQSGRHFAAWLGLVPKEHSTGGRQRLGGISRAGNERLRQLLVLGAMAVIRFAKPGSKSASAWLLALLERKPRKLAAVALANKMARIVWAMMATGEAYWGSKKVAAPAAGAAAAA

SEQ ID NO: 261743 - protein, 398 aa, unidentified
MTESSDYESVQVFIGVDVGKDTHHAVAVNRSGKRLFDKALPNDENKLRSLISDLKQHGQILLVVDQPATIGALPVAVARSEGVLVGYLPGLAMRRIADLHAGEAKADARDAAIIAEAARTLPHALRTLKLADEQIAELSMLCGFDDDLAAQTTQVSNRIRGLLTQIHPALERALGPRLDHPAVLALLQRYPSPDKLASRGEKKLATQLCKLAPRLGKRLAADITRALTEQTVVVPGTNAAVVVLPRLALQLITLRKQRDEVALEVEQRVLAHPLYPVLTSMPGVGVRTAARLLTEVACRAFASAAHLAAYAGLAPVTRRSGSSIRGEHPSRRGNKTLKRALFLSAFAALRDPISRAYYTRKMSQGKRHNQALIALARRRCDVLFAMMRDGTFYTPAAS

SEQ ID NO: 261744 - protein, 308 aa, unidentified
MSIFVGIDVGKATLDVACHPRGPGGRFDNSPRGHRALLEALAPQAVQHIAIEATGGYERGILDALAQAGYCVTRLASHRATAYARALGHFAKSDALDAQVLARMAAHVTPQPYQAPSPERAELVELLRCRLQLVGQRDDNRRRLAQTRLAAARHALQAMIDAAKVQIAELDKRIATATTAVAPASRLREVPGVGPVTAATLLAYLPELGRLSRQQIAALVGVAPYVDQSGRRDGPRRVRAGRWIVRRALYMATWSAIRAKGSALGERYRALRARGKVAKVALVACMRSFITAINAMVRDQVGWRSTAP

SEQ ID NO: 261745 - protein, 365 aa, unidentified
METIYIGVDFHARQQTICYLKTETGELVICELKHQDKQKVRAFYAQFGCPVVVGLEASGYSPWFERMLEELGCEVWLGHATEIRRRARWRQKNDRRDAELILDLMLHNEFPRLHRGSVQSREVLRMLRYRQKLIKIRTMSKNSLQAIALQSGLAKGSRLFTKEGQQQLGTAEMSPVMHWQREHWLQLMEPLNQQLLETMAWFKAESKGDVSVMRLRTHPGIGLLTSLCLVHTLQPVSRFSNTRKVAAYAGFDPVERSSAERKCFLGISKAGSRLLRYLVVEAAQTAVRKDEDLKRFYQRLADRRGRPKAKVAAARKLLIRAYIMLRDEIDYAEFRHRAVAARLARRGQGPNVPEVLIGQPASPVK

SEQ ID NO: 261746 - protein, 305 aa, unidentified
MENGKEVHIGVDVSKATLDISDGSRFERIDNDKKAATAFLREYKHCQIRVSAESTGPYHKVLAEVCHKLGIPFFLCDGKQVAYAKKAKGRYVKTDKSDAEFLRTFAADYGIEPHVLLEELTEIKELANLQHLESKHLRSLKTTKDSISTTTSAKELERQIRQSQKTIDRLQDKINELIKLNPTLLEKKKLLCSVSGVGEKIATTLIIFLPELGSCNRRQIASLCGLAPFNNESGTYQGHRYIRGGRSRVRTALFMAALVSIRCNDRYSSMYRKMVHEEHRPAKVALIAIARKLVCYLNSLMKRAG

SEQ ID NO: 261747 - protein, 324 aa, unidentified
MADNMLGIDVSKGKFDVVLMRADGKRRWRTFANRAEGFAALLGWLDKQQALPVHACLEATGTYGLALASFLYQAGQPVSVVNPACIKAFSDSELNRTKTDKVDAGLIARFCRALRPALWQPPAPEVAKLQGLVRRLESLQEMAVKERNRLSVPGLAEPVRESVERTLAMLEEEIKRLRGQLDDHVEGNPALKQQRELLTSIDGIGPTTANLLLGELSGCDFRKAREVAAYAGLVPQERQSGSSVRGRARLSKKGNARLRKALYWPAIVAIRHNPVLAAFARRLREAGKPKMVVIAAVMRKLLHLAFGVLKHQRPFDPNWIARRT

SEQ ID NO: 261748 - protein, 411 aa, unidentified
METLIRRCAGLDVHQASVVACVRCIDEHGELQQETVTFGATTPQLLKLFDWLSRWGVTLVGMESTGVYWKPVYYLLESEFECWLLNAQHLRNVPGRKTDVGDAAWIAQLVAHGLVRPSFVPPKPIRDLRELTRYRKQLLQERSRETQRLQKTLEDAGIKLSSVVSDIKGKSARAMLNALLAGIHDPQVLADLARGQLRKKLPALEQALTGWFGPVHRILVSEILAHLDYIDETVDRLSAAVEKTIAPFASAVDLLDTIPGINRRTAEVVIAEIGADMTRFPSERQLASWAGMCPGNNESAGKHFSGKTRKGSRWLRQTLVESAQVAARTKGTYFSAQYARIKGRHGHKKAIVALGHSLLVVAYYVLLRNEPYVELGDDYFLHRQQKESYRRRLVQQLERMGYEVNLAPKAA

SEQ ID NO: 261749 - protein, 343 aa, unidentified
MSKISIVGLDLAKNVFQVHGVDASGGVVLRRQLRRGAVEKFFAQLPPCTVGVEACGSAHHWARVIGRYGHQVRLMPPAYVKPYVKRNKNDGRDAEAICEAVSRPTMRFVPVKSVEQQATMAVHTTRALLVRQRTMVANSLRAALGELGIVAAQGIEGLRELMAKLEAPHEEVPEIMRGALLLLAKHWQALDADERVLERQIAKAVRSDREARRLMEVPGVGPIIASTVLAKVPDAKVFRSGRDFAAWIGLTGRDHGTGGKHRPGRISKQGDRMLRALLISGASAYLRHQRTRGVSDPWLRDLLARRPYKVVMVALAAKTARILWAMLVKGEPYRDRASASAAA

SEQ ID NO: 261750 - protein, 347 aa, unidentified
MNAYIGLDVSLASTAVCVLDEKGKIVTEAQVASTPEALVSFMGKLEHEIAAIGLEAGPLSHWLHKELTDACFEAVLMETRQVKAALKAMPIKTDRRDAEGIARLLQMGWFRPVHCKSVSSQEMRALLTSRRSVKDALTDMELSLRGVLRNFGLKLGQVSKGRWEARVRELVADNAMLEAAAEPILRARLALRRELAGLEKLVRDLAREDPVCRLLMTMPGVGPVVALTFMSAIDDPERFRRSKDVGPWVGLTPGRDQSGERDIVGRITKCGDAGLRTALYQAATVMLNRCAGPNWLKAWAQRLTKLRGKKRATVALARRIGVVLHRMWRDGTEFRFTREEAMALQTA

SEQ ID NO: 261751 - protein, 351 aa, unidentified
MEHIGIDLGAKHSHVAIVGAGGQKMGPYRVETRKLAGFLRDRPKGMVVMETCTQSRAISTAALAAGHEVRVVPGQLVRQLGVGSRGIKTDDRDATMLAEASARNGDLPGVHLRSTESARIKTLLASRQALVSSRSSVAAAVKSWLRGRLLNVRGRASSKHFADAFRRLAARNDVEVPIEISTMLSAYEDLTGHINTLSAEIEMLAKSDPVTERLMTVPGVGPIVAMAFKSHIDDPKRFSSSSKLGSFLALVPGECTTGGKIKRTSTIRAGCQYMKALLIQAAWSMWRCQPTSPLVTWARVLSERRGKRIAIVALARKMAFVLWAMWKNGESYDPSRASSHQPAAVQTDLAA

SEQ ID NO: 261752 - protein, 340 aa, unidentified
MINNFLGIDISKDRFDVSLSFISNKGKRETRKRSFKNNDHGFQGLLSFLQKHNVEQVKACMEATGCYSEALAEFLHNTGHFVSVVNPACIRFYAKSKLIRQKNDQTDAEIIADYCQRQEPIRWAPPSPELKKLKHLYRCSAALKDELTLVNNHLEKKERLPKEVANAWEYLAMNIKQKIERIKNSLRELLNKHKELLENFQLLLTIPGIGEESAVAILAEVPNIKAFKDARQLAAYAGAIPRNITSGTSVHAKPRLSKSGSRTLCKAMYFLAIVAKNHNPTIMTFCKRLKEKGKHNMAIVGAAMRKLLHIVFGVLRSKKAFDPDHIKNYRARSLAESLVL

SEQ ID NO: 261753 - protein, 354 aa, unidentified
MNTTQNSTKSKIVKVIGVDLAKDHCDVIGYDENGKICLRLDGCSYAKLREILANLPQAVVLMEACKGSMFHARSIADLGHEVRLVKGTDVKALRNVNHKNDLRDAAYIANLYFVPGIKYVYIKNQQQQSLQFLQNEYKSLQELRIQVGNQIHAGLEEFGCPVRKSSKFIKTRMVAHLEKHAELIPEDVMASFKRRREIWLNLLQQEEEAKRRLEQVAATDANAKRIMTVPCVGPQTAVGLLVHVGVDFGRFKNSRQFAASLGLVPKQNSTGGNNTLNHITKCGPKSLRSNLVQCAQLVLMYAEKWKGNFGDWVRKMRDNGKKHGVIVCAIAAKLARIIYRLMKDKVDYTPILSC

SEQ ID NO: 261754 - protein, 276 aa, unidentified
MAHFQDVVGIDVSKETLDVFVLSHQQQRAVANAAAGHCDLVNWLKSLGVRIAVMEASGGYERTIAGVLRRAGFDVRIVDPRRVRHFAKAAGRLAKNDQIDARMIAEFGAVFAVAERCEIAADPARERLAGLLGARQALIEHQTALRNQISAAPRGAARLALAAALKPIAGAIKKLDRLIAAAIAAHPPFAALAARLDTVPGLGLVTIAAVIAWLPELGRLDRRALAALVGVAPFDDDSGKRVGQRYIQGGRCKLRNVFYMAAMGGATRHNPVLSAV

SEQ ID NO: 261755 - protein, 346 aa, unidentified
MLYAGLDLSRQRLDVHVLDEDGRSIEVTAVHPDSDALRTLATHVLLHGQEVTAAIESMTGARFVHDQLERWGWDVAIADAVKVKGLAPLAAKTDRIDAHVLAELARRDLVPEIWLPDPTIRAERERARFRLHLVHHRTALKNRIHATLMTFGYSVPVSDLFGTQGREILGRLTIPEPWAGTLTTSMRMIDDLNVEIAAAEADLRGLGPDHPYIPLLLTVPGVGPLLAYTIAGEIGDIGRFESPKKLAGYTGLCPIVRGSGNRDIRGPLAKNGPKYLRWALIEAATHAARDPRFRDRYERTKHRLGRGRGAKVARVDIARQLAEAIWHVLTKNEPFAPAGPAITLVA

SEQ ID NO: 261756 - protein, 400 aa, unidentified
MDTNRIVAGLDVHKDTIFLCIMGHDEAIIFQNSYGTLTPDLHRMRDDMLMYGVSEAAMESTSTYWIPVWNALCGSMDLKLSNPLFIKQLPGRKSDVKDAQWIAECLLKNLIKASFVPGPIIQDMRKYNRRIFDLKDDIVYNTNKLDAAMQRCGFRLSNYVSKVKCKGYQKCIRAVASGIVSAEELIRFVHGRTVNKHGREAILAALTADFHQADLDLIRQYTEMIDIIERQIKECQQTLTALCEEHFPTQYERLQTIPGVKERAATAIIAETGAEMEHFQKSSHLVGWCGLKPRNDISNKKVKNKQITHGNKFLRKILIECAWSASRKKKCFYSNFSYVQCTQKKKNKMKIQVAIARKILVAVWHMLSKDEDFDDVYLRRLEREAQNKQSEEQKNLTVAP

SEQ ID NO: 261757 - protein, 367 aa, unidentified
MMGWMAPLRHLSAKLLSDRISSEWEPSMDEVTTIGLDLAKHVFQVHGVDAEGATVLRKQLRRAQVLAFFSRLGPCLVGLEACATAHYWARELRALGHEVRLMPAQYVKAYIKRNKHDAADAEAICEAVGRPTMRFVPVKTADQQAAQLLHRVREQLVRQRTMLVNALRAHLAEFGLVAAQGLRNVGELIAIVRDDGDKRLPAMARQVLQVLANQVEQIEAAIAALERQLLAWHKTNPVSQRLASIPGIGPIIATAIATTVADPTVFRSGREFAAWLGLVPRQNSTGGKTRLGGITKRGNRYLRRLLINGASANLLRSKATKADPWVIGLRQRRPPLVVAVALANKTARIAWAVMLREREYQPRAVAA

SEQ ID NO: 261758 - protein, 342 aa, unidentified
MFVAGIDAHTTYSVVVVVSNTGDLVHQPTRIPNAEPDRLLRLLEEFRPLEAVVETCPSWPWLFDLFQGSDIPFVLAHAKRLRAIADSTYKRDELDAELLARMRLAGLIPEVHPKSVEQREQAVLLRNRAMLVRQRTAAAARIHSQLHQVGLHMARGHLLTRDGRQWIRSEAWPLLGPERRLFIRMQWALIQRLSPMIRSLDKRVERMGREMPAVALLRTIPGIGLFRALPIATETLPIERFPKPAHLVSYAGLAPRTSQSGLRPIRHGSIPAGANRWLRGTFVRAVVTHVAHAPDSWLSHSYEQTRQRLGWQVARVATARRLARVVHAMLRTGEAWRDQPTQ

SEQ ID NO: 261759 - protein, 457 aa, unidentified
MGDDVMISVDPHKASNTLAVMDPVTKTVIARQRFMNTAVGYRRLREFAGGWTHRRWAVEGCHGAGRSLAQRLAGDGEIVLDVPAKLAARVRVYSQGHGRKSDADDAISIGLAALNSTRVAVVRRDDTLVSLRLLCDRRDELGGLRTQAVCRLHRLLCELTPGGTHRGLRASRAEQLLAKLRPVDPVDVVRCQLAHQHLDDIRALDAKMTAVRAQIAALVDGTGTRLTELYGIGPVIAGRILAEVETIDRFPSKDHFASYNGTAPIDASSGEQVRHRLSRAGNRRLNHALHMMAVTQIRQPETIGRRYYERKRLEGKTPKEALRCLKRRLSDVVYWQLVADRRATITQCGSATTPTRTRPTSTSATTPVPRTAPPRRPPHPTASTGSSHSTGKTAASSASKSSTPAVGSPKTSSTKQKTRAEATRKPTTSSAAVPDRRPTSAAAAGVKAGAATRRARP

SEQ ID NO: 261760 - protein, 351 aa, unidentified
MRTSQNTAESINTIGIDVGKNTFHLVGLDNRGAIVLQQKVTRHQLGRRLSNISRCLIGMETCSGTHFIARQLAALGHDVRLIPAQYVKPFLKGHKNDYRDAEAIAEAVQRPTMHFVSIKTPEQMDLLALHRVRSRLVRQRTGVANQIRGFLLERGITVRQGFMPLRKALPEILSSKSDALSPRMINLIGELIQDWRRLDDRIASVSTEIEAIAKRDESCQRLMSVPGVGPIISSAVVAAIGNGAGFKQGRDFAAWLGLIPKQESTGDRTILGKISKRGNKYVRTLFVQAAHVVLERRPRTARQGLWPWIEQASKRLHRNMLAIALANKLARIAWAVLARGHAYQPRIIANA

SEQ ID NO: 261761 - protein, 344 aa, unidentified
MLQVSTIGLDIAKHVFHVHGADGKGRAVFSKRISRGKLLDFFAALPNCTVALEACGGAHHWARQLTQLGHEVRLIPPAYVKPFVKRQKSDAIDAEAICEAAQRPSMRFVAVKSEEQQAAGLVFRTRDLMVRQRTQLINAIRGHLTEYGWIAPKGPSHVATLADLIEEEAMASSLPEAARPMFRVMLDLLAELNGKIADLDKEIARRAREDEVSRRLMTIPGIGPISATAIAALAPPIETFAKGRDFAAWLGLTPLQKSTGGKQKLGATSKMGERTLRRLLIIGSSAVVQQASKRGAPKGSWLEQMLTRKPRMLVTVALANKMARIVWALLVKRENYRAPVSAKA

SEQ ID NO: 261762 - protein, 392 aa, unidentified
MFIVGIDIAKRFHEASVIAQDGSLVRKALRFANSQAGYNKLMNMVRGLNEPVVFGMEATGHYWLTLFTHLRNDGFTVHVINPIQSDALRGMYIRKTKNDAIDSMIIADVIRFGRYCETSVQPGDLQAMRELCRQRFYVIDMASDLKRKVLALLDQVFPEYEKLFSDTFGASSMELLSQYTTPEEMLSVSTEKLAELLETASRGRLGLAKAEEIQEAAKNSFGIVLASGSFALIIRQYIEQIRSLESSIAVFDTEIARLLAGFDTQLTTITGIGSTLAAVILSEIGGDIKRFSSPAKLAAYAGVDPTVKQSGDFTGTRMKMSKRGSPYLRRAIWLASTVAAFKDPAIHALYERKRSEGKDHMTVIGHVCRKMVSIIFAVLRDNTPYSPAVISD

SEQ ID NO: 261763 - protein, 444 aa, unidentified
MNVSVQTLAEKREFIKGKIIIGIDPAKEKHQVRILDAERVPLGRTFSFQNDYNGFTTLLWRKLDQYQDRKVDYREEVVFAIESACDLWQPLVHYLYSNGYLVVRVSPLATYHARVLIGNDFSKTDPKDAQVIATNAANGNFTMHTEHDESIRSMRTLSITSDKLRKDMVKYKNRIISFIKRYFPEFIKVLNPETLTARYLLKRYFLPGHYLTLDIRKETKAIMSLSKSQHGKETLMLLQQMAEKTIGVSCSDETEEKSLHLTLSCWLNQLDLIEEQTRHIECELIRLSKQYPAYYSVRSLKGVSDKMAALFIAETRALKNVTHYKQIQKMAGTNLRLNTSGYYRGRNRISHLGNSRLRWILFMMAKETAKYVPEVRVKYLKRQLKRRNYLKNTIACTSKVLQLIMSLTKEQRIYEPHLNPDIEIMVRQLNLEYENLKRGRLIAA

SEQ ID NO: 261764 - protein, 369 aa, unidentified
MSDTKTLVNTVADKLFIGLDLHKNTSTFVIKDKEGNVVNSAKVLTDKNDVSRYINAIKRNNGGKELSLVVEPVSQWYYYADLIESLGVDVHLAHPMEVKAIAHSHIKTDKIDASVLADLLRTNFLPEAYFSPAEVRGWKEQCRFRASVINLRVQVKNKIHAILFKHSLKHNFSDLFGKGGRRWLAGLELNEPFKTNLNKYLGLIDYLTGEIETAEERITDTVINCPQAKLLISIPGISYCSALTIMAEIGNINRFLSVKHLQSYAGLIPSTYNSGDKQIHGKITKRGSKWLRWIMIEAAYHQMNCKRISGFGSYYNTLKKRKGSKTAAVATARKLLAVVWRLLKDNRPYEVIDPRCRKFEAVGLKNIVS

SEQ ID NO: 261765 - protein, 410 aa, unidentified
MEITLERCCGLDVHKKTVSACVLIRQGTGWEKEIRTFSTMTADLLALHDWLQALGVTQVAMESTGVYWKPVFNLLEDSFQVLLVNAAHMKAVPGRKTDVRDCEWLADLLAHGLLRGSFIPPEPIRDLRDLTRYRKSLTEERVREINRLQKILETANIKLGSVASNVLGTSGRAMIEALIEGNRDAESLALLAQGSLRKKLPLLRQALEGRFRPHHEFLLKQILSHLDFLEEMIEHVNEEVEHRLGPFSKEMELLKTIPGVNQKVAETIVAETGVDMSRFASARHLASWVGLCPGNNESAGKRLSGKTRKGDAWLKSALVESAWVNSRAKNYLGAQYHRIARRRGKKRALICVAHSLLVIIYHILKEGTPYHDLGEDYFDRMNLQVLKKRWVQRLEAIGFKVNLEPLPVAI

SEQ ID NO: 261766 - protein, 345 aa, unidentified
MWIIGCDYHPRFQQIAFLDTDSGEYGQRRLEHVGEAEQFYRGLIGQRVRVGIEASGQARWFQRLLAELGEELWIGNPAAIRAMVARKQKTDARDAEHLLQLLVEQRFPRIWVPSAEERDVRQLVLHRHRLVQMRTRVKNQLQAIALNEGVGRKPGLWSRKGRAQFEGLALPAWTARRRQDNLELLAELVQRTLPLDQAVEQEAARRPEVVRLMSHPGVGQITALAFVLTIGEPGRFACGKQVASYLGLIPAEASSGGKQRLGHLTKQGNALLRGLLTEAAHSAARQEPQLGRCYRRLAMKKNRSIAAVAVARKLAVRLWWMWIRGLDYGQMIESGSHAGQARLAQ

SEQ ID NO: 261767 - protein, 302 aa, unidentified
MSKRWLEVNVYGEEATWKEGNDAVGFISLIERMKAIRSMLIVFEATGGYEARAAHSLSESGFGVAVVNPTRVRRFAEALGILAKTDKIDARLIAHFASVVKPAAKSLQTPLEEQLAAFVERRRQLLVELVAEKNRLSTCPACVRDGIQEHIAWIEEHIEDLEAEIQFCISQNPDWQKRAEIIDSAPGVGPVTAATMVAELPELGQLNRQKIAALVGVAPFNKDSGPRKGKRRIFGGRAGVRRTLFMATLSASKYNPVISAFYASLLKHGKEKMVALTACMRKLLVIINAMVKKGETWQASPA

SEQ ID NO: 261768 - protein, 391 aa, unidentified
MIYIGIDVAKDKHDCFITNSEGEVLFNAFTIPNNADGFHDLFQKISSLTNDFSNVKVGLEATGHYNYNLLGFLIDKGLPTFVINPLHTNLFRKSLSLRQTKTDKVDAHTIALMMMSGVNLQSYSDTSYHNEELKSLTRYRFDKVQERAKLKTSISRLVNILFPELEKLVPSLHMVSIYALLAELPSSVQIASCHLTRLTNLLANASKGHYNKEKAIEIRNAAKHSIGSNMPAKSLELKHTIRLIQELTSEIDEIECSIKSIMDEIRSPILSIPGINYRMGAMIIAEIGDFNRFSSPDKILAYAGLSPSTYQSGQLDGCYSHMEKRGSRYLRYALFNATKFVCIWDNQFSAYLAKKRSEGKHYNVAISHAAKKLVRVIYQLEKSGQLYHRAA

SEQ ID NO: 261769 - protein, 340 aa, unidentified
MTPIGIGLDIAKNVFQAHGVDDKGTVVIRKRLRRPDMLRFFASLPPCLIGIEACSASHHWARELIRLGHDVRLMPARYVKPYVQRGKSDALDAEAICEAVSRPTMRFATIKTTEQQSVLTLHRSREILVKQETMLANLIRGCLGEFGIVAPLGIRRVAELIAVIKDDADPRILPEARIAMRAVADQLCDLQKRIKEIEQAIRAWHRSNETSRRLATIPGVGSITASAIVATVANATEFKSARHFAAFLGLTPKECSTGGRQRLGRISKQGDVYIRRLLVLGGTSLVRYARAAGGSVWAKQLLARRPTRIVTVALANKAARVIWALLTRGGVYRAPQPQAA

SEQ ID NO: 261770 - protein, 321 aa, unidentified
MSLYFLGIDVAKAKLDCTLRLPNGKSRAKVVPNSPEGFSQLTAWLDSKDARDTHVCMEATGVYWEGIAQFLSTQGFTVSVVNPAQIKAYGASRLARTKTDAVDARLIADFCAERNPPAWQPFSDDELALRALVLRLDALQTMRTQESNRLEVSRGAVRQGIQDHLNWLDGQIKSVTKAINDHIDANQGMKDKKALLDSIPGLGERTIAILLAFIGDPVRFGNSRQAAAFAGLDPRQHESGSSVKGKPRLSKVGHAFLRKALYMPAMVALYKTDWGKRFKDRLAASGKPAKLIIGAMMRKLLHVAFGVLKSEKKFDPALHNA

SEQ ID NO: 261771 - protein, 323 aa, unidentified
MSQPNLQCMGIDVAKLSLDIATTDTIEPFTVGNDEDGFAVITDKLKHTKINLILMEATGGLEAAIACKLQSEGYDVVVINPRQARDFARSMGYLAKTDKLDAAMLAQLALVIDRHPDRSRYIRHLPDEARAVLAAMVVRRRQLNHMLVAERNRLYPSHPQSRKSIDNIIDALQNELDRINEQMKQHMTAFFQEQARLIGSVKGVGDITVASLIAELPEQGKLNRREISALTGVAPLNRDSGKMRGKRTTFGGRAGVRATLYMAALVATQFNPAIKLFYQRLLAAGKPKKLALVACMRKLITILNTMLRKGEEWNASFQSQVIS

SEQ ID NO: 261772 - protein, 415 aa, unidentified
MEKIYDKCCGIDVHKKLIVACLRSGRKNEIREFGTSTKDILSLTDWLTDKGCEMIAMESTGSYWKPIYNIIESCGLQAIIVNAQHMKAVPGRKTDVKDAEWIADLLQHGLLKASYIPDKAQRELRELVCYRKSLIEDEARELNRLQKMLEGGNIKLSGTVSDINGKSSRNMLEVILSGEVLDLKKLESMVSEKKVSKRLKASKQKIVDDMDGVLTALQRKMIRELLKHIDELEKHIKNLSDDIDRFMDSGEKAAVKAIEEVPGIGKVSAEAIISVIGTDMSRFPTDKHISKWAGLCPGNNESAKKRNSGRTTKGNKTLKTTLVLCAHAAVRVKESYFAAQFARISVHRGKKRAYVAVAHSMLIAIYHMLRCGATFMDLGSEYYNTFNRERKAEGCLKKLKQLGYAANIATIADLA

SEQ ID NO: 261773 - protein, 369 aa, unidentified
MKKRIKNIGLDVHKNSISIGIANDGRDGEVRYYGKIDNDMSQLDKVIRKLVSEGAVLRFVYEAGPCGYGIYRYLTNNNMDCVVIAPSKIPQQSGNRLKNDRRDCLSLARLHRAGELTPVYVPTPEDEALRDLVRARIDATRALRVAMQQLGAFLLRHDIVFPGKTRWTKTHFNWLSSVTLPHSAQVFVLQEYIDRVTDCINRVQRFTDQIRLQSRQSSRHELIKALQAMRGISLIVAATIASELGDLTRFETPGKLMAFLGLVPSEHSSGEKVKKGSITKTGNRHVRNALVEAAHDYRFFARKSRIIRKRQEDLPKNVIDISWKAQCRLCARYQYLMAKGKKVNVTKTAIAREIAGFSWAIAMELDRAA

SEQ ID NO: 261774 - protein, 488 aa, unidentified
MPVFYKNSCLLQGCQNGMVHNFNYTRRYEMLVNSVIGIDPDAKGFICCLVKNRESKVFKKAYSVNKSGLDTFIKWVKDEKDVIVAIEGTNGQSYPIEKTLKAKNIDFYSLKPAEVDHFRKAVMGQNKNNKNDAEATARYALALENQGKLDKHKRLWEPDIELRMLTRGHTEKTKEITREKSRLWKYLKLASADLYLTLSGNNPDSEVSDNLLTNKGILTLLAQKSDIYSWKSSSKDDIRKAMGDHNYQGYSKLIDEIIKISRNFTPVPSGVILTIKHSASTILLFQQQKKDIIKSLKQLTSDNKEITSLCKHKGIATLTAAKITAEIIDIRRFSNNNKLASYAGLGRKEHSTGENKNMVPSYLFNHRLKNAFMTAAKNFVIFNPDSHLSGYYRNLIKHRGMSFTEAIKRVARALVRIFFRELSVLIEVEKETGESNMASGSDRSDKFHISNIKLSPDYNHNTENIEIINMRNKEKKKLLNISSWKEIL

SEQ ID NO: 261775 - protein, 341 aa, unidentified
MKIIGCDFHPSFQQIAMVDTETGELTAQRVTLSEAVEFYRNLPGPARVGMEACGNTGWFERLLAELGHELWLGDAGRIRATEVRKQKTDRRDAELLLRLMLENRFPRLWIPSQEQRDLRQLLIHRHKLVGMRRQVKNQLQHLALNQGVQQKRKLWTRAGRKLLEELPLTGWTARRREELLELLDSLDRSVGELDQAVKQAAEKDTVAQLLETHPGIGPITALAFALTLGDIHRFAHSRQVVSYLGLNPAEHSSGGRQRMGSISKQGNAMVRSLLVEAGQSAARLVPELKRAYQRLKHRKHSAVAKVMVARKLAVRLYWMWKTQQPYAATRMQGSPSHPVAV

SEQ ID NO: 261776 - protein, 342 aa, unidentified
MVMFAGLDVGGKRTAMCVVDEQGKIIWQGMVDTHPEMIAAALKRFQGQLAKVGLESGPFTPHLHRALTAMGYPVVCMDARRAADAIKSRRVKSDKADAWALAEMLRTGWFTAVHVKTLDSHRIKTLLGARDQLVRIKRSLGNQLRGLLRPFGIRLPSRVGTKIFAEAAHQATRSDAIMHAGITALLEALASIEAQLAKLDGALKELAGRSEVAWRLMSVPSIGPITALAYIAAIEDPHRFKRTRDIGAYLGLTERRYQSAGTDIRMGISKQGDAMARHYLYEAANVLLTTVKKRFALRSWGLKLLKTLGPKKARVAVARKLAVLLGRMWKDGTHFEAATVAA

SEQ ID NO: 261777 - protein, 395 aa, unidentified
MATAILTMSRLTSLTSLMWWTAPERHLCAKLGAVEGIEREEPSAVKTSAKAVPTTIGLDIAKNFFQVHAVDAAGQVVLRRKLNRADVLHFFKGQPKTLVGIEACGTGHYWAREIAALGHEVKLLPPTYVKPYVKRGKTDAADAEAICEAVTRPNMHFVPIKTPEQQAALMMHRSRELLVGQRTALVNALRGHLAELGIIAAKGIHRVADLLAELVGVDTAKMPPLARASLNCLAAQIEAVQTQIDNLEALILEWHKGNEASRRLAKIPGVGPITASAVVATIGDASSFTSARHLSAAWGLTPKQNSSGGKAKQGGISKAGNPYLRRLLFLGAIAVIRSKRAQEAGGWLARLLERRPAKVVAIAVANKTARVIWAMLRSGEAYRAPETDAAISAAA

SEQ ID NO: 261778 - protein, 342 aa, unidentified
MTNFNTKYQSVCGIDIAKNVIQIYQVNQDGECKNFQVKRKEFLQLFENREPSLIGMEACGGSQYWARELQKLGHTVNLMAPSAVKPYVSGFKSDRKDAIGIFNAMLAGVRKVAVKTEAVTDLATLLGIRARRVRARTAKVNMVRGYLMEYGIVMAKGLRQFKNSIADSLLQLERAQASNMVKEEFKFLLDEVNKETEAILRLDREINSLAKQCKNFDHFLTAPGVGPITAATMCAKLADPQVFKNGRQFAAYIGLVPQHYGSGGKNVNTTIPIKCNKELRALLVQCAQSIRRTKNKSSWVTQIEDRKPNSVATIAVANRLARRLWAIASKGEDWKRMDINFG

SEQ ID NO: 261779 - protein, 341 aa, unidentified
MSDYSYFCGIDLAKNHFSLHAVDQNGKVILHKSVTRSKLLTKIANMPLMRIGVEACGGAHYWARTLNKLGHDARIMAVKYVIPYRTKGKNDLNDAVAICEAVQRPSTRFVPIKSPEQQAILSVHRMREHWVRERTALMNRMRALLSEFGLIIPVGRSSLMKQVPLMLEDAENELPLLARTLIADAYHHLGELNQRIADTEQVFDSFAKVSINVQRVMKVRGIGPQTATAILASIGNGSQFDKSRDFSAWLGLVPKQYSTGGKPRLGRITKHGDKYLRTLLVHGARTVLANLGDKQDKLSQWCRGVLQRRGMNRAIVALAAKNARIIWSLLHNQTEYENYAA

SEQ ID NO: 261780 - protein, 419 aa, unidentified
MSKKSRNGGLTQEGLRLADGELVYVGCDVHADKYQVALWSPQRQDWAGEWVQPADNEALLRRLDKFRSQVVRVVYEAGPTGFGLVRALLAAGFNAEVIAPSHTPKAPRGPDKCDKLDARQLACQAAQDRMLHPVHIPTVQQEQERQIFRVREQQKKRLAQLKQRIKALLLFHSLAAPPGLKCWSLAGIAALRAMRLPEALRWSLDELLAELEEARSGVMRCNRRLQELARGARFKPLVDRLRTVPGVGLIVAMGFILELPSPERFASGRQLGKLLALCPRVQSSGSSSWECGRALGGHDTLRALLVEAAWRWVRGDPYARMVFNRYHAGTASKLKAIVATARKLGIILWHLLLGPLPYVPGLMRVPPAVAGMPVKQAASGGSTKGGARPRANGKQATSGGSTKGGARPRANSKPLALEA

SEQ ID NO: 261781 - protein, 433 aa, unidentified
MHEVEDEPLFAERAAGIDIAKAGIEVTVRVPSDTRAGRRQQETRSFATTRRDLESLADWLRSWGVTKVGMEATGDYWKPVYFVLESRDFDCQLYHAAAVKALPGRPKTDRADSVWLARITERGSLPSSFVPPAPIRALRTHTRYRRHLTQARTAEKQRVEKLLEDGHLKLSSVISDIHGVSGRAMLEAIIAGERNPKVVAQLARGTMRGKIAQLEEALDCSFFTGAHVAILTMMLAAIDSFTAQIDELTARIEVLAEPYLHQIEQLDAVHGVGTISAQDVIAEIGVDMTVFPTAAHLVSWAKWCPQVRQSGGKRKGANAAGRGNPYLSAALGEIAISASRTQSFLGAKYRRLVKRMPKKKALVATGNSALTLFHALLSDSAASYHDLGPGYYEQRTNIRRQARNHLRSLQRLGYHVTIQTINPDTGELLTTTA

SEQ ID NO: 261782 - protein, 401 aa, unidentified
MAPTAGIDWASEAHEVCVSEEGRVAERFSVSHDEGGIATLAARLGRAGVDRVAIERPDGIIVERLLETGIEVLAIHPNQAKAARPRFAVAHGKSDRFDAYVLAELARTDAHRFRTLVPDGDETKALRALTRAREDLVGVRVELDNQLRAQLDAFWPGALVFADVDSPISLAFLRRCPTPADARGLGPRRMEGFLARHRYSGRRTAEELLERMRSAPVGRAGVLEAEARRAVVLGLVGALEPIVTEISDLTSQIRGALALHPDAAVFGPLFRDAKTVISPATLIAELGDCRGRYPNEAAMAADAGMSPVALESGKLRVATFRRACDKRLRAAVARLADSTRHWHPWAREVYSRARARGQDHPHAIRTLGRAWIRVLWRCWRDRVPYDPARHGNLRRLRPSGG

SEQ ID NO: 261783 - protein, 392 aa, unidentified
MYIVGIDIGKNHHEASIVSPEGKQIGRSLRFATTHKGADSLMSFIFKNIGNSPCVFGMEATGHYWYPIYSFLKAKGYTIYVINPIQSDSLRKMYIRQTKNDSIDSFLIAEVIRFGQFGTTSMADENILAMRQLCRYRDSVISSRTEIKLRIGTIMEQIFPEYEKQFSSLWVSTSIGILEKYLTPENIENAPIDELFEIIKDKSHNRLTRAKAISIKEAAADTFGIKIAQDAFSFQLKQLIDRMNFLDKQIEALDCQILEYYEKFDCYLHTIPGIGMIAAATILAEIGDINRFKSSSALVAFAGIDPTVRQSGEFSSTHNHMSKRGSPYLRHAIFLAATTCSFHNSPLNAYYKKKRDQGKHHLTATGAVARKLTTIIYAVLRDSKPYEPKSFC

SEQ ID NO: 261784 - protein, 394 aa, unidentified
MRFVGIDIASETHVVAVVDETDAVLVRPTKFTEDAPGYDRLFGLLGTPADTLVALEATGHYWKNLFAVLVTRGFAVALLNPLRTRRFADEELARTKTDAIDARGIARFAAQKRPAPTRLPDRATEELRELVRLRDRLVQDFGDRLRQLHRLVDLGFPEFTRHVKSLDSELATAILHDYPTAAAFRNVSARRLAGLRYDGRHKVGDDLARALLAAATRSVGQHHGAAYRLQVRYACEDLDLLRRRLRTLERDIERTLDDHEIGTLLTTIEGIGPQTAARLIAELGNPAEFRSAAALASYVGVIPAIRQSGKWTSSRAGLNPLGHAALRAALWMPVLTAVRKNPWLRAYYQRLTARGKLPKVALIAAMRKLLIAVYTVAKTRRPFVSQRAPQEARA

SEQ ID NO: 261785 - protein, 437 aa, unidentified
MEKTLTVVHPHAAGIDVGSRNFFVDAGEEEIQVFPTYTEGCHGVRDYLLSKGVTTVAMESTGVYWVILYAVLEEAGIDVYLINGRMARNVPGRKSDVKDCQWLRQLHSYGLLSKSFIPDDKTRVLRSYVRLRQDHIRSAASQIHLMQKALTLMNIRLTEAINDITGASGLRIIEKILGGETDPNVLGALCETSILNKKRDLVLKSLQGHYREEHLFALQQALISWKHFHSLIYECDKKIEKLLQAITVDLQNVEVKKKRKPVRYHKPHIKDLHQPLLKLTSGKDATNIAGITDYSALQLISELGTDLSPWKTEKHFTSWLKLAPQKSSSGKSMRRVRVKHHNPASMIFRNMAQGLLNSKKIALGSFGRRIRAKRGGAIAVKAIARKLACYYYRVMTKGEEFLEQGIANYEQQLKDRQRKYLERLAFELNMHVIPIDI

SEQ ID NO: 261786 - protein, 385 aa, unidentified
MSAHPIQAEAAAQLQANTLFASLELSKARWLVTVSAPGSDKLSRHDVPGGDGQALLELLWRLQAAAAQRTGASVTIVVIQEAGLDGFWIHRLLVQNGITSHVVDPASIAVNRRHRRAKTDRIDGVKLLRTLMAWMRGERQVCTMVQPPSPEDEDRRRLARARARLLKERVQHTNRIKGLLSGQGIPDYDPLHRDRRGRLAALTTGDGRPLPKRLETEIGRELDRLELVASQLAAVERERDALMAQTAEADARAAPAALIRLRGIGPELAALLWLEALFRRFENRRQIAAYAGLTPSPWKSGGIDREQGIAKSGNPRLRRAMIELAWFWVRHQPGSALSRWFVERVGAARGRVRRIAIVALARKLLVALWRYVTQGVVPEGAVLKA

SEQ ID NO: 261787 - protein, 311 aa, unidentified
MHPPKVYLGADVSKASIDCRLLDQAFQVSNDAAGLRRLLARLRSQPDVHVVCEATGGYQNDLVAALHRQAIPVSVINPRQVRDFARSRNLLAKTDRLDAQVLAAFGQANGPTPDAPKPAHLQRLAALLSARDQLVGIRAEHKTRSHQITDRWLRAQTQRLIGFYDREIKKLEDQLQALRDADAQLQAKAQRLDQVAGLDWRGALGLLGYLPELGTLSRRAIAKLAGLAPLNYDSGQLRGQRHIAGGRAPARRLLYLASLTAVTKNSLFKTSYQKLRAAGKPPKVALIAIARKLLIHLNSLLSRQLKSSLVF

SEQ ID NO: 261788 - protein, 341 aa, unidentified
MQITTIGLDIAKNVFQVHGIDAAEKVAIRKQLRRGQVMKFFAALPPCLVGIEACATAHYWARELTRLGHQVRLMPAKDVKAYVKRNKNDAADAEAICEAVRRPTMRFVEVKSAEQQGRLMQHRTRDLLLRQRTQTINALRAHLAELGIVAAQGREGLKKLLEIIADKADERLATDARASLIVLAAQLQALQTMIGAIERRIMAQHRANEASKRVATIPGIGFLGASAITATVTDASAFRSGRDFAAWIGLVPRQDSTGGKQKLGPISKQGDRYLRRLLVVGAHAVLRLAKKSPQNYPWLAQLLARRPFKVVAVALANKMARVAWALLARGGSYRVPALAAA

SEQ ID NO: 261789 - protein, 341 aa, unidentified
MQITTLGIDLAKSVFQLHGVDGSGTVVLQKKLRRGAVLDFLSGLEPCPIGMEACPTSHFWGREIAALGHDVRLIPPAYVKPYVKRQKNDAADAEAICEAVTRPNMRFVALKTEDQQAVLVLHRSRDLLMRQRTIILNAIWAHFAEFGVIAAHGPRKVAEMVRRLRDPDDELDLTALARSALLSLAAQLESLAEEIGKIERQLMAWHRQSAASQRLETIPGVGIITATALAASVPDPSVFKSGRQFAAWLGLVPRQNSSGGKDRLGRVSKMGNGYLRRLLVVGATSVTRRAPTTDTRTGAWVRSLLERKPTRLVTVAIANKTARTAWALLARGENYRAAPAT

SEQ ID NO: 261790 - protein, 474 aa, unidentified
MNENHRRCCGIDVHKNSVTVCVLAPLGQRHIETKKRKFRTFTRDLKQLRTWLKNCQVTEIAMESTGQYWRPLWNLLEGEFDKLVLVNPQHIKGLNGYKTDPKDAQWIADLLEGGKLRGSWVPERPIRELRDLTRQRVNVLEDSNRAKNRIEQLCQAGNIKVSSVATDLFGVSGRQMLKDLVEGEKDAGWMADCAKGKLQIKKRELTLALEGTFTNEQRWLLAKELRQIEFLETQIEALEQEIERRVAAFEEPIRRLLTIPGIDRKTAWTIIAEIGADLSAFPDAKRLASWAGLCPGNRESAGKRMSGRTRKANRYVKRAMCQAAWAASHTKKTYLAAFYRRMAIRKGAPKAVMALAHHLIVVVHQVLSRKEEYVEFGGDYYDQRNKPRTVARLVARLAKLGYEVDLKLLAEPAPERKDALEEHVGSAMPQEPAAPKKRRGRPCKCIERGLICKHHTAREANSLILQSSSPGEFS

SEQ ID NO: 261791 - protein, 399 aa, unidentified
MAKPFASCILTPVMVKGSIVEASCGEASVASRAARRWRREIDCVLALEVVTKRDPRRHYGTNPNSRMNRQRPAGRASSHLQDWEQTMTEPLFIGIDVAKDTFHVASCPPSINISLPNSSTGTKQLIKTLQPFTVSLVVLEATGGYERPIVAELLEANFKVVVASPRQVRDFARGIGEFAKTDPIDAAVLARFAQVVQPKPKPPSSPQTDELADLVRRRRQLTDLRTQELNRSETVRHPKVRKSVRKMIKTLDYQIAELDELIEQNIKSDDEFRGKDEILRSTPGIGPQTSAMLLSLLPELGQLNRQEIAALVGVAPYDFSSGRFAGKSRIWGGRKEVRSILYMAALTAMRYNPAIHCFANRLREKGKVFKVVITACMRKLLIILNAMMRNQTLWRTEKI

SEQ ID NO: 261792 - protein, 352 aa, unidentified
MNQLKYIGMDVHKAMTVISVLNSEGKELAQAIIETKSTTIIDFIHGQRGTLHVTFEEGTQAAWLYDLIRPHVASVLVCDPRKIVTQGNKADKIDARRLAELLRTKGLTAVYHGEQSTRAVKELTRSYQEMMEDSTRVKNRLKALFRARGIDCSGNAVYTPDERKNWTAKLEHAAVRARAGRLWGELDALEKLCEQAEDDLKTEARKHAAIKILQGIPGIGPIRAAVILGIAGTPHRFRSKKQFWTYCGLAVTSKITSEYQLVDGRISRSKKQPLVRGLNRNCSRTLKDVFKGAAKTAAAGAWKSHFDAMVAKGQDPPLALLTIARKIASITLALWKRGERYDQKKVEILHAA

SEQ ID NO: 261793 - protein, 351 aa, unidentified
MKKPSTAATKASRNISQQRLTVGLDLGDRNSWYSVVDETGQIQLEQRVRTSRQALQQVFGAMPRSRIALEIGTHSPWISRLLSELGHEVIVANARKVRLIGESRKKDDRLDAQSLARLARIDPELLYPVKHRSAQAQADLTVIRARAALVRTRTGLVNTARSLAKSYGERLRGCNVRNMNPEKAESLSPELQAALQPLLMAIESVSERIQEYNQRIESLAQQSYPQVELLKQIKGVGTLIALTFLLTLEDPRRFHKSRDVGGYLGLQPARRKSGQSEPQLHISKEGDPYLRTLLVQGAQHILGPFGVDCDLRRWGQKSSSKRLSLSSTFSSMLTTTPSSSTYLASAIKRAR

SEQ ID NO: 261794 - protein, 410 aa, unidentified
MNSKDIQRYVALDIHKEYVMVGAMNAAQEWVIHPRKVEMIRFRNWAVNNLHPGDAVVIETTTNVWDIYDIVAPLVTRTVVAHAGAVRQIAEARVKTDTEDIKRLLRLLIADIVPEVWVPPAHVRELRGLIAYRNRLVVNGAAVRNRLHSLVHRHNLQLPKGELTDASWWEGQPLSALEKIQVRQELALLQTIEQNKAELDNELAKMSVGPTWGQDATRLLQLPGLGLIATMTVLSAIGDIHRFAEAKCLVGYAGLGAGVHDSGKEHKDKGITKSGRKELRWALIEAAWRAVRSSPVWEKRFQELAKRKGQHKAIVAIARKLLVTIWYVLTREETDQNASEEDLAWKMLLWSWSLGDEARLGLTPKQFAKYSLLRLGVESDVTEFQRGKVLRRIAPRDEVLKRISELGLQT

SEQ ID NO: 261795 - protein, 343 aa, unidentified
MELYVGMDVSLKETSICVVDGSGEIVSEGTVISEPSAIAAFIEARAVSALRIGLETGPTTTWLWHELRALGLPVICIDARHAKAALSMQINKSDRNDAAGLARIMQCGWYKEVQVKSVSCHEIRAVLNSRAQLVKIKRDLENQIRGLLKNLGLVIGKAGGTVFTRRVEELLGRHGLLWEAVRPLLAVREIVRRELTALYRKLLDLARDDEDSRRSMTVPGIGPITALAFYAAVDDPIRFRRSRSVGAYFGLTPRRFASGEVDWSGRISKCGDAMVRSYLFEAAGVLLTRVAHWCKLKAWGHRLWERIGFKKAKIAVARKLAVILHRMWRDRTDFIWSNKEATA

SEQ ID NO: 261796 - protein, 344 aa, unidentified
MDIVIIGIDLGKNSCSLAGMDASGRVVLRRRMRRSSLENFAKGLGRCIIAMEACCGAHHLGRVFAAQGHEVRLMSPEYVRPYVKAQKNDDLDAEAIAEAGMRPTMRFVEVKSQAQSDIQALHRARERLVSERTALINHLRALLLERGIVAPQGRRKLEEELSVFADEDGIEALSPRIRLLIEDLRAEWRALDERIAAFDGEFVRMARDDEAVRRLTRIPGIGTINATALAAAVGNARAFRRGRDMAAWLGLTPRQMTTGGKPRLLGISKRGNRYLRKNLIHGARAVLPYLVERETPLGRWARELLARAHKNVVVVALANKLARIAWAVLAHGCAYDSGRETAAT

SEQ ID NO: 261797 - protein, 405 aa, unidentified
MERVIERCAGLDVHKKTVAACVRVRGTQHVRTFGTTATELLVLRDWLFAHEVTHVAMESTGVYWKPIFYVLEDAFTCVLSNAAQIAQVPGRKTDVKDCMWIAQLLEHGLIRASFVPPAPIRELRDLTRYRRALIEERTREANRLHKVLEDAGIKLASVASDVLGVSGRAILAALIEGTTDPMVLAELARGVLRKKLPALRHALMGRFREHHAFLVTQILAHLDYLDELIATVSGQVEVAIAPFADELARLDTIPGINQRTAEAVIAEIGVDMTVFPSARHLASWAGLCPGNNESAGKHRPAHARKGNRWLRSALTEAALAGAVRSKKGALAARYRRVMPHRGHKKAVVAVAHAILVTAYHLLARQVTYTDPGADYYERRHADRVRQRAVQTLERQGYRVSLEPAA

SEQ ID NO: 261798 - protein, 359 aa, unidentified
MDKNTQVPAVRVGVDLSKRIIQVHAVDGGGRVLTNRALARDKFLAWCALLQAGCMVVMEVSSSAHHWARALRAMGLDARIISAHLAAPYRAEGHCGKNDANDAAAICEAASRPHMRFVPVKSVEQQSLLCVHRLREGLKADRTACINRIRGLLLEFGVAVPNGSRALRLVLDELLEDGANEMNGLARMTLRRAQAQWRELDEHLAWCDERLAAHEQENPEVRRAGQLMGIGPVGASAAVATVGDFKQFKSGAQFGAWLGLVPKQHSSGGKPHLGTITKRGDAYLRTLLIQGAKSVVNTAHTRSDPISRWVLALKERSGWQKAVVALANKNARILWAVMTRGERFDPHHISLKPGAAMPS

SEQ ID NO: 261799 - protein, 336 aa, unidentified
MRYIGLDVHKNNTTACIIAANGKPVAMMDVKSADSGLQKIVDYMGDQEYCVMMESTTYAYRIFRFFSSHDVEAHVVHAASLKMVTDTDKKTDREDAESIGRMLRLWKKGDIELSMSYLPTVKECELKDLCRLKEENSLKIGDESRRIKSHMARNVEEFRGNTDLKTKYVREQIREDYPKDATLMYRLDEYERLVTDGNVLKHMVESQMIGNRYVELLESIPGVGRQTAVQIMSMIVDPNRFKDEKRICAYFGMAPRVRDSGGKENHGRMTKNGDKMMRSIMERVTSSHVRFCDSSVTRYFKTKEKEMGTKKAMVTASRKMLTMILAILKRGTPFRS

SEQ ID NO: 261800 - protein, 355 aa, unidentified
MSQTPNTAVAVIGIDIGKNSFHVVGHDARGAIVLRQKWSRGQVEARLANIPPCLIGMEACVGAHHLSRKLASLGHDARLMPAKDVRPYSKGQKNDFNDAEAIAEAVQRPTMKFVAIKTAEQLDLQALHRVRERLVSQRTGIINQIRAFMLERGIAVRQGIGFLRTELPTILATRTDALSPRMLRVIEELAGDWRRLDQRIDGLSGEIEALARQDQACSRLMTVPGIGPIISSAMVAAIGTGDVFSKGRDFGAWLGLVPKQISTGDRTILGKISRRGNRYLRVLFVQAAWVVLVRIKNWERYGLKSWIEAAKRRLHHNVLAIALANKLARIAWAVLAKGRAFELTRTDDAGVVQPA

SEQ ID NO: 261801 - protein, 421 aa, unidentified
MRGARAKRVKTVKEGTLVATVDIGLASNAGYCTTLDGRDAKPFKFDNTKEGFEKFWYLTMASKNRFGCDEVVVGYESTGPYAEPLVHYLAHKQVKIVQVNPMHTKKMKEVNDNSPLKTDDKDPRVIADIIRLGRALTLVVPEGDAAYLRRLNNARERHVGEQTALLNQLQQLVFLIFPEFQTVLKNMKGKTAQYLLKRYTTPERIGALSKEALGEEMRKRSMGQFGVQEAELLIGLARETVGIKEGLDGIFMDIRHILLQLEAEGRFISEIEAEMGATLERIPFSGRLLSIKGLGIVSVAGLIGEVGDFSKFSTQSEILKLAGLDLYEISSGKRKGQRRISKRGRGLLRKILFYAAIQMIRKNGIMHDYYARLTGRGMERMRALIAVARKLLRIIHALVRDNSDYVEQNKVGDRRMIEMAA

SEQ ID NO: 261802 - protein, 311 aa, unidentified
MDEIIIDKGCGLDVHKETVVACVMGSGIKKEIRTFSTKTNDLLRLKTWLSGLGITHVAMESTGPYWKPVFNVLEDGFTVILANARHIKNVPGRKTDVKDSEWICRLLRCGLLSASFVPPQGIRELRDLTRYRRKLTQALSAEKNRIQKVLEDANIKISSVLSDTFGVSGSQMIEAIMEGKLSEAEMADLAKGKLKSKKEEIREALVGYFQEHHRFMIKASLEHIKYLEKLISDLDQETEKKLAQYQKEYELLQTIPGVKEQGAATIIAEIGADMDIFPSEGHLSAWAGMSPGNNESAGKKKAERRPMAIRI

SEQ ID NO: 261803 - protein, 318 aa, unidentified
MIYVGLDISKDTIDVHLIDHLETWLKIDNDSAGWQSLLDLLAKYPEEPIRACCEYTGIYYLGVATALYEAGYRISVVNAYSIKHYARLMMRRTKTDRKDAQLIADYLRVNDPPDWQPPAEELAQIKRLNRRLGQLVAMRTMEENRRQVADESCAASCTAIIDSVEAQIVAVEALLQNIIGGDAKLKEKQKLLMSIPGLGKKSAAILLPEVAEIDRFPTPKHLVSYIGLSPMQRESGTSVRTKGHISKMGNKHVRSALFMPARSACLRSRVFKDWAKAHMERGKAPKVVYVMMMRKILTYAWHVFKENQPFDEKILKRS

SEQ ID NO: 261804 - protein, 348 aa, unidentified
MLAEMVDHVVGVDPDRDRITAVVIDAATKGEVDQVEASATPAGYRRLIEWADVWSTSASRVWSIEGAGSYGAGLCATLQEAGEWVVEFDHPDSRADKDGAKSDGLDAARAGRELLGRSRYSTPRSRGPREALRALMVARRGAQQARVSAINELKALVVTAPVALRQELRGLTVACLVGRCSRLRGGADVELAGTKQAMRLLARRVVALADELTTIDTALERIVADMAPQLLDEFGVGPVTAAQVIISWSHPGRCRSEAAFARLAGAAPLPANSGQSQDRHRLSRGGDRHLNWALHTIMLTRVRSDPATLAYIARKTSQGKTAREARRCLKRYLARRLYRLLEHPPPTT

SEQ ID NO: 261805 - protein, 412 aa, unidentified
MNAVGIDVSKGKSMVAVLRPLGAVVAKPFEVLHTAAELKKLTDFLKSLDGETKVVMEHTGRYYEPVAHTIHHQGLAVSAVNPLLIREYGGNSLRRVKTDKADARKIARYTLDNWADLREYTPMDTIRYQLKTLNRQFHLASKNRTSCSNNLIALLDMSFPGARAWFDSPVRKDGSQKWVDFVLAFWHVDCVRSLSHTAFSQRYRNWCKRQGYQFSAGKAEQIHREAREMIALVPKSPTTKLLIREAALQLTSLSRTVEVLRAEMNRLAAELPEYPVVMAMYGVGESLGPQLIAEIGDIRRFAGKQSLVAFAGVDPMPNQSGAKETRSNRSSKRGSPYLRKTLFNVMKVLIQKSPPDVAVYQFLDRKRAEGKPYYVYMTASSNKFLRIYFGKVRDHLAALDAPPNDTSLANPL

SEQ ID NO: 261806 - protein, 423 aa, unidentified
MAQRGNSRGSTEFTEGGLKLAKYHVGVDISKHKHKACIRNLAQDSYSGVFSFEVNHQGFEKFLGTLEKFSSNKDDFLIGIEATGNYGVTLTYFLLSHGYKVVEINPYRANQFRKAQGKKAKTDSIDARSLAALLSLENLKPLSIPDPVLDNLRELTRFRSDMVRDHTSLVNQLHETLSTLFPEFATVFSQLNSTTSLALLISYPGPEYISRAGEAKIGETLSNASRGRIGKVVAKALVEAAQSSIGVLQRQPALATKVSILGERLVALTAAIERVEKEIADLFRKLPYNPEDFPVGDIPSLATLVSEIEDIHRFSTLKQFLSHFGWCPKSFQTGSYNREHPRMSHAGNKYVRRIIWMLSIVSIRTVPRYRAYFRQRVKEGKAKMHIIVAVGRKLLSVFYAILKKGIPYDPNWEVNRHFAMARH

SEQ ID NO: 261807 - protein, 413 aa, unidentified
MEMAVIVERCAFLDVHRDTVMACARIPDGHGGRREDVVEFGSTTSQLLALADWLTERRVSLVGMEATGVYWKPVHWVLEAHVAEVWVINARHMRNLPGRKTDVADAIWGASLLEHGLVRPSFIPPPPFRALRDLTRYRKSVIEERARESQRLHKVLEDAGVKLSSVASKVLSKSGREMIEALIAGERDSEVLAEMAKGRLRSKIPALQDAMAGRFNEHHALLCRAMLARVDQADSTIEVLTGRIEELLDPYEAAVSLLVTIPGVSYRTAQVILAEIGADMSRFPTAGHLASWAGMCPGNNESAGKHRSGRTRHGSKWLRKALIEAGQAAGRTKNTYLAAQYAQIRTRRGPQRAAVAVGHSILVIAWHLLSTGEPYQDLGGDYFDKRRTSAARQRRLVAALEAMGHQVTLEPAA

SEQ ID NO: 261808 - protein, 324 aa, unidentified
MTDAILGIDVSKETLDASCARGQRRQSRTFANSPEGWKMMLAWLKAMGSKQAHACMEATGRHSLGLALALHDAGHVVSVVNPAQIRDFGRTKLGRNKTDKVDAALIREYAELLKPGPWTPPSSAMRTLNELQTVRAGIVGSRTEWKNRSGSGLGDSTATKLAAATIEHFTIQLQAIDKAISETIDGDAELRGRCDLLLSVVGVGETLAALLLAEMPEPGVLRRSGELVAYAGLNPSHHRSGTSIDRPTRISKIGNAALRSSLYMPALSAMRYNPAIAALVARLKSTGRLKPKQIVVAAMRKLLVICFGVLKTGQRFDPALAMPA

SEQ ID NO: 261809 - protein, 350 aa, unidentified
MEEVSVIGIDLAKNVFELCALGASGEIAWRKRLKRRGFVRFMEEKAPRYLVAFEACGGAHHWGRFLLARGFRVKMMAPRVVKSYRQGPHKNDGRDAQAAAEAGSRAGVRSVTIKSEASQAVQILVRLRTLQIKQMVQTSNQLRGILNEFGIVLPKGHKRLRETIARLEVADPAYGRLPGPVRQAVEKLCCQLGQQVGWVKQATDDLAAATEVDDSCWQLSTVPGLGPINVASLSVALEAPDAFANARAFATFLRLVPRQHQSAEKQKLLGVGRQSTNETRRHLVLAGQSLITMVKRRQHPPTDKFLLWVLRLSQRKKRNVAAVAVAAKLARIAWALMARGQTYNPQFIKA

SEQ ID NO: 261810 - protein, 340 aa, unidentified
MQLYAGIDLHASNNYLAVVDENGKRMFKQKLPNESEVILLKLERFQEEMVGVVVESTFNWYWLVDLLHEVGYRVHLANPAAIQKYSGLKHSDDKHDAFWLAEMLRLGILPEGYIYPKEERPLRDMLRKRGQLVRLRTSLILSLQNIIVRNLSVRISANDIKKLKENAVVPLLESNDDLAMAGIISKETIDFLTGKIRAVESVVEQKVKIKDEYRHLLTIPGIGKILALTIMLETGPIGRFPRVGDYVSYCRKVNTKWTSNDKAKGKENKKNGNKYLAWAFSEAAEMARRYDTQCKNWYNRKMQKTNFMVAHQALAHKLARAAYCIMKEDVSFVPEKLFAT

SEQ ID NO: 261811 - protein, 477 aa, unidentified
MSKGSGTTRGDRRRNERRARLRRVLPRDGAVIGIDLAEEKQAIAVIDHDLRVLARKTVRVKVFRLGEALDWAVAQARAKGFGPVSVACEPTGPRWLQVQQLCAERCLPLVCIQPLVSHIAREQQDFTSRKTDEADCVMIARLAVELHCYLPEQLDETWAHLRHLGRRRNQLITAATASVQRIRDFLSVAWPVAAETCVRPFESVTWLAAMQVVMSRCGADPAKLAPCGVEAFAVLVRRAVPCWGGVRPSGRVCQAVFAALTDTQGVVASHRRGLLRRCTDELDDLQRTRARLRAVEADMVTVLAQLGLVRLADIPGLTAVGAAAILAEAGDPRRYDSSSSLVKHAGLSPADNASGAFSGQAHISRRGRPGLRLTVWRAVWAVLIHNPVMAAKYQAMTQAADTAAAQAASASADAGSRQVSAAAAAARARRAKARVACAASLLRWIYSMVVHGTGWDPAVASGAAACQHASSSRQQAA

SEQ ID NO: 261812 - protein, 403 aa, unidentified
MAKYHVGVDVGKDSHHVCIRDLSKDTYYKTFSVKNDHVGFTDLVSSLEKLSSDKNDFLVGIEACFYGLNLSYFLMGAGFNLVEVNPFRAGQFRKAQGKKAKTDRIDARSIAAILSLGDHKPLCIPDPILDNLRELTRFRADLVDEKAMMIIHLKEALSVLFPEFSKVFRQLDSMASLALLIAFPGPELLIAAGEERIAETLSLASPHRMGKGMARRIMEAAKNSVGVVQKQPGLGIKISVLAQRILGLRSAIRDLDGQIATLFDKLESKPEGFPVGRASSLATIVSEIGDVHKFPTLKKFLSHFGWCPQSFQTGNYRMAHPKMSHAGNKYVRRIIWMLSILAIRNTPRYREYFERRVKEGKAKMHILVAVGRKLLSLLYAMLKRGIPYDQNWEENRHLALARY

SEQ ID NO: 261813 - protein, 417 aa, unidentified
MRIVRPICCGADIHKNLIVATIATTNQDGITEYIQSSFSSQNFDLNRLKAWLKEHHCFEIAMESTGKYWIPVFNVLEDEIKVFVVHPKYTKAIKGKKTDKKDSKWIADLFKHDLLKFSFIPPKEIRELRELSRYRIKLIAMRSSERNRYQNSMTISNIGLASILSDPFGKSSRAVMKEVIRSSSVTEEKISKLLERNAKKKVKEVLQSLEGSHIESDQRLKMSIASQHMDQIDSHVRRLETEMAIRCIPYATLINLLLDIPGISYLSAMTIIAEIGTDMSVFETSKQLACWAGLAPANNESANKKKSVRISKAGSYLKPLLVQCALAAINSKSNPYYRIKYNRIKKRRGHKKAIIAIARMILVNIYHILSTGEVYSPCDMEQIINPKPVKKVMTIQNAIEFLQSQGFDTSKLISSSS

SEQ ID NO: 261814 - protein, 347 aa, unidentified
MPEKTEVDTFAGIDVSARELSVALRRGKGEDKPAMAKFSNHPSGHKALIAHLLRGGRRVRVCVEASGNYSLDLALTLQAHRQVEISVINPRRARRFAESLGQRSKTDPVDARVLCEYAARMPWVAWQPPSSVALHLRAVTRAIADLGIIHTQQNNRAHASAASQALPVLVVKEMQRHQKYLEQRMTRLRREALRLIAGDSELDRRFRLMLTTTGIAETSALQILGELAVLPDMLDARQWVAFSGLDPRLFKSGKSVEKRPRISRGGSRHLRRALYMPALVALRRDPYLRGFYQNLLARGKARMQAVVAIMRKLLHALFAMFRTNQSYDGSKLCCAVDMAGNAIAACA

SEQ ID NO: 261815 - protein, 435 aa, unidentified
MEEVTDEPLYRDRVCGIDIGKAGLVATIRVPSDRDPARRMQETRSFGTTKREVLALADWLRCWQVPAVVMEATGDYWKGPFYRLEAEGFDCVLADAKQVKNLPGRPKRDPADSRWLAACFERGAITSCFVATPEFRIIRLHTRYRRDLTEERTREKQRAEKLLESAAIKISSVLTDLHGVTGRDIMDHLIAGERNPKVLAQLARAAARRKISQLEEALDGAEFFTEDHAALLKVMLERIDRLSADIDDLSQVIEQLLAPYEEQLQQAESMPGWGRRAAQDAVAETGVDMTRFRTGGHLVSWAGRAPQDHQSGKRKGRAKAKKGNRYLGAITGETAVAAGRTQTREGARHRRLARRRGTAKACVATGNTQLKVYHKLLSNPGMRYQDLGADYYERQRDVRRQVAHHVGKLGSLGFEVTLCRIPEPAPDGSGPAQAA

SEQ ID NO: 261816 - protein, 340 aa, unidentified
MRLYTGIDLHSSNSYLAIIDETGKRVFKKKLPNDPEQILSALAPYKDANIGIVIESTYNWYWLVDALMADGYKVHLANPTKIQQYHGLKYSDDQHDAFWLAEMLRLGILPEGYIYPKEDRPIRDLLRKRSHLVKLRTSLIISLQNIICRNNGFRLKTNDVKALNADRVAPFLEQNEDLALAGKISKESIDFLTRQIKAVESVVEERMELRDKYKKLLTMQGVGKTLGLTIMLETGPISRFAQVGNYCSYCRKVSTKWISNDKKKGKGNKKSGNKYLAWAFSEAAEIARRYYPEARAFYQRKMQKTNAMIAHQALAHKLARAAYYIMRDGVSFMPEKIFTH

SEQ ID NO: 261817 - protein, 357 aa, unidentified
MKYVGIDVHKKMCQAAVLDEDGELLDQIRFGSNKEEIEEFALKLTAFHDDVKAVVESTGNLWIQVYDILEKHGFDVVLSNPYKTRLIAEAKIKTDKVDARTLARLLRADMLTTCYVPGEDLRSRREFLRHRLDLVKMQTQVKNRIHGILDKHGLRFPSTPFTKKSIAWLRKQKLGVMDEAVVQGDLSILESLEEQIRLIEEKIAALAVKNPQARLLMTMPGIGYFSAMLIIAEIGDINRFSNDKKIASWAGLAPSISQSGEKTHIGRITRQGNKRVRWVMVQCAHNARQYDPRLRNFYERYSKRKGKMKAVVAVAHEMMRICYFMLKRNEPYRGQNIGLTERKLKRMERIALNGFGN

SEQ ID NO: 261818 - protein, 352 aa, unidentified
MAKNDFDELMSVGVDIGKDVFHLVGFDKDGQLVLRKKIKRMALIATFEGLPKCVVGMEDCLSAHFVSRTLRKMGFEPGIIPAIYVKPFNKGQKNDYNDAEAIAEAALRPNLKTVSEKTQEQLDLQALHRVRSRLVSRRTATMNQIRAFLIEQGIIVRRSVAALRSSLDAILDNRSEEISLRMRKLILGLQQDWIWTDKRIEMTTSEIKSVSESEASCQRLMTIPGIGPIISTAVVAAVGTGEAYDRGRDFAAWLGLVPRQHSTGGRTILGRITKRGSRYLRMLFVQAAQVIMMRPKNWPKFSFGAWLEPASTRMQHNKLGVALANKLARIAWSVLSSGKDFDWKEKELATAI

SEQ ID NO: 261819 - protein, 356 aa, unidentified
MSRDIKYIGMDVHKEAVVIAVLNGTGKQVMESIVETQANSILQFIHGLQGELHVSWEEGTWAAWLYDLLKPHVQQVLVCNPRRNALLKEGSKSDKIDAQKLADLLRTGMLRPVYHGEHGLRTLRELGRSYHTISQDLNRVMNRIKALYRGWGIACGGTQVYAARYREEWLDKIEHKGVRRRAELLYQQLDGLQTLRRTLRPELLAESRKHKAAKLLRQIPCIGPIRAARLLALMQTPHRFRSKRQLWTYSGLGIETRDSAQYRFVRGQLQRAKKPQQIRGLNRNHNHEMKDIFKGAATRASCGVGPLRDFYVALLDKGMKPEMARLTLARKIAAIALTLWKKEERFDAGQLKTQAA

SEQ ID NO: 261820 - protein, 428 aa, unidentified
MNYNTQNAKIASITEKTLIVGIDVGSETHYARAFDWRNYEYTKKPLEFSNTEAGFQTFKAWMEDIAEKYGKTAVIPGMEPTGHYWFALGKFLQDSGMRPVHVNPHHVKKSKELDDNNPNKNDRKDPKTIATLVNEGRFSYPYIPTGIYAEIRSLSNLRFQTQEELTRIRNRLARWFAIYFPEYKGVYGDLKAVSGRMVLKEAPLPEDIRKLGVEGVDRIWRDAKLRGAGMKRAKTLVTAAEHSVGSTEAPEAARMELKNLLADMDVYTSRLEGLLLKIEEKLKEIPYVDKLMGIKGIGLATVSGFIAEAGDIGRFDNPKQLQKLAGYAVVANDSGKHNGESRISYRGRKRLRYVLYEAAISLIGKNAEFRAIHGYYRTRKENPLKKMQSVVAVACKVLRIFYTILTKGVDYDAGKLMGDIRRPQIQAA

SEQ ID NO: 261821 - protein, 411 aa, unidentified
MENERLWFAGIDWASEIHQARVSDVHGTKIGEQSFKHGGEGLAELANWLLKLTQAPPGSIHIAIEVPHGPVVESLMERGFQVYAINPKQLDRFRDRFSPAGAKDDSRDAWVLCDALRTDARCFRALATLDPTLVELREWSRITGELRHERNRLSNRVRELLWRYYPQLLELTDDVAASWFLDLWRLVPTPAKAARVRETTVAKLLKHHRIRQLTACQALEKLRAPAIPVARGTIEAATGHLGAVAIRLDLVNRQISQAEAQLDTLTSQLAEKEMPEDGNQAEQRDVTILRSLPGVGRIVLATLLAEASDALQRRDYHALRCLSGVAPITKRSGKSRIVLMRQAVHVRLRNSVYHWARVAVQHDLRSKAKYAALRARGHGHGRALRSVADRLIAVACTMLENQTTFDPLHTA

SEQ ID NO: 261822 - protein, 370 aa, unidentified
MKKYSEAFIGFDTAKKKYAVAVAEDGRNGEIRYLGEIDSSPATGEKVIGKLAERYAKLHVCYEAGPTGYGLYRQVKALGHECAVVAPSLIPRKPGERIKTNRRDAVTLARSLRAGDLTSVWVPDVIHEAVRDLSRARDAAGEDVRKKRRQLLSFLLRHGRIFSGHKHWSLAHRRWLAEQKFEHPAQQIVFQDAIDVIEDGAARLRRLEEQLLAITPSWSMAPVVAAYQAMRGVSFIVAVTFVAEIGDVRRFDNPRQLMAFLGLIPSERSTGETVRRGGLTLAGNRRARRVLVEGAWTYRYPARVSETLRARLQGLPKAVRDIAWKAQIRLCARYRRLTAAGKKTPVVIAAIAREMAAFLWAIGHQIEPLI

SEQ ID NO: 261823 - protein, 457 aa, unidentified
MEQALAQRNRSVSVKPGKSRAALTITHPNAAGIDIGSASHFVAVPPDRDDQPVREFPSFTVDLNALADWLEACRVDTVAMESTGVYWIALFELLESRGFTVLLVNARHVKNVSGRKSDVLDCQWLQQLMTYGLLSGAFRPGEQVCVLRSLWRQRGMLLKSQARDVQHMQKALTQMNVQLANVIADIVGETGQKILRAIVAGERDGQVLGAMKNVRVRASVDEIAKSLQGNWRAEHLFALKQALDAFDFIGTQLAECDREIEQQLHCLQAHDGEPAKGKKRGRARNAPKFDLRVQLFKMCGVDLTRIDGVDVTTALAVVSEIGVDMSRFPTIKHFTSWLGLCPGTKITGGKVMSGKTKRCVNRAAQALRLAAAALRSSKSALGAYFRRLCSRMDKPKAVTAAAHKLARLIYTMLTKGEEYTDQGQDYYEERYRERVLRALSQRAAKLGMQMVPIEQPA

SEQ ID NO: 261824 - protein, 356 aa, unidentified
MEKIGNVEDLPSVEEVILGVDTHLDLHVAVALDQLGRRLGQITVPTSTRGYARLLRWAEGFGTVGCVGIEGASSYGVGLVRYLQCAEIPVVEVERPKRRHLRRNGKSDPIDAEAAARAVLAGEAAGEPKSADGQVGMIRTLRSARQSAVKARSQAANQLQALLVTAPEELRHTLRKLPTKALVSTCARFRPVKEPDDVRTATKIALRSVARRHEALSEEIAELDERLDRLVARTSPGLISLPAISTHHAAALLCVAGDNPRRLGSEASFASLCGVSPIEASSGKVVRHRLNRGGNRDANRALHMICVVRMGSDRRTQQYVARRPAEGKSKREIMRCLKRYTAREVYRVLVQPTATS

SEQ ID NO: 261825 - protein, 312 aa, unidentified
MITVSKIYVGVDISKDNLDICIEPLGKSFRIANSQEAIEKFIKKLPEHDGIKIGCESTGGYEKLFDQILNKHCIELWIIEPKRIKGFIVSKNCKSKTDKIDAQKIAQFVMQNNEDYKQIKRTECEQKLRALVDRKQDLIMMLASEKTRFKHPSHALSIKSIKKIMDFFETEIESIDVQIKESIELNEDLKKKSELLISIPGIGKATAAVLLSSLPELGIIGNNQIASLIGVAPYTRESGNYKGKSFISGGRAIPRKALYMCALTTIKYHLPLKDFYDRLKAKNKPFKVVMVAIMRKLIIIANVILRKGEMCK

SEQ ID NO: 261826 - protein, 453 aa, unidentified
MAQRNRSIPLKPGKSRAALTITHPNAAGIDIGSASHFVAVPPDRDDEPVREFPSFTVDLNALADWLTACGVDTVAMESTGVYWIPLFELLESRGFKVLLVNARHVKNVSGRKSDVLDCQWLQQLMTYGLLRGAFRPADAVCVLRALWRQRGMLLRGQGRQVQHMQKALTQMNIQLTNVISDVVGETGQKILRAIVAGERDGFVLAAMKNVRIRASVDEIAKSLSGNWRAEHLFALKQALAMFDFIGTQLAECDREIEQQLQSLQAHEGEPAKGKKRGRARNAPKFDLRTQLFQMCGVDLTRIDGIDVTTALAVISETGADMSRFPTVGHFASWLGLCPGTKITGGKVMSGKTKRVANRAAQALRLAAAALRSSQSALGAYFRRMCSRMDKPKAVTAAAHKLARLIYSMLTKGEEYTDQGQDYYEERYRQRVLHQLAQRAEKLGMKLVATEQPA

SEQ ID NO: 261827 - protein, 400 aa, unidentified
MNPVIGLDVSKGESHAQAFLDRGVPHGKIFKFNHDLEGLSSFLNYVRAVESAAGVSPCIVMEATGHYHSPVVQFLDEHQYLYIVINPLISYEAKKTNLRRVKTDAADAYQLGALFYKEEFEPIKKRGQHLMNLRYLTRQYESLTGMYVQAKLQFQAILDQVFPEYHGVFGDLYSKVSLRFLALHPTSKEVLGMTVEEITTTIQRLTGRGRSVSWCLERAQILAAAARRNPFKETAFPSHLISMQLLIKLLLQYQDHLSDLDKSIETLAEELLEYDLIQSIPGIGTKIAATILAEIGEIDRFDHAKKLVAFAGVDPSVFASGKFVATQNRITKHGSRRLRTALYQAVRCGIRSNRNKKLRAYYDKKRAEGKLFKVAVIACVNKLIHWIFAILTSKEAFRLE

SEQ ID NO: 261828 - protein, 431 aa, unidentified
MIKINYLSTLFVGIDVSSKSNAVCAIDFDQNQYISSSFRNNQPGADDLVKMILECMKTHSNLNTIIIVLESTSVYSVHIANFLSTSEVLMPYKPYVYCLNPKATANYRKSYIAMQKTDPLDAFLIADFARCGHTKKCVPWRGSQFLALKRLTRHRLHITECITREKTYMVSNLYLKFSELQILDDTDKPFSNIYGSTCSAILTEFMSLQDIIDSPEDELLQFIAQKSRNRISNISKTSELLKKAARDSYRLDKCLYEPINVSLASSFNCIQAYLKELKLIDEAIEKCIKGMNTNAFTILKSIPGIGPVWAAGILSEIGDINAFHSSDALAKYAGLTWSKNDSGDFVSEDNHMQKAGNTYLRYYLGEATNSVRRHIPEYKEFYNKKYAEVTKHQHKRALALTSRKFVRLVFGLLVKNQLYTGEKLDAEFNNF

SEQ ID NO: 261829 - protein, 367 aa, unidentified
MKKVSTAAVKATKNFSQPKLTIGLDLGDRSSWYCLLDEVGEVLLEQKLGTTPKAMREVFGSMPCCRIALETGMHSPWVSRWLSELGHEVMVAHARNVRLIGESRKKDDRLDARTLARLARIDPQLLCPVKHRSAKAQADLSLIRARAGLVRARTALVNTARGLAKSYGERLRGCNVRNMNPEKAEGLSPELPRALEPLLAGIESLSEGIREYNERIEKLAQQSYPQVALLKQVKGVGTLIALTFLLTLEDAHRFRKSRDVGCYLGLQPGRRNSGQSEPQMHISKEGDPYLRTLLVQGAHHMLGPFGADSDLRRWGLKLAERGGKNGKKRAIVATARKLAVLLHRLWVSGEVYEPLRNGNQTAMPAAA

SEQ ID NO: 261830 - protein, 465 aa, unidentified
MTTGKKLWRNRKERKEWARRLQSEDPGLEVVHPHAAGIDVGNSAHYVAVRPDRDPGPVRRFECFTADLHHLANWLKSCGVKTVVMQSTGVYWIPLYEVLEDRGFEVYLVNARHTKNLPGRKSDVQESQWLLKLHTYGLLSNSFQPPAEIRVLRTYWRQRGEHVAGAAICILRMQKVLTQMNVQLANVISDISGLTGQTIIRAILNGERDPLKLAALSDWRVHASQEEIAKSLEGNWRPELLFVLQQEVDMYDTYQRRVTECDQQLQKHLSTFAGTLAVQAPPKGKAKTKKAAAKNAPRFDLSSELQRITGVDLTRIDGIDVMVSQTILSEVGLDMSRWKTEAHFSSWLGLCPDNRISGDKVLGRGTRRVVNRAATALRQAANTLLRSRSYLGAQFRRLRTKLGAPKAITAMAHRLARLVYRMLKYGQAYVDKGTEYYEHRFREQPIQLLTRKAAKFGLQITPIQA

SEQ ID NO: 261831 - protein, 379 aa, unidentified
MQTIDTVNPSILLAIELSASTWLVAARVPGLEKQHRIDSGDTAALLALISSLRARAARRLDAIGIVCCFEAGRDGFWLHRLLTAHGVICHVLEPTSILVNRRARRAKTDRLDAEGMLRVLAAYLRGDHQACSMVRVPTPEEEDAKRTHREREKLVQERLRIENRIEALLFTQGIRKRPSLRSWERDLAVLRTGDGREIPRHLRAELDRLRRRLVMTLELIREVEAERDQAAKTKPQDQTCHKIAALCRIRGIGENFAAVLTREVFYRSFDNRRQIASYVGITPMPYQSGGMDRDRRISRAGNPRARTTMIQLAWLWLRYQPGSELAEWFRERVGTLAGRTRRIAIVAMARKLLIALWRYAETGVIPAGAEIRAETAVAA

SEQ ID NO: 261832 - protein, 416 aa, unidentified
MKREWKTSEVRYIGLDVHKQYITVGGMNKEQEIVLRPRNVEMERFKRWAQENLRKTDEVVLEATTNTWDVYDTIVPLVKRVVVAHPAEVKQIANSRVKTDNQDVIRLVRLLIADLVPEVWVPPLEVRELRALISYRWRLVKMSTAIQNRMHSLLHRHNIQAPNGKVDMGENRAWWEGIALSELEALRMKQELKTLRLVREHILEVEKELGRLSTSERWRKQAVHVMQLPGVGVIVTMTILSAIGDIRRFESPKKLVGYAGLGAGVHASGQKHREKGITKFGRKELRWALVEASWQAVRSNPHWRAQYDALCKRKHPNQAIVAIARKLLVTLWYLLSKQESYKGSSDEELAYKMLTWAWHMDKSALNGMSNQQFAKYGLIQLGRGEHLTRIVKGGQPRRIASKEEVLALKPDLRPPL

SEQ ID NO: 261833 - protein, 351 aa, unidentified
MVVTVGIDVHKDTHCAVAIDEAGREVARPLTVRATDAGHRQLMRWAKREFADVVEFAVEDCRHVSTRLERALLDAGAVVVRVPPKPMAQTRTSARTRGKSDPIDALAIGRASVREPGLPRAEHTHASREVKLLVDHREDLVATRTELENRLRWRLHELDPEFDLPPRRLDQPKQLARTRTRLEQAPASTLRRIALAELADIGTLMARINALERELTELVRAQAPQLLALPGCGPLTAAKLLGETANPARFRSEAAFAMHAGVAPIPASSGRTHRHRLARGGNRQLNVALHRIAVTQIRLDGLGRTYYQRRRAQGDTTMEALRVLKRRLARVVFHLLRPTDTAAPACLPDAA

SEQ ID NO: 261834 - protein, 336 aa, unidentified
MEPTTIAIDLAKRVFQIHYVEPETGAIHSKVLKRAQLAPFFANRPASRVVMEASGSAHHWARVLARLGHDVRLIAAQFVRPFVKSNKNDEADAAAIWEAAQRPGMRFVAVKTEDQQAMLAMHRIRQQLVRIRVMQVNQLRGLLYEFGVVLPQGRRASIDAAKAALASLADELPAMLLDSLQDQLSRLRALDEQIARIEQRILNWRRNDDACLRISEIPGVGVLTATAAVSVIGQARTFRSGREFAAYLGLVPRQNGSGGKIKLGGISKRGDVYLRTLLIHGARSVISSSKHLPERLRQMLSRRPTNVVAVALANKMARTIWALLAHGRTYEAAPSQ

SEQ ID NO: 261835 - protein, 462 aa, unidentified
MHTQMLSFEDSAIRNAGFSGDVGEKEAQEMNGQEQIVAWIGIDWADEAHQVWEYNVGTGGKQNYAVRHSGESLQEWLIELRNRYGGKRVSVVLEQARGGLIYALMSTDFLAIYPVNPQSLAKYRKALYPSGAKSDPADAELLGEMVRQNPSRFRAWVPGDAQTRTLQLLTEGRRKLVEDMTARTNQLTSALKTYYPQALEWAGNLGSEQACAFFEKWPTLVELQKSRPFRIRQFYEKYGRPSREALKERVDQIQKAQPLTLDGPVVMANVMMVQALVTQIRPIRLAIEKYDHEIERVFQQHPDRVVFESFPGAGKVLAPRLLAAFGADRDRFQTALEVQEFSGIAPVTERSGKAIWVHRRLACPKFLLQTFHEFANCAWRFCAWSKLYYQQQRGRGKDHHAAVRALAYKWIRIMFRCWKDRTPYVDSVYVKSLTKRGSHLARGLNHPDSVVEMLSTVCESRA

SEQ ID NO: 261836 - protein, 327 aa, unidentified
MKELFAGVDIHKEKYVGCIVDGEGAVVREHTFPPTREGAQSFLCGMPVKAVAIEACGMWRAALKVFRELGYEVKLTSPKKTKDIAGKKKTDKVDAKTLADLLRTGFLPKVYIPDDEMLRLRDLARHKAQLTRMRADVQRKIRSILMLKGIKSPKGLWTIKNVEWLVNLNDENIANWVRLFSSFKAEEKETLRRISKIAKNQRLTNILMTIPGIAEFSSLMILEEIADIKRFKTPKELVMYAGLCPGIYQTGNTERNVKNNAVNNWLKWIITECSGRASTMKNTKFMYHYAKIKQRKNAKVARRSTARKMLTIIWHMLQKEEPYRHAA

SEQ ID NO: 261837 - protein, 355 aa, unidentified
MTDNHQKIIIGIDTHKDFHHVAVISALGESLTDRKFDATPDGYTALIAWVTGQGDVLRAGVEGTGSYGAALTKRLRTAGITVIDILAPDKQERRLRGKTDQIDAYSAARAVLARRARTVPKIRDGEVEAMRVLRTTRKMVVKQRTETMNQLHSLLVSAPENLRAKLAGLKAKDIAKASARLRDLATDDVVTAATKDAAKSLGRRFLELTIESDRLEDRIDALVTAYAPELLAVYGVGPDVAATLLTVAGENVDRIGTESALAHLAGTAPIPASSGKTNRHRLNRGGNRQGNAAFHRIVLVRMVRHPETRAYVEKTIARGKTKRDTMRLLKRYLAREIFPILVAVQQRHAATQLAA

SEQ ID NO: 261838 - protein, 396 aa, unidentified
MYYVGIDISKNTFDYFIRNDDVDRIDSGKLKQNKEGYSFLLSSLKDIDPKDILIGFESTSTYHINLFNFLVSNGLFPSIINSYAVHNFAKHFNLRGAKTDKIDAKIIARFLLTFSPTPSKGNLDEIKLISREMVKVTKYITKLKNELKRLINLVFPELDSTNSDVRFDSRYKGWWIILKHYPSAKKISKASVEDLYNILPNRSKRSFTVEKLEKLILMAKDSVGSNKPSLEKLLVMYVNRLITSMDEKEELEQVVLDLMDEDNLTNIELLKTIPGIDSLSISIVSEIIDISRFHSAKSLVAFAGIDPVPKQSGDKDGYRRISKRGSKYLRRAIGMAANSARMNNDYFKYFYNKLVNSGKPHWVALMALANKLLRIIYSLLKNKTEYDPLYHYKLMS

SEQ ID NO: 261839 - protein, 419 aa, unidentified
MEQKYVNPKVSRISQDTLIVGIDVAKRNHWVRMTDYRGIDLISPFKINNTIDGIKMLEEKIRIIKQKEGLNNVILGMEPSGHYWKVLAWQMKSNEQVNYLVGVNPYHVKKSKEFDDNSPSKNDKKDAGLIAKLIKDGRYFDMHLSNDVYSELKVLTTTREQLVSKRKNSKNIVIAIIDEYFPEYEKIYKNIFSEGSMKLLKTYPFPEEILRVGVEEIESVLKESTKGKDWKSRARKIYEAARESVGVRAGQKSAKMKLRMLLEEIELLTRQIQELEEEMKKMIEETEEGEYIESVPGIGTVMTATILGETGGLSRFKSWKQIRKLAGLNLYEESSGEHKGKTRITKRGRPLLRKIIYLMAKTVIRHNREIMEKYLKLRKREKNPLKETQALIAIGLKMIRIIFKLVKSKTRYEPERVYV

SEQ ID NO: 261840 - protein, 314 aa, unidentified
MTEITIGIDVSKKRLDVAVLPSGDEFTTLNDEASCCELAAKLKSLNPTLIVLEATGGLENLVTGVLVAEGLPAVVINPRQARDFAKATGRLAKTDRIDAKVLALFGVAIKPEPRPYKDEDAQALTALITRRRQIIDMITAERNRLASSHSSVKNDIAQTIKWLESRVKDIDDDLSGFIRRNALWKAKADILTTCKGIGPVVSTTMLCSLPELGTLNRRQISGLVGVCPYNRDSGTMRGKRTIFGGRATVRAMLYMAALSAVRFNPVIKTFYDRLIRAGKAYKVAMVACMRKLLTILNAMLKDMKPWSPEFQYAP

SEQ ID NO: 261841 - protein, 516 aa, unidentified
MVATVVRRPRRVFQVHKPNGQLSPRVQAVGPERFGIIAVDPAKKRSRLLLANFYGTVLVPPITVEHERGPIEAALAALRGAIREHNLGDVVVALERTGTYHRPLQRAFQAAGFETRLVHPFTSKQFRLPADPDNKTDDTDLAGIVRAVTQGFGLLEPVWPELYASIQMLRRHRRDLVDKAALLQNQIRETLHSAMPGFEAAFTHLWQSPAPLAIARQFSSAADILQAGADGLRAALKDAGVRPRHDTIGKVLDWARNAPQGHPLNALQRRIFTALDDDRREKTRLINAIEVDLARLVVQTPYAILLAIPGINIVTVADLAGEMGPMEFYLNANHITGRAGLVPCRYQSDQVDRSGPLVKRANRRLRAVLMQTASNLINCNNTYNARAAAWRRQGKDERWIRVKVAKSFSRLLFAMVAGRRIFPHPALQPRHYVLGKLLEFHMEHKVAPEQMRADLEALCDQLPTRARAAEIPPLQERLDELTRRRAHGPRPLAEILPIVLVRLQGVQSTPRSEDPS

SEQ ID NO: 261842 - protein, 320 aa, unidentified
MMAQTDSVVAGIDVAKDKVDACIRMIAERPIFPSTTKGRRQLVAWVRKHKVTKVVMEASGGYEREWAKALRQAGIEVRIVDPKRVRSFALSAGCLAKNDAIDAEMIAWFAETFSEAPSQVDDPAHEEMKALVNGRKSLTDLRARLEMQKEHEAPALVRKAHARLLKKLADELATIDAAIVATIKATPAFAERAEIIRSVPGFAEATAVTLLAGLPELGQVSDAVAAALVGVAPYDDDSGKRHGQRCIKGGRRWVRNALYMPCVGAATLNNPVFKAFYERLIAKGKAPKVALVACMRKLIVILNTMIARGEKWDPKRYQVV

SEQ ID NO: 261843 - protein, 329 aa, unidentified
MKKNWYVGIDVSKKWLDAAIFVENSDLKGFIHTQVGNDKQGYRELLRWLKEHDVDASTCTYGMEHTGFYSDGLQHFLDKKGYRYTMLEPAVIKHYPIQPREKNDRLDAAKIADYLFRFKDTIKLSRVPDKTMEELRSLHRERKFYVEDRVCYMNRKQVVGKEEAKRLDKMISMLDKQIDSIEEKIREIIQNDESLMENYLYLDSIKGIGFVNAVNAIVITQNFTAFKTARDYASYLGVAPHTKTSGTTVRWKPKPRKHCDLTAKADISQAAKIAVVHDVELKRFYERKCNGKDDADTVRKAMNAVKFKLVLRMFAVVKQKHTYKQLTTI

SEQ ID NO: 261844 - protein, 321 aa, unidentified
MSSAVTELYVGIDVSKRRLDASLRPTGEHFGLPNDPAGIDTLVGRLERARPKLVILEATGGFERAVAAALAAAAIPVATVNPRQARDFARATGKLAKTDRIDAEVLARFAEAVRPAAKALPDEEAREFAAILARRRQTVEMLTAEKNRLGAAASSPVGKRIEAHIKWLEKGLARTDGDLDGAIRESPTWRENEALSRGVPGVGPVLARTLMAELPELGGGELTPKQLAALVGVAPLNRDSGTLRGRRTVWGGRERVRQAPYMGALVATRFNPTIEEFYERLVGAGKPKKVALVACMRKLLTILNAILKHRTPWRSPHALAP

SEQ ID NO: 261845 - protein, 412 aa, unidentified
MNPVVGLDVSKGESQVQAFLDKGKPYRKSFSIKHTLDGLDRLLEFLREIEKLADGKQPSVILESTGQYHMPVIQFLEEQQYVYIIVNPLISHRARSTNLRKVKTDAIDAYQLCELYYKEELEPYKKRGIHLLNLRNLTRQQETVSSTAVQTKLQLQSILDQIFPEYRGVFGDLYSKISLQILSIFPTSKEVLSVSESDLTNKIAELCTTRSEKWAKEKAIKLREAALRNPFQNNLYLSHIFNLRMFINIVLQYQEHLSKLAAEIDALAKEIEEYEIIQSISGVGEKIAATIISEIGEIERFNHPKKLVAFAGIDPSVYSSGRFTASINRITKRGSSRLRQALFMAVQCGIRDARKQKTSEEIIPRNKKLRKFYDKKREEGKPFRVAIIACANKLLHWIYALLKRKEAFQNAV

SEQ ID NO: 261846 - protein, 293 aa, unidentified
MNYSGIDLHSNNSVVSVIDETDRVVAEKRLPNELARILTFLAPWQAELAGVVIESTYNWYWLVDGLQAAGFVVHLANTTAIRKYDGLKHSGDETDARYLAHLLRLGILPTGTILPPQQRAVRDLARKRMQLVRSRTTHILAVENITARQFGKRITSHQVIRLDEEAIKQMRLPEDVELALRANVAVITTLSAQIAIVEKRLQEKVAPDAHYDLLTTVPGIGQTLATVILLEVGTIERFASAGNFASYARCVDSQRISNGKKKGEGNTENGNPYLSRAFIEAANFALRFSAEAI

SEQ ID NO: 261847 - protein, 358 aa, unidentified
MNNITRVGVDLAKNVIQVCAVDVTGKVVLNKPLPRDKFLTWCAELPKGCLIAMEACSGSHHWARELNKLGLNAKIIAASHVSPYRMEGKGGKNDANDAAAVCEAASRPNMRFVPVKTSNQQGILCVHRMREGFKEERTGCINRIRGLIAEFGIVVSKSPNKLREKLQDILEDAENGLDWLARLAIQELYTHWCAIDEKIDWCDKRINAHISDDVQAQSAKQLIGVGALTASAAVATVVDFKQFKNGAQFGAWLGLTPKQSSSGGKTKLGKITKRGDTYLRTLLIQGAKAAVMSAHMRQDPISKWLFQLKEKSGWQKAAVAMANKNARILWAVMTKGINFDPAYVSVKPGGSIGVAIAV

SEQ ID NO: 261848 - protein, 337 aa, unidentified
MAYFAGLDVSMKETHICVVDGDGGVVLETRTATLPEAIAAALAKAPSCQRVVLETGRMAPTLFHGLEALGVPVVCIESRQAYQALKSLATHKTDRNDARGLAQLARTGFFKPVHVKSLAAHAIRALIIARKKLVGQRVTLENQIRGLAVVFAVRLPRGLSPAFETQVISGSKGVAGLSGAVCGLLAARNAVLEAITAIDRDMKRLARASEACRRLMTIPGVGQLTALAFVAVIDEPERFRRSRDVGAYLGLVPRRYQSGEVDYTGSISKCGDRRVRTLLYEAANVMLTRYRGALALKEWALDIARRSTMRKARIALARRLAIIMHAMLRHGTEFRAA

SEQ ID NO: 261849 - protein, 395 aa, unidentified
MFFLGIDIGKNNHVASMLGEDGKPVFKAFSFANTTDGGESLLAKLERSGANNEILVVGLEATGHYWLAVYSFLHEKGYKQHVINPIQTDGWRKGVEIRKRKTDTIDSVLIAELVRYGDFIEARLPDEALLSLKNLTRFRTYLVDSISDLKRKVICVLDQVFPEYQGIFSDVFGVASKEVLLQFSSPSELEDLSVDTLAELLAKFSRKRIGTDKANELSDAAKTSFGVTFCRESFTFQLRMMIEQIKYIESQVKDTETEIKRIMSEIASPIMTIPGIGKTTGAVILGEIGDISKFDNPKKLVAFAGIDATVRQSGEFEGTNNKMSKRGSPYLRRALFQSALAASVGKNPDPVLSEFYHKKLAEGKHHNTAVGAVARKMCNIIHSVLTNNRPYEVRK

SEQ ID NO: 261850 - protein, 392 aa, unidentified
MLNSGTKQHSTGYSQDILLSRVKYLYVRWVMAKKFHGIDLHKRYSTIIVRDSEGSEIEYRSHCTDFQEYVETLGEHDSVVVESINNAFYWADQIEKQGAACHIVDAHKFKIIKDSWNKTDKRDAANLSLALWMAEMRKEFKMPTVYKPSIEVRELRKLFSQYQMITEQIAQYKNSIQAIFVENGIALSKEQKYELYKPEGARAILENLAVTEASRHCIEMSHAMIRNLTEQKETMKKLIIEMGTSFEREIRLLITIKGVTPLLALAFLADVGDIKRFKNARGFNAYLGVVPTVKSSGGKTYLGHINRQSRKLARSLFTQPINHMIDSSETMTEFYNGIKLRRGVGRSRIAVIRKIFNIMRRMLLNGEEYRGKNEENFQKKLHDFEKIIHQAA

SEQ ID NO: 261851 - protein, 350 aa, unidentified
MEYISVDAHKRYSFVSIENSEGKLRCEARVEHRRGAIREFLARRLPGSPVAVETVGNWYWIVGEIEEAGMVPKLVHAYRAKMMLASTNKTDRLDARGMNKLQRSGTLPTVWIAPKQLRDQRDLFRTRMILAGQRTRLKNRIHASLSKYGLQVEGSSDAFNKKGRKELEKCILLLPEHTRYSVERVLEQLDCTERQIGLLEKRMKEVFLPNEEIRLLMTLPGIGLILAVVILNEIGEIGRFGSSGQLASYSGVVPRVKASGGKVRLGRLRSDVNRYLKWAFIEAGNSVAIHRAAHPQWYVKQLYERVRARRGHQAAIGAVGRHLAEASYWVLKKGEEYRPPKTGSISSKKG

SEQ ID NO: 261852 - protein, 328 aa, unidentified
MLEGNTEKEDKVLENVPVFIGIDVSKARLDICVRPLPSRESFANDEVGIRTLVKGLRELQPALIVLEATGGVERRVVRALASEELPVVVVNPRQVRDFAKATGQLAKTDRIDAEVLARFGEAVRPELRPLPDVCSQELRALVARRRQITEMIVAESNRLSGASKRVRKRIDAHIRWLEAELDRADKDLDQNIGQSPIWREKEDLLKSVPGIGPVISRTLLAELPELGQCNRKQIAALVGVAPLNWDSGIFRGRRAIWGGRSAVRAALYMAALVASRRNAVIQDFYRRLRNTGKAPKVALVACMRKLLTILNAMIKHKTHWSLNTVQAT

SEQ ID NO: 261853 - protein, 343 aa, unidentified
MDKIATIGLDIAKQVFQVHGADAQGVTLFNRKLRRSEVLPFFEKLSPCIVAMEACGSAHHWAREIGALGHEARILPAQYVAPFVTRGKTDAGDAIAITQAMKRPDIRSVPMKTAAQQAATMVLHTRTFFVRQRVNAVNALRGYMAEFGLVANRGIAHFGKLVAALPKRGDARIPPAARLMLDEILAEIETLTLRIQRIDDQIAAHAKQDQDIRRLTAIPGIGTLTASAIQAHVPDPGCFKSARHFSAWLGLTPKQNSSGEKLRSGSISRMGNAELRSLLYIGAMGVLTAARRFGTRSGWLRRLMVRRPLRVAAVALAHKTARVVWALLTKGGSYHAPAELVES

SEQ ID NO: 261854 - protein, 445 aa, unidentified
MSPRNEGKAETLPFAAWIGLDWADQKHFWSMRTTDGKIQRGQLDNKPETVEVWASELAQRFGGRPVALALEQARGAVVGMLSKYAHLVLFPVHPTTMANYRKTFSPSGAKSDSKDGDLILDLLIKHPEQIRSLRPDTVETRKLKFLTEERRKLVNLHTSQLQCLINWLKQVFPQILYWFDDPSTPLVEDLLSRWPTLPQLQKASPKTLLKFLHQHNCRSEERNQQRLAEFRQAVPAADDPALLAAGILCIQNSVRWLSQMRTAIKVFDRQIAETFQAHPDRAIVESFPGAGPALEPRLIAAVGTQRDRFDSANSLACFTGIAPVEESSGNSCWTHWRRACPKFVRQTFHEWANCSIRTCSWARAYYDQLRARGKSHHAAIRALAYKWIRIFFRCWRDREPYSEQRYLESLQRRAPQKTSSAPGPADGKLLLKKCGDFTKLEGFSS

SEQ ID NO: 261855 - protein, 365 aa, unidentified
MQKISTMRRNGKNIFKGQLTIGLDLGDRFSAYCVLDEAGEIILEQKLPTTPEAMKQTLGKMPRSRIAMETGTHSPWVSRLLAALGHEVIVAHAQNVRLIVKSRRKDDRLDARTLARLARIDPELLSPVRHRSAQAQLHLTEIRARAGLVSARTALVNAARGLVKSYGERLRKCGTQQFRRETMSGLSAGLREALEPLLQEVESLNERIQEYDRRIEKMAKEAYPETALLKQGKGVGDLIATTYVLTIEDPHRFRKSRDAGCFVGLQPGRRNSGESEPQMHISKEGDEYLRTLLVQGAHYILGPFGEDSDLRRWGQKLAERGGKNAKKRAVVAVARKLAVLLHRLWVSAEVYEPLHNSQKVMSAVA

SEQ ID NO: 261856 - protein, 345 aa, unidentified
MEIRTIGIDLGKTVFHFVGVNARGEVVVRKKGSRTQLLRFTSNLRGCLIGMEACGGSHFLGRALREQGHDVRLMPAQYVKPYVKTNKNDYIDAEACAEAVTRPTMRFVPIKTDDQLDLQSLHRVRERWVVRRTAVINQIRGMLLERGITIRKGRHHIEESLPGILEDADNKLSGALRVLLTQLRSEMQYLHGQIEESDKLIARICGELEQCRRLVAIPGIGPITATATVAAIGNGAAFKKGRGFSAWLGVVPGEHSTGGKQKLTGTSRRGNKYLRKLFVQGAHTVLLQKTKQSSGLSTWLVNLVSRKRKQVATVALANKMARMAWAVLFKGEAYRPPTAPQVIAA

SEQ ID NO: 261857 - protein, 406 aa, unidentified
MNAVGIDVSKEKSTVVILRPFGEVVAAPYDVSHTDSELDRLAKVIKKLPGETRVVMEATGVYYEPVARRLHEHGIFVSVVNPVLISDYGDNTLRKAKTDRKDAIKIASYALSAWLDLVEYKPEEDRRRTLKSLNRQVKKVIKVNTMLKNNLISLTDTAFPGINKLFTSQERPSDGHLKWVDFVAKFSHRDTVAKLSLNAFKKKYKSWCEKNKYHYQDSKAEEIHAHARKCVAGVSAEETFCLMVTKAAEFVNAACENENALKNEMDRLSSTLPEYEVVMGMYGVGKSTGPQLMAEIGDTRRFRNRRAITAFFGYDTEPDDSGQHISKSRPITKKGSPSLRRTLFIIMKTLVTKKPVDNPVYAFLDKKRSEGKHYYSYMTAASAKFLRIYYAKVNEVLNKKETSMCT

SEQ ID NO: 261858 - protein, 372 aa, unidentified
MGDYSVAYIGFDTAKLRHAVAIAEEGRTGELRFLGEIENTEAATIKLVKKLASKYRSLSFCYEAGPTGYELYRLIKRLGHDCIVAAPSLIPRKAGDRVKTNRRDAVGLARLLRAGDLTAVWVPDPRHEAMRDLTRSREAAVEDLVSKRQQVLSLLLRIGRHYPGKRNWTRMHMNWLVSQKFEHGEQRIAFEEMLLAIRQAQERVVRLEQAIRNALPEWSLSDLVTALMAMRGLDLVSASAFLAEMGDLSRFASARELMAYLGLVPSEQSSGEKVKRGGITKAGNRRARRILIESSWSYRHPPRVGKDKLARTAAVPREVREIAWKAQHRLTSRYRTLIRNGKKPTVVVTAIARELSGFIWAINRAVRPAMTG

SEQ ID NO: 261859 - protein, 376 aa, unidentified
MSQSTVRFLGLDAHADTIAAAIAEPSGEVRPLGTIPNRLESLRKLVKKLQPVSSLRACYEAGPTGYVLYWQLAALGVRCEVIAPSLVPTKAGDRVKTDRRDAAKLARSYRSGDLTPVWVPDAAHEALRDLVRAREDAKQDQTRARHRLGKFLLRLGKRPETTMKSWTAKYMEWLERQVHFDEPALEATFLDYVHEVSHQAERIIELEKAIDQAIGAAPPQIRAVIEALQALRGVAKITAVSIAAEVGSFSRFQGPRSLMGYSGMVASEFSSGNRVQRGAITKTGNAHLRRVIGEAAWAYQRRPWVGGFLRKRQQGLEQDVKEIAWKAQQRLHSRYTRLSARGKNKNQVVTAVGRELLGFIWAIATRTEAKYQKKTA

SEQ ID NO: 261860 - protein, 319 aa, unidentified
MKENQPETYVGIDVSKAKHDVAIGIDGEYWRANNDAVGIRIIVERLLTIGPTLIVVESTGGLEMALITEMYAAGLPFSLVHPGRVKEFARSIGLLAKTDKLDARLLARFAKAVNPPLSHLPGEAEQYLNALLLRRRQLLDILVDEKNHLVSTCLSLRLTVEEHITWLQTEIDDLNQQIADQISQIPHFKEKEAILRSAKGVGPVLCAKLLSGLPELGKLDRKKIAALVGVAPFNNDSGYRRGKRKTKGGRADVREVLYMATVAAVRFNPVIRPYYQYLLKRGKLKKVAIVACMRKFITILNAMIRDKRPFMVPNQPIQH

SEQ ID NO: 261861 - protein, 341 aa, unidentified
MDTITYGLDIAKRVFQMYWVEGDTGEIVNRRFTRQQLIEFLGQRVPGRVALEACGSAHWWARKIASLGHEVILLHAKFARPFVQTNKTDAADARAICLAVQQPGMRYVAPKTVEQQATLALHRMRSLLIKSRTMQVNQLRGLLFEFGVVLTAGRVAGMADVRERLHEVEQAVPGTLFCALRDQLQLIDRINEEIKKLEKQLAVWQKQEAACRKIAEIPGIGPLTATALVATIGNPAAFKSGRELAAYLGLVPRQTGTGGKLRLGGISKCGDNYLRMLLIHGARAVLFRSKCKGVWCEQLLVRRPVNVATVALANKMARTAWALLANDRTYQNNYAAMQQAA

SEQ ID NO: 261862 - protein, 355 aa, unidentified
MDSVKYIGMDVHKEAISIAVLNSSGKLVMESTIETKAITILDFLKGLRGSLHVTLEEGTWAAWLYDLIKPHVTELVVCNPRRNALLKEGSKSDRIDARKLAELLRSNMVRSVYHGENGVRTLRELARSYLAINKDLGRVMSRVKAIYRSWGIPCTGKQVYAPRYRSEWLGKIREAGVQRRAEFYYQQFDALRSLRQDVRRALLAEAQKHDAWKLLRTIPFIGPIRAALLIALIQTPHRFRTKRQLWTFSGFGIETYSSAEHRYVQGELQRAKKPASVRGLNRNHNHDLKNLFKSAATVAAAKPGPFQEFYERLLAKGMRPEMARLTLARKMAAITLTIWKKGARFDVQHLKPQTA

SEQ ID NO: 261863 - protein, 394 aa, unidentified
MKLIGIDIGKNKHFFCVMDQQTGEIISQPVSFSNDKEGFDFLIQKINSYPKDSVLIGMEDTGHYHFALLKYLLDLQYTVALINPKTTDFNRKMQGGITKNDKLDTINICDVLDTPERKKQYRITKVNSFDLYEQKQLTRHHHNLKEEENVYKNRLQKCIDIVFPEFNKLFNSKYGIVYMNILKMFGSAENIANTDIRTIRKCFEIEGRGNRISLTPERLKECARSSIGISSSAEVIQIKHLTAQIELIEEQLTEIDKKIEEFSIQNNSPILSIPGISHFSGTSILAELGDISNYSKPSQIIKFAGVAPLHYESSQFNAQHTAITKKGSKYLRKTLYQIILPVIKHNQVFYKYYQLKIFQGKGHRCAQGHCVRKLLRIIYHLLKTNQQFDPQLLR

SEQ ID NO: 261864 - protein, 327 aa, unidentified
MSKSNIVCAGIDTGKYKLDVALAGAAARRQVDNTAEGHARLSAWLRQHAVERVGIEASGGYEGAVVAHLRREGFVVIVWQPAQVRAYAKFLLQHAKNDGIDAKLVADCTAAAKTIHAPPDPRLLPFAEHLTFIEQLGEDIARAKTRRESCHGEERIRAHWTAEIARLKGLLRTEFKALVAKIRSHADLAERLDLIDSVAGVGLPTAVAILVRMPELGQLSRGEAAALVGVAPYDDDSGTYVGIRHIAGGRERVRGALYAAAFPASQRWNPALIALYRRLIAAGKPHKVALVACTRKLVIYVNTVVERGTPWTPQGRGRQADPALPAT

SEQ ID NO: 261865 - protein, 326 aa, unidentified
MESVVGIDVSKDSLDVVFVNDGRHLHKIFSNHAIGHNHLHNWLVAQRSGTVRVCLEATGQYGEGVTEYLYQRGYPVSVVNPARIKHYGESKLHRNKTDKADAALIAEFCQKENPALWTPLPAEVKHLRALVRRLYDLQNAYQQERNRTLAGEQNAWVLEDLKAHLSYLQDRIRTARQAIQQHIDQTPSLKSQQELLVSIPGVGQLTAARLLAEIGDISAFEDAPQLAAYAGLNPKGFRSGASVHKKTRISKEGRAFLRYILYMPAIVARQHNPIIKEFCKRLADRRLANMAIVVAAMRKLIHIVFGVLKNQRPFDPDYGNQFAFTS

SEQ ID NO: 261866 - protein, 396 aa, unidentified
MYFLGIDIGKNNHVASMIGEDGKPVFRAFSFSNTTEGGESLLSKLSSYNLESQELVIGLEATGHYWLAIYSFLRNKDYRLHVINPIQTDGWRKGMEIRKRKTDVIDSLLIAQLVRYGDFIEAKLPEETIISLKNLTRFRSYLVDSISDLKRKVICVLDQVFPEYQNIFSNVFGKTSKEILLQFSSPAELESVSADTLAELLAGLSRKKLGIEKAEELNRAASASFGVTFCRDSFTFQLRMLIEQIKYIESQVKDTEIEVKRIMSTLCSPIMTVPGVGKTLGAVILGEIGGIEKFDHASKLVAFAGIDASVNQSGEFEGTSNRMSKRGSPYLRRALYQASLIAVIGKNPDPVLRAFYQKKLAEGKHHSTCIGAVSRKLCYIIFSVLKENRPFEVRNP

SEQ ID NO: 261867 - protein, 416 aa, unidentified
MQPTLFVGVDVHRQQNVFCVMDQDGQELSERFSFDNNRPGTQELVGRLAHLMQEGDYEQLQLGAEATGLYWLHFCMTLSQDPMLNQWPLTLYAVNPRLTANYKRSFSDLDKTDDIDAFVVADRLRMGRGLPHPFVYDERYLPLRFLTRYRYHLVHNLAREKAYCLAMLYLKASEYTRRDVKPFSDVFGAASRAVLQEFASLEEIAALPFDDLVEFIDVKGKRRFPDPTDNARRLQQVALDSYSLPEPFHAPIQLVLNMSLQHIAHMERQQKRLNSAIAEQMASLPQTLDTIPGIGPVFVAGILAEIGDIARFQFNQAKVAKYAGFKWRKSQSADFVADETPLARTGNRFLRYYFCEAANIARMHDADYRAYYDRKFREVRKHAHKRALVLTARKLVRLVVRLLTTNQPYRPRRMTA

SEQ ID NO: 261868 - protein, 433 aa, unidentified
MSQFLHDFVVGIDVSSEFSVVAMLAPSGELIRKPFRIDHNPAGFHKLLDILKKEEERLQRKPIYFVESTGIFHLPLFFFLRSNNLKGFVLNPLSVHSTKNFDLRKVKNDSKDAEAIARLAKYQDVKVSLVPEPQILALRMMTREYYALSDTLTEMKNRLSTDLYLLFPGFLDVFSGAFGKTALAILKDFPSPRAILAADTDSLTSLISKTSRKGTAWATKKVNQLKDCAQLASSMPHEFSWLDAKIKVHIDGIESMQASLDGVVTQIQAMIDSELFPADAKRHIELLDGIPGIGFLTAATLIAEIGDFRLFKSAKALTAFFGLDPSVNQSGKFQGNRNKISKRGTRIGRRILFTIAMASIRTTRKGDEINPVLREFYAAKCVNKKKKVALVAVMHKLLHYIFAVLRDQKPFEIRQPEDHQSWRNTKLRQAPAA

SEQ ID NO: 261869 - protein, 398 aa, unidentified
MTRKNTLKSLPTDTEFRVVGLDLAKSDVSVAAIPVDDNTPSLVDRMTYADLLDWAGKISPTLFAMEPCNGYSLLCLQLENLGHEIKVISGSTVSMWINTHLSGQKTDLNDAIALARLAVSDAELTPLRHKSITEIRIQTVQAVRQQLMSQRSKSIVSFKALAQQWGIPCAAGHRNLKKLRESIEAKVDLITRPVANAMLFLLDAVKSLDRQIGQLNQTLQELVMSDERGRLLQSVLGVGTQISARVITVVGNIERFNSPRSLVAYVGVAPRNFITGHKNLTKKKHGNCPDLSHKGQGKISRRGDKLLRSLFIQGAACLYMQFCKDQLPECQLKRWILKQLARQKPYGKLIVSLAAKLIRIVWAVLTYREKFNIQKAGMTRSMWSEMALETPLNKEVPA

SEQ ID NO: 261870 - protein, 345 aa, unidentified
MDHFVGIDVSLESCAVCVVNQSGAVVREAKVACEPEPLSAFLRDLNLDIVFVGLEAGPLSQWLHRHLREVGFEAVLMETRQVKGAMKAMPIKTDRRDALGIAQLIRMGWFRPVHCKSVSAQELRALLGARRTLQKSMISIELSMRGMLRGFGLKLGQVRRQRLAERARELAEGNEMLTAMVTSMLRGHAALRSELARLENRLRRIARADRVARLMMTVPGVGAVVALQVKAGIDDPARFRSSKNVGPHFGLTPRREQSGERDVVGAISRAGDRNVRTALFQAATVMLYQSQAKNWLKAWGMQVAKRRGMKRAVVAVARRLAVVLHRMWSDGTKFQMTHPARLAAA

SEQ ID NO: 261871 - protein, 322 aa, unidentified
MPQEGRIVGLDVSKLKVDGCIRSVGLRRSERSTPEGQAEMLSWLKANGVRLAVMEASGGYERSWAKALHGGGMAVRIVDPKRVRHFAKSAGRLAKNDPIDAEMIAWFAETFPDAPSQAQDVEREELAGLVKARLALLQIKTELGNQAEHQQPRSVVKAFAAVTRSVDAQLARLEAAIAAKIAAKERFAARAEIIESVPGLATQSAAGLIAWMPELGLIDDKAASALIGVAPYDDDSGKHRGERHIKGGRQALRTLLYMPVVGAATHHNPVLKAYYQRLRAKGKEGKVAIIACMRKLIVILNAMLARGEKWDPARGRRSAATA

SEQ ID NO: 261872 - protein, 382 aa, unidentified
MQTIDTVNPTILLAIELSASTWLVAARVPGLEKPHLHRIDGGDTAALLALISSLRARAARGLDATIGVVCCFEAGRDGFWLHRLLTAHGVVCHVLEPTSILVNRRARRAKTDRLDAEGMLRVLAAYLRGDHQACSMVRVPTPEEEDAKRTHREREKLVQERLRIENRIEALLFTQGIRKRPSLRSWERDLAVLRTGDGREIPRHLRAELDRLRRRLVMTLELIREVEAERDQAAKTKPQDQTCHKIAALCRIRGIGKNFAAVLTREVFYRSFDNRRQIASYVGITPMPYQSGGMDRDRRISRAGNPRARTTMIQLAWLWLRYQPGSELAEWFRERVGTLAGRTRRIAIVAMARKLLIALWRYAETGVIPAGADIREETTAAA

SEQ ID NO: 261873 - protein, 425 aa, unidentified
MKSTQNEKISQIKFETLVVGIDIGKETHYARAFDYRGIELARLLKFSNTDQGFQRFDQWMRDICKQQEKTEIIAGFEPTGHYWFVLGDHLKRQGYKLAIVNPFHVKRTKELDDNSPTKNDRKDPKTIAMLVKDGRYREVYIPDDIYQELREAVSERERLQEQLTSIYNRVVRWLDIRFPEFTTVFKDWRRNAALITLRSFPTPEKVMEMGVDKIVETWRKQMKRVSLKRAERLVKAANRSVGRTSGKVASEASLQNLLAEYDLYCQQYDKQEQLMQDLLMQVPNADKLLDIKGVGLITAATFVGEVGDISRFQDPRQIQKLAGLNLVENSSGKHKGKTTISRRGRRRLRHSLFFSMIAMLGKNQEFRLLHQRNLRRENNPLNKMQSIIALCGKLVRVFFAILTKGVDYSPEKMLGDMNQSIRVAA

SEQ ID NO: 261874 - protein, 396 aa, unidentified
MPQIWAGVDIGKTRHHCVVLDAEGKRLLSRRVLNDEPELPALLADVLAIDEDAVWAVDVADGMAALLISVLLNHSQQLLYIPGLAVNRASAGYRGMGKTDAKDATVIADQARMRRDLTALRPDDEDAVELRILTNRRADLNADRTRRINRLRGQLNSILPALERALDLGNVGPLILLTGYQTPAALRRTGAKRLETWLHNRKVRGASDLAAAASEAAGRQHTAVPGEKITAQVIHTLAKEVMGLNEQITEIDKLIAARFREHELAEVISSMPGIGPLLGAEFLAATAGDMSRYGTADRLASLAGVAPVPRDSGNVSGNLHRPRRYHRGLQRVFYTSALISIRNCDASRCFYERKRAEGKRHTQAVLALARRRVNVLRALIRDGRCYQRELPVTVAA

SEQ ID NO: 261875 - protein, 337 aa, unidentified
MQPTVPLFVGLDYSQHKVQVCALDPQGKVLGNRAVPDSAAAIDQAVRRLGAVQGAALEACTGAADLAEELADRFGWPMHLGHPGFVSRMKQSPDKSDFSDARVLADLERVGYLPRVWIAPKQLRELRTRVRDRQQLVAQRRNLKLAITALLREHRQRCEHQRWTAAWRAWVAQQAQLPEQARWVMTQRLRRLEWVVAEVHAVERRLEEVTKDDSTVRRLRTIKGLGPVTAWTVRAEVGRFDRFRTGKQRARFCGLSPCNRSSGDKAADAGLIRAADPERRRVCVEAAWVLIRCQPRGRQRAQRLRAQGKPRTVVTAAVANRFVRWLDHEGVRQQAVA

SEQ ID NO: 261876 - protein, 323 aa, unidentified
MSKIFLGIDISKSSFDVSLLLSDNKIKTKKFSNTKSGFKLLEDWLKTCNINIENIHACMEATGIYGESLADFLYKINCTVSVVNPARIKSFGMSELSRTKNDRADAKLIARFCKAMNPAVWQPIKPEYKELQQLVRRLEDLKNLLQIEKNHLEAAISDDVKKSIKFVIEFLNKQIEEIAKTINDKINQNPELQKKQALLETIPGIGEATIIQILSFINIENFNNIKQLDAFIGLNPKQRQSGTSVNGQSRISKIGNGSLRKTFYFPAISAKNHNPIIKAFCTRLEIAGKPTMVIICAAMRKLVHIIYGVLKSGKAFDANLVRI

SEQ ID NO: 261877 - protein, 403 aa, unidentified
MNSVGIDISKGRSTVAVMRPFGEVVISPFEVRHTDSELSELARQLKSLNGETRVVMEATGNYHAPVAKLLHDAGLYVSVVNAKLVHGYGNNDLRRVKTDRKDAVKLANYGLDRWLTLPRYVPEEDTRLLLKNCYRQYRQYSKVQTVLKNNLISLLDTVFPNVNRLFSSPIRGDGSEKWVDFVAEFWHCRCVSEKSQKAFTSKYQRWCRKHGYNFSEEKAHTIHAEASGYIGVMPKSETTKLLVEQAVAQLRATSAALTALKHEMLALAAQLPEYPVVMGMFGVGPTLGPQLIAEIGDVRRFYSKKALVAYAGLDAPPNDSGDVTGKHKSMSKIGASSLRRTLFLVMSVYLQNAPLDEPIFRFMDKKRAEGKPYRVYMMASANKFLRIYYATVKAYLESLEHTA

SEQ ID NO: 261878 - protein, 354 aa, unidentified
MTDIKYVAFDVHQATISAAVLDLSGKLITQAVFQTDASSIRDFLRGLSGKLHLTFEEGTQAQWLFDLTRPLVSNLIVCNPRENHSMKRGNKSDQKDALQLATLLRAELLKPVYHGSQETKSIKHLAHNYDSLTEDTTRCMNRLKAVYRSQATKCAGRDVYYTRNRQGWLAKLNDEGLRLRAEFLYKQLDYLRELRREARKALLKEARRQAPFKRLVEVPGLGPIRVAQIIAAIGSPFRFRTKRQLWAYCGFGVVTRSSADYEVKANNLQRRHKQAETRGLNQSFSRRLKVAFKGAALEALKTEAFKKVYERLTSNGVRAEMARLTIARKLAAVALAIWKSGEAYDETKLSKLAV

SEQ ID NO: 261879 - protein, 378 aa, unidentified
MRTTKHYVGLDVHKDTVTIAVADEGRNGEVRIYGKISSDLNAIERSLRKIGGGGGELHVAYEAGPTGFVLYRRLKQLGIDCVVVAPSKTPQEQGKRRKTDRRDAQMLARLHRAGELTIVHVPDETDEAIRDLTRARADAVHDLTRAKQRLKSFLLRQGYRYSGKPNWSEAHQRYLRELTLPVPALKAVLEQNLEAIRQAQERVARLEELLSVQVVSWRLYPAVEALMTLRGFQLVAASVLVAELGDIRRFEHPRDLMGYLGLIPHEESSGLGEHRSGITKAGNKHARWILIETVQHAWLPPKVSSHLAKRQEGHPEARKSLSWKVQTRLYKRAWHLTRRGVLKGKVTVALAREMAGFAWAMLQTVNWPGEAPKRPNPL

SEQ ID NO: 261880 - protein, 354 aa, unidentified
MKYYTSTTQFNCGIDLHARQMYVCVLDRDGKKLVHTNVRNNDFAYFLKLVAPYRHDLTVCAECMFGWYWLADDCQAAGIHFVLAHALYLKAIHGGKNKNDRIDSEKIAHLLRTNFIPPGYVYPAEKRPLRALLRQRLVYVWNRSELLSRIQSHQLAHNRPTCRQTRPNREPWAAQLLAQEEHPVRQLALQNDLALIRHYDTQLATLEKDLLQLTKQTASRDFTLLQTTPGIGDYLGLTILHEIGDIARFPTVKDFLSYCRLVKGTVASAGKIKGLRGAKLGNPYLRWAFGEAAVIAKRDIVLGPLAQRLEARMGGNKFKANTVLAIKLARAVYFMLKNKTVFDPERLVAALSKN

SEQ ID NO: 261881 - protein, 381 aa, unidentified
MAYDKGILGFANLWVDGDLTTKKEKDMNTLNENSVIIGVDVHKYSHTAVAMNAWGEERGTLTFSNNNLETYTRWLEELGLKENIIVGLEDVNSYGIHLVENLRKKNYHIRYVPAILTERERKVSTKRHKSDAVDAKRVGKVILTKYEDTLPAKESIADERELKTARSLDLLLMERRDLTRSKTILKNQLHCLIHQRYTESYREHCPRSFSKKAIRWFLLDLKEDKSILATSIVRRLERLLFVEDQIYAISKEVTVIGETSKEAQALTGIHGCGMVTACAIVAEVITVKRFKNKHHFSMYAGIAPTPHSSGRKHKMHTNPFGNRQLNRAIHTVALSQIAIKGDPTGKEYYQRKLKEGKTKLWALRCLKHQIAKVVFQKLKYA

SEQ ID NO: 261882 - protein, 316 aa, unidentified
MSAPQLFVGVDVANARLDMALRPTGERGAVANDDAGIATLVARLQAVQPTLMVFEATSGDQRAVVAALAATGLPVVVVNPRHARDVANATGPLAKTDALEARALAHVAEAVRPSLRPLPDAQADALRALLARRRPLVAMRTAAQNRLGNASPRLQADIQAHITWLNTRLTALDDDRDTTLRASPVWREREELLRSVPGIGPVWARTLRLDRPELGTLSRQRLAALVGVAPLNRDHGTLRGRRTIWGGRAPGRATLYMSTLVAVRYNPVLKAFYDRLRAAGKVAKVALTACMRKLLTILNAMVKHHTPWQPQAGSVD

SEQ ID NO: 261883 - protein, 341 aa, unidentified
MQITTIGLDIAKNVFQVHGIDATEKVVVRKQLRRRQVMAFFEVLAPCLIGMEACATAHYWARELTKLGHEVRLMPAKDVKAYVKRNKNDAADAEAICEAVRRPTMRFVAVKSAEQQGRLMQHRVRDLLMRQRTQLINALRAHLAELGMAAAQGREGIKELLAIVAQDGDSRLPVDAHASLIVLAAQLQTVQTMIGSIEKRIVSQHRSNEASKRLETIPGIGVIGATTIAAMVPDPKVFRSGRDFAAWIGLVPRQDSTGGKQKLGPISKQGDQYLRRILVVGAHAVLKRARQQPEKYPWLTQLLARRPFKVVAVALANKMARIAWALLAKGGTYRAPQLAAA

SEQ ID NO: 261884 - protein, 390 aa, unidentified
MEVALVCTEVMLDRKGRIALKELTVQFASFIGVDLHKKTVSLSAVGPDRLEIDFLKTSTKCVGRIEKWLADLPKPCWMAVETVGFVEWFIDRFRSHVDRIDIADATQLAYKRGRRRRSDRNDARDIAERLSRGECPLGFIADDALMQLRKLGRHWRSLSRTLSRAKHCVKSMLHAANIRGPQLNAASAHRWYLVHSHLLKPAQHDAFEDFLEIIALLERKRERLRRRIFFANRSERFADTVDLIKTVPGIDEIWGCVIAAEVGPFDRFPNADTLEFWAGLTPDNQKSAGRTQSGKITKAGSATLRWALCQAAMTLCQSDPKQEATRQRLIKRLGKTAGKAKANVAMGRRLLRIIFAMMRDRKPYLRIASSDRPAAANRARLKARSRKEPA

SEQ ID NO: 261885 - protein, 402 aa, unidentified
MTVVGIDAHKHSHTLVAVDSGGAKLGEKTIEATSAGHTEALRWALGKFGTDLVWGVEDNRSVTALLERELMAAFQRVVRVPPHLMARNRGPARAWGKSDPIDAIAVARAVLREPDLPVAFHDQESWELKLLVDRRDDLVGQRVEAMNRLFGRLHQLSPERPKPVKLQWATRRQALNDWLLEQPGLLAELARQEVADIGYFSDSIEGLTKNIAFRVHELGSTLLSLPGCAELIAAKLISETANIDRFRSEAAFARYAGIAPVPMWSGSTEGRLRLARSGNRQCNSAIHRIAVVQIRLDGPGRAYYQRRRAEGDSGMGALRCLKRRLCRIVYNRLRADYVRRTRPVVNVAEPLTDVQSRMPAWMASIDLAVSLATEDTDIDIDIDIDIEEELPDHGDGLPPADK

SEQ ID NO: 261886 - protein, 342 aa, unidentified
MVRQRKGRQIKGVRMKLYVGIDIAKHDFATALELADGSLKRSIKKLENNKRGWNTLKIWVLKQQSECQADTVHLGVESTGGYETPMVEWLREHSDFEITILNPVQVKRFVQSQLIRTKTDAVDARMIARYMAVHQPNPTPAPPEGIKQLKALTRHLDHLVRKRADEKTYLESVKNPKVQSMVKKTIKSFDKQIVEVEKQITDHLDQQPDLKKNTELLTSIPGIGAITAGILLSEINESLDPKQQVAHAGLAPRERQSGMQKGKSQLCKTGNRRLRAALFMPTLAAIRYNPVIRRFYFKLLSKGKPKMVAVAACMRKLLHIAIGVLKNQTRFDPCYEQLPLAS

SEQ ID NO: 261887 - protein, 344 aa, unidentified
MDISVLGIDLGKNVCSVVGLDASGAVVMRRKVRRETLIALAEKLPPCVVGMEACCGAHHLGRVFAAHGHDVRLMSPEYVRPYIKAQKNDDRDAEGIAEAATRPTMRFVELKSQDQLDMQTLHRSRDRLVGERTALINQLRAILLERGMVAPQGKRKLEQFLAVLMDEQGGAGLSPRMIVLVADARTQWAEIDRRIAAFDAEFVRWVKENEEARRLMTIPGVGAIVASALVAAVGQAESFERGRDLAAWLGLVPRQFTTGGKPKLLGISKRGNKYLRRQLIHGARAALPYVVERDTPLGRWAKDLLSRAHRNVAIVAFANKLARIAWAVLRRGERFAVTGMPVAA

SEQ ID NO: 261888 - protein, 353 aa, unidentified
MASLTDLREVVDVVIGVDTHVHTHSAAVVDTATGGLLDEITVEATTEGYAELVEFANNHATLRAWAIEGTGGHGAGLSRHLLQACEIVIELDRPKRAARRNGAKSDPLDAIRAAREALARPQLGTPRSGAERQALSVLLTARRSAINASTEAQLQVFSLVIAAPEPIRARFRGQKVAAMLNTAANLRVHSSWDIETTSTVVALRALARRAHAMLKEAREHQKAIVTIIRTWRPDLLEQFGVGPIVAATVLCAWSHPGRIHSEAAFAMLAGVAPIPANSGQVTTRHRLNRYGDRQLNRALHTVVRIRIQYQPATRDYVARRSAEGKTSREIKRCLARYVARDLYRLLENGAAAA

SEQ ID NO: 261889 - protein, 360 aa, unidentified
MAKARTVVGLDVHAAKVVAAVLDVETGELQFFGMEMDVGRVAGFCAALPGPVRAAYEAGPTGYGLARELAKRRVDCVVAAPSKIPRGSGERVKTDRRDAELLARLLVAGKLHAVRVPGDEEEALRDLVRARDGVRQDLMRCRHRLSKLLLRRGIRFDEGDAWTERHRRWLDQVVLEWPAAQATLLDANGAIDVLAHRRDSLEREILASLASSPWRVQTGRLRCLRGIDTLSAVGLCAEVGDFERFAKAGQLMSYIGLVPCEATTGQQRRLGSITKTGSAHARRLLVEAAWHYRKAPRIGKTLTERQDGQPPAAIAIAWSAQRRLHRVWTRMEQRNKRRTLIATAAARELAGFCWAICQIE

SEQ ID NO: 261890 - protein, 428 aa, unidentified
MEVIHPRCAGIDVSKKDAKVCVRVQGRGRRGTSTTVSTWGSTTGEILALREHLLAERVSCVVIESTSDYWKPFYYLLEGQLNVMLVNAKAARNVPGRKTDVSDAAWLADLGAHGLLRASFVPPEPIRVLRDLTRARTTITRARTKEIQRLEKLLEDTGIKLSAVASNIVGVSGRAMLEALIAGQRDSVVLADLAKQRMRQKIPALTEALRGRFTEHHAFMVRLYLDRIDAHTADIARLDARIEEAIAPFRPIRELLMSIPGWSRLVADVFIAETGADMSVFPTAAHLASWAGVVPGCDESAGRVKSGATRPGNRHLKAALGVAALSAARTKDTYYSIRYRRIAGRRRAAQSRRDKTAGMSIAGQIALVSIEHKMLTDAWNMLTNGAFYRDPGPDYYTRHQPGKAKARAIKQLESLGYKVTLEPPTQAA

SEQ ID NO: 261891 - protein, 414 aa, unidentified
MLKIVYRVCCGMDVHKSFVVACIASTNEQGVTTYKSKRFSTFTGDLRRCAAWLAENDCKDVCMESTGKYWIPIYNILEPICNIVLAHPKYVKAIRGKKTDKRDAKWIADIFKHDLVAGSFIPPADIRQLRDLFRYRWKLTSFTTGEKNRAQNCLTVSNFKLDDVFSDVFGKAASAITSRILENPTEKITDVSGFRTKGMKATNEQVLAAVDGVMCEEQAEKLRIIRSHMDSLELCKLNLESLILSTAEKYLPQLNLVMTAPGIQSFAAIGIISEIGVDMSVFPSSKHLCSWAGLTPQNNESAGKKKTTRISRAGAYIKPLLIQCALNAIRAKQFPEVRNRYLALKKRRGHKKAIIAIARMLLTAIYNMLKKNEPYNSELYHKSDRPPAHREVSVEEAIFILQRQGYLVTAPSTS

SEQ ID NO: 261892 - protein, 316 aa, unidentified
MKTTESEAPRSYVGVDISKDGLDVALAGEGPRHYSNTVGGIAEMIKALKALPEAPQVICEPSGGYERELLEALWASGLMVSLVHAGRIRAFARAQGLLAKTDQIDATVLREFGELMRPDPWVPPSASRQRLAALVQRREQLLSILTMEEQRLAQSRDAVVRQMSESLLTELQKQIEQMDALIAAQIDGDDTLKGQSARLQQVKGIGPVTASTILAELPELGKLSRSEAGALAGVAPYNCDSGTHRGRRMIRGGRVKVRRVLYMAAVVASRYNTVLKAFYTRLVAAGKPKKVALTAVMRKLVVLLNHLLKNPTFTLA

SEQ ID NO: 261893 - protein, 340 aa, unidentified
MVHVGVDLHKRMSQIAVLTEDGEIAQRRLANEPARLEAFFAQLPPRTPVAIEASGTWWWLVDLLERSGHRPVLSNPKQTKAIAAARLKNDRVDAERLALLLRGDLLPTVWIPPAALREARELIRHRVSLVWLRGEARNRLLAMLARRNLQPTRGKSWLTGRGQRELQALPLTPIATTIREDCRALLPLLDEQIRRLDDDLRQRWGDDPRVRRLMTLPGVGAFIAIVLVMELGDIDRFPSAQHVASYIGLTPRVRASADRIRSGHISKEGNRLLRWVLVLAATQAARQPGPLRAWFRVMKQRKGTKIARVALARRLVEIVYHVWKHDCDYFSVLRRGAVRG

SEQ ID NO: 261894 - protein, 422 aa, unidentified
MKVFNPADFAALIAIDWADRKHDVCELDQQNNETTFSVISSKPEAINAWANALKQKYNGQQVAVACELKKGPLIYALSKFKHIVLFTINPSTVAKYRKAFTHSGAKDDPTDAAIQLEILQQHMSKLNVIMPDTQSIRSLAQLVEYRRKLVQDRVDLTNRLSTTLKNYYPQVLDWFNEKDSMIFCDFLLRWPSLAKVKRARKQTLHDFFNLHNARYPNVNEKRIDDIKHAQSLTSDNAIIGPNLLLVECLVGQLKQLMLSIERFDHEIKSIYKQHSDRFIFDSLPGAGPQMAPRLLAAMGSNRERYQSSEEVQKYAGIAPVTERSGKKEWIHWRYSCTTFLRQTFVEWAGQSVRYSFWAKAYYEQQKSKGKPHNTIIRALAFKWIRILFRCWKTKTAYDESTYLEALKRKGSPLLKYAVESKF

SEQ ID NO: 261895 - protein, 348 aa, unidentified
MDHIGIDVHKRDSQIYILAEGGEVVEQRIRTEPERFAAVLGTRPRARLLIEASTDSEWVARCLEALGHEVIVADPNVAPMYATRSRKVKTDRRDARALAEACLLGAYRPAHRLSDPQRHVRGRLGVRDALVHTRTRDISLIRALLRQHGYGVPSGSAERFVDRVRGLPLPGRVRSVVAPLLAVMRPLNQQLAYSDATIEHLAVQDPRVPRLRSVPGVGPVTAAAVLAAVDDAQRVHHAHQLDASLGLVPREYSSGETQRRGPITKAGHSRPRWLLMHAARSILRCQPPAAEALWTWALRIAARRGTHVAVVALARRLAGILYALLRDGTVYAPRPARHHPDPVAALHA

SEQ ID NO: 261896 - protein, 420 aa, unidentified
MKTPSNKSFTAFIGIDWADAKHDVCVQAAGDERREFARISHKVDEIEDWAQSLYRRFGGPIAVALELSKGPIVYALQKYDFFVIFPVNPSTLAKYREAFAPSGAKDDPTDAELALDLIRRHPHRFQPLNPQSVEMRTLASLVEQRRRLVNDRVRMTNRLRNTLKQYYPQALQWFDRIDTLLFCDFIERWPTLVQIKRARRTTLQTFFHQHNMRFAHVLQSRLESIKAASPLTLDQAVITPHRLQALVLVDLLRATLAAITRFDQEIAELAPKHPDYALFDSLPGAGPSLAPRLLVAFGEQRERFNNAAELQKYSGIAPVTERSGKKHWVHWRWQCPTFLRQTFVEWAAQTINKSFWAGAYYRQQREKGCTYNAAVRALAFKWIRILYRCWETHTPYNESVYLKALQRRGSPLLNQLSSTK

SEQ ID NO: 261897 - protein, 350 aa, unidentified
MSSASVRTTISTIGLDLGKNTFHLVGLDRRGAIVLQQKLSRGQLERRLANVPRCLIGMEACSGSHYIGRRLTELGHDVRLIPAQYVKPFLKGHKNDYRDAEAIAEAVQRPTMRFVSIKTPEQMDLLALHRVRSRLVGQRTGLINQIRGFLIERGITVRQGVLPLRKALPDILSSSTGTLSPRVVHLIADLALDWRRLDERIETVSTEIEALAQQDDSCQRLMTVPGVGPIISSAVVAAIGNGVGFKQGRDFGAWLGLVPKQESTGDRTILGKISKRGNKYLRTLFVQAAHVVLVRRPATARRGLWPWIEQASRRLHRNLLAIALANKLARIAWAVLARGHAYEPRVSSHA

SEQ ID NO: 261898 - protein, 410 aa, unidentified
MRYYLGVDWADQTHAVWVVDERGTKITARTVPHTAEGLSEWGRELDEWRAHGIELWVAIERPEGRVVDFLLDHGVVVYPVNPKALDRARDRFRQSGAKDDPFDARVLADFLRTDHAHLQPLRPSSEAAQELKLLTEDYQRQVRQQTRLVNQLTITLKAYYPRALEVAELTTGLAQAFLQAYPTPAAVAALTKRQWQRWARTHRLSATRTRELWEVLQRPQLPVPAHVVRAKARLLRSLVAQLTPVVAAVGEYREAIEDFFARMSTAQWIRTLPIGDHGITAPTLWARLGDAPGRWEAFRHLQAQAGAVPVTKRSGKQQRVVHFRVACDKALRYVVDQVAFLSLRSCEWARAYYDQQRGRGHSHRRALRALGAKWLKIIFVMWQRHASYDEPYHLATMARQQLRQPQTKIA

SEQ ID NO: 261899 - protein, 348 aa, unidentified
MLKLKQYVGLDVSLKETSIAVIDENDKLVWRGSVALTPEAIAEALKKHAPRAERIGLEAGQLSSWLYHGLRAKGWFVTCIDARHAKAALSLKVNKTDENDALGLAQIMRVGWYREVAVKGHDCQALRALLVARAQIVSQITTVKNCVRGILKTFGHVLPKKLRATYIATVREIIEGDTTLEPIFMPMIRTLAVTMEQLQVYDRAINRFARNSEIARHLMTAPGVGTVVALAYITGIETPARFSSSSAVGAYFGMTPRRYQSGEVDQAGRVSKCGDGMVRGLLYEAAKVLLSRSAKPSAVQAWGHALARRIGKKKATMAVARKLAVILHRMWTTGEPFRWTAVPTPAMA

SEQ ID NO: 261900 - protein, 550 aa, unidentified
MQTTLEPSPRQIRGLGLTTGNAAGRDAVRVAPSPCTFYVEQYTVLWVSRREEQQRRSADRRGGAPRDPSQSARSWRIRRKSVLRPEHLPFPVPGAPAVDCARTERTVIADPVGSCATSASTGVIPRTVADRKGGTVSNTFDWFLGVDWGSETHQFCLVDARGDQILQRSVTHSADAVREALDWALRETGATTGAIAVGLEVPRGALVDTFLEHAFAVFTINPKQVDRFRDRFTVAGAKDDRRDALVLAMALRTDLVAFRRVTTEHPAIIQIRQWSRMAEELGEELRSLANRIREEAHRVAPALLGLSPGADEPWFWALLAAAPTPTTQRRVGRQRLHTLLRRHRIRRLTVDQVHAALQAPPFPLAPGVEEAAAAHLRFLLARVQLVHEQRAHCDRELVALFEQWAAETAPSDQREHHDVAILQSCPGVGTHVTAVMLAEGARPLATRDYRTLRAEAGAAPITQQSGKRRVVSFRWACNKRLRNALYYWAQSSLRDAGCRVYYDALRARGHSHARALRSLGDRLLRILIALLNTGSLYDPSRYAPTATTAA

SEQ ID NO: 261901 - protein, 338 aa, unidentified
MKTHVGVDLHQRFCYLTALDASGKLCKQGQVVNEGAALRAWLRQLPCPRQVVVEASGFWPAFARAVAPEQERLVMVHPQRVKAIASAKLKNDRVDSETLAHLSRCDLLPEAWMADEATQQLRLRVRLRITLGRQRARAKNQLQAVLHQEGFKKPVTDVFGKRGRAWLAGLELSASGRLVVDTWLREVDHLDVELAEQTRELERLAKADGRARFLQTVPGIGAYAAMVILAELGDVERFGSKRALASYAGLTPVVRESAGKRKRGGITHQGSNTLRWMMLQVAQVAARCSPGARSYYAGLRARKPAQVAKIALARKLLTVVWALLHHGECFDEELFARG

SEQ ID NO: 261902 - protein, 377 aa, unidentified
MKKVRFIGLDVHADTIAVAVAEPSGEVRSVGVIPNRAESIRRLMKKLGPAEHLRACYEAGPTGYVIYWQLTTLGVPCEVVAPTLVPTKAGDRVKTDRRDAEKLARSYRAGDLTAVWVPDGAHEALRDLVRAREAAKKDQLRARHRLGKFLLRHGRRPSTAMTAWTQRHLTWIRQVQFEHPAQEATRLDYLHEVDHVVGRIERLERAIDEAVKTAPRQMRAVIDALQALRGIALVSAVTIVAEVGDLSRFARAPQLMGYSGMGVREDSSGSRTQRGGITKTGNAHLRRIVIEAAWAYRHRPAVGGALRKRQAIVSEEVKAIGWKAQLRLHGRYRKLLGRGKCQQQVVTAVGRELLGFIWAIGVTVERQQRKTSSSIAA

SEQ ID NO: 261903 - protein, 372 aa, unidentified
MASIIYVGMDVHTTNFTFCCYTADSDRGFAVAQTEPDYRQVIKYMERVQKQRGEECKFVCGYEAGCLGYSLYHQLTRCGVDCVILAPSTMHQEKGKRIKTDRRDAENIARCLAFSLYSPVYVPTTEDDAVKEYIRMRDDIKADLKRVKQQIIAFTTRHGFAFDGKSYWTQKHLKWLETLVFEHPLYKETLQEYLILYYMLDEKVAVYDTRIEEMSHLEHYEENVQKLCCFRGVAAHTALSLLVEVGDFQRFRSAKHFAAYLGLVPGEHSSSDKQIRTSIAKAGNTHLRRLLVEAAQSYNRGAIGKKSAALKARQGGNPAEVIAYADKANERMQRKYYRIAFKSRHNIAKTAIARELACFVWGMMTGNISNAA

SEQ ID NO: 261904 - protein, 375 aa, unidentified
MDTIYIGVDFHAREQTICYLTTETGEFGTRELKHQDKDEVRTFYSQFGGRVIVGLEASGYSPWFEQLLEDLGHEVWLGDATEIRRRARWRQKNDRRDAELILDLLIHDEFPRLHRPSLESREILRMLRYRHKLVKMRTIIKNSLQALALQSGLSRRTKLFTKIGQQELRAAPMSPVMKQQQEQWLELLLVLNQRIGETTRWLKQQSLNDARIRLLRTHPGIGLLTSLGLVHTLDPISRFRNQRKVTAYAGLEPMERSSAERKRFLGISKAGSRLLRYLVIEAAHTAVKKDDDLKRFYRRLQERRGRPKAKVAVARKLLVRSFIMLRDEIDYAEFQRRAVAARLARQSSRPSVPDRLIGQPASSESQERVLSAAKK

SEQ ID NO: 261905 - protein, 362 aa, unidentified
MTKVRSWVGLDVHARSVLAVAIDGESGELRSRRLSGTTSEVVEFCCSLPGPTRVAYEAGPTGYGLARALHAAAVGCVVAAPGKIERPAADKVKTDQRDAERVLRLLMIDALHPVRVPSGEEEALRDVVRAREAVRGDLMRARQRLSKLLLRHDVRYKDTASAWTIAHRGWLTKIDLGERGAQVTLLEYLGAIDAIVIRRDALENTIRELIPGSPWEQTVARLRCLRGIDTLSAVGLCAEVGDFQRFQRAGRLMSYIGLVPSEDTSGEKRRQGAITKTGSRHARRLLVEAAWHYRRAPAKGQTLRRRQEGQPAPIIEIAWQAQRRLHHIWQRLDTQRGKRRTIVAVAVARELAGFCWALANAD

SEQ ID NO: 261906 - protein, 341 aa, unidentified
MKKFIRIGVDLAKNYFQVHALVSDVGPAVTRKLRRSKMHEFFSQIEPSLIGMEACGSAHYWARELKAMGHEVLLMPPAYTKPYVKRGKNDAVDADACCEAMSRPGMRFVPVKSAEQQATLMLHKTRELLVKQRTMSVNALRGHLSEFGIIAAKGIGRVDELLDLVESDTTLPNAARASAKVLAQALEGLDKAIDDLEDEITNAQAQNEMTRLLYKVPGIGKIIASVIAASVPDPSVFKSGRDFTAWLGLTPRQNSSGGKQALGAITKQGNRYIRKLLVLGATSLLNVVGKRQGALRDWIVGLLAKKPARLVTVALANKLARILWAMMKTGESFRTEMFAKA

SEQ ID NO: 261907 - protein, 359 aa, unidentified
MQAQKKELDFNGQNVFIGIDVHLKSWTISIMTKHLAHKTFTQPPKAEVLSNYLQQNFPGGEYHSVYEAGFSGFWAHYQLKAMGINSIVINPADVPTTQKEHLQKDDPTDSRKLARSLRSGDLKAIYVPDPSTLEDRSLVRLRACLVKDMVRFKQRVKSFLYFYGITFPPEFERSGTHWSRRFMGWLSQVSLEHGAGTETLRILIQEVEQQRKLLLEVLRKIRFMSRSEKYASRMVLLRSIPGVGFITAISFLTEIESIDRFPSTDHFAGFVGLVPSRHSSGGRENHGEMTFRGQNTLRKLLIESSWFAARLDPALTMSFSKYAQRMEPNKAIVRVARKVLNRMYYVLKNEREYAPGVIK

SEQ ID NO: 261908 - protein, 371 aa, unidentified
MAESSRTLYVGLDVHKDSIAVAYAPEDRGAEVVSLGAIGPRQCDIDKLIRKLQAKGATLVFVYEAGPCGYWLYRYLTRIGLVCHVVAPSLIPRKAGDRVKTDRRDAITLARLMRSGDLSSIYVPQVEDEALRDLSRGRDDAMQDLKRSKRRLKSFLLRQDIRYEGRANWNAAHLRWLSEVVCPTPPQQIVFQEYVRAVTEQQERLQRLERELHEAVKGWRLYPVVEAIQALRGVELTGAVILMAELGDLTRFDTPRQLMSYLGLTPSEYSSGARRRQGGITKAGNSHARRALVEGAWAYRYPAKVSRHLQLRLEKLPAEVQAIGWKAQVRLCKRYRQLTARGKHVNQVVVAIAREMAAFAWAIARLVPLAA

SEQ ID NO: 261909 - protein, 394 aa, unidentified
MFFIGIDVAKRSHQAAVTDISGNVIVKPFNFKNSSDGFTKFLSIVESNAIEKNDCTIGLESTGHYWYPLYFFLIENGFDVKVFNPIQTAAFREITIRKVKNDNLDSLLIADFTRFGRYSETYIPDENILALKNLTRFRLSISDICGSLKKKVIAILDQVFPEYTGVFSDVFGKTSKQLLEQFSTPDEFMDISTTKLTNLLLKVSRGRNGREKAELIKTAAQSSIGISYALDAFSFELKQLLAQIEFMENQLSDVDAEMEKLLSQSEYAVITTISGIGPMLGSVIVSEIGDINRFENSSKLVAYAGLDASVKQSGEFNSSKNKISKRGSPYLRRALWMAAFMSLQCDPALYDYYSKLRARGKTHRCATTAVARKLCIIVWAIMKSKKPYSPVLKN

SEQ ID NO: 261910 - protein, 339 aa, unidentified
MTVKTVGLDLAKDVFQVHGISAAGRKIFNKKIKRAKLLEFFEALPRCVVGMEACGSAHYWGRELSRLGHDVRLMPAAYVKPYVKRGKTDAADAEAICEAVRRPTMRFVEVKSEDQQAILALHRTRDLAVRQRTQLANMIRSLLREFGHVLRSGIEAVIAFAKRHLEGERPGMPDLASGILGTVCYQFLGVHERVEGFSKMIEKHALLDAGARRLMRMPGIGPITASAIVATIGDAKQFRTGRDLAAWLGLTPLNKSSGGKEKLGKITKKGDRYIRKLLITGMTSRALMGRKHPERIDIWSARILAGKPFRLATVAMANKSARIIWAILTKQQEYRQPAV

SEQ ID NO: 261911 - protein, 334 aa, unidentified
MESVRKHIGVDVGKERLDICHPDGTKEHVRNSRKFRRRLIEKAKHQDAIVSFEATGPYEEALAEECTQAGVKAVRLDAWATRKYAESQGRIEKTDEIDSEMIRDFAASLKAEKLHLVKPVSLARRHLKRLVAVRDNLLKAVAILRNQLEALADDTGLRRDVNAAIRGIERKIEKVEAECDEVIASDDEMRSLSERFLRVKGVGPCLVRTVLASCADIGAFNSKSIAKMSGNAPIDHRSCTIVLKSKPRRGRSDLKKAFYMAAVSASRSNQVLHGIYQRLVSRGKPKKVALVAVARHLAIVLNYIAKYPDFEPEPDQRRGARKPSASREKPKMAN

SEQ ID NO: 261912 - protein, 354 aa, unidentified
MRKMQDYVVRGKRVFVGLEDAKRTWRLCVRSEKMIVQELSIPGQAANLLDYLRGRYPECEVTVMYEAGFHGFWLHDELVASGYQCVVTPPHLVREAKVSKVKTDKGDARRLAQMLEGGDYQACHVPSRERREDRQLSRTLSDVQEDIVRTKNRVRRLLEFHGLDQGLKAGGWNKSDYERVWSLLPTLSEPLRQSLEVYQHILTSLEVSQKELLAQLKTKASERYRRPVELKASCPGVGWLSAIRFTLEWGDLSRFESGKPLAHYLGLTPGEHSSGETKATGHITGQGSPQVRAWLIQCAWRATRLDPVLLAKFGAVWRSSGSKKKAIVAVAHKLALRLRAVELSGQPYEIGVIQ

SEQ ID NO: 261913 - protein, 351 aa, unidentified
MLLIGVDYHPSFQQIAFLNQDSGECGELRLNHGDGEAERFYRELQQRGVRVRVGMEATGFARWFERLLAELGFELWIGDPAEIKAKRVKKQKTDRKDADLLLKLMREDRFPKIWIPTPENRDLRQLLWHRHRLVQMRTRIVNQLWALAMNEGQRRKKKLWSEQGRAELEKLSLAPWANRRRRELLELLDRLNPTIEELTAAAEQEAKKRPDVLRLMTHPGVGPLTALAYVLIIGTPSRFARGKQIGTYAGMIPSEESSGDKQRLGHISKQGNALLRFLLVEAAQAAARVNPEWRRRYIHLAMRRHKSIAKVAMGRRLAVRLYWMWRNGCPYSPSLEFGSYAGQPGIVHGVR

SEQ ID NO: 261914 - protein, 337 aa, unidentified
MTIMMGLDQHRAQITAEWLDTETGEISRTRVAPADREAVRRFLARFSGQSLEVALEATTGWRFVVEELRAVGARAHLAEPAETSALRGNKKHAKSDRADARHLRELLMTGRLPECWIAPDHILDLRAKVRLRHTLVDERGEWQQRIRAVLYHHGFPRRSDLDLLTAAGRDWLTELSLPAAARDQITIALTVIGTLDAQIPAIDKPLRAYARRQTGCRALMGHYGIGELTSVAILAELGDCRRFSSSRYAVRYGGLDITVHASDRRRAPGHLSRQGPPVLRWALYEAAQAATRPSSPDHAYYRQAAQRLGHNRACLAIARNLLKRSYQCVTNAEGGVV

SEQ ID NO: 261915 - protein, 356 aa, unidentified
MKYLKDIERFVENKVVFCGIDVHESDNKLCYYCDGEVLEKTVVGSEAERIMNHTRKTYSKSKGVRFVYEAGFSGFYLYRKLKSFGYDCMVTPPSRIPRMGDKVKTDRRDAQKLAQFHAGGLLKEVWVPPLRIESDRQYVRLRDRSVKKLSRVKGQIKSHLKLTGKKWNKANGGYWTKRYMAWLSGLTFEDESLGLILEEYVLEYNFLRKRVAELTRRIKALSRSEAYRSRYKILTSCRGVGLITAMTYLLEIWDFRRFGSVEQFGSYLGLTPSQHSSGSKVRLGHITREGNARIRKVLVESAWTVIRHDPFLRDKYLRIKSKGTNGKKAIVAVARSLSIRLRRCLLNEEPYVTGVC

SEQ ID NO: 261916 - protein, 334 aa, unidentified
MSLELLAIDLGKRSFHLYGIDTDGVILSQKVSRAKLAEVVANLAPTVIAMEACASAHHWGRCWLAAGSKVRLINPRFVKPFVKGSKNDAVDAEAIFEAAMRPTMRFVPVKSTDQQDLQSLHRARDRLICQRTALINHTRGLLAEYGIVLRQGRWHFATQASAAIADADLSDLARVIFGELLDQLDDLDRRVKRLDATMVALCRTNAICRRLAKLPGVGPVVATAIVAAVNDGRQFRSGREMAAWIGLVPRQYTTGGKPRLGGIGRRANHYLRRQLIHGARAVVSRLPKHDDPRSTWLKALLARRGFNRTIVALANKTARIAWALLSREEEYAIA

SEQ ID NO: 261917 - protein, 407 aa, unidentified
MDILIERACGLDVHKDNITACIITPKGKEIETFSTKTVYLIGLVDWIKEHKCTHVAMESTSVYWKPIVNLLEAEDIEFLVVNAQHIKAVPGRKTDVKDAEWIAKLLRHGLLKASFIPDRKQRELRELVRYRRSIIEERARQLNRIQKVLEGANIKLGSVVSNITGVSSLDMLRSIANGVEDLDVLANYARGVMKQKKEQLKLALQGYIQDHQRFMIKTIIDHYDYLTNTIDMLDEEIAQRMSEYQEDIERLDSIPGIATRMAEQILAELGTNIKKQFPTAPQMCSWAGLVPGNNESAGKRKSSRTRNGNKYLKSALIEAAHSLRGSKTYLGALYRRTAARKGRKRAAIVVAHAILRIAYYLLTRKEMYVDLGEDHFDKQRKQSIVNHSLRRLESLGYTVDIKEQEVS

SEQ ID NO: 261918 - protein, 341 aa, unidentified
MQTKKYFTGLDISADDFSASCITSPDNSVFSTQKFLNNFDGFNEFLSLLSKHSIKHSEVIICMEATGVYSENLSYFLASKGFTLCIEAPHKIKNKTKDSPRKNDFIDAVSIAEYAFRYSDKLSFWKPKDEIIEQIQVLLTTREHLSIQMIANQNALKTLKYKYYQTPLANQIYEKTISKFKEHIKQIDQEIKSLIDKDDSFKNKISLAKSVPGVGLLLAANLLVLTKGFTEHLNYKHAAAYTGICPYEQRSGTSLYKPPRSRKCGPAKLRKLLYLAALSVRTHNQIFKKYFLRKVAEGKNKRLVLNNIENKLLKIIFAVINSGVSYTYNYKSINPALLKTA

SEQ ID NO: 261919 - protein, 350 aa, unidentified
MLYTGLDFHRSFTYVTTMDEKGEILGQKKLPSNGEIVDFLKGFNDSMEVAIESTPSWYWLYDCLEDEGFDVKLSHPLRTKAIAYAKVKTDKVDSATLAHLLRSDLLPLSYVPERPVRLSRELLRYRASLVNIQTRVKNKIHMVLAKNNVNNEYSDLFGKAGMAFLRSLLLPENYKIALDGYLNVLDTVREEIKTVSKRVQQVAEKDQDAMLLMSIPGVGYYSALLIKSEIGDVNRFPSAKRLCSYSGLVPSTHTSGNVSYHGHITKRGSKWLRWILIEAAIHAAKRPGPLRLFYYKVARKKGGQIAKVATARKLLEWIYHILREGRSYQEVERVVAAIGRGEPVNSSGRA

SEQ ID NO: 261920 - protein, 366 aa, unidentified
MLQKAGLSEEADPENYLGGSSETMYYIGLDVHKKTISYCVKDAAGCVLSEGKINASRRDLDVWVRTLPQPRMMAMEATIFTGWIYDHLQPHAEKVKVAHPLMLRAIALAKRKNDRIDAAKIADCLRCDFLPECHMASTGIRDRRRILRYRNLVVKQSVQMKNRISGLLMETGVTYNKRRLHKVGYFADLMATNAEIHDCIRPLLRLSREHIERAQKLDYALVTSLERDPLLKERLRRLRTVPGVGPITALTWALEIGDYTRFHSIKEAISYCGLCGDEKSSADKVTRMPLSKQRNRHIQRVLVEAAKLAPRECHELAVVRERELERGNPNRATLAVARKIVCYLLAVERGQRDFVPAEEFSRTAAA

SEQ ID NO: 261921 - protein, 438 aa, unidentified
MSNKVIFNLDELFISVGIDVGADFSWMSIALPNQQFVGKPYKILHNSIDSLTTAVSKIKEAEELYSLESRIFLESTGIYHYPLFCYLRDKGFNCSVINPIITKNSTNINIRKVHNDRFDSKKAALVGLKPDLKVSLMPSDLALNCRNLCREYYDLMDNRSAYVNKLQGELRMAFPQYLGIFSKVTINTSLTLLETYTSPSAFLKADKQEIIDIIKSTARFGLTYAQNKYNAIIQAATDANQFGYIIDSNIKRIRLYISFIRKYDEEINSILESLHELVDANEDADFVKQIHLIETFKGAGFLSAVSIMGEIGDFSAFSKPKQLFAYFGLDPSVKQSGKFEGTKVQMSKRGSAIARRVIHTLTLQSISISRNREAKNPVLREYYLKKCDSKPKLVAMGAVSHKVCNMIFAILRDNKPFKIIAPQEHIKQYNAAKCDIAA

SEQ ID NO: 261922 - protein, 398 aa, unidentified
MPPTTRLTATPRSREFTATDGAMLYLALELSQRGWTLAFTTGRGQVARIRKMAAGALEAVEAEIARARRRFGLPPAAPVVSCYEAGRDAFWVHRALLARGIGNVVVDAASIEVNRRQRRAKTDRLDARKLVAMLVRWHDGDRGVWHVVHVPSEADEDRRHLERERQTLVAEQTRLVNRLQELLATQGVTLPLTGDVRAQLGTLRRWDGTALPAGLRTRLEREWARIEAVRTALRALGSERHRRMTESAPAPADAPVMAKARRLAQLGAIGETLAWVLATELFGWRAFQNRRQVGGFVGLTPTPFQSGGGPREQGITRNGSRELRALVIELAWLWLRYQPQSALSQWYRRTYGGASPRLRRIGIVALARKLLVALWRYVDFGELPAGARLKVAAEAAAA

SEQ ID NO: 261923 - protein, 480 aa, unidentified
MEATQQQKQKKGVKRPVQRGWHEMNRKQRREMTRRIQAEDLSLEVMHPEAAGIDIGNESHYAAVPSSRDSQPVRCFGCTTGELRKMAAWLKQCGIRTVALQSTGVYWIPVYEVLEEAGLEVFLVNARDTKNLPGRKSDVQESQWLMKLHAYGLLRNSFRPPQEIRTMRTYRRQRNDLVQSAGRHIQRIQKALTQMNIQLANVLSDVSGMTGQAIIKAILAGERDPWKLAGFRDKRVKATEEEIARGLEGNWQDDLLFLLKQEQDSYEFCQKQIAECDARLEQYLQQRPDRSHGANLPEEKRKGRLQKKAKNPQFDLRTHLFRMTGADLTQIDGIDVRTAATVISEVGWDMSKWENEDHFVSWLRLCPDNRTSGDKIIGKGRLPTNNRLTVALRMAASTLRESDTYLGAQFRRLRSRLEGPVAVKAMAAKLARLVYRMLRYGMQFVDRGALFYEARHRQHQINFLRRKAVKLGFQLVACAN

SEQ ID NO: 261924 - protein, 344 aa, unidentified
MDTHRDAHVAAVLSLVGEVIGTQEFPVSAAGYRNLLGWARASGMVRRAGVEGTGSFGAALSRYLLAQGVDVFDVNRFDRADRRQRGKSDPLDAENAARAVLSGRASARAKTGDGPVEIARMYKLAKDSAVKARTQAINQLKAVLIRADPQLREELAGLGNADLFRTCAGLVDDSLNHEADEGAVLHATHVTLALLARRIRQLSEEIQDLGGRLTRLVERHAPQLLEVVGIGPDTAVTLLITIGDNPERLGSEASFAALCGVSPVERSSGSRQYRRLNRGGDRQANAALHRIVQTRLRVDPRTREYYERRSKEGKTRREIVRSLKRYAAREVFHLVRPVQSQPSL

SEQ ID NO: 261925 - protein, 312 aa, unidentified
MDSSLCIGIDVSEAWLDVAVHPSRQHWRSKTSPAARASLSKRLNCLSPRVIAFEASGGYERPLAEALTQAALPFAIVNPRNVRSYARSIGVLAKTDRIDAAVIAEFAHVTKVEPKTPPSPAEQAARDLVTRRAQLIADQTREMHHSRHASGPSLASAERHLAFLKQEIPAVEQELRQVITADDALRQRWERLMTVPGVGAILAAVLVATLPELGRINRGAVAMLGGVAPLARDSGKSEGKRFCWGGRSIVRTALYMPMLSAIQHNPAMHALYQRLIGRGKPRKVAITACMRKMLTILNAILRKETTWNPQTA

SEQ ID NO: 261926 - protein, 405 aa, unidentified
MNAVGIDVSKGKSTVAILRPYGKVVASPFGVAHTGSDLRALADLIKKLPGETKVVMEATGNYYESIARCLHEQNIFVSVVNPVLISDFGGNTLRKPKTDKKDSVKIASYALNYWLDLREYTPQEDLRKSLKLLNRQYQQSIKLKTMMNNNLISLLDLTFPGINKLFTSPSRESDGHEKWVDFVLEFPHCDMISKLTIKSFTRKHMKWCSNNSYYFTESSCEKIYAFAKECVSSVSSDEAIVFSVVQAAKMLVSATENCHAIQTEMNRVASKLPEYDTVMNMYGVGKAVGPQIMAEIGDPRRFHSRKAITAYFGYDSENNDSGQKTTRSNPMTKKGSGVLRRTLFIIMQVLLKTKPQDNPVYDFLIKKQSEGKHYYSYMNAAANKFLRIYYAKVKEVLHTTETPLT

SEQ ID NO: 261927 - protein, 323 aa, unidentified
MSDPINNYTMIGVDIAKLKLDIAIDDKKVLSVDNKEENFKELLKTIPDVGQVCFVMEATGGYERKLVSFLQSKGIAVAVVNAKRVRDYANSMGAYAKNDHIDAQMIRHYAQAASAKNRLKLRESHTEIAQRLEELQRRRNQLVGQRAMEKQHFEAASDKESVRSITRMIKQFDKEIDRIEVKIKAYINADDNLKKSMEQLIKVQGIGEVTVLTLLTQLPELGKLANKEIVALVGLAPYCKDSGTKTGRRVIFGGRILIRSTLYMATLSAVRYNKPIREFYQHLLAKGKLKKVALVACMRKLLTILNSMAKTESEWDPHFGKTA

SEQ ID NO: 261928 - protein, 451 aa, unidentified
MSKRKGSKVASLPMVEPNAAGVDIGATQIFVAVPPDRDAEPIRCFDTFTADLERLADWLEQCQIRTVAMESTGVYWIPLFQILQERKIEACLVNARHLKNVPGRKTDVEDCQWIQHLHSVGLLRGSFRPDQEICAIRSLWRHRDNLIQLATVHLQHMQKALDQMNLQIHHVISDLAGTTGLAIVDAILAGERDLTKLAKLRDWRIRASEETIIKSLVGDYREEHLFTLRQSLETYRHYQRLIQDVDAEVKQMMQRLPAKIDIGEKPLPKEKNPRKTPWRNEPPQLREDLYRAFGVDLTQIPGINTLTAQMLLTEIGPDLSRFPTVAAFCSWLRLCPEPKISGGKVLSSRTRPTKNRAALALRMASQGLHRSQTLLGDYFRRMKARLGTPKAMTAAAHKLARVVYHMITTHQEYDTTVFQELEHRLQDRKRMKLRAQARELGFDLVAREAVP

SEQ ID NO: 261929 - protein, 478 aa, unidentified
MVVVSRDGEVGAAVGYSRPRLCLIRSVQRTDDCDALHPDVGTGEHEGLLESSCGMLSAPETGGMEMSHMVSFIDVHKKMVAVVVADAGKDEEVQFVRRKFGAGAGEVKRCAEFLTELQVKEVCMESTAQYWKPVWGELEERGFHLELAQAQSNRGPKGRKSDFKDAERGWRRYVADELILSYVPDPEQRIWRTQSRTRLRLTRDRSRLQSQLEALLEEMRIKLSSVTSDLLGVSATRMLRAIADGETELEKLADMADPALQASKAELCDAMHEVKNLDARYLVILHQFFERLDLIDRQSEELQKGLAQSLKPCQDQVERLAEVPGLGVDSAQQIIAEVGPEAQNFATAGQLASWVGVCPGQNESAEKNSSDASPKGNRFLRRILSEAAKAAGKAKGTVFQKRYQRTVGRDPKRYNEATWAVAHHILRVTWKILHDGVRYEERGDRNEPKADQRRAARLIRQLRHLGYGVTAHPLPAGS

SEQ ID NO: 261930 - protein, 339 aa, unidentified
MKLYTAFDLHSNNSYLGIIDENGKRIFKKKLRNDPAMIRETLKPFKTDIEGIVVESTFNWYWLVDFLKEEEYRVHLANPSKIQQYSGLKYSDDKHDAFWLAEMLRLGILPEGYIYPKEERPIRDLLRKRGHLVRLRTALIVSLQNIIARNLGVKLKANDIRFLTTDRVTPLLQENEDLSLAGKVSKESIDFLARQINAIERTISGRIQLSNPYDRLLSIPGVGKILAFTITLETGPIDRFPKVGNYVSYCRKVPSARFSNDKKKGTGNRKNGNKYLAWAFSEASDHARLFDAKARIYYQRKLQKTNGPVAHSALAHKLARAAYYIMRDGVVFMPDKAFI

SEQ ID NO: 261931 - protein, 331 aa, unidentified
MKSGSDCNTPADVLYIGIDVSKDTLAVNAAEVFTATIKNNKRDIYKMVRTVRKTIGRERPILFVFENTGRYSLPLLLELDKLGEKAHVANAARVRYFAKAIGVGAKTDPVDATVIRRYGEKTTPEPTPIPSDSLLILKELFRTRALLVKINSMIRNLADATSGKLCRDILRDIVRLIDRRLAKISDEMDDVISENETMREMSDALTGIVGVGKTTAAAVLAGCPEIGTLGKRRIVSIFGLAPFVRQSGKWQGKACIGGGRSDVRRCLYLPALSAAKRNPVLKVFYDRLIARGKPANVAIVAVMRKLLIHMESVAASVLEKRQSKENSLCAM

SEQ ID NO: 261932 - protein, 366 aa, unidentified
MKKISTVEIERIQIFKENQLTIGLDLGDRTSHYCILNEVGEVILEHELPTTPKGIEGVFSRIPRSRIALETGTHSPWVSRQLTQLGHEVIVAHARNVRLIGESSRKDDQLDARTLARLARIDPGLLGPVRHRSAKAQIHLTVIRARAALVSTRTALGNAARGLTKSYGERLRKCGTEQMNREIAKGLSQELRDVLDPLLREIESLTERIAEYDGRIEQIAKEVYPQVARLKQVKGVGPLIALTYVLTLDDPHRFRRSRDVGCFIGLRPGRRNSGMSEPQLHISKEGDRYLRTLLVQGAHYILGPFGQDSDLRRWGWKLSERGGKNAKKRAVVAVARKLAVLLHKLWVSGEVYEPLRNNRKGMAAVA

SEQ ID NO: 261933 - protein, 326 aa, unidentified
MHTHFLGIDIAKSKFDCALIRPDGKVRNKVLTNNAPGFAQLLTWLDGHGITSNDLSQLHVCMEATGIYWEALAEFLCDQGIVVSVINPAQIKSYGASRLMRSKTDKIDANLIAQFAKERSPEPWTAPAAHERVLRSLVLRLEALQNMLTQESNRLQVANPAVQPQIQNHIDWLNTEIKALAKLIKDHIDKHPDLRQKRDLLDSIPSIGERTQAIMLAYFGSVEQFDNARKAVAFVGLDPRQHESGSSVKGKTRMSKVGHAFVRKALYMPAMAALYKTQWGKLFRERLANAGKPPKLIIGAMMRKLVHVAVGVLKSNKPFNSALHFA

SEQ ID NO: 261934 - protein, 478 aa, unidentified
MPRRKHPSAAPAPSAASNSVTPRPPAPGGDHYHDSLPVQHRHAAGIDVGSRSHWVAAPGAGGAIEVAEFSAYTDGLLALVDWLRQRRVTTVALEATGIYGDALFDLLRAEGFEVIQVNPAYTAQLKGRPKTDKRDCQWIQRLHAHGLLPASFRPAPDIAVLRSYLRQRAELVRAGARHIHQLQKALELMNVKLTEVVSDVTGLTGLKIIRALLVGERDPRALARLRDKHCKNPTDTFARALHGCWREEHLLAVRQALASWEHYQAQQRDLEGVIAEHLRRMKKAAVLPPLPPKPRQRGRGTNEPRFDVRAALYYVTGVDLTELDGIAEVTALVVVSEIGLDMSRFPSVKHFCAWLGLCPKVKKTGGKVVSSRTRPGKGRAARALLLAARALWHSPTPLGAFLRRLKARLGAPAATTATAHKLARLLYRTLRSGQPPAKETAEAYAERQRQQAVAAVLKKARRLGLQVVAPGEVAEPPA

SEQ ID NO: 261935 - protein, 337 aa, unidentified
MNITTIGIDLAKTSFSLVGTSKHNKIVLRKTLTRNKLMPFIAQCPACLIGLEACSGAHYWAREFEKLGHEVKIIAVKFIEPYRKGSKNDNNDAEAICEAVRRPNIWYVPVKSADQQASLCVHRVRQGVVRDRTSWINRSRGLLSEFGVVIPKGRYAAQAALPVILTDQGNGLPELARQMIHDLWLSIQQANEQILGYDRALSRMAREDNNAKRLLTIPGVGELTATGVVASVPDPRLFKDSRQFSAWLGLVPRQYTTGGKIRLGRITKRGDKYLRMCLVHGARAVIAKLGDKQDHVSCWVRGVIERRGYLRAVVALAARNARLIWTLMVKREDYRAT

SEQ ID NO: 261936 - protein, 322 aa, unidentified
MSVAVLGIDIAKQKFDVALLVEGKIKNKTCKNSVEGFDTLKIWLEKQGIDKVHACLEATGNYGEDLAIYLHESGHLVSIVNPARIKGFAQSELIRTKTDKIDAGVIARFCLAMVPEPWIAPTPEIRSLRALVRRVDSLIDMRSQEKNRISTAHESVVALIKEHITYLDKEIEKIRKQIADLIDRNPHLKQKKDLLDSIPGLGKATIPHILAELEDLDKFNHPKEMVAFIGLAPKETLSGSSIKGKPRLCKIGHARLRKALYMPALVSIQCNPVMIAFYNRLKDKGKNGKVIVCAIMRKLVHVIFGVLKSGKKYDPNYKPVCA

SEQ ID NO: 261937 - protein, 423 aa, unidentified
MAASPDARDTPGGALVSVHVVPATSSTIVVAIDVGKNVAAISATDSSRRRVLPPTHVALTRSGLDSVVTRIQSASDPSIQVRVGVEAAGHYHQPVLGYTWPSGWELVEVNPARVAEQRKIFGRRRVKTDAIDLDALTVLLLAGQGIPVISRSDVCAELSAWSAHRSRRVLTHTATMIQLTTQLDRAFPGVGTVISDLFGTGIGRLVIAEFTDPTHLTKLGTKGLIAFAADHGLRLEHPRAERLVAAAADALPTPHAALARQVIARDRILLADLEAQITVATARIAELIPASPFATLMSVPGWGPARIGNYAGALGDPERWAGPAQIYRASGLVPAQYESAGKRRDGHISREGSVPLRRALIELGFGLRHNEPAAKRYAADLKLRGKPNRVIGCALAHRANRIAYALVRDRAAFDPGYWRREES

SEQ ID NO: 261938 - protein, 338 aa, unidentified
MAIVFVGIDLAKSIFAIHGVDECGKATLVKPKVQRDDLAKLIANLPACTIAMEACSGAHHWARLFASFGHTVKLIAPKFVVPYRRSGKKGKNDAADAAAICEAGQRPDMRFVPVKDVEQQGILCLHRVRQGFVEERTAVINRLRGLLSEFGIVMNQRASVVREKGKDAIERLTGYAKTAVSDLLEEMKRLDKKIFDYDKMISDVAKNNSRASNIKRIKGVGSVTASLVVSLIGNGHDFKSGRQFSAWIGLTPSQYSSGGKSRLGRITKAGDPYLRSLLILGARSVLNSAKGKTDEVSKWACGVQERRGYWRAIVAIASKNARMIWAALRKGEGFQVPV

SEQ ID NO: 261939 - protein, 355 aa, unidentified
MKNQALQYLAMDVHQATVVASVRNEQGAITMRATVATEARAILSLIRAVGARVVVAFEEGTQAQWLHDLILPHAEGVVVCNVRGKSELTNKSDRIDADALSELLRLGALKAVYHGAPSMLTLKELVRNYNAVVEDATRAMLRIKALFRARAIPTPGTSIYRVSDRAGWLDQLTIQGARVRAESLFKQLDLLRELRPKAKRAMIVEARKQSGWKPLRSIPFLGEVRTAQLMAIIATPHRFRTKRNIWPYAGLAVVTRSSADQEFAGGKLRRRNRPPQTRGLNRNHNPMLKSIFKGAATTAAAKPGPLKDIYDACVARGTKPDMARVTLARKIASIALRLWKKGELWDPTKLTMQTT

SEQ ID NO: 261940 - protein, 411 aa, unidentified
MELLVPRCAGLDVAKDEVVACVRVPDGQGGRRQEVRTYPTFTSGLEALADWLTGEGVTQVVMEATGQYWKPVWYVLEEAGFELLLVNARHVKILPGRKTDVADAAWLAELLEHGLLRGSFVPPAAIRQLRDLTRYRKRLIQAHTAEVQRVQKTLEDAGIKLDSVAADVLGVSGRAMLAALVGGERDPEVLAELARGRLRTKLPQLRQALRGRFSDHHALLLRLALAHLEHLEGAIAALDTEVDRVIAPFARARDQLDTITGVGKRAAETIIAEIGVDMAVFPTAGHLASWAGRCPGNNRTGGKRRSGKPTKGNRWLGEVLTECAWAAARSRDTYLAAQYWRLARRIGKKKAAIAVGHSILVIAWYLLANDCDYQDLGGDYFVRRDADRARQRAVAQLQALGYRVTLEPLAA

SEQ ID NO: 261941 - protein, 428 aa, unidentified
MAEDTTLTSQTWLVAIDIGKSFHAVLVEGGDGTRQQFRMANHVEDYDRLVAFLRGLPGPARIALEPTGDFHRTLAHRLLREGFSVVSVSSVAGARYREALFNSWDKNDPKDAYVILQLLKHGLVQHYHDPLLAGDHDLQELAKTYHQIVLARKRLADSLLNHYLLLYFPEMGRYWESTRVEWFAAFLEQFPTPAAVQALPKEAFVRAAWSVVGRKVNKQAKLEELYELAQRSIALPVAVDSVAIETFRLQLAQLRRLAELRQTLEARAHALLKDRADFQRLCSLPGVAAILALVILAEGGDLRRFPHHRQFLKYCGLDLAKCQSGQFRGRERLSKRGNARLRMAFWMAAQRAVRMNENSFRDKYERYTRHDSGNPDVRRKALTAVAAKMARVAYAVVKHDQPYHGYHEHALPSGSIPLKRAVGARATP

SEQ ID NO: 261942 - protein, 371 aa, unidentified
MDESIKFFVGLDAHKDSIAVAVCEAGREPSRFVGTLGPDVQGVLKTLRKYGPAQQVSVVYEAGPTGYGLHRELTRRGYCCEIIAPSLIPRRAGERIKTDRRDCARLAELSRAGELKAIWVPDEAHEALRNLWRAREDAVNMRLKVRQQLKAFLLRQDRRYAGKTSWTRLHQRWIADQRFSQPADQIALTEYQLAVQAAEERVQRLTAALQQAVQGWRFEPVVAALRALRGIDTVSAIGLVCEIGDIGRFGSARQLMGYLGLVPSEHSSGNSVRRGSITKTGNAHARRLLTEAAWNYRFPARISNELRDRSKALPPGIRTHAWKAQVRLCSRFAQLSSRGVQANKVCVAVARELAGFVWSIAQQAAPSTATQ

SEQ ID NO: 261943 - protein, 429 aa, unidentified
MRAESTPGARGPVFCGVDTHADSHWLCVLDWRGRKVLSRRFPADAAGYEALAGAIAAAGEPACVAMEGTSSYGAGLTRHLASLGMPVREALSPAGMQRRRPGQGKCDEADAERAARAAMSGSKLGTPKSQDGWVDGVRCMLAARSGAVKARTSAINTARSLLTTAPEGLRSRFRGMAGPRLMEELPSVRAEGALGAALGALADLWAAARDAALDMERAIEASLEENCPALLAMYGCGPVSAAKLAVAAGDNPGRLRSEASFAAICGACPIPASSGKTVRHRLNRGGDRQANSALHEIARQRVMRDPETAEYAERARARGKSDREVMRCLKRYVAREAYRALMRPHEIRRPEDASELVAARRAAKVSQVRAASILGTSEKYISMLERGQRELKPIRRAYEAWVEAGLPLNWDRQAFEAERKMDSKKHLAK

SEQ ID NO: 261944 - protein, 315 aa, unidentified
MTKRSQDILRNEKVFVGLEDSKKTWQLCVRSGGVIVNETSMPAKLDVLSNYFNNKFPECQIQVIYEAGFKGFQLHDELEAKGWDCIVTPPHTVTEEKCQRKKNDRTDCRRLAKNLENGDYHSCFVPDKELREDRQISRTYEQVQTDIRRECNRIRRTLEFHGLDQGFSPGSWNRAMYTRVKLSLEDLEISASLRFSIKVMFNELEHLRQLRKEILQQLRTLAKSDRYKESVELLQTTPGIGTFTAIRLLLEWGDVSRFKRKEEFASFLGLVPSDYSSGETERQGHITKQGNSSVRSWLVECSWVGSCPTPLLNPR

SEQ ID NO: 261945 - protein, 410 aa, unidentified
MEAIVERCAGLDVHQATVAACLNLGAAAAKPSKQVCTFGTTLPDLEDLRNWLKDNDCTLVAMESTGVYWKPVHAVLEDHFEIVVGNARHIKNVPGRKTDVKDCDWISDLARHGLIAKSFVPPRPIRELRDLTRYRCKLVQATSAERNRLIKLLESANIKLSSVASDVFGVSGWAMLEALVEGRQTPAEMAQLARRRMRRKLNELEPALHGRLEEHHRFLLGVQMRRIETMQADVAELDKRLREKLAPYSRQMRLLRQIPGVDWVIAATIIAEIGVDMSAFLNAEHLASWATMCPGNHESAGKQHGGKTRKGNVHLKTALVMAGNAAGKTKGTYLADKYRRLKARRGALRAAVAIGHKILVTAYRMLITGSDYQDLGDGYLDQLNTHRTAGNLIRRLRQMGYDVQIAPKAA

SEQ ID NO: 261946 - protein, 420 aa, unidentified
MLVSRWINVKPILETCCGLDVHRDQVTACIASGPLDRAKEKLIVKEFSTMTYGLRELSSWLKEHDVGTVAMESTGVFWKPIFNILEDDFEVLLANAARIKNVPGLKTDKKDARWIARLLRYGLVPASFIPPRNIRNLRDLTRTRKKLTEERTRHKNRIHKILQDANIKLSSVATDVFGVSGKAMILSLLEEDEPSPDEIKSMTKGKLRNKIGLLVKAMDGKVTDHHRFLLKMHFEHLESISSQINELDEEIYRKLEPFEKEFRLIRTHPVISEVTGASVIAEIGVDMSQFPDERHLSSWAAISPGNNESAGKIKSSRTRRGNNYLKTTLVEAAWVASRTKDTFLAGRYYNIARRRGSKRAAVAIGHQILKDVYRILSTGEPYKEIGAEAAQNRKSEVRERSIIRELESQGYSVQKIEKSA

SEQ ID NO: 261947 - protein, 388 aa, unidentified
MQIITDRPHAPTAIRTDLGAIFVSLELSRSTWLITSLSPGGGEKISKHTVRSGDVAGLWARFSQLKDKVQVRTGQVAPIIVIQEAGLDGFWIHRLLQDEGVESHVVDPASIATSRRRRRAKTDKIDGEALVRALLAYKRGEPRVCAMVRAPTPQEEDRRRICRERKTLTAERVEHVNRIKGLLFAQGITDYEPLSRKRRERLEELRTGDGRPLPEHLKAQIGRELDRLELTLQQIKSVETERDAMLSPSDEGTPAPGAMLKSLKGIGPEFAAVLWAEGLFRSFSNRRQVAAYAGLAPTPWRSGSVAHEQGVSKAGNPRLRTTMIQLAWLWVRHQPRSILTLWFHQRVQLNGGRVRKVLIVALARKLLIAFWKYVTAGVVLEGAETTVA

SEQ ID NO: 261948 - protein, 344 aa, unidentified
MTQSSKIIGVDLAKSVFQLALADAQHHVTATKRLTRRQFHTFFVNHPPVHVVMEACGTAHYWARTLQALGHTVTLLPAQYVRPYVRRNKTDRNDAMAIVEAARNRAIRAVPVKTEYQQALQSLHRVREQWKTTRTARLNALRGVLRELGVLVPLGPAAAIKTTRATLDTLPPLLQPVVRSVLDELTDIQFRIHALEKQLKQATKADPVIQQFMQINGIGLLSATAMRASVQSPSQFKNGRQLSAWLGITPREYSSGDKRYLGRISKRGDKYLRTLLIHGARSVMARIKIRQRANQELTALQHWAAQLEQRVGHNKATVALANKLVRILWATWMYQRDFDGNYAR

SEQ ID NO: 261949 - protein, 310 aa, unidentified
MDGIFVGIDVSKDRLDVAVRPDGAVFAVERNAAGLEALVARLRELAPHLVAIEATGGFETIAAAAVAAAGLPLVVVNPAQVRAFAQALGKRAKTDPIDAAVIAHFAEATGAKPRPLPDEATRMLADLVARRRQIVEMMAAEGQRDRRFNEKRLKKSIARLRKAMEKELAELDREIHDQVRGSPVWAEKENLLASVPGVGPVIARTLLADLPELGQLSRKQIAALAGLAPFTRQSGRWRGRDFIGGGRTTVRTVLFMGALVARRHNPVLRAFFERLVAAGKPKIVAIIAVARKLLTILNAILRDRRAWQTA

SEQ ID NO: 261950 - protein, 323 aa, unidentified
MKPGPTRKGEKMAAMVRLAGIDVSKQTLDVHVLPSGERRTVTYDRHGLGELRRWLLDLGVAVAAVEASGGYEREVSEVLEEAGLVIHRLNPLRVHRFAELRGRLAKTDRLDARTIAEFTRAYPQDRQLARDPRRERLAEHLLVRRHTQDGITDCINQLEHLRDSRLRRLVTTRKASLERSLAALDKRLAALLAEHDDLVALSDQLRSVPGVGPVLATTLIALLPELGLLTRRQIAALVGVAPFDRSSGRSSASKSIHAGRVLVRNALYMAAMVAARHNPALKTFAERLEAKPGKVRLVACMRKLLVTLNAMVRDGAQWQSRTA

SEQ ID NO: 261951 - protein, 311 aa, unidentified
MKRNYVGIDVSKDKLDFAIKDGSTKQVANSEEGINKALVWLKTEAKHNPKVVVESTSWYHWLVCLLLTENNYDVRLINPLITKKYQKSSIRDAKNDKIDAYRLAEIGYLESGLAKFFDSRQELKNRRIQTLISNLEKTKQRFQRSLRDTLKSLETIDIEVDLSAVEEALKAIELALKTCKSLIQRNANELAKKLALTPGISLYQASTLTIAVSGKTFTKREKLVAFFGLDVRVRQSGRWQGNSCLSKRGNAYYRKILFQIGWSLQRHNERFREYYDRLRAKGKHYYTAIIATARKFLNYFFKLLTEFQGAY

SEQ ID NO: 261952 - protein, 340 aa, unidentified
MNEITTIGLDLAKHVFQVHGVDASGAPVVRKRLRRSEVLAFFARLPGCLVGMEACATAHYWARELRAVGHEVRLMPAQYVKAYVKRNKNDAADAEAICEAVRRPTMRFVPIKTAEQQAALLVHRGRERLVRQRTAVVNALRAHLAEFGVIAPLGLRNIARLIAVVRDESDARLPALARQVLEVLATQVEQLEAAVAALEKQLAAWHKSNPVSQRLATIPGIGPIIATALAATVVEISGFRSGREFAAWLGLVPRQHSTGGKARLGGISKRGNRYLRRLLINGASANLLRSKATRADPWIIALRRRRPSLVVAVALANKTARIAWAVMHRQQNYRRMAAAA

SEQ ID NO: 261953 - protein, 342 aa, unidentified
MKKYFIGIDVSKETIDVSFVESDFQQQPEYLAQYPNGKKGYRSMIRDLKLALRGASSGQWLFCCETTGAYDRQMCHWLVEHGMHVWRESALQIRQSLGIRRGKNDKADSMAIADYARRHPDKVNLFQLPIKELSALKDLYLYRQTLVDKLKGVKNRQKALKSQGEAASPAARFIRRDSNNEIKRLERSIAECESAMMEVIRSDEQLMSNYEHVRSIKGFGLVVTVALMVYSGNFQTVPTANKMATYCGVASFRNKSGTTLDARQDVRHLSNLRLKGVLTMAARTAIRHDEAIRQYYQRKIAQGKQHGVAINNVKNKLLHIAYALVRDGQLYQSGHVANGDAA

SEQ ID NO: 261954 - protein, 388 aa, unidentified
MKVGADKSEPLTAIHTDLGAIFVSLELSRSSWLITSLSPGGGEKMSKHSVRGGDFAGLMQRFAQLQEKARLRTGQSFRIIVVQEAGLDGFWIHRALQNEGIESHVVDAASIATSRRRRRAKTDKIDGETLVRALLAYKRGEPRVCAMVKAPTPGEEDRRHLCRERKALTAERVRHVNRIKGLLFSQGISGYQPLRRDRRQRLEELQTGDGRAFPQHLKALINRELDRLELLLKQIKTVEAARDALLAVGQTAKPAPAAMLLDIRGIGPEFAAILWSEGLFRHFENRRQIAAYAGLAPTPWQSGAVDREQGVSKAGNPRLRTTLIQLAWLWLRNQPRSALSVWFHERVSRNGGRLRKTTIVALARKLLVALWKYVTAGVVIEGVTMKVA

SEQ ID NO: 261955 - protein, 355 aa, unidentified
MTKDRLEVTGGVDTHGRTHHGAALDGAGRLLGEREFPATAAGYPALLAWLIGFGRVVAVGVEGTGTYGAGLARHLAGHGVRVIEVDRPDRKTRRFRGKSDPIDAIAAARAVLAGTATGVPKTRTGPVEALRALRVARRGAVKAKVAALNQLHGLLASAPEVLRAQLRDLSSAALVTTAAGFRIREDQLEDPAMAVKAALRSIARRVVDLNAEIALADRRIAPTVARLAPRTLALPGAGPQVAAQLVVTAGDNPERLRSEAALAHLCGVAPLPASSGRTDRHRLNRGGDRQANNALHTMVLTRMRHDPTTRAYVQRRTKDGLSKTEIMRCLKRYVVREVHTALMADFTAPRGLDSP

SEQ ID NO: 261956 - protein, 356 aa, unidentified
MTIVAHAYPFVIGVDAHARSHALAVLASPTGELLDETQFPATVAGLQRAVSWVARRTGGDLAVLWVIEGVGTYGARLARAANDAGYAVAEAGRMSARANRGVGKSDPLDARRIAQSVLAVDVAMLRRPRADDGVRAAVRVLIASRDHISTERTSAANALTALIRVADLGIDARRPLTAAQITAMAAWRARDEDLATAVARKEAGRLAKRVIAADRELAANTKQMTDLLNASPARVLLDQPGIGPVTAAVALAAWSHPGRVRSEAAFASLAGVNPIPASSGNTVRHRINRGGDRRLNRALHMAAVTRIRMDPRTRAYVERRTAEGRTPREIRRCLKRYLARQIYRQLNAAETALNPT

SEQ ID NO: 261957 - protein, 416 aa, unidentified
MNELKCWFVGVDWASENHRVRITDGCGKRLGERDFAHGGAGLAEMAAWLTSVTGAEPSAIYIAIEIPHGPIVETLLERGFNVYSINPKQLDRFRDRFSPAGAKDDSRDAEVLADALRTDMRAFRRLALAEPLVVELREWSRMTDDLNGERNRLCNRLREQLWRYFPAMLELEQDLGAEWFLDLWELVPTPDNAMRIRDTSIARILKSRRIRRLTAAEVSAVLRKPPVTVAPGTIEAASAHIRVLTERLRVVNRQLKDAHRQLDRLCGLLAEPTESESGQVNEQRDAAILASLPGNGRIVLATLLAEGWEALQRRDYHALRTLCGAAPVTKRSGKTCIVTRRLACNPRLRNALYHWARVAVQHDPRSRAKYAALRLRGHGHARALRSVGDRLLNVACAMLRNGTQFNPSLESQKNAC

SEQ ID NO: 261958 - protein, 394 aa, unidentified
MPRFPHKQRVFSPSPVLSRLIPSFSNTLSPYKLADYLKSLDGETRVVMEHTGRYYEPVARFLHDEGVFVSAVNPKLIKDYGNNTLRKVKTDKADSRKIARYGIDNWAELRQHTPMDTIRMQLKTLNRQQSLYTKTKTMMKNNLIALLDQTYPGVNALFDSPVREDGSQKWVDFATAFWHVDCVRNMSLTAFAERYRKWCKRHGYNFSQSKAVEVHTGAQDLIAMLPKDALTKTMVRQAIDALNAISASMERLKAEMQALAAQLPEYPVVMAMHGVGDSLGPQLMAELGDVTRFTHRNAITAFAGVDPGADQSGTHEAKSTRVSKSGAPELRRALFLVMDCLLKTQPQDDPVYRFMDKKRAEGKPYLVYMTAGANKFLRIYYGRVKEYLASLEGN

SEQ ID NO: 261959 - protein, 343 aa, unidentified
MKDTIYNHYIAIDWSIKNMAIARMTKKSNKITVIDVPSDIEDLQAYLKNLKGTKILAIEETTTSQWLYIELKEYVDRIFICDPNRNKLLSEGPKTDKIDATKLVQLLKAGLMKEVYHSTDKFLYLRRVVSGYEDLVKAGVRLKNQRYSLLRACGKSGDEKIGSTLESQGEQFVLECLDRQIEAYEGEKEGYEKEFEKLARSHPKIKHQKSLPGIGVINAVKIVARVVTPYRFPDKGHYLSYTGLIKLNKESGGRSYGKKNSRFSRQLKSVYKTGVLAAIGGNNPINDYYEHLIQEDGYPEYNARQKACRRLAILSLGVLKSGKKYQPYRRDHLKGSKEGTSGL

SEQ ID NO: 261960 - protein, 409 aa, unidentified
MFFIGIDLSDKFFDCCITNSFRDVVSRNRFDFNDDGFYSFIYHIREKELNSQNCIIGLENPRSRLVDFLVTRGYTILPVNPNALARYRESRFPSKAKSDQGDAQLIADHIREHRRALRAVKIPDEKVRELKLLLEDRDRLVKEKVRISNQLTNTLKDYFPQALDAFGNITNKSALEFLRRFDTFEQAKSLSSEDIEQFLNECHCYQKKTRDRFGNVMKKNPSQIPQEIIRTRMRLKKILVGHLALLIQEIQDYEEQIQQVMGEIPHGDIFRSLPGADYVVGAKLLVLYDGKEFSSVSEVGAFYGTVPYTARSGQSVYIRFRWGCNKFGRTTFHQLARSSLKKSQWAKKPFTKKREEGKGYHHALRCLANLWVKVTFAMWRDKTPYDEAKHLASIASHLINQPVSASSNR

SEQ ID NO: 261961 - protein, 431 aa, unidentified
MNDVDRFIQFSQFRKQIRGSLTHLIVGIDIAKDKHHAFFGTANGKTLWRRLIFTNDLIGYTRLIEQAQVLSSQYHLGEVVFGLEPTSNYHKPLAYWLIKQEYLVVMVAGKAVKDNRELLDGRWDKNDTKDSANLADLISQGKCQFYEQPDEDIVVVRNLLVIRKQLKREEHRLRMRIRNGLIAKYFPEMDRYWGHCLEENLAIVRWYLDPQKISNTEFEKFVLHVTTTNRGVRQMQRLRAIHQAAGESVGLPMDESAGYEAQLLVERLQQVKEQLSQTMQRIENVCQNLSGYKLLLTIPGFGPYISALVLGALANPFRFTSRKQVIRLAGLDLNASRSGKKSQDRVPKISKRGKADLRYALYQAALIASYHNDSFRRLYHGMLEGRHGERGIKTKVRVKLAAKMLVVAWTILKNNEPFDARRLLGESVQQR

SEQ ID NO: 261962 - protein, 320 aa, unidentified
MHTLFVGIDMAKAKFDAAILNSEDKYRSKVFPNTSAGYLQFLDWLAKHNALGAHLCMETTSVYGCDLANFLVQKQLLVSVVNPAQIHAFGKTELNRAKTDKADARLIARYCRMHRPAPWAPPAEEIATLQALVQRLEDLLGLQTMENSRLEAATGPARESVEAVLQFIEQQIEMVRLQIQIHIDQHPRLKSQKELLSSIPGIGDNTAATLLAFLSPVERFHSAKQVVAYAGLNPRIRQSGQWAGKSPIAKTGNALLRKALYLPAVVAKHHNPIIAAFCDRLLARGKRPMQVVVAAMRRLLHLVFGVLKSGKPFDPKFGLA

SEQ ID NO: 261963 - protein, 338 aa, unidentified
MIVIGVDVHKHSLTAVAVDEAGRMLDEKTVEAADGELVAWALGLSGKRLWALEDCRQLTRALERELLAVGEQLVRVPPKLMAPQRRAGRARGKSDPIDALAVARAALREPRLSRPRPDEQPFRDLKLLVDHRDDLVDERRRAQQRLRWHLHQLDPSFAVPAKALDRPVHLDRVGRWLARRPAEAQVRVARELVVRCRSLTRTILTLDRELEQRTAQTAPALLELPGCAAITAAKLLAEIGPIDRFQTDAQLARHSGVAPLEASSGRVQRHRLDRGGNRQLNCALYRIAITQARYHPAARAYLERKQAEGKSRREAIRCLKRQLVRVVFNTLKASPALT

SEQ ID NO: 261964 - protein, 326 aa, unidentified
MSRPPQAEPHASVFVGIDVAKASVSVAVHPTGENWTAETTTRALRALAQRLARLTPTLVVLEATGGYEVPVVGALSQAEVPVSLVQPGRVRHFAQAAGLLAKTDRLDARLLARYAAHLEPALYVLPDEVQRGLMLLVARRRQLEEMLTAERQRLEQQNFFPRSPVRAEIAETVAYLERARGDTDRQLHAYLAQHPRWDDAHALLRTVPGVGFVTAVTLLAYVPELGQLSRQAIAALVGVAPMACESGQWRGGRHIRGGRAAVRHVLYMAALTAARMNPVLRAHYQQLRARGKAPKVALTACMRRLLVILNAMLRTRTAWSVPLPQP

SEQ ID NO: 261965 - protein, 447 aa, unidentified
MAQGNGLTRGDRNRNRKLGELRAVVRADRAVLAIDLGEDKQVAVVMDHDNRVLARTTVRAKAHRLGGLVEWGEKVAGKQGFAGLVVACEPTGHRWMALMALAESRGHGFVGVQPLAVHRARESDDYTYAKTDHRDSYLIGKLAARLECYLPEQATEEWAQLRHLGARRAELITAVTGYRQQAGDLLGCAWPAALDVARRPLESVTWQAAMMVVLSRCGGHPGRLRRMGYEKFLAAVRRELPRWGGQKLCHAIVKGLWDALADPAGVTAQRPGALERLHMVLEDWLALRARLAGTQKRMLEVLDSLGLTELAGSIDGVSPLSAAVILAESGDPSRFSSGRALVKHAGLNPSEHSSATMTGQSRISRRGRPGLRTAAWRAVWAGLRHNTVLQAKYRHLTTREESRLAAGQARVACAAAILRWLRAVITAGTAWDPAIAAGHAAPEAIAA

SEQ ID NO: 261966 - protein, 421 aa, unidentified
MSQQNISRKLAQVKKGTLHVGVDLGLENNVAIVINEYAQRLGRFRFPNDHEGYEYFHRQIEKAQQKSGAPEILVAMEPTNYLWKLFASDLEQKNVRYRLVNAYTVKKHREGDQLDRSKDDPRDAFTIADLSRTGKFTETQLQHGAYAELRQYVSLYYRLKRQIRREKQHIWHAVGQLFPELARVFKNITGETAKAILSTQAAAVEIRKISEEEFIAKVRSGFDGNRLYVSRVRSAYRLAMSSVGVKYGVQALQLALELHVASLNRLQSQEKQILSALEACYLSLPEANFLLSVKGIGTLSGATILAEIGDPKRFRNARQLVKLAGIQPTPNRSGRKQRSATPMSHQGRPRLRSALYFTCLRLIRVDQRFSQLYQRLQNREKNPLTKMQALGVLMNKLLHILWALMKQRTQYKPLGDPLIET

SEQ ID NO: 261967 - protein, 337 aa, unidentified
MQQITKNEIYKHYIALDWSKVNFALASIRDTGTKYKVVEHPADLKLLKQCLKQLPGKKILTIEETTTAQWLYVELKDFVDKILICEPYQNSLLKTGPKNDKIDATKLCTLLRNGSLKEVFHTTDELYHLRKLVSIYDDFVNASVRMKNQRSSMFLSEGKDHKKEKILSGNTINKFITEKQNFNIENIDQIRRDFEVMFRKIQRENQMIQKLVMISGIATKLAVTILAVVVDASRFESKYKYYAYSGLVKHSKDSGRRNYGKRIVRHSRILKRCYKIAANAAIGGNNDIREYYEYLLQNNYSYEDARNQIARYIAKVSYAIMKYKTDYRPYQWRENIK

SEQ ID NO: 261968 - protein, 365 aa, unidentified
MSSVTQSGPIHLGLDVHKDSISVAVLPSGQESAEVDKIFHDEPSVRRLIARFPDPGRLRACYEAGPTGYELQRLLARLHVRCDVVAPSLIPRAPGDRVKTDRRDARRLARLHRAGELVAIRIPTETEEAVRDLCRARADVVDDRRRARQRLGKFLLRHGRVYRDGTAWTVGHERWLAAQTFTEAALAATYARYRAAVTARDAELAAIEADLALWYDRVPFAAQVARLAAYRGVDRLGALTLASEVCDWRRFPRATAFMGFTGLVPSEYSSGESTRRGHVTKAGNAHLRTQLIESAWAYRSPASIGAGLRARHEGVPAQTLARSWTAQQRLCGRFHRMAARKNVKTVVATAIARELAGFLWAEMTA

SEQ ID NO: 261969 - protein, 371 aa, unidentified
MDESSKTLFVGLDVHKEAIAVAYAPEERGAEVVSLGSVGTRQCDIDTLIRKLRSKGATLVFVYEAGPCGYWLYRYLTRKGLSCHVVAPSLIPRKPGDRVKTDRRDAITLARLMRSGDLSSIYVPGIEDEALRDLSRGREAAMEDLKRSKRRLKSFLLRQDIRYEGRASWNAAHLRWLSEVVCPTPPQQIVFQEYVRAITEQSERLQRLERELHEAVKGWRLYPVVEAIQALRGVELTGAVILMTELGDLTRFDSPRQLMSYLGLTPSEYSSGARRRQGGITKAGHSHARRALVEGAWAYRYPAKVSRHLQLRLEKLPAEVQAIGWKAQVRLCKRYRQLTARGKHVNQVVVAIAREMAAFAWAIARLVPLAA

SEQ ID NO: 261970 - protein, 337 aa, unidentified
MRFCGIDLHSNNSVVVVTDETDKVLVSRRCPNDLSKILALLAPHRDELAGVVVESTYNWYWLVDGLMAEGYDVKLANTVAMKRYDGLKHSNDETDAAHLAHLLRLGILPTGYIHPPAERALRDLARKRIQLVRDRTRHVLAVENILARSTGSRPSAAVIKRFPPADTGTLGLATDVALAVQANLAVIATLNLEIGRIEARLLEGAKLRPDYAWLKSIPGIGEVLAIVIMLETGDVTRFAQVGNFASYARCVDSARYSNGRKKGEGNTKNGNAYLVWAFIEAANFARRYSEEARRFFERKKARTNSIVATKALAHKLARASYHMLKAGQPFDVKRCFA

SEQ ID NO: 261971 - protein, 322 aa, unidentified
MESPSIFIGIDVSKARLDIAMRPSGECASVAHEEDAIQSLVKRWNQVRPTLIVLEATGGLERSISGALASAELPFVVVNPRQVRDFAKATGQLAKTDRIDALVLARFGEAVRPAVRPLADEASQELKALSARRRQITEMIVAERNRASRAPKSVGKRIDAHIRWLEAELDRADKDLDQSICQSPIWQENEDLLRSVPGIGPIVSRTLLAELPELGQLNRKQIAALVGVAPLNRDSGQFKGRRTIWGGRAAVRACLYMAALVASRYNSVMKAFYTRLRSAGKKPKVVLVACMRKLLTIINSMIKHRAHWSESNLHHLTLKTVA

SEQ ID NO: 261972 - protein, 393 aa, unidentified
MTATHSVNSTASVSPVLYVAFELSNGQWKLASTTARGQRARLVSVPARDTARILTEIARAKSRFGLPQSAKVFTCYEAGRDGFWLHRFLHQQGISNAIVDSSSIEVNRRARRAKADSLDAVSLVGLLVRYREGETDVWSTVEVPDPADEDQRHLHRELDQLRRERTDHSNRVRGLLAAIGIKIPSKCTLPCDLDSLRQWNGEPVPTGLKRRLTHEFERMELLARQIRAIETEQAEEINNDQTRHVDKVRALMGLKGVGQTSATILVYEFFGWRQFANRREVGALAGLTPTPYQSGESNHEQGISKAGNARVRWIMGELAWSWLRFQPESSLSQWYYRRFGRGTARMKRTGIVAVARKLLIALWRYVEQGEIPEGARESDWKAKLKRVLGRRAA

SEQ ID NO: 261973 - protein, 344 aa, unidentified
MRIIGCDLHARQQTLAMLDTTTGEIANLTLTHEGNNVREFYCKLPRPVRVGIEASGSMQWFLNLMDELGIECQVGHPASVRAAEPRKQKHDRRDADLILKLMVENRFPSIWLPSKELLDLRALLLHLQAIALANGLRRGRSLWNQAGQDQLASLPLAPHTAHRRSELQALYAKFAMEIEKLNQRVEKQAGERPTAVRLMTHPGVGPITALATDVFLGDATRFADGKALASYVGIIPREYSSGGRRRLGGLTKQGNPLLRFLWCEAAIHAVRKDPELKRFYCRKLFQKGLGKARVAAARKLGIRLWILLRDQIDYNEFCRRGQRRQKYGGACAGMPERVMAQNSR

SEQ ID NO: 261974 - protein, 415 aa, unidentified
MERLYSCCCGLDVHKQTVVACLLRPADGGQRRKEIRTFGTTTEALRHLADWLRVAGCTHVAMESSGVYWKPVYNILEGQCTVLLVNAQHIKNVAGRKTDVADSAWIADLLQHGLLRPSFVPDRAQRELRDLTRTRTTLIDERSAAVNRLQAVLEDANLKLAGVATDIMGVSGRDMLAALLGGESDPAVLAALARGKLRRKRAALEQALAGRMNDHHRRLIALHLEHIAFLDESIAQLSADIAERVRPFEEAIALLDSIPGVDRRTAEVLLAEIGVDMGRFPSAGHLAAWAGMCPGQHESAGKRRKAPAREGNRALRRALTEAARAAARTKTAGRTRLAAQYRRLVVRCGKKKAAVAVGHTILRLVYHLLTHNEPYREPDLSYLDERRRAPTQQRAINQLRALGYEVTITPKEPAA

SEQ ID NO: 261975 - protein, 410 aa, unidentified
MEVLHPRCCGLDVHKETVVACVRLVIDGKPVKEVRTFSTTTADLIALSEWLAGTKCTHVAMEATGVYWKPVWHILSDGGFNLVLANAAHIKNLPGRKSDVKDSDWISDLLAHGLIRASFVPDSPTQEMRTFLRTRKQLVHEKARHILRIQKTLEDANIKLDSVITDIMGLSGRKIIEALIAGKSDPATLARLADPRVKASQQTLRQALRGRVTGHHRFLLRLHLDQIDTLDLAIAKIDQEVEAGIAPFRTAVEQVSSTPGIKALAAMQILSEIGTDMSRFGSDANLISWACICPRSDESAGKRRSTRIRKGSLWLKTTLVQCAWAAVRKKDTYLHAQFHRIKARRGPKKAIVAVAASILTAIYHMLKDGTMYQDLGPNHFHARNKERQKNRLVKRLADLGYAVELAPLPN

SEQ ID NO: 261976 - protein, 445 aa, unidentified
MAHANQLSRGDVRRNARLDRLRGVVSRDRAVLAVDLADDKQVVVVCDHDSRVLARRTWRCRPWQLDKALGWGLAVACRQGFAGVVVACEPTGHRWRVVVEQASRLGLEAVCVQPLLVRRAREAEDFTRDKSDDKDALLIARLTTQLHCYLPERPTAAWARLRHLGNRRVEQLTLVTAAQQRLRDLLECGWPAALEVTRHPLDSLTWRAAMTVGRCDPARIRRLGLARFARAVARELPRWGGRRRHLGILRALYAATGDDRGVTSQRAGALERSALVLADFKQALAALVEVEGRMATVLGELGLAELVTSIRGVSVVGAAAILAETGDPARFDDAKAVVKHAGLCPRDNASGAFAGKTTISGRGRPLLRLAAWRAVWGALPHNPVFAARYTHLTSRQCNRLSDGQARTAVAAALLRQLWVVCVNRIPWEPAVAGGADGKEVTDPAA

SEQ ID NO: 261977 - protein, 399 aa, unidentified
MLAVGIDISKSKSVAAILNQDGSMHTSPFEFHHTQPELDAFIKYILNSNQSATILMENTGHYHYPVLKAFREAGLPVCMVNAYQIKKFGDMDLRKAKTDKKDAVRIARYALEKSYSLVPYTSMEQKYEDLKFLARQYNQRMLTLKTNKVFLLNLLDETMPGITSILPLTTRTPETSLSVLFINRFKSYDRIKKMGKSRFLDAFEKIARKSRNRQTKTYGLAIYEAALRNITTRGENEYTLAAQDQCLELVCESQKAADSIIPKMQTLAETLPEYAVLRSMAGVGDRLGPLILAEIGDIRRFHSGKALNAYAGNDAPPYQSGTFESHNRHISKRGNAALRKYCFEVMQALKLTRPQNDPVYLFLLKKEQEGKPYNVAKMAGVNKFLRIYYARAMETLKQQ

SEQ ID NO: 261978 - protein, 460 aa, unidentified
MAAVMIGVDPHKASHTAVAIGAAEEPLGELRVRACVAQAERLLAWAQAWPERTWAVEGAGGTGRLLAQQLVAAGERVLDVQPKLGARVRLLAAGDVNKNDPNDARSVAIAALRSPGIREVQPDDHAAVLKIWSKRYRDLGRTRTQVVCRLHAVLGELIPGGVPKVITVARAGRVLKAIRPEGAVPAARCELAAAFLDDLRRGDAQLRETRKTLAAVVAASGTGLTALFGVGPVIAAAVLGDVRDVSRFPDRDHFAAYNGTAPIEVSSGQRKVYWLSRRGNRRLNHAIHMAAITQIRQRHSQGRAYYEKKLAEGKTGKEAQRALKRQVSNAIFACLQADARRAAARAKGPGGQQGNDSVASAAGSHPRHRLFGQATPGPGHHPTAAAATPAPGPAGTRGRAGHSSIAATLPPAPPQVQVERPQRSEDERPGGAARRRPHSAARKATGQRSLVKRLRPEGTS

SEQ ID NO: 261979 - protein, 336 aa, unidentified
MSTANVKNFVGIDISKHTLDLALIRPGSASFKFKVDNTKQGIAKIKKHLAEQGAEMTADTLVVMEHTGLYQRQLVSWLAESGVQICVEMPMRIKTSSGLHRGKTDTLDAQRIAEYGYRNRETLNLWKHPRKALLRVQDLLANRERLIKARQALQVPIREMKQLGQESKYFERLNKQALDGIEKSIEKIEKEIDATVSTDAQLQKQTGLLRSIPGIGPITALHLVCSTNEFTNYSEGKKLACYAGVAPFEHQSGISIKGKTRVHPMANKTLKKHLHLAAISTLSRQTEFREYFDRKVAEGKNKMLVINAIRNKLVLRAAAVIKRQQPYVDNYVGKAA

SEQ ID NO: 261980 - protein, 321 aa, unidentified
MQGKVHAGAMSAVYVGIDVSKERLDVYLHPLGERLAVANDAGGWRHLQRRLAGLAPALVVMEATSKYHRSVHRRLHAAAIPVAVTNPLRARLFAEARGQLGKTDAIDARMLALMAEQLAPDPAAPLSQAAEALQELVRARAAAVADRTAAGQRRAVAATAFLRREMARNLAMLERHIARLEAEIDRLVAADPDLARRRAVLRSIPGIGPVTAATLIADLAELGRCSDRQIASIAGLAPHPRDSGARQGQRRTGGGRASLRSSLYMAAVAAIRSNPDLKAFHQRLSDKGKPFKVAITAVMRKLLLLANSLIAKNRTWSPAAA

SEQ ID NO: 261981 - protein, 355 aa, unidentified
MSQEKYIGLEVHQASISAAVMDPSGKVLMECLLETKAATILEFIQGLRGTLSLTFEEGTAAAWLHDLLKPHVSRRVVCDPRKAALLKAGNKNDRVDARKLAELLRTNQLKAVYHGEHGIRTLKELGRSYLTVSKEITRTMNRIKSLYRSWAIPCSGTTVYAPRDRREGLAKIMEPGVGVRAQHLYQQLDNLQPLRLEARRELLLESHKHAAVTLLRQIPSMGPIRAALLVALLQTPHRFRSKRQLWAYSGFAVETHDRGEYRWVRGKLQRNREPITVRGLNDNHNHDLKNLFKGAAISARARPGPLQDFYLARVTQGMRPTMARLTLARKIATITLTMWKKGANFDPQQLHRQAV

SEQ ID NO: 261982 - protein, 358 aa, unidentified
MASIPPTSRVVIGGIDTHKDLHVAAVLDTAGVLLGTEAFSTTRAGYRALVRWLRGFGDVRLVGIEGTGSYGAGITRHLGEAGIEVAEVDRPDRSDRRRRGKNDTIDAENAARAALTGRRTSTPKTKDGKVEALRVLRLTRTTAVKSRRAALQLLGNHIVAAPEELRDQVRNLTRMQLIRTCASWRPDTTGFRDPVVATRIALKSLARRILDLNDEIADLDQLITTLVGELAPQLVAATGIGVETAGQLLVTAGDNPQRLRSEPAFAMLCAAAPLPASSGKTQRHRLNRGGDRQANSALHLIVVTRMRVDPRTKDYVTRRIAEGHSKLEIIRCLKRYVAREIYYLLKPPHNENVKSRPA

SEQ ID NO: 261983 - protein, 364 aa, unidentified
MRKVSKRALQMEAKHNSAPAMTVGLDLGDRFSRYCLVNAQGEVVEEGRIRSSEEAMRRHFEGQLRLRVALECGTHSPWVSRLLSQLGHQVVVANARRIPVITASTSKNDRNDAQQLARLAAYDPRLLSPLKHRSPQRQQDLNLIQVRATLVRARTMLVNALRGLVKSAGGRLPSCSTESVAVRGPAHIPPALAAAARPLLEQMVALNGQIAGLDREIEKLREKYAEIGVLRTVPGVGPVVAAAYVLTLDSCDRASNRAAGAWLGLRPRQKQSGDSDPQMRISKEGDRYLRSLLVQSAQYILGRFGPDSALRRWGLKLAQSGGKRGKKRALVAVARKLAVLLHSMWRSGKRFQPFPQPAATAVVA

SEQ ID NO: 261984 - protein, 349 aa, unidentified
MKTYYVGMDVHSASIRIVVLNGAGKVVMESVIETGAERVRGFLKQLRGKVCVTFEEGTQANWLHAVVRPLVTEVVVCDPRQNKLLQSGNKNDRVDAQKLAELLRLGSLKAVYHGDNGVRTLKELVRSYDSLVSDTTRVMNRLKAIYRGRAIACAGHQIYRQDRRAQWLAKLSEPGAKQRAGFLYEQLAALKPLRRKAKLAMVKEARQQPAYRWLMSVPKLGSVSVAQLLAVVGTPHRFRSKHQFWTYVGLAVVTCSSADHEVVNGVLRRSTKPLATRGLNRNHNHLLKRVFKNAATSACHSGPFKAGYDLRVARGMAPSLARLTIARQLAATTLALWKREEQFDPERKK

SEQ ID NO: 261985 - protein, 410 aa, unidentified
MKVLNRRCAGLDVHKAEVVACARVFAGRKVVQEVRRFGTTTRELMALGDWLESLRVTHVAMEATGVYWKPVWHVLDERFALILANAQQVRNVPGRKSDVNDATWIADLLAHGLIAASFVPPRPIRELRDLTRTRRQAVGEVVRHQHRIDKILQDANIKLSSVLSDPMGVSGVRMLKAIIAGESDAGKIAELGSSRLECPRGALIEALSGRVSEHHRYLLGWHLRQIEQLEGDIADLDARIEAQIAPFRATIERVMGVPGVKATAAPAIIAEIGTQMSVFPSAGHLLSWARIVPRLDESAGKKRSRRVKKGGAWLKPVLVQCARAAVRKRGSYYGAQYRRLKARVGDKKAIIAVAASILTAIYHIVRSGTAHRDLGADYLARREHDKAAIAQRLARHIRALGYQVDLRAAA

SEQ ID NO: 261986 - protein, 427 aa, unidentified
MRVLYDRVAAIDVHKDMVKVAVRVPGQRRGTRKTDVLEFRTFYGVLQEMARELRRRGVTHVVMEASGVYTEPVYYALTELDFEEVMVINPAHAKALKGHKTDAKDAVRLLDLYECGALLRGSYIPAPDLREVRDLARYRMKTVQARTSEIQRLQKTLESAGIKLSSVVSEVTGTSATAMIEGLISGERRGAVLAENAHIRMRNAGKMADLSMALAGRFTEHHALMCRLHLDRIKIFDQAVAGLDGHIAPKVAAYPREAALLDSLPGFGDVVVAGWLGAIGPAPHQHFATVDRLASWATLCPGNYKSAAKSKGGRTGDGGAYIKPLLIQAAWAAVRMPGRLQARFRRLVRKFGGPRNKGAQKRAITAIAHTLLKIAYSVLKTGKPYQDLGDDFYSRREDPAARQDYLMRQLRKLNPGCVITITPTEAA

SEQ ID NO: 261987 - protein, 348 aa, unidentified
MRFYTGQHQDYCGIDLHARTLYLCILNAEGNVLLHKNLPCDRTRFLEAIEPFREDLVVASECIFNWYWLADLCAEHDIPFVLGHALYMRAIHGAKAKNDRIDALKTASLLRGGLLPMAYVYPAGMRSTRDLLRRRTHFVRKRAQLMAHVQNTFHQYNLPRPPGRLVYKYQRAPIPDAFEDPLLKKSVETDLALCDTYDELIRDLEKTVVRQARVHDPQTLLRLNTIPGIGEILSLTLLYEIHDIGRFESVQRFASYARLVKCEKSSAGKRIGTSGHKIGSVHLKWAFSEAAVSVIRHLPQSQRLHDRLKRKYGKGKALSIFAHKLGRTVYFMLKRNQAFDADRFLANA

SEQ ID NO: 261988 - protein, 366 aa, unidentified
MKKTITVQAFQNEIFKKQKLTIGLDLGDRWSFYCVLDEAGQVILEQKLPTTPEAMKQSFGKIPRSLMALETGTHSPWVSRLLSELGHEVIVAHAQKVQWITKSSRKDDRHDARTLARLARIDPTLLGPVRHRSVQAQLHLTVIRARAELVSARTALVNAARGLVKSYGQRLPKCGTYQVNEKLAEGLSAELREVLVPLFKEIESLNERVKEYDERMEKLAQEVYPEVSLLKQVKGVGTQIALTYVLTIEDPYRFPKSREVGCFLGLRPGRRNSGESEPQKGISKEGDRYLRTMMVQAAHYILGPFGEDSDLRRWGQKLAERGGKNAKKRAVVAVARKLAVLLHRLWVGGEVYEPLRNSQKAMRKVA

SEQ ID NO: 261989 - protein, 406 aa, unidentified
MLFIGDDWAEDHHDVELMDSSGRRLAKARLPEGAAGIARLHALIGAQLGEDADESEVAIGIETDRGPWVAALVAAGYTVCAVNPLQAARYRERHSVSGAKSDPADAHTLADMVRTDAHQLRAVAGDTPDAEAIKVVARAHKTLIWERTRHTQRLRHALREYFPAALEAFEDLDAADTLELLGKAPDPAAAAKLTLGQIRAALKRARRRDVDAKATRIQAALRGEQLGREAVITTAYAVTTRAAVAVLSVLDEQVKTLETQVEESFGRHPDAEIILSQPGIGPALGARVLAEFGDDPGRYTTAKARKNYAATSPITRASGKKKVVLARFVHNDRLVDALMSQAFSSLQASPGARAYYDKQRGRGLDHNPALRQLANRFVGILHGCLKTRTTYDETTAWPHRTEQVAA

SEQ ID NO: 261990 - protein, 338 aa, unidentified
MPENSSSGLTDLHRQRSVIVRQTDTGEQLSAIRIVNDPVALALEIERAGPNPEVVLEATYGWYWAVDLLQASGANVHLAHPLGVKGFRYRRVKNDVRDAGDLADLLRMNRLPEAWIAPPATRELRELVRYRAKLVALRSGLKAQVHAVLAKAGVLIVATDLFGTAARKRLERTPLSGVYAQRVASLLRLIDILDIEQAALSERIATELQHHAGYRAIQQLPGVGPVLAAVFVAEIGDVHRFPGPAQLCSWAGLTPRHYESDTVVHRGHITKQGSRLVRWAAVEAIQHKTTAKIGVDKDRIAARRGRNIAKVAAARKLLTLVFYGLRDGHVRALAKDAA

SEQ ID NO: 261991 - protein, 511 aa, unidentified
MERLCKFRRPGRARLNSTEKVSMKSQPSKRARKDKKQGKEASNNPTLVKWNEMNRKQRREMMRKVQSEDLSLQVVHPHAAGIDIGNESHYVAVPPSRDPQPVRCFGCTTAELKKMAEWLTQCGIRTVAMQSTGVYWIAVYDILEEAGMEVYLVNARETKNLPGRKTDVQEGQWLMKLHTYGLLRNSFRPSQEIRTLRTYWRQRHDLVRSTGRHIQRMQKALTQMNIQLANVISDISGVTGQTILKAILDGQRDPRELAAYRDCRVEASEEEIVQALEGNWQEDQLFVLRQEQAGYEFCQKQITECDQQLAQYLARLEDQTQGATLPEETRKGRRKKKKGNPQFNLREELFRMTGTDLTQIDGIDVMTAMTVVSEVGWDMSKWKTENHFVSWLKLSPDNKISGGKVIGKGRMPTNNRATTVLRMAATTLRESDSYLGAQFRRFRTRLGPPVATKAMAAKLARLVYRMLRYGMKYVNQGAEFYEAQHRKQQVIHLKRKAAQLGLEIIEVAAAA

SEQ ID NO: 261992 - protein, 308 aa, unidentified
MNYSTIGVDISKHFLDICMLPTGEICRYPNDKNGFEELLGLLNKHSFKRILMEDTGCYHKAFYKFLIQYFDNVFIINPKRIRDFARSSGRLAKTDQLDAYIIAMYGERMNIISKITRSPAAEKLRAYVVRRRQLISLRKQEYNHIETCLDDDFKSSIYKIIKFIDDEIKQIEKAMKDLIKSDDRFKSIYDRLNQINGVGDVLITTLMSDLPELGYLNKRQIASLAGLAPMNCDSGKMRGSRHIQGGRASVRHALYMAALSATKTNDVIKIYYTHLREQGKPGKVALTACMHKLLIYINSVFNKEFCSI

SEQ ID NO: 261993 - protein, 340 aa, unidentified
MSEKEAILGIDISKDKFSAALLKGEKKSQVKEFANNLEGFEQLKKWLEQNQLERVHACLEATSTYGHSVATYLHGLGHIVSIVNPARIKGFAQSRLSRTKNDQADATTIARFCAALKPQAWTPPSPEMAQLQSYSRRLRALEQMATQEKNRLKTTVNESLIEDIEAHLVFLETQIDNVKKRQKELLNEYSSLKSQADLLTSIVGIGEPTAMTILAEIGDINQFSSARQLAAFAGLTPQEHQSGTSVKGKTRLCKIGNPHLRKALYFPALSSIRHCSPIKDLRERFLEAGKNKMQIVGVVMHKLIRIVYGVLKSGKPFDQTKLALPNVVLEEETDFLPVSP

SEQ ID NO: 261994 - protein, 433 aa, unidentified
MIRAILEHCAGIDVGKSVVAVCVMTGEAAAEPHVEYGTYGTFTADLERMKEWLLAAGCTHVLMESTGSYWKPIFNVLEDRLEVYVANAEDVKGRKGHKTDKQDSWWLAHLFRHGMVRTSFIPPLAIRELRDLTRRRRKVLGMATSEKNRIAKVLEDANVKLGSVLSNLFGVSGQLMLEALLEGKATPEEMAQFAKRRAREKIPQIAASLEGHRMSEHHRLLIHMSLDVLRCLESQVMALDEEILRRIERHGYIRQLQLIESVPGIQQDAAVVILAETGGDMSVFPTEQHLSSWAGVCPGNKRSAGKDFRGHTTRGNRWLRSTLAQCAWALSHSKEGPLREKFWKVAARGGKKKAVLATAHAQLRLVYRVLSTDHPYSQLPAHQCDQARRLRTIRHHLRCLGRLGISAGPMLAQLSGARHTKTRQIASVEPTQQ

SEQ ID NO: 261995 - protein, 340 aa, unidentified
MEKRYIGIDLHRNRFTCCIRLENGRTYLSEWALKDLDRFVKKLRASDEVAVEITSNTRLFYDAVAPHVSRVVVVDTNQFRVISQSVKKTDPNDARLLSLYLAKGLLPEVRMKDKQHGQLASLTQTRDTLVKQRSALKNKVNNILSARGLNLPKEALSSEKKLAEVLELPFDEIVRIELRVIVEQIRSLNKSIAELEKTIGEEGSKLEGHKGLSSIKGIGKITSAILLSVIGDVNDFPDEGRLASYFGIVPRVSNSNETERNGRIHKRGTKLGRTALVQSALIAANYSPYLKRFYERVKARRGAGKAIIALARKFLGIIYRTLKNKWVFEDFPNFVLVEES

SEQ ID NO: 261996 - protein, 347 aa, unidentified
MTNIVKQVVGIDVAQNELVVSLGRMNHDTGTDIFAFKTFPNNAVGFKDLLAWVNKLSAKEIRVSYVMEATGVYHEKLAYYLSDQGQEVSIVLPNKISNYFRTLEVKTITDKTASQAICQFGLERKLEAWKKPKKIFKDLKQLTRERDQLIAERTALKNQLHAEKAEAFPNDSSIKRVIKRIQLNDKQELEIKAEIAAIVKQDLELVEKINTITTIPGVGKLTAVIVLAETNGFELIKNKKQLVSYSGLDVRLKDSGTSVKSKPKISKKGNRHLRKAMYMPALAAMRFNDQHKALFVRLVSKHGIKMKAAVAVQRKILELIYTIYKTDKAFDKNYTNTNIQTETAYNS

SEQ ID NO: 261997 - protein, 341 aa, unidentified
MAEVSTIGLDIAKTVFHAHGADARGQMVFSRRLTRVKLLEFFAAQPRCVVALEACGGAHHWAREIASLGHEVKLIPPAYVKPFVKRNKIDAVDAEAICEAAQRPSMRYGAIRIEAQQAAGMVFRTRDLLVRQRTQLINAIRGHLTEFGWVAPKGPSHISVLEEGEKIGASLPEAARAMFLVMTGQLEQLNEQIKLLEKKIASRAREDEAARRLMTIPGIGPIAATALLALAPPVEGFARGRDFAAWLGLTPRQHSTGGKERLGAISRMGERTLRRLLIIGSSAVVLHASRRGAPRGSWLEQMLARKPRMLVTDALANTTARIIWAVLMKGEDYRAPVAAAA

SEQ ID NO: 261998 - protein, 329 aa, unidentified
MEQLFCGLDIHKEKYTGCIMDARGKVVREKEFPARREAVERFVTGIPNSHLTVAVEACGMWRPAYKNLTTLGYTVKLANPRKTHDIAANKKTDWGDARILADLVRTNYLPEVYIPGEETQKLRDLCRHKSSITRIQTQVKTKIKTILLREGQPYPKNLWTKKNLTNFKKQNQDQNTTNLLNVYDTVHAEETEAKNRIDKISRNNKQTNLLMSLPGVAEYSALFILAEIGDIQRFKTPQHLISYCGLCPGIYQSGSKEHTVEKHAVNKWLKWILYESSGKAATIDPRFMKHYYKIQKRKGMQTARRSTARKMATIIWHMLTNQEPYREVA

SEQ ID NO: 261999 - protein, 344 aa, unidentified
MQTPNDLNQSRIILKQDSTLIAVIEMSLSSWLVAGIVPGVERQPLKKLAVDESALLKLLNRWREEAEKAGRKIERIAVAFEAGRDGFWLARWLRARGIEAHVIHASSVAVSREHRRAKTDRLDTELLKRAFLGWLRGERDHCKMVAIPTIENEDAKRPNRERESLAGEQTRIVNRMKAALSRLGIRGFNPKLKKAAERLKDLRTPEDQPIPPNTLAELRRDMERRRLVSDQIRQIEHARLERIEHAPSDGPHAMVRLLARVIGVGIETADMLVQEVLSRNMRDRRAVARYASLTGSPDESGTKRREKGLARSGNARVRRGMIQLAWRFLMFQKGSALAQWTVRL

SEQ ID NO: 262000 - protein, 351 aa, unidentified
MPRRSTVHAVTVIGVDLGKNTLHLVGLNSFGAIVLREKVSRGRITLRLANLPPCLIGIEAGMATHYVARELAALGHDVKQVPAMYAKPFRQGHKNDFRDAHAVAEAVQRPTTRFVPAKSDEQLDLQALHRVRSRLVSDRTAVINQIRGFLLKRGVIVRQGLRFLRHSLPDILAKRTDVLSLRMVRIVADLADDWRRLDERIETVTDEIETIAKNDDNCRRVMTVPGVGPIISSAMIAAIGNGVAFARGRDFSAWLGLVPKQMSTGDRTILGRLSKRGNGYLRMLFMQAARVILLRPRNWPKHSFGGWLARAAQRLHPNVLAAALANKLARIAWTVLAQQRSYEARVSKAAA

SEQ ID NO: 262001 - protein, 324 aa, unidentified
MEQFYLGIDIAKAKFDCALVLPNGKFRSKAALANTPKGFDELVHWLDAHEAKQVHVCMEATGIYWEALAEHLSNTGYTVSVINPFQIKSFAGACLTRSKTDKVDARLIARFCTERHPEPWQAPSASEQTLKALVMRLDALQTMRVQELNREEVAREAVREGIVAHIDWLDGQIKALRQAIKRHIDNDPDLKGRRKLLDSIPGVGEKTINLLLAFCIYPGRFDNARQAAAFAGLDPRLHESGSSVHGKPRLSKMGHRLLRKTLYMPAMVALYKTRWGKVFRQRLEGAGKAPMLIIAAMMRKLIHVAFGVLKSGLPFNAALHGSAP

SEQ ID NO: 262002 - protein, 343 aa, unidentified
MQTTTTIGLDIAKSVFQVHGVDAAGQVVIRRQLKRRYVLSFFQKLPQCLVGIEACASSHHWSRELQALGHTVRLMPPAYVKPYVKRQKNDATDAEAICEAVTRANMRFVPTKTPEQQSGLVLHRTRHLFIRQQTSVINAIRAHLAEFGIVAPVGRRGVEELLTVVADPNDKRVPEIARACLSAFGAQLRSIKEQVLEFDRLITAWHRSNEMSMRLDEAPGVGPVLATAVVATVADPKVFRSGRNFSAWIGLVPKQHSSGGKDRLGSISKQGDRYLRGLFVAGALAVIRYAKIHGTKHRPWLTALLARRPTKIAAIALANKIARMVWAMMAKGERYKEPVALAA

SEQ ID NO: 262003 - protein, 372 aa, unidentified
MTQSNILFIGLDVHKESIEIAIAEDGIGGEVRHYGKVGGTLSAIDKAVRKLVSKDKTLHFCYEAGPCGYELYRHLTSQGHICVVIAPSLIPKKPGDKVKTDKRDAIQLARLFRAGELTAVYVPRREDEAIRDLSRAREDVMIAQKAARQRLKSFLLRHNIRYAGTANWSEKHLRWLADEVRLAHPAQQIVFQEYVNTITEASARLSFIVKEIDVYVKQWRMYPVVHALMAMRGVKMIVAVTVVAELGDITRFESPKQLMNYLGLTPSEYSSGERKRRGAITKTGNQHARRILVEAAWAYRFIAKVSPQIQKRQEHVPIPIRNIAWKAQVRLCQRYRDMLKKGKAKNIIVVSIARELSGFMWAIAQEVKLESK

SEQ ID NO: 262004 - protein, 346 aa, unidentified
MKIIGCDFHPSYQQIAVLETTTGEVIEAKLMHGDGEAERFYRELEEPALVGMESVGNSLWFEQLVERLGHQLWIGDAAQIRASYVRKQKTDKRDAGHILKLLLENRFPQIWVPSHQQRDQRQLLIHRHKLVGMRTRIKTELQHVALNQGMQKKRSLWSKGGMSDLKKLSLEGWTSRRRADLLSLLSMLETQVSELDKAVEEAAQRDPQAQLLMTQPGVGPNTALAFVTTIGDVARFPRGKQVASYLGLIPSERSSGSKRRLGAISKQGNVFLRTLLVEAAQSAVRHDEDFKKEYRHHCHHKPKGVVKVAVARKLAVRLYWMLRTQTPYPQVVHNEGSPSHFVVSQS

SEQ ID NO: 262005 - protein, 320 aa, unidentified
MAKQVEERTIGVDVAKCWLDIYVSEIGELERIENTEGAIEEWLRGLPGSARIAIEATNRYHELFIERAHAQGHCIYVIDAFRLSRYRDAVGHRAKTDRHDAELLARYLQQEHEHLRRWQPRDPRHARLWRLLKRRATLVQTNVRLRQSLADIGALDDAAKELIRHCQQLVRQVDRELLAQARRLGWQQDLQRSRGIPGLGPTTSLALVATFHRHNFRNADAFVAFIGLDVRVRDSGKFRGRRKLTKKGDPEIRRLLYNAAMSGCKDSHWQPYYQSLRDRGFSGTAALMALARKLVRVCYALLNNQLSFDPEKRKLPCNAT

SEQ ID NO: 262006 - protein, 343 aa, unidentified
MQAITTVGLDIAKSVFQVHGVDRKGNTIVRRQLKRRYVLAFFKKLPPCLVGIEACATSHHWSRELQALGHSVRLIPPAYVKPYVKRQKNDAADAEAICEAVQRPSMRFVPTKTPEQQGCLMLHRTRHLFIRQQTAVINTIRAHLAEFGIVAPLGRNGVEQLLHVVADPEDERLPEVARGCLEALGALLSKLKAQILEFDRQINAWHRSNETSRRLDELPGVGPALATALVASVADAKAFRSGRDFSAWIGLVPKQNSSGGKDRLGSITKQGDRYLRSLFCAGALAVIRYAKIHGSKHRPWLSRLLERRPTKVAAIALANKIARMAWAMMATGECYREPIALAR

SEQ ID NO: 262007 - protein, 377 aa, unidentified
MKKNIRFIGLDVHAETIAVAVAEANGEARSLGVIPNRPEAVRRLVKKLGPAESLQVCYEAGPCGYVLYWQLSELGVHCDVVAPTLVPVKSGDRIKTDRRDALKLARSYRSGDLTPVWVPDAEHEALRDLVRAREAAKKDQLRARHRLQKLLLRRGLRPPEGIKAWTVRYLTWVKTLQLEPAALAATLLDYIAEVDHSHERIERLERAIDQAIEAAPEAIRAVIEGLQSLRGVARISAATIVAELGQLSRFGRAKQLMGYAGVVSSEHSSGERIRRGAITKTGNAHLRRILVEAAWAYRHRPYLGGELRRRQKNASEKVKEISWKAQHRLHSRYARLMGRGKTKQLAMTAVARELAGFVWAVGVEVERSLATRPARAA

SEQ ID NO: 262008 - protein, 391 aa, unidentified
MVNNSLTGKAGGGEANAVSRASTSRRREFGRVLVSKAVTEREPRRHRGTSPDSRLNRRRPTRSASSHLQVREITMSEPVYVGIDVAKDTFCVATCPNLLKTHLPNTPDGHRQLCQSLKNHTVALIVLEATGGYERPIVAELLDAGLPVVVVNPRQVRDFANGLGQWAKTDPIDAQVLAKFAQVVKPAPKTHSTPQTTELAELVRRRRQLNDLRTQESNRLSLVHHRQVRKSIQKMLKMLDRQIAEVDELISRQIQNNDDFRQKDRILRSTPGIGPQTSAILLAQMPELGNLNRQEIAALAGLAPWDYASGKYNGKGHIWGGRKDVRSVLYMAALSARNCNPVIRQFAQRLEQEGKAFKVVITACMRKLLIILNTMIRNQSLWTPQISLKNP

SEQ ID NO: 262009 - protein, 408 aa, unidentified
MKDSRKRYIGLDVHKHYLIALGVDDDLNVVLPARRVELTHLESWMKKTLTQQDEVVLEMTTNTWQLYDELCQYAGSVLVVHPPHVALITRSQVMNDKIAASILARLLAKGLLVGIWVPPQEIRELRGLVAQRKKMTELTTQAKNRLQAVLQRHHLVPPTGNLFHESRQRWWLALPLATLEKVNVQGDLETLRFAQAQQVRLTSIMEEIANQNEQVTRLLQVPGFGVVTAVTVWAAIGDIQRFADSQHLVGYAGLGTKVHNSGMTSRSGRITKAGRRDLRLVLIEAAQVAANSHPHWKAELARLQPRLGRNKAIVAIARKLLVTVWYILAQHKTDRFATPEAIAQKFLKFAYQLGKENRPQGQSAAQFVRQHLDALHLGNDLTSIAWGSKKPIPLPPSTHKVSDVPSTK

SEQ ID NO: 262010 - protein, 341 aa, unidentified
MGSFIGVDTHKDSLSCSAVDEVGKEVESVHAVNDGRGFCKIERFAQRVEATRIGIECSGSFGLALAQHLLAAGFDVREVPGQLVKRDRRSLSKGKSDALDALLIARVVAREDSLPPPPLKGLTHDLKALVDHRETLLNEATRHRNRAHAILTQIRPGYSRAVPALTSGRQLDAAQYLVEGDSGVRATVLRDALKRVAELDSTAHALEKQIDALVKASGTSLTQIVGVAAITAGRILGELRDVGRLSGQAAFGAMTGTAPVPASSGKTDRWRLNRGGNRQLNRAMHTIALTQSHHDPRARAYLEQKRAAGKTDREAMRCLKRHLARVVYRRLAADRALIPLT

SEQ ID NO: 262011 - protein, 350 aa, unidentified
MASTPNMSTPPVMIAIDPHKRSWTAAAVDVRLQPLATIRVPVSRDGYRTLLRFARRWPDTAWAIEGASGLGAPLTVRLRQDGITVLDVPAKLAARVRLLSTGHGRKSDEADAVSVGVAAHTSSSLNTAEIDSATTALRALVEHRDDLVKTRTQTINRLHTVLTHLIPGGASRDLNAERAAELLRTVRPRDTAGKTLRALAADLISELRGLDRRIDKAVHDIEIAVKDCGTTLTELHGIGALTAAKIVSRVGSIQRFDSPAAFASYTGTAPIEVSSGDVVRHRLSRAGDRQLNYCLHVMAITQIRRDTPGRTYYLRKRANGKSHSEAMRCLKRRLSDTVYRQLLRDANTTT

SEQ ID NO: 262012 - protein, 360 aa, unidentified
MSQDNPVLLLANVPARTIGVDLGDRTSRTCELDAAGRCVHEGTVATTEAAMRRYFAARPRCRVVFETCTHSPWLARLVAGLGHEVVVANPSAMFTRGARRRRNDVLDARFLARQGRADVALLHPITPRSVDAQHALAQLRARDQLVKVRTQLINHVRGAVKAVGQRLSASSAESFARRAQRELPAALEPALRPLLDVIADLTQRIRAADHALAHLIAARYPVAQRLQQPAGVGPLTALAYVLLIDDPGRFRRSRDAGAYFGLVPRLDESSTATPQLRISKAGDGLGRRLLVSAAQYILGPFGPACDLRRHGQAIAQRGGKNAKKRAVVAVARKLAVLLHHLWVTGVAYDPDYLLHRGRLA

SEQ ID NO: 262013 - protein, 372 aa, unidentified
MQSYYVGLDVHSRESVFVVENEAGAIVARGSVPTTVNGLKHLRASCGLPAATGVALETGTSAFFVARELARLELKPVVIDAHEVRRKAQRPEQKSDTRDALELCEGLRRGFYRSIVHVPSPAISDLRTTLSRRRHFIRIQTAEVNAVKRLLRGVGRNSGRRGSLRTDAHWQSLLASDLVPEQLQEHVRHHYAVWRQGAERVRALDLSLGESARERRDAVKRLETVPGVGPIVALTAIAVFAEVGRFESAKHAASYAGLVPSTFQSGERDAHGNITKRGSAELRAMLCEAAHHARRPAHPLHPHFARVCARRGYKTAVVAVAHRLCRLLFAMLRDGTDFSVTRVGVEEGEFERTTTYKYRLRPKSAGRLPAAG

SEQ ID NO: 262014 - protein, 352 aa, unidentified
MSLRYIGIDVHTSSCTIAVMGPSGKRLRHWQVETDRRVLVEAIQSISGPRHICFEEGTLSDWVYELLEPLAAELQVIQPLRTRGVKSDAHDAWAAADTMRLQPADVTRVFKSPGTFTALRKAVRAHGLIQRDLVRAKNRIHACYRARGVQGLGPSIYDPLKRDEWLKQLPPPQRKMTQCFCLELDGLVEACHQAQLWMLEEAQRVPVVGLISTAPGISTIRASQIVAAVVSPHRFRTSRQFWAYCGLGIVMRSSSDWAIQQERWVRTNLNQTRGLNRNHQPLLKNVFKGVAITISSSKMAAHPLHQSYQRLLATGTKPNLARLTIARRVAAATLAMWKNKETYDSTKQAQST

SEQ ID NO: 262015 - protein, 389 aa, unidentified
MKIFVGIDIAKLNHFAAAISSDGEILIEPFKFTNDADGFQLLVSKLESFDKNSIIIGLESTAHYGDNLVRYLVAEFYQVCVLNPIKTCQMRKNNVRKTKTDKVDTFVIAKTLMMQDDLRFITFFDLDMMDLKALGRFRQKTIKQRTRLKIQLTTYVDQVFPEIQYFFKSGLHQNAVYALLKEAPSPKEIASMHMTHLANLLKVNSHGHFTKEQAKELRVLAQKSVGANDSAISIQITQTIQQIELLDSQLEKIEVEMTDIMKFNDSVIMTIPGIGYINGGMILGEIGDIHRFSNPNKLLAFAGLDPTVYQSGNFQAKTTRMSKRGSRVLRYALVNAAWNVVRNNATFKAYYDAKRAEGRSHYNALGHCAGKLVRVIWKMLTDEVEFNLE

SEQ ID NO: 262016 - protein, 347 aa, unidentified
MKKVVKQVLGIDVAQDELVCCFGKMHDDFTPELTSHKTFVNSLKGFESLLTWVGKLADASVSVRYVMEATGIYHEKFAYFLNDQGLDLSIILPNKISNYARTLDVKTVTDKTASEAIALFGLERKLENWEPPKGVYKKLQQLSRERGQLMDEQTVIKNQLHAESKEARPHENSIHRSNKRLALIKKQIQDIQEEVEELINTNDEVKEIVILLCSIPGIGKITAATVLGETNGFNLIRNKRQLTSYAGLDVKEKQSGTSVKGKATISKKGNKQLRKAMHLPALSAIRSDERFKAIFIRLVSKHGVKMKAVVAVQRKLLEMTFTMFKSKTKFDKNYFKCAEEIVEQGAE

SEQ ID NO: 262017 - protein, 387 aa, unidentified
MYFVGIDISKFKHDCAIVDELGDVITSSWSFSNDCEGFLLFKHLLDALDGEKKIGFESTGHYGQNLKLFLESNGFSFMEINPLLISRFVRSKSLRNTKTDTLDAEYIAQYLMTVEYKPYPPSFYHMDKLKSLTRFRDSLVRQRSRQLVELTNILDKVFPEFKPFFEGRFSATALYILANYQSPERIGNMNAKSYEILRKKSRGRFTMAKFVQLKSLAKNTVGRSDDFLLQQMDMLLDIQAQLDAKISEVEGLIQECIMGIDPPILTIPGIGYLSAAVILSEYGDFSKYENPSKMLSFAGLEPGYFQSGQSEHTGHMVKHGSSYLRYALMNACLPLITHDPVFAEYYAKKRAEGKPYRVALTHVAKKLLRVIYTLQTKNIPYDPAQIR

SEQ ID NO: 262018 - protein, 370 aa, unidentified
MKETITSFVGLDIHKDSIAIAVAEAGRSAPRFVGTTPSEMASLCKALTRCAKRDNTLLVYEAGPCGYGWARHLSRQGWRCEVISPAHITRKAAEQRSKTDRLDAVLLARESRAGNLVRVVVPDERDEAIRDLSRAREDASGARLRARLQLKAMLLRHGRAYQGKTSWTAAHQRTLGTIKFAHLAQQIAFDEYRQAVRDAHERLERLTQALREQCEHWRMKGVVRALMCLRGVDFIAAITLIAELGDLSRFAHPKALMKYLGLVPSEYSSGNTRRLGPITKTGNKHARRILVEAAWTYRFNPRVSRPIEVRQEGQPKAIREIAWRAQLRLAYRFRKLNAGRKMTQNKCCVAVARELAGFIWDIARHVKIPA

SEQ ID NO: 262019 - protein, 339 aa, unidentified
MRLYAGFDLHSSNTYLGIVDEDGKRVFKKKLSNDREVILSTLAPYKDNIAGIVVESTYNWYWLVDLLMEEGYKVHLANTTKIQKYSGLKYADDQHDAFWLAEMLRLGILPEGYIYPKEDRPIRDLLRKRSHLVRLRTSLILSLQNILSRNNGIKLKANEVKALTIDHVAPYLAGNEDLALAGKVSKESIDFFTLQIKSLESVVGDRVDLREPYNKLLTEPGIGKILGLTIMLETGPINRFADVGNFVSYCRKVSTAWISNEKQKGKGNRKCGNKYLAWAFSEAAELARRFDKDARAYYNRKAQKTNRMVAHNALAHKLARAAYYIMRDGVSFVPEKCFG

SEQ ID NO: 262020 - protein, 347 aa, unidentified
MNKITTVGLDLAKNIFHLVACDHRGKVVFRKKLSRSRLLAFFRQLPPCLIGMEACSTSHYWAREFQNLEHQVKLIPAQHVKAFLRGNKNDFNDAIAIAEAMVRPEMSFVPVKTVQQQDQQTLNGHRQQLIRARTAETNRIRAMLIEQGVVIAKGRAVLKRRLPELMENPENQFSELFITLLQQAYIHLQQLDEHIARCDRELKTLTEQSPACQRLQSIPGFGPVSASLFYSHVGDASSYRRGRDVAAALGLVPKQFGTGGKVVLLGISKRGNRTLRCLLVHGARAVVSRVGNKQDALSCWIRGLVDRVGIHKATVAYANKMARIGWAVLHYDCEYQPNHIPTMAKSP

SEQ ID NO: 262021 - protein, 337 aa, unidentified
MNYSGIDLHSNNSVVSVIDETDRVVAEKRLPNDLAKVMAFLAPWQSELAGVVVESTYNWYWLVDGLQAAGFVVHLANTTAIKKYEGLKHSGDETDARYLAHLLRLGILPTGTILPVKHREVRDLARKRMQLVRSRTSHILAVENITARQCGTRITSNQVKKLDQAAVDQLHLPDDVALAVRANVAVITTLSAQIAIMEMRLQEKVARHADYALLTTVPGIGPTLATVIVLETGTIERFASAGNFASYARCVDSQRMSNGKKKGEGNTKNGNPYLCWAFIEAANFAMHFSAEARQFYERKKARTNPVIARKALAHKLARACFHMLKERKPFDASRCFA

SEQ ID NO: 262022 - protein, 324 aa, unidentified
MAKRITVCAGIDTGKRKLDVAIDGNCEQLQVENTAEGYKVLLEWLRRHKVKRIGIEASGGYEQPVVVELRRKRFVVVVFQPAQVRAYAKFHLQRAKNDKIDAALIAACTAAVKKIHPAPDPRLQLFAEHLTLIEQIGEDVTLYKNRLETCRDPRIQKVWKEEIARLAKRERGELKALVAAIREHRDLAQRLDLIYSVGGAGLPTAVAILVRMPEIGQLSREQVAALAGLAPYDDDSGEQVGIRHIDGGRKRLRRALYTAALPASFRWNPQLIALYKRLRAAGKEHKRCLIACARKLLIFVNSVVARGTPWQDEPPPSAIIAPTG

SEQ ID NO: 262023 - protein, 348 aa, unidentified
MLIIGCDYHPGFQQIALVDTETGELGERRLTHREEAEQFYGALKERRVRVGMEASGHARWFERLLNDLRFELWIGDAAEIRTKRVRKQKTDRQDAQLLLRLMVEDRFPRIWVADAENRDLRQLLWHRHRLVQMRTRVMNQLHVVALNEGLRRKKALWRPAGRSELQSLVLAPWASRRRQDLLDVFDQLTPKIQELTRALEEEVEKRPVTRRLMTHPGVGPLTALAFELVIGTPERFHCGKQIASYVGLVPSEESSGDRRRLGHISKQGNSLLRYLLVEAAQVTVRSQPQWRSKFFHIAMRRGRKIAKVAMARKLAVHLYWMWRRGWDYGEFEKLGSHAGTPGNRHGVQ

SEQ ID NO: 262024 - protein, 360 aa, unidentified
MAKVRSWAGLDVHAARVVAVTVDGESGELSVHRLSGQTGEVVAFCAALPGPVHVAYEAGPTGFGLARALGAAGVGCVVAAPGKIERPAHDRVKTDRRDAERLVRLLMVGALHAVRVASGEEEALRDLVRAREDLRGDLMRARHRLGKLPLRHDARYDGAGDNWTRRHRDWLGRVELADRGAQVTLADRLGAIDALVVRRDALEATIAELVPGSPWAQTVARLRCLRGIDTLSAVGLCAEIGDFERFARAGQLASYLGVVPSEHSSGDKRRLGSITKTGSQHARRLLIEAAWHYRRPPRRGTALAARQAGQPAHVLALAWQAQQRLHRTWRRLDGERGKRRTIVAVAGELAGFCWAIAKAH

SEQ ID NO: 262025 - protein, 354 aa, unidentified
MSQTVNAAIAVVGIDIGKNSFHIVGHDERGAIVLRQKWSRGQVGGRFANMPPCLIGMEACVGAHHLSRKLRALGHDARLMPAKYVRPYSKGQKNDFRDAEAIAEAVQRPTMKFVATKTADQLDLQALHRIRERLVSQRTGIINQIRAFLLERGIAVRQGQRFLRAELPRILATPPDVLSPRMVRMIEDLAGDWRRLDERIEDLSNEIVAIARQDAGCERLMSVPGIGPIISSAMVAAIGAGDVFTKGRDFAAWLGLVPKQISTGDRTILGKISRRGNRYLRVLFVQAAWVVLIKPKVWERHGLKPWIEAARKRLHHNVLAIALANKLARIAWSVLAHGRAFEARKIDQAANQSA

SEQ ID NO: 262026 - protein, 416 aa, unidentified
MKKGQDTRGYEGYLALDIHREYILVGGWNEKKEWVLTPRRVSIEKFLEWAKKNIREGDIVVLETTTNVWTIYDIVAPLASRVLVANAAEVWELAGARVKTDKEDIKRLLKLLVGGIVPEVWVPPMEVRELRAFISYRHRLVTTSTMIRNRLQSLLHKHNLQLSEAGLLDQTWWEAQKNISPLEKLQIRQELVLLQEVEKLKGAVDEELQRQSTGSTWGKQALQLMQLPGVGFIVAMTVLSAIGDITRFESAKQLVGYAGIGAGVHDSGKTHKEKKITKKGRRELRWAMVEAAWRAVRMSPFWKAEYEKHLKRRRKPNQAIVVIARKLLIAIWHVLSKEETDIRASEEDLAYKMLLLSWSLSEDVRQGLTYKQFAKYALMKLGVETDITRFVRRNVPRRLAAKDEVLARMTELGLSV

SEQ ID NO: 262027 - protein, 337 aa, unidentified
MKHTVIGMDIAKRVFQLHAVDPESGEIERVKLARGEVLAFFAQRCPALVAIEACGSAHWWGRQLTALGHEVRLIAPKSVRPFVVGNKTDAADARAIWTAVQQPGAHFVAIKTEQQQAILSLHRMRAQLMKFRIMQTNALRGLLYEFGVVLPEGVRALTKAWPAAMATVADQLPGMLIDSLREQWARVQTTEAEITAIERRLASALRDSPSCQQIAAIPGVGLLTATAAVAVMGNANTFKSGREFAAWLGLVPRQTGTGGRIRQLGLSKRGDTYLRTLLIHGARSVIAKAHHSPWIAALLKRRPYSVAVAALANKLARTIWAVLAKGRPYDPAAFSGA

SEQ ID NO: 262028 - protein, 462 aa, unidentified
MCRSARSSTNKCGFDHVDLSLFKQLLVYLGRTVNACMFTILKREGVSMLKIVFPICCGIDVHKTFVIAAIASTNSANITTYQHKRFSTFTKDLRALALWLETNGCIHVCMESTGKYWIPVYNVLESSCRINLAHPKYVKAIRGKKTDKNDAIWIADLHKHGLVPGSFIPPKPIRQIRDLLRYRTKLIRFVSSEKNRVQNSLTVSNIMLSSVVSDTFGKSSMAILSHLLDHPEDKGFDFRPFLHGSMRKNEEDIALAIDGTIDSIQADKIRLCLRHIDNLHEYTSQIEATSLSLAMPYTGGLTIIESVPGIGSISALTILSEIGIDMSAFHSAKHLCSWAGLAPCNDQSAGKKKSVRISRAGAYIKPILVQCALAAIKDKTFPHYRQRYDSLKYRRGHKRAIIAIARMMLTAIYYMLQSGELFNKLLYEESQRKPEFILSPEQELERLAKRLGYSLIKVQEPA

SEQ ID NO: 262029 - protein, 416 aa, unidentified
MDVIVARCAGLDVHKNTVMACVRAPGPDGGRISTVRRFGTFTDALRQLRAWLVAEGVTQVAMEATGVYWKPVWHVLEAVPEFELLLANAHAVKNMPGRKTDVADAEWLALLCECGLLRPSFVPPPVIAELRDLTRYRKKLIEERSRETQRIQKLLEDAGIKLDSVVSDILGVSARQMLEALIAGVRDVEALAELAQTRMRPKIPQLRRALEGRFGAHHALMLQMHLDHVDQLSAAITRLDVEVDRVIRPFSAQLQRLITIPGVGRRTAEVIIAEVGVDIRRFATAGHLASWAGMCPGNHESGGKRRSGRARKGNQALRAALCEAAWAAAHGKTGYLPAQYRHLMRTFGKKGQTRAVFAVGHSILVIAWHLLANDCDYTDLGAEHFTRNADPEARKHYLIRQLEALGHKVTVEPAAA

SEQ ID NO: 262030 - protein, 412 aa, unidentified
MTASNSNVNPVLIAIDIAKRSHDVLIQLPERKPKYLKIPNSLEGYQQILSFIPNEQPVVKVAFEPTADYHRNIAYWLDQQGFECHLASSLACARAREMMFNTWDKNDRKDANVILYLLQHNLTKPFHDPLKHQYLDIQELSNTYYQISLARSRCYHSLLNHYLTLYFPEMEIYHHTSRAEWFCLFLLKFPTPKSITRYKKETFVRRAWDVVGRKVNKTAFLEQIYDTAQSSIGIPVEMGSQALAMYQLQVSRYLELTKQRMAIEKTAEQFLQSHSDFETLLSVPGIGAVIGMMILAESGNLRRFSHYRKYLNFCGFSLSASQSGQGSSKHKLSKRGNSRLRYAFWLAATIAINSKENSFAYKYNKMIAKDPLNKDLQRKARTAIAIKMARVVHSLIKQNLPYQGYHETSYGT

SEQ ID NO: 262031 - protein, 479 aa, unidentified
MTPHKDYGLDPRPSAPTPLLPLSPLLSDALQVCHPHAAGIDIGEAEHWVAVPPGRDPQPVRRFGTFTADLDALADWLIECGVTTVAMESTGVYWIPLFELLETRGLEVLLIDPRQAKRAPGRPKTDRLDCKWLQRLHAYGLLAAAFRPAEQVCVLRSYLRHRQMLLTYGAHHIQHMHKALQQMHLKLSQVVSDLTSVTGMAILHAIIAGERDPLTLAKLRTPHCQHSEEEIAKALQGTWRAEHLFALQQAVELYHFYHQQLTVCDQHIQAHLGTFADKSDGQPLPPKPRRHKKVNEPRFDARTPLYRLAGVDLTTIEGIEEGTALVILSEIGTDMSRWPSVKHFCSWLGLAPQHQISGGKVLSRRVRPGAQRVTVALRLAARTVHQAHTALGAFYRRMRSRLGAPKAITATAHKLARLVYSLLKHGSAYVQQGIEAYESQYRERKIKALARQARAFGYTLMALGTPEVPSLDVVAVPTP

SEQ ID NO: 262032 - protein, 590 aa, unidentified
MTTTTPLDRIGVGIDTARYGHRVSFLRPDLRPAAKPLTVTEDQAGYQALRDRLEHLRRQHPQVHFHVRIDAAGQYAANLEQFLRGLDGPMTLSIGEPKRNKDYRMAHFPKRTTDDTESQAMARFALVERPPATPAPSQPMALLRELVGRLQSQAKQTTRAINRLHNLLARTFPELALLTEDVSAGWVLRLLKEYPTAERIAGARLSSLEKIPHLDGDKARAVQRAAADSVASLKGPMAESLVRDLVDQVVRSRATQRDLLRLVTQAWKSLPGSPHVQVLTIPGIGPATAAILVAKIVDIERFATPEGLVNYFGVFPEEDSSGTDKAGRPHPTPVLRMSRKGNDLARAYLWNAARVAIRHNPAVRAQYRRLRARGTRGDVAIGHAMGKLLHLVFAVWKTDRPFDAGRCASKSVAQEATTATAAQEATTATAASTADENAVGHKRDEPAGKVVTTASSTVEPIPSAVNPAAPAIRVARPRVDYAFLREQINMERVLAHLGLLSRLRGAGQQRRGPCPLHSHAGAAERTFSVNLSKDIFRCFHAECGARGNVLDLWGAVHRLSLYDAALHLAETFGLARNREEGPVPGTRHPQ

SEQ ID NO: 262033 - protein, 433 aa, unidentified
MKVKYEDRQKQKVIAITTDTLVVGVDIAKNYQWARFVDFRGIEHDRALKFKNSKGGFETILARIREICKKENFAKAVVGMEPTGHYWKAFANWLEKQDGIKAVLVNPYATKQAKELDDNSQTKSDKKDALTIAKLVKDGRYFELYLPHDVYAELRGLSTTRTGLNKRKNALKNTITAVMDEYFPEHGEVFKCPLSGKASRHILKTCPFPKFILELGEDGVTDEIKKAVKKTVGRKKAAQLIETAKESIGVDYGEEAAGLKLRLMLEELELLEKQTEELEVQMEAALQKTDYAGFLLSIKGIGVVTLAACLGELGNPARFENPRQMSRMAGYNLVEDSSGKNKSGTKISKRGRKNLRSVPYQMALIMAATNDEMKQLYHYLKTREEAPLRKMQALIVVSKKILALIHALAKKKENYDPGKVFGPVRREQLKAAA

SEQ ID NO: 262034 - protein, 413 aa, unidentified
MKSASNILPFQPRDGVTVGIDWARDDHAISVVDPHGREIDRRVVAHTDAGIRELLKLLDRHDADEVAIERGDGPLVDALLEHGTTVVVISPNQVKNLRGRYGSAGNKDDRFDAFVLADTLRTDRARLRPLEPDSEATQALRRACRARKDLVAHRIAVTNQLRAHLQRVFPGAVGLFADLDSAISLAFLARFTTQDQADWLSPKRLAAWLKSIGYCGRVSAATLHTRLAAAPRGATGETGTIEAHVTRAYLAVLHTLTEQIKALAIQVDEQLALHPDQHIFTSLPRAGRVRAARLLAEIGDARGRFPTPDALACLAGVAPSTRQSGKTRHVGFRWSCDKQLRDAVCDFAADSRRANPWAADLYQRARNRGHDHPHATRILARAWLYVIWHCWQQNTPYDPAQHGALQRFIQPAA

SEQ ID NO: 262035 - protein, 355 aa, unidentified
MTSVKYIGLDVHKESISICVRNSVGKVVMESVIETKASTIVQFIDGLRGDLRVTFEEGTWAAWLYDLLKPRVSGVEVCNPRKNALLKDGSKSDRIDANKLSEQLYMNNIKSVYHGEHGLRTLKELARSYLTISKDLTRVMNRLKALYRSWAIPCAGKEVYAPRHRAEWLGKISESGVRRRAEFYYQQLDALCSLRQAVRRDLLLEVKKHKTWKLLRQIPGIGPIRAAVLMAVMQTPHRFRTKRQLWTYSGLGLETHDSGEYRTVKGQLQRAKKPATVRGLNRDHNHDLKDIFKGAAMRASTAAGPLHDFYENLLAKGRKPTMARLTLARKIAAITLIVWKKEVRFDATYLKPQAA

SEQ ID NO: 262036 - protein, 339 aa, unidentified
MAECCFLAIDIAKNVFQLHGAASNGSIVFRRRLMRDQLPEFIAKLPACVIAMEACASAHHWAREFRRFGHDVRLISPQFVRPFVKGSKNDGNDAEAICEAMQRPNMRFVPVKTIEQQDIQSLHRVRSRLVSERTALVCQIRGILAERGIVFAKALTRVRREVPVIAQDLNNPLTPILRTMLTELMDELSALDVRIKRFDHHIDAVFQSNEACQRIARIEGVGPKTATAFVAAIGDPHEFKNGRHFAAWLGLVPRQRSSGDRQLLLGITKRGDKYLRTLLVHGARAVLRTAPKKNDAKHAWALEVASRRGAPKAIVAIANKMARVIWVLLAKKEDYRPAV

SEQ ID NO: 262037 - protein, 316 aa, unidentified
MESQGPFVGIDVSAQRLDVAVLPHGAHFTVPYTDDGVASLVQRLQELAPQIVLLEATGGYEIPAAYAMSEVSLPVVIMNPKTLRHFAKSTGKLAKTDKLDAQVLAHYAQAIQPPVRPLKDPEQMELATLMSRRRQLQGMIVMEQNRRRTSTPKVRHNIDQHLAYLRQLLKDLDREIYEFIRRTPLWHEKQEILRSTVGIGPKVSASLIADLPELGLLPGPQVTALAGLAPMNRDSGQYRGKRMIQGGRPAVRQALYMAALVASRHNPVIREFYQRLRQAGKPAKVALTACMRKLLVILNAMLKNHTHWEDRLPVAA

SEQ ID NO: 262038 - protein, 368 aa, unidentified
MRKSLRFVGLDVHKETITVAVAEARGGPAEVVEVIPNDGVALYKVLDRLGPPRWLRVCYEAGPTGFGLARRLRAAGIDCLVAAPSLVPVQKGCRIKTDRRDARKLAQFLRSGDLVAVAIPDEETEAMRDLERARGDAKIAERAARQQLDKFLLRHERIWRDGTKWTQRHWRWIRQQEFVDVKLRSVRQDYETAVEQATARVERITADIAEFAETCSLAPRIKALQGLRGVDVVTAVVLAAEIGDFKRFGSPRNLMAFVGLVPSEHSSGASSRRGRITRTGNKHVRWLLTEAAWNYQFYPKASKRIKARRKLVSSEVRAIAEKAEQRLYRRFQRLLRKGKQPNRVVTAIARELCGFIWAIAREEKLLAA

SEQ ID NO: 262039 - protein, 369 aa, unidentified
MRIVGGLDIHRAQITFDCLDLRTGEETRGVIRPATREEFKRWLGQFDRKQAAFALEGTTGWRFVVEELQAARMEAHLAEPAETRARRGPKRRAKTDRADARLLRDLLLTDNLPESWIPPTHLADLRTTVRLRRALVESRSAWIRRMQAQLLHHGLPSAPHLSTVIGREYVLSAPLPPAGHQVVEVGSRMLEIFDEEVEELDRQLESFASRHVGCQVLQRQWGIGPILSTAILAELGDTRRFSSSRQSVRFAGLDVTVEESDGKRTRGHLSRQGSPVLRWALYEAAGGAWRKASPDHDYYLEVKRRLGPSGPAYRSLAGSCVVCITNWPTRATTLSPKPLDLGAATPTLSMILRLAPLCARSRVHADVPC

SEQ ID NO: 262040 - protein, 368 aa, unidentified
MPNGCGVNRMVSPILAQWTTLSEDFVLLGAIMDTVSLIGIDLGKHCFHLHAQDGSGRMVLRKKLTRNQMFTLLSNFPSCTVVMEACAGAHWIARRLQTLGHEAKLISPHFVKPFRQGNKNDFADAQAICEAASRPSMRFVSPRNEAQQVVSALHRVREALVRERTGTINQIHAFLLEFGISLPRGMAVIRRLPAVLETQALPPRLVAVLERLQAHFKYLDEQIGQLEHELLTQLHEDERSERLLEIPGIGPITASVLMSELGDAHQYGSARQFAASIGLVPRQYSTGGKPTLLGISKRGDKGLRRLLVQCARVIMLRIERRTDSLGVWVRSLLARRHSNVVACALANKLGSSRISVKARPKGKRCPKE

SEQ ID NO: 262041 - protein, 412 aa, unidentified
MEVVYTCCCGLDVHKKSITACVLWAEAKGKSRKEKKRFGTFTHDLLQLADWLQECGVTHVAMESTGVYWKPVWNILAEQFEVLLVNAQHIKAVPGRKTDQKDSEWIADLLQHGLLRGSFVPPRPTRELRDLTRYRVSLAQEINRIANRVQKVLEDANIKLASVATDPLGASGRAILEAMLAGEQNAAQLAELSKGLLRNKIPELMLALEGHVTEHHRFLLQQLYDHLLFTESKRKQIEEEIARRMRPFQAEVVRLCTIPGVDRVTAWGLLAEIGLNMDQFPSAAHLASWACLCPGSFESAGKRLSGKMRKGNVSLRRCLSQAAWAISMMKNNYLSALYRRIAARRGAKRAIMAVAHALLVTAYHMLKRKEDYRELGADHFDRIDVNRTRRSLVRRLERLGHKVTLERVGQAS

SEQ ID NO: 262042 - protein, 320 aa, unidentified
MFMIGIDPHKGSHTATAVDASEAVVGEIRVEADRHQRARLLEWAAAFEPRTWAIEGATGLGSMLAQQLVGAGEHVLDVPPKLSSRVRLMDTGRIDKIDPNDARSAAIVALRNASLNTVTGEHEDRVILRLLADRYHQLTAQRTRSVCRLHAVLCLLIEGGTSRSLTAARATKLLANVEICDAITFQRVATCGDFVTEIATYDKALADTRTRTVAAVLASKTTVDEIYGIGPIGAAIILGRSGDIRRFPTAGHYARHNGTAPIEASSGPKARHRLNPRGDRQLNHAITPPRSPRSHTTIPAGCTTYASRRRARQGRKRCAR

SEQ ID NO: 262043 - protein, 425 aa, unidentified
MKNNFLSTLFVGIDVSSKTNVCCGLDFSGSKLLNLKASNNQPGANTILESILTCLNSNQLCYVVIALESTSFYSTHIANFLSANPTLLAYNPLVYCLNPKTIANYRKSFVDMDKTDPLDAYIIADFARVGRISCEPWRGSQFLALQRLSRHRHHLIECIAREKAYMVSNIYLKFSELSVLDKEQRPFANLYGVTSAAVLTDFFSLDDIAYAPIDNLVSFVSEKGKNRFSNSLETATLLQKAARDSYRLDKVLYEPLNTSIASSFNVIKAFSEEIKTLDKAIEKTIKGINTTQFQSLTSIPGIGPVFAGGILGEIGSISSFASNDALAKYAGLTWRVNQSGDYSADDTNMTKTGNKYLRYYLIEAANSVKNNIPEYNDFYHKKYAEVTTHNHKRALALTSRKLVRLIFGLLAKNQIYSDTKVADIN

SEQ ID NO: 262044 - protein, 445 aa, unidentified
MSNKVRSLTRGDRRRNEKLIRLRSIVRPELAIVGIDLASAKQAAVVADHDSITLARRMFEGDPWMIDEIVDWALPIAADAGFAGIVVGCEPTGHRWKPVLERCRARGIEVVCVNPMLVHRGREEEDFTRDRSDFKDSTIIARRVADRHCYVPYALEGHWCRLRHLGARRNDQLVEATAARQQLRDLLECVWPAVLRTAAKPLEATTWRAAMAVSCDPAEIAAMGYDAFASSVGAELARWGGKRRSHRILQAIWAAAVEPDGVERERPAALERARDAIRDWRRALDEIADVEARMLEVLDALGFTELVTSIDGLSAVGAAAILAEAGDPARFDCARTWVKHAGLCPRANESGTFAGQTKVSGRGRPGLRTAAWRAVWGALHHNAVYAARYQHLRTRTDNPLKDGQARAAIAAALLRQLFVVVTRRVAWDPAIAAGARHQEVVDQAA

SEQ ID NO: 262045 - protein, 374 aa, unidentified
MSACYEGQQFVGIDLHRRRTVLVRMTSAGERLGGMVRFPSTPEALRREMVPALSPTGPAPQVVLEATYGWYWAVETLQQLGARVHLAHPLGIKGFTNRRVKNDERDAADLADLLRMGRLPEAHIAPEPVRALRELVRHRAKLARWRSAVKNSVHAVLAKRGVTVPMSDLFGAEGTALLDALCGNLSGVGNPGGLRLEPEYAARVGSLRGLLATLEGEIAEFDRRIAAALAGHPGYRTLQQVSGVGPVFAAVFVAEIGEVGRFATADKLTCWAGLTPRHRESDTTVHRGRVTKQGSKLVRWAAVEAVQRSSEPAVAAIRTRIADRRGRPGQRTGRNIAKVAAARVLLKLVYYGLRDGQIRALDRGPASPGVTDAA

SEQ ID NO: 262046 - protein, 440 aa, unidentified
MSKRAYRATRVNDVNWDQLAQGKEGLDITLGVDVGKYSLWAVCRWADGRFERPWRVQNPGEIPTLLTLLKRVSAGRKLVVAMESSGTYGDALRQALADNQIEVQRVGGKAAHDYAEVFDGLPSQHDGKDAAVVAELAALGKAMPWEYQPADPWEQELAYWVEWMVAHRQMLTIWQGRLEGLLARHWPEATQVLKLSSGTLLRVLKRYGTPQALAADGEAAKLLARWGGAFLATEKIEQLLAGAGASVGVRLGEWQQRQIQNYAQQALAARQEANRAQRRLRSLAAGHAVLQAQGKVVGVPTACVLWVSTGDPRKYHAAGAYRKAMGLNLVERSSGTYQGKLRISKRGSSRTRQWLYFAVLRLVQKCGVRPWYEAKKAHDEADARRVVVAVMRKLAVALYYVGVHNEEFQPGRLFGRIRRRRDSPGEQKSRTKRRSRAEQI

SEQ ID NO: 262047 - protein, 451 aa, unidentified
MTNKKLKMDIIHPHAAGIDIGSRSHFVAVGQDENDVKEFGVYADDLTQICLHLKQHYITSVAMESTGSYWQNLYVELIKHSFEVVLCNGKFTRNIKGKKSDVKDARWIQKLHSIGLLTGSFLPDETTEVLRTYCRQRQNWQDLSVEATHKMQKYLKLLNFRLDVVVRDVCGLTELKIIEDICKGNLDAASLAKHRHFNCRKSEEEITKALKGNNRQDYLFGLRQEYDAYLFIQNKMLECEKQISSFLQQQINSSPKKKKLQAPEKKHKRLNKNAITGIDLNQAACQYFEGVDLFTIEGLGHATVLSIISEVGPDGFTKFETAKHFTSWLRLAPNNKVSGGKLLSTKTPKGSNRLKIALRNAANAIGNLKDTHLSNFFKRVCYRKGRTVAVSATARKLAVIIWNMVVKKIPYQPPTHYLFLDEKRKLGLVKRIRKQIDKFGLTNDDLGLLTT

SEQ ID NO: 262048 - protein, 322 aa, unidentified
MPQNGKIVGIDVSKRQVEGCLRSPLERLSAANTPQGRQQLIAWLRQREVTLAVMEASGGYERDWAEALGAAGIAVKIVDPKRVRYFAKSAGRLAKNDPIDAAMIAWFAETFAAEAAPADDPERALIDRLTTARALLVRLESQVGQLVEHRQPALVARAQQAIARTIGVQRRRLEAAITAKIEAHAPFARRREIIESVPGLGPRFAAGAIAWLPELGQIGNKPAAALVGIAPYDDDSGARHGERHIKGGRREIRDLLYMATLAATRCNPPIKAHYRQLRARGKSFKVALVACMRKLIVILNTMLRQDHKWNPCAAPVAAPVLA

SEQ ID NO: 262049 - protein, 365 aa, unidentified
MKKGSTATATSKRNFDQKLTIGLDLGDRSSWYCVLDEAGEVIDEQKLGTTPKAMKEVFATMPRSRIALETGMHSPWVSRLLSELGHEVIVAHARNVRLIGESRRKDDRFDARTLARLARIDPLLLSPVKHRSAQAQADLTVIRARASLVRARTALVNAARGLTKSYGERLRGCNPRNLDTEKAQSLSPELQAALGPLLQALESLSERIAEYNQQIEGIAQHSYPQTALLKQIKGVGTLIALTYILTLEDPHRFRKSRDAGCYVGLQPGRRNSGQSEPQMHISKEGDPYLRTLLVQGAHHILGPFGADSDLRRWGLKLAERGGKAGKKRAIIATARKLAVLLHRLWISGEVYEPLRNTNRTMSAAA

SEQ ID NO: 262050 - protein, 348 aa, unidentified
MQFTSALPVIGMDIAKNVFQIHVVDVEAGEIGRHKLKRERVTAFFANRQKSLVAMEACGGAHHWARILQALGHEVKLLPAKHMRPFVLRDKTDARDAQGIWVAAQQLQIKAVPVKSEQQQACLALHRMRAQLMKMRIMQTNALRGLLYEFGIVLPEGHRILLDRIQGELGKAQERGRLPAVVVLSVQEQLKRIEGLQADIDQLDKRLASLAKHNQQMQALLAIPGIGPLTATAVVSAATDITSFESGRQFAAWLGLTPRQTGTGGKTRQLGISKRGDAYVRTMLMHGARAVIARSRHGGWIERLLQRRPYNVVVAALANKLARTAWAVLAKGKAFDPLQWNPTEITPA

SEQ ID NO: 262051 - protein, 341 aa, unidentified
MQITTIGLDIAKHAFQVHAIDVEEKVVIRKQLRRGQVVQFFEELPPCLVGLEACATSHYWARELSKLGHEVRLMPAKDVKAYVKRNKNDAADAEAICEAVRRPRMRFVQVKSAEQQAHLMQHRARDLLMQQRTQLINSMRSHLAELGIIASQGREGVKELLAIAAKDANTHLPDDARASLVVLAAQLHALQTTIGAIEKRIVVQHRANKESKRLQTIPGIGPIGASAIAATVTNPKIFRSGRDFAAWIGLVPRQMSTGGKAKLGPISKQGDRYLRRLLVVGAVSTLRRAKLNPQRYPWVTRLLARRPFKVVAVALANKMARIAWALLMSGETCRSARFAAA

SEQ ID NO: 262052 - protein, 354 aa, unidentified
MSQNLNSAVAVIGIDIGKNSFHVIGLDQRGAIVLRQKWSRGQVEARFANMPPCLIGMEACVGAHHLSRKLKALGHDARLMPAKYVRPYSKGQKNDFRDAEAIAEAVQRPTMKFVATKTADQLDLQALHRVRERLVSQRTGILNQIRAFLLERGIAVRQGQRFLRAELPRILATPPDVLSPRMARVIEDLASDWRRLDERVESLSGEIEAVARQDAGCERLMSVPGIGPIISSAMVAAIGSGEVFSKGRDFGAWLGLVPKQTSTGDRTILGKISKRGNRYLRVLFVQAAWVVLIKPKSWERYGLKSWIEAAKKRLHRNVLAIALANKLARIAWSVLARGRNFEARTNTNATAQAA

SEQ ID NO: 262053 - protein, 421 aa, unidentified
MKRLRAKKANIMKEGTLIVAIDIGMATNHGCCVAADGRSTKTFRFDNTREGLDTLWTMVLASKTRFQCNEVIIGYESTGPYGEPLIHYLRQKQATIVQVNPLHTKRMREINDNSPLKTDRKDPRVIADVIRIGHALSVVVPEGDAAYLRRINNARERHVRERTALLNQLQQFVFLIFPEFTRIIKTIFCKTALHILKKYTTPAKIGSAKIEKLGEEMRRRSMGKFGAEHAAALINYAKTTIGIQEGLDGLVMDIQHALVQLEMVNSLMAELEHEMETTLQRIPYSRKLRSIKGLGIVTVAGLIGEIGDFTKFATQSEIAKLAGLDLYEVSSGKRQGQRRISKRGRSLLRKILYYAAMQTIRKNGIMHDYYQRLIGRGMKSMMALVAVSRKLLRIIFAIVRDDTEFKMNHEFQRKEEMRKAA

SEQ ID NO: 262054 - protein, 365 aa, unidentified
MKKIAYVGVDYHMNHLSVAVMIKGKKKFHDMIRINNEDKIVRRYMNKLSKDFEIKACYEASNSGYVFQRKMASWGYHCDVIAPSLIPKKRGERRKNDFRDARDLSRLYTHGLLTIVHPPNEEEESIRSLIRCRLAFKESEKRAKQQINALLLVHDYRWPKTKWTAQHQKWLSGLKLPIEYSQQVLDEYLGHLRYLQGRIQYLDERIEELSQSDIYAPSVKKLKAFKGIDTLTAMLLIAEITDFRRFPNPRALMAFLGLIPSEDSSGDKQKGGGITKSGNHRCRKMLIESVQHYARRPHISLKMKNNLAQIDAHSAHTAIKCLRRLHKRYWALTMRGKIRPVVITAIAREFVGFIWAMMRPELVTV

SEQ ID NO: 262055 - protein, 372 aa, unidentified
MMEVTTFVGLDVHKRSTSVAIAEAGRGGEVRFHGEISSTPEALRRLVKKLERPDRRLHFCYEAGPCGYGIHRLLRGLDQDCIVVAPSLIPRRPGDRVKTNRRDATALAKLHRAGELTAVWVPDDAHEAMRDLVRARSTARRVLGKARQHLQGFLLRHGRIYSGTRGWTRAFRRWLTTVRFDHPAQQIVLQDYIHAVEDAEARLARLEGQIEELLPSWSMAPVVEAVQAMRGVGLIVAVTVVAEVGDFSRFAKPRQLMAYLGLVPSEHSSGASVRRGGITKAGSAHARRVLIEGAWTYRMQARVSSKLLDRIEHLPKEIRDIAWRAQLRLCNRYRRLAAAGKPKVVVTTAIAREMVGFIWAIACSVQPRPTPG

SEQ ID NO: 262056 - protein, 329 aa, unidentified
MSALVCGLDVHKDSTYATILNSEGKIIDQTRMENEKVAAYLSQHKVGRVAMESSTAVAPLYRQLKKEGFDAVVSHPKKTKLIAEAKIKSDRVDSKAIAQLLRMDWLPLSYVPDDAVGALREKVRRRAFLVRERVKLRVKIKSYLTYQGLKWPEDHGLWTKAGVVWLHDLNLASVESYLRLIDVLSEEIKLLSKELKSEAEGDEDVKLLMTVPGIGYYSALLVKSEVGDIGRFPFAEKLCSYAGLVPSTYQSGGMVRHGNITKEGSRWLRWIMMECASTHVSKYDTWISRSYRCLAGRRGRKTARVAAARKLLVVCFSVLKHKKPFYDQP

SEQ ID NO: 262057 - protein, 344 aa, unidentified
MKITTIGLDLAKSIFQVHGVDATGQVVVRKSLRRSQMLPFFAKLPPCLVGIEACGTSHHWARELLKLGHEVRLMPPAYVKPYVKRGKTDAADAEAVCEAVTRPTMRFVPVKSPEQQAALSMHRTRDLLVKQRTQLINMIRGLLAEFGIDIPKGLERALLMARQIVDGKPPEVPFEAAKIVSTLSQQVLDTHVRLREIDRDLAIWLRSNDVARRLMTIPGIGPIGASALAASVTDPHQFRSGRQFAAWLGLTPLQKSSGGKERLGRISKMGDKYLRKLLIVGMTSLVRRAKYNPGKIDPRLADLLARKPTRVATVAMANKTARVIWAIMARGETYRAGHRPALSA

SEQ ID NO: 262058 - protein, 357 aa, unidentified
MRSSNIKYIGLDVHKEAISIAVLNGAGKLVMESIIETKASTLVQFLDGLRGELHVTLEEGTWAAWLYDVLKPHVREIVVCNPRRNALLKEGSKSDKVDARKLAELLRSGMLRAVYHGENGLRTLRELARSYQVISKDLNRVMNRLKALYRGWGIPCTGTQVYSRRHREQWLKKILEPGVHRRAELFYQQLDALQVLRRTVRGELLAESRKHQAVKVLREIPFIGPLRAAQLVALMQTPHRFRSKRQLWTYSGLAVETHDSAQYRYVDGQLQRSKKPQQVRGLNENHNHAMKEIFKSAALSAAGRTGPFQDFYEGLLARGMKAELARVTLARKIAAITLTLWKKGEHFDAKYVKSQAA

SEQ ID NO: 262059 - protein, 398 aa, unidentified
MESQLRVGVDVGCHAHRVGIADPEGSILEEFDISHSEAGFQEFFRRVEVQRAALGFPVAVAMEGYNGYARPLDRLVQERGYRLFNVNNLKLARFKEVFPGAAKTDPIDARKILELFHLREQLPMAKDVLQEVLPAPEVNEKLKRISRRRRQLVTEKLRVLNRMQADLQAVSPELLAATHDADNLWFLRFLSFRDDLRQLARLRRASIRQIPSVGVKYARIIEEWQTKATFSDEVDYVGPMIIEDAKRILELRRQIAALDEALAQLAEQSEIASRLATIPGFGKTSIAELAGEIGTLSRFSSEASLALYVGMSPLTVQSGQSLRARAPRQVNTRCRAAMMTAVARHIGCVPRSQAYYARERTQGKTHNQAVRALCRHMVRVIWAMLRDGRDYEPRGDAA

SEQ ID NO: 262060 - protein, 405 aa, unidentified
MDEPRFDVFCGIDVGKHKHHVTGLDCSGRRLLDRGIVNDEQALRVAFSQLAERGRVLVVVDQVSGIAALPLAVARDLGLAVAYLPGLTMRRLADLYPGTDKTDPRDAFIIADAARTLPHTLRPVSRDEATQVEVGILTGFDADLTTDITRVTNQLRDALLHVHPALERLFGRGLGRYAVLELLTVAPTPDALRELGETGMAAVLGRVSRLVAKRLPTKILAALGEQTVQVPGTAEFGRVIAHLAGRLRDLLRERDAVAGRAGVEADGHGTFEVIHSMPGLGVLSAAKLLVVVGDGSRFPTAAHLAPYAGLAPVTRQSGTSIGSQRAPRRGNPQVRQIFFFAAVASLAHDPQSRRYYDRKRAQGKRATAALLCLARRKANLLHAMLRNGTLYRAPSAGEVAQPSAA

SEQ ID NO: 262061 - protein, 421 aa, unidentified
MRGIRGKKLKMVKEGTLIATVDIGMTTNTGYCTTMDGRDIKPFKFDNSREGFEKFLHMIVASKHKFGCTEIMVGCESTGPYAEPLAQYLMDKPVTVVQVNPLHTKRLKEVNDNSPRKTDDKDPRVIGDVLRLGHALSVVVPEGDAAYLRRLNNARERHVGERTALLNQMQQLVFLIFPEFKKVFKDVTIKTPRYLLKRYTTPATIAGLDRDELAREIRKRSWGKFGMREAEALITLARDTVGIKEGVAGIALDIRHILVQLEALNAFIDEIETEMAKALDRIPYSARILSIKGLGVVTVAGLIGEVGDFSKFRTQSEIMKLAGLDLFEISSGKRKGQKRISKRGRHLLRKILFNAAVGTVRKYGIMCDYYARLIGRGMVRTSALIVVAKKLLRIIHAMLRDGRDYIPNYESPKRVVIKKAA

SEQ ID NO: 262062 - protein, 341 aa, unidentified
MDKELYFGVDVSKKTLDLAYYDGETIDWKNAHIKVSNDDAGFKKIGSWIAKVGKNFDTFLFCMEYTGLYNQNFRLWLESKEYIYGMVEPRKMHRFEPDLDDDQRSLDRIKTDELDAFRIAIYCEQNHKKILRNPSKLPSPVYFKLKRLLAERKQNTKQSTLYKQQLHDICAYDTDLSVERKKLLLKNMQENQKAIDKEIDSYMNEDTSIRKNYNLLTSIPGIGRIIALETIVLTENFTAISNPRKYACYIGIAPFKKESGTSVRKKTGVSKKGFSEAKADLSIAVLSAIRNNPSIRDYWIRKRKEKCGGIVLNAVKFKLVLRMFAVIKRGTPYVETDAYKN

SEQ ID NO: 262063 - protein, 367 aa, unidentified
MKKHTPMAVGLTLNRKCERLTIGLDLGDRSSCYCVLDEAGDVLLEQKVSTTPKAMREVFGSMPRCRIALETGTHSPWVSRLLIELGHEAIVAHARNVRLIGESKRKDDRLDAFTLARLVRIDPQLLCPVKHRSAGAQADLIVIRARAALVRNRTTLVNAARGLTKSYGERLGRGNARSMKPKAAEDLSPELKNALGPLMREIQSVSERIRDYDELLEPMAQNKYPEAERLKQIKGVGTLIALTYMLTLEDPSRFRKSRDAACYVGLQPGRRNSGQSEPQMRISKEGDPYLRALLVQAAHHILGPWGVDSDLRRWGMKLAEHGGKRGKKRATIAVARKLAVLLHRLWVSGDVYVPLRRIGQAAVPAVA

SEQ ID NO: 262064 - protein, 382 aa, unidentified
MEQSTTAYVAIDTHKKTISVAIAEAGRREETRFIGEIPSRPEAVAKMVDRLAKKHGTLAFCYEAGPCGYGLYRQITALGHECVVVAPSLVPTRPGDRVKTDRRDALTQASLFRSGELTPVWVPEDAHEVMRDLCRARQVAVESLRRARQQVSGFLLRQGRVYSNGAHWTRKHRFWLAAQRFEHPARQIAFEELVQAMDEAQARRDRLAKQMQELLPSWSLAKIVAAIQALRGIALIAAITLVAEVGDFKRFANPRQIMAYLGLTPSERSSGAKTARGAITKAGNTRARRMLVESAWTYRLPARMGAQILKRNEAPSRRSKRSPGRRRRGFAPDIAGSFGPANQPMSFASASRVNSSPLSGRLRRMTPSPRRPDQQGKTKHSA

SEQ ID NO: 262065 - protein, 357 aa, unidentified
MSSNMKKYIGLDVHKEAIAIAVLNGAGKLVMESIVETKASTLLDFLHGLRGELHVTLEEGTWAAWLYDVLKPHVEEIVVCNPRRNALLKEGSKSDKVDARKLAELLRGGLLRAVYHGENGLRTLRELARSYLTISKDQARVMSRLKALYRSWGIPCSGTQVYAPRYREQWLSKIAQPGVRRRAELFYQQMDGLSVVRHTVRGELLAESRKHQAVKILRQIPLIGPLRAALLLALMQTPHRFRSKRQLWTYSGLGVETHDSAQHRYVDGQLQRSKKPQQIRGLNQNHNHEMKRIFKSTALSASRCAGPLQDFYAGLLSRGMKPEMARLTLARKIAAITLTLWKKGGRFDAEHLKSQAA

SEQ ID NO: 262066 - protein, 360 aa, unidentified
MDVHKESIVAAVLPPDSDRVALTTKFENTPAALKTFVARLRSRGALTFIYEAGPCGYQVHRDLTAQGQECVVIAPGLIPTRPGDKVKTDRRDAEKLAQLHRAGQLTAVNVPTRADEADRDLVRAREDVMSERLRARHRLGKYLLRHGLVWRVTKSWGIKHREWLKALRFELASETRTFDAYLRGLEEVEARLNGLDLEVLALAKNGTWNKLVANLRCLKGVDTLSAVTLCVEVRDFRRFASAREFMGYTGLVSREYSSGESVKRSRITKVGNAHVRRVLVESAWSYRQSSDRTGKTLLERRQGGSPEAVATARRAQERLCRKFRKMVGRGKPQQKAVTAAARELAGFVWHIGRLSQEVRG

SEQ ID NO: 262067 - protein, 313 aa, unidentified
MQEVFVGVDVAKSWLDIHHPGRGTRRIENSPAAVRAFVSASAKTGLWVVFEASGGYDRLLREGLEAQGVRFSRVNPRQARDFARAMGVIGKTDRVDARMLAELGARLRPAATEPVDPARRALQAQATRRRQLVELRKQEATRLQQTADAEARADIKSLVTLLDRRIAKADSRMRAIVEVDPELAEIDRRLRTVPGVGPIVAATLIAELPELGRLDRRSIAALAGLAPIARDSGRRAGRRTIGGGRPIVRTMLYIAGLHASRRDAVFAAFRGRLEAAGKPVKAAIIATARKLLAVLNAMLAAGTDYRPGTATQG

SEQ ID NO: 262068 - protein, 341 aa, unidentified
MKQPPCFAGIDIASASFAISVVTTPDQVLLGPRSFENTLKGFEALVDWFEQNHLEPKQMIICMEATGVYGELLCYFLHQHQYTLAVEPPLKVKRAFKINHHKTDAVDSIQLAKYAFRFLDELSIWAPRVELVEKISSLISSRELLVREKTQTRNSLHALRRKAIKSSVAIQSLETVLQVIEKQIKALEKQLKHLIEQDPRVSTKVDLLKSTPGVGLLLAANLLVLTNGFTSQRSCREAASYLKIAPLQHESGTSVYRNPQSPHYGPSVMRKLLSLAAQSVVTHKAEFRKYYLRKQAEGKAKRLIINNVENKLLKIIWAIIRDDKPYTPNYQSVHPKYWKTA

SEQ ID NO: 262069 - protein, 338 aa, unidentified
MTLYVGIDLHSNNNVVVIQDENDECLKRKRLANTIETVLAFLQPYRGEISGVVVESTYNWYWLVDGLQDHGYRVHLANTAAIQQYEGLKHVDDESDARWLATLLRLGLLPEGHIYPRHERVVRDLVRKRSQLVRNHTRHMLSVENLMARNTGQCMKAQAVRQLTNDGVDALGLEPDVALAMKTNVAVMVCLREQIGLLEKAILSRVRLCRSFRGLLSVDGIGKVLAMTIMLETGDIKRFKRVGNYVSYCRCVKSVRLTNGKPKGKGNAKNGNKYLSWAFIEAATYAIRWNEQIRRFYQRKCAKTKRVVAIKAVAHKLARACYHIMNDGGKFDVTRAFV

SEQ ID NO: 262070 - protein, 432 aa, unidentified
MMTTRKDPTPQDPPKEPAVEFAALIGADWGDQSHALALLDRASGQVEASTLEHTPEAIHAWLEQLEKRFGGRPVALALEASKGPLVQALWLVPWLTLYPIHTTTSARYRTAFRPSGAKDDQPDAQVLLDLLCHHRDKLTPLQPEDVATRTLDGLCQARRAAIDLRTQLSNQLTSTLKGYFPQALDWVGGNLSSALALDFLDRWPDLLALKAARPATLRKFFYAHNVRRPETIGQRVEAVAKARALTTDTAVIEVSVRVVRLLVGQLRALAKHIDQFDRAIKQAFAAHPEADLFRDLPGAGPVLAPRLLTLFGTDRSRYPRVDHLLKYSGVAPVKEKSGARQWIHWRWHAPRFIRQTLIEWAGQTVVFCGWARAYYQRQRKKGMGHWAVLRSLAFRWVRVLWRCWQDRIPYQEARYLAALRHRGVNVTPELVP

SEQ ID NO: 262071 - protein, 355 aa, unidentified
MDSKKYIGMDVHKESISIAVRNAAGKIVMECVIETKASMILQFIDGLRGDLQVTFEEGTSAAWLYDLLRPHVTKLVVCDPRKNASMREGNQSDKIDARRLAELLRLNHLSPVYHGEHGLRTLKELVRSYLTVTKDLGRVMTRVKAIYRSWAIPCSGKQVYAPRHRAEWLGKIGEPGVRRRAEFYYQQLDALRTVRQEVRRELLAEGKKHQAWKPLSQIPSIGPIRSAVLLGILQTPHRFRTKRQLWTYSGLGIETQSSADHRVVAGQLERAKKQNSIRGLNRNCHHDLKNLFKGAAIVAATKPGPFQEFYTALLTKGIRPEMARLTLARKIATIVLIVWKRGAFFDAQHLKPQTA

SEQ ID NO: 262072 - protein, 331 aa, unidentified
MQSHSNIFIGIDVSKDELVVAYQVDKGWKKHKVPNTVDRIGEWLDGLPLMSKHFVVEATGPYSERLISVLAASRASFSVVNPLQSRAMSKTLLKTNKTDDQDAQTLSLLGQKFELIEYKMPSIAQKKRQEAFSALASLQKQERQLKNQLHAFEYRVNPNPIAVKALQDVLTSTQEAIQALEKELNPEQDEEEARQLIHRIASIKGVGPSTAKVFVTLFGNFQHFDDAKAFAKFVGLSPTEFSSGATVRGRSFITKRGSSKVRALLFNCARSAMRYNKNCKELYQRLLEKGKNGKVALTAVMHKLARIIFGVVRSGFNYDPEFALQKQKFTK

SEQ ID NO: 262073 - protein, 370 aa, unidentified
MPTMPQTERRGQPAGTVEEEVILGVDTHKDTQVAAVITAVGVLVDSQPFPATMAGYRQLLSWARGFGLLRRAGVEGTGCYGATLTRFLRANHVQVVEVNRPDRAARRRRGKSDAVDAEAAARAVLAGQAVVTPKDADGPTEALRMLKLARDSAVKARTQAINQLKAVLVTADPRLRESLAGLGTAALIRCCLELPATTTSPLTDPAAAALYTLRLLAGRITALTAEARDLHRRMQAAIATHTPALLQQPGVGPDTAATLLIAAGDNPHRLATDASFAALCGASPVQASSGKTTRHRLNRGGNRHANAALYRITLTRLRCDQRTRTYLHRRTTEGKTRRETIRCLKRYVAREIQPLLQPPPAAANQPSTGA

SEQ ID NO: 262074 - protein, 285 aa, unidentified
MTTNISMLAVDLSKGSFQVCAVRPDGSVLYNRALSRARFAALLADQPACVVAMEACATSHHWGRVAQHNGHEVRLVPAVYVKPFVKRQKNDRADAEAIAEAASRPSMRFVTVKSAETQARAVAFRTHQCLVRQRTQLINALRGHLAEFGVVAPKGPANLKVLDEALANEVGDLPGAVRAMGSVYLNQIARLTEVIERLADELETASRTDTDLRRLCTIPGIGPVIAGAVAAFAPDLDTFDSGRNFAAWLGLVPRQRSPSPGLSPATRIPSISAWTRAMTIRSPAP

SEQ ID NO: 262075 - protein, 389 aa, unidentified
MSPQNDQSKKCFTAFEQASTMVAVVELSKKLWLVAGIVPGIGRHPLKKLEADENRLLALLHHWQQQAVKAGREIKRIVVAFEAGRDGFWLARWLRVRGIEAYVIHPTSVAVSREHRRAKTDRLDTEHLKRVVLGWLRGEPDHCRMVAIPTVEEEDAKRPNRERETLVGECTRIVNRVKACLARFGIRGFNPTLRKAADRLETLVTPEGARLPPLTLAEMLRDIARLRFLREQIKSIEKARVQRLRDAPATRTNAMVNLIARVFGIGIETADLLVHEILSRNLRDRRAVARYAGLTGSPDESGDRRREKGLARAGNARVRRGMVQLAWRFLGFHPDSALTQWYNKRAADGRGSTRKTMIVALARKLLIVLWRMVTTGEVPADLKLRRTTA

SEQ ID NO: 262076 - protein, 325 aa, unidentified
MKQAAIVGIDLGKNWFHLVGLDDAGAAVFRKKMNRSQLAQFAATTPRCIVATESCPGSQYWGRVFTTAGHEVRILPAQFVKPYLKSNKNDFNDAAAIAEAGGRASMRYVPLKTMEQLELQALHRVRRRFIVERTAVINQMRALLLEHGMTIPVGRAAFVHRLPAIFVDAEQRLSPRLLLLLHRLRQRWLALDVEIAQATRDLTAWAEQSPLCRRAVTVPGIGPMIATAVVAAVGDGRMFARGRDMAAWLGLVPRQHSTGGKPTLGAISKRGNTYVRELFIQGAQSSFVHLKRDQSSLGHWLRQGETRRQCQVAIVALANKMVRIC

SEQ ID NO: 262077 - protein, 349 aa, unidentified
METVIKQTAGIDCGCKELVVSFGQLYINGNFYCRNTKAFANTTKGFDELVQWITTMHDEDTLVHYVMEATGVYHERLAYHLVANGYYVSIALPNKVNAFAKTCSSKKQDDCQASKVLAEFGCLKQLDAWQPPHVLYVSLKQLTREKHQLQQELTLIHNQHHAEETKAITSLSSIKRMKARSKLLGKQIAEVEKEIVSLINKEESIKERIDNVCTIPGVGLQTVVTVIAETNGFNLVRNSRQLVSYAGLDIIQKTSGISVRGRAHISKRGNPHLRHCLYFPAFTAVKYNLPLQNLHNRIVEKQAIKMKGYVAVQRKLLMLIYTLWKKNEPYQLPIKFLEQPVEAALTELD

SEQ ID NO: 262078 - protein, 421 aa, unidentified
MRGLRAKGMRMVKEGTLIATVDIGVTSNTGYCTTLDGISTKSFRFDNTREGFEKFWRMTVASKIRFGCDEVLVGYESTGPYAEPLVHYLAKKQVKIVQVNPLHTKKMKEVNDNSPLKTDDKDPRVIADVIRLGRALTIVVPEGDAASLRRLNNARERHVGEQTALLNQLQQLVYLIFPEFKTVLKNMKCKTAQHILKRYTTPERIGTLSKEALGEEMRKRSMGKFGIKEAGSLIGLARETVGIKEGLSGIFMDIRHPLLQLEAEVLFILEIEGEMRATLERIPCSAKLLSIKGLGTVSVAGLIGEVGDFSKFSTQSEITKLAGLDLYEISSGKRKGQRRISKRGRSLLRKILFYAAIQMIRKNGIMYEYYARLTGRGMERMRALIAVSRKLLRIIHAIVRDNRDYVGQYQAPPRRVIKMAA

SEQ ID NO: 262079 - protein, 367 aa, unidentified
MDLHKKTAVCCAVHAGPGKPSEDEEEFLRRFNRDHGTQPSEPEDIARIAEALRGHEAHVLIENSTKTHETYWVLTNLGIDTVVAQAQDLYRITKSVKKTDANDAAELAGYMRRRLNGEREFAVCKMPSPVWMERREICRAVLAEKRHLADLKRRARMHMLLHGIRLSKDYSDIFSKKAMKEMWDSRDTCLRLLVSEARSIKARTDEEARLIRATFGHITDFDLVMSIPGFGAVSAAYAVSMIIDVKRFGSSAQLAAYFGLVPKVRESAETSHRCATTHRGDREMRRLLCQSAIVHVRTAEDSVVSALYNRLRARGVSHREAQVAAARKLVTVVWSVLRNRRPFSTDRELLERSAEMAEEAEGDPAAD

SEQ ID NO: 262080 - protein, 466 aa, unidentified
MTPPTDFFLHPRPSTPPPPQPPARTGPLQVFNPHAAGIDIGEAEHWVAVPPDRAPQPVRRFGTFTADLDVLADWLIDCGITTVAMASTGVYGIPLFELLETRGVQGLLIDPRQATRAPGRPKTDRLDGQWLQRLQTSGLLAGALRPEAQGCVLRHSLRHRQRLRTSAAPHIQPMHKALQQMHLTLTQVVSDIPGATGMAIRKALVAGERDPQRLAALRHAHGQHDEDDIAKALQGPWHAAHLFAFQHALSLSACSHPPLALCDQQITRHLATFADTSAGQPLPPKARRATKTTAPRFDARTPLYRLAGVDLTTIEGIEEHTALVILSAIGTDMQRWPRVKPFCRWLGRCPQHQISGGKVLSRRGRPGAHRVPVALRLAARSLPHSQSALGAFFRRMNVRLGTPKAITATAQKLARRVSSLRQHGSAYVQQGLDAYETPSRERKGTAMTTQAKALGYTLVPLAAQGA

SEQ ID NO: 262081 - protein, 369 aa, unidentified
MKTYTLEAAPTARAVEEKNNTKSSKAKRILVGVDVHLRGYQAARKVDGGVIGAVETCRSEVELLLHIEKQRHRAEQVVVVYEAGPLGYTLYRKLTAAGVLCYVCAADSAEQKRKRRKNNKIDARSLTSKLFNYLNGDKEALQLARVPTQAQEQLRLGSRQHDQLVEERKRLGAQGNAVLLSQGYGSWSNWWRTKAWAQLSAIVPQWLQERLLIWVDVLKVLDEKIAQAKAALVRRCSGPRPKGVGALSQVQLQSEVLDWSLYSNRRKIACLAGMVPSEWSTGDKEQRGSITKVGVPALRRIIVEMVWRMIFFQPQYKPVQKWLEVLRGPNPALKKKAVIAIGRQLMVDLWRLQTGRVTAEELNLIMVTE

SEQ ID NO: 262082 - protein, 389 aa, unidentified
MIYIGIDVAKNKHDCFITNSDGEILFKPFTIPNNLEGFDDLYHKIESTTNDPSQVKVGLEATGHYNYNLLGYLIDKGLTTYVINPLHTNLFRKSQSLRQTKTDKVDARTIASMLMSDVNLKSYSDTSYHNEELKSLTRYRFDKVKERSALKVSISRLVCILFPELENLVPTLHMASVYALLSEFPSATHVASAHLTRLTNLLKTASKGRYDKETAILFRNTARSSIGSNMPAKALELMHTIRLIQELNSEIAEIESVIQTIMDKLNPPILSIPGISYRMGAMILAEIGDFDRFESPDKILAYAGLSPSTYQSGQLNNSHSRMEKRGSRYLRYALYNATKYVCHWDPLFNAYLSKKISEGKHYNVAMSHATKKLVRVIFHLQKTGQLYAS

SEQ ID NO: 262083 - protein, 343 aa, unidentified
MDSYVGLDVSLREVSACVVDEAGTIQFERTLAADPDVIAAWVHAQAPTVRRVGLESGPTSAWLWRELAKRGLPVICIDARHAKAALSMQINKSDRNDAAGIARIMQTGWYREVQVKSPHSHAIRGLLNSRSLLVKVQRDLENQVRGLLKSAGLIVGRAKDGVFSARTKQLLAAHIDLAAIALPLLEAREAIHGQLVQLERRVRQLAKEHRQTSAFMTVPGIGPMTALAFLATVDDPRRFRRARAIGAYVGLTPRRYASGEVDWTGRISKCGDTMLRTYLFEAAGVLLTRVQKWCALKAWGLRLAKRSGMKKARTAVARKLAVILLRMWRDGTRFHWTAGPAAS

SEQ ID NO: 262084 - protein, 450 aa, unidentified
MSRMPQVIIDQDHERVHDRVAAVDVAKDSGVVCTRTPHPSRPGARASTIWTVQARTGAVRALGARLKADGIELVTLESTSDYWRIWFFVLEACGLAVQLVNAAQARHVPGRPKTDKLDAQWLARLTEMGLLRACFVPPKPIRDLRDYTRARARLTRERTRCWQRLEKLLEGALIKVSAVASKLTTVSARDMVTAMIAGQRDPRVLAGLARGRMKARHDDLAAALDGMFDDHHGELAGMLLDQIAFLDQRITTLAARAAQLTAAMPAAWGTDPDGTTGPAAGAAPGAPVLNAVARLAEIPGISQDLARAIIAETGLDMTRFPTAGHLVSWAGLCPSARQSGPRTRPGAKGRGDTWLRGSLGQAATGAARTATFLGERHARIARRRGKAKAQVATARSILVIIWHLLADPQARYTDLGHGYYQARTDADRKIRNHIRQLHALGFDVTLTKTP

SEQ ID NO: 262085 - protein, 421 aa, unidentified
MNSLITAKYTAFVGLDWADAKHDICLQAAGRDRREFDCFAHRTERIEEWALALQQRFGGRIAVALELSKGPIVYALQKYDFLVLFPINPSTLAKYRQAFQPSRAKDDPTDAELALDLLIRHPERFKPLTPQSVPMRQLCLLVEQRRRLVGDKNRYVNRLGDALKQYYPQVLEWFKRHDTVLFCDFLARWSTLTGVKRARKTTLRTFFKVHNARSEKLIEARLCAIQAAQPLTHNAAVISAYRLLVEILVEQLRVTLNAIYRFDEEIAATAATLPDYELLFRPLPGAGPVMAPRLLAGFGEDRQRYGGAEELQKYSGVAPVTERSGKKTRVHWRRQCPIFLRQTMVEWAGQTVKYSFWAGAYYRQQRAKGSSHQAAVRSLAFKWLRILYRCWQTRTPYDESKYLNALRRRGSPLLEHLSETM

SEQ ID NO: 262086 - protein, 411 aa, unidentified
MDVVHERCAGIDISKADAKVCVRVQGRGRRRTEQSVRTWGATTGQILALRDELLERRVGLVVMEATGDYWKPFYYLLEDAGFEVVLANPRRVRAIPGRKSDVSDAAWLADLGAHGLVAGSLVPPPPIRELRDLTRTRTAIIRERSREYQRLEKVLEDAGLKLSTQTSSLTLVSVRRMLEALVAGERDPRVLAEMAQGQLRNKIPALAEALVGRFTEHHAFLVRLHLDLIDRHAEAIEELTGRIDAQMEPFRGFHTLICTIPGVSTLVADVVVAETGGDMSRFPTAQHLASWAGTSPGSNESAGKVKSSATRPGSPHLKGALGVAARAAARSKGTFLSARYKRIAARRGPMRALVATERSILVTIWTMGHTGELYADLGADYYRRRNPERSKQRALAQLRALGYQVTLSAAS

SEQ ID NO: 262087 - protein, 427 aa, unidentified
MKFKQSDGQNQRIERISTSHLVVGIDIAKETHVAQATNFRGIVLTKRHLTFPNTREGFEKLDRWMDGLQQKHRLKGLIIGMEPTGHYGFNLANWLADKGKHVVMVNPATTKRNKENRDNSPSKSDPKDALVIADVVSRGYYYEYSRQATVFQRLRTIMSDREFWVTNSVRLQNRIIRWLDIRFPEYFSVFKNWTYKRSLTTLKEFPSPRDIESLSVSEVITGWKKHMKRAGGSTGMQKAAQLIAQAKRSVGETTALDEAKQDLERLLQEFERIVEMLDRIEQDIEVLLSEIPMADHLRSIGLGTICIAAILSGAGDLTQYAHGRQLLRKAGLNLAEKMSGKYKGQIMLSKRGDATLRKYLYLATLQLVGNHAVFRQLHEHNVQVKKMKKQQSVFKLLGKLARIIIGIVGRGETFSPEKAAPTCTQAA

SEQ ID NO: 262088 - protein, 307 aa, unidentified
MYIGIDVSKDRLDVCRRPSGTAFAVARDGEGVAALIERLQGARPELIVLEATGGFEQVVAAGLAGAGLPVVVVNPRQIRDFARSMGRLAKTDRIDAEVIALFAERVRPEVRPVPDAAARELDELVTRRRQVIEMMVAEGNRARRLASRRLKKRIDRHLEVLQKELTEIERELDDTIRRSPIWRETEDLLKSVPGIGNATARTLLAELPELGTLDRRQIAALAGVAPFNRDSGTFRGRRMIGGGRAGVRATLYMAALVASRHNPVIAAFYQRLLAAGKPKKTALVACMRKLLTILNAIIRHRIPWQIA

SEQ ID NO: 262089 - protein, 343 aa, unidentified
MQAITTIGLDIAKSVFQVHGVDAEGNTVFRLQLKRHYVLSFFQKLPPCLIGIEACATSHYWSRELQALGHKVRLMPPAYVEPYVKRQKNDATDAEAICEAVGRPNMRFVETKTPEQQGCLTIHRTRHLFIGQQTSVINAIRAHLAEFGIVAPVGRRGVDQLLAVVSDTSDKRLPEVVRSCVAALGAQLQMLKAQILEFDRMIRAWHRSSEASKRLDAIPGVGPALATALVASVANPKAFRSGRDFSAWIGLVPKQSSSDGKDKLGSISKQGDRYLRSLFTAGALAVIRYAKIHGTRHRPWLTALLARRPTKVAAIALANKLARMAWAMMARGDQYKEPAALAA

SEQ ID NO: 262090 - protein, 412 aa, unidentified
MANDNVTWFAGIDWGATTHQACLLDAAGKAVGERAFPHGGAGLAALCDWLVSVAGDPGRVAVAIEVPHGPVVDALLDRGLAVHAINPKQLDRLRDRFSVAGAKDDRRDARVAAAGLRTDPQLFRAVQAGDPVIVELREWSRLSEELQQERVRLGNRIRQQLWRYYPQLLDLTDDVAAEWVLALWTMAPTPAKAARLREATLARLLKQHRIRRIDAAAALGILRQPAIQVAAGVTEAAVLHLRSLVARLRLANHEFHQAERKLDELCATLTQAAPAQGNTPCDAAILSSLPGVGRSTLATLLTEAGGPLARRNYAALRTLTGVAPVTKRSGKTCIVVMRRAAQARLRQAVFHWARIAVQHDAKSRSRYDALRARGHSYGRALRGVADRLLGVACVLLQRQMLFDPDHGTPAAS

SEQ ID NO: 262091 - protein, 497 aa, unidentified
MPTKANIYSDCNPQVLKLFEQAGHPARVLCVALDYAKAQHMALVCNGLGDLLKGAFAVDNTPAGATELLQQVRQCAKQRRIPNQQVFFGGEDYPTFAENFLRHLRKEKFLVVRVNAWEAKQQRSNFQASSDELDLLGIARCCLNRRGQPVQDLPVAYANLRIATRDRNELVRLATATSNRIHTYVDRLFPGFLSADKSGLAPFCQASLDLMAERFSPAEVRRRPRGALGQWLARRAVEEPHAVAAQLKELARGALGPAPEQTALLQRTLAQLVGLYRGLEGSISGLDRELAYWLARTPGALLTSISGIGITLAAGWMAELGPPQQWRAVRRICSYAGVVTKTKQTGGPEKEPMPSYVQQRCNKRLKNVVLQAVEKVRQYGPEDLRRSAEELEANGSHTEFGMAKRLVRLAKYLVVTGTIYRPKTLLDPDTPKEKLVLYYQTAWDKLLLKWKGKSDLKDVFAPAHPLGQWRQMVKELYALELRLPQQRAAPTPGASTP

SEQ ID NO: 262092 - protein, 375 aa, unidentified
MQAAGSGYEGGRILYMALELSNRWWRLGFSNGAKVRQKSVEARALERVVEEIALAKHKLGLEPTARVVACYEAGRDGHWICRWLRTVGVEVLVMDSSSIERAQGRKHVKTDGLDVARLLDLLMRYCMGFRRSFRVVRVPEEAAEAELRLHREDGYLVKERSRVANRIRGLLATQGLVDVSLGRGFVGWVKTVRLWNGAGLAGELEAELLRLYEQYQLIGRQQGEVTKRYQAELATASVVGQQRGRLELLKGIGPKISRVLSAEVFAWRTFSNGKQVGSMAGLTPTPDQSGDLSRERGIGKHGNRRVRHTAIELAWLWQRWQPGSALSVWFRQRFASAGKRLRRIGIVALARKLLIALWRYVEQGVVPEGAILRAG

SEQ ID NO: 262093 - protein, 322 aa, unidentified
MNYLHLGIDVAKLKLDVALLTDQGVHTAVFPNNSTGFRALEDWLRRWPQPLRVCLEATGSYSLGVASFLHQRQRLVSLVNPLAVHYFARTCLSRNKTDPHDALLIARYSQQYNPRPWTPPTLAQQRLQTLVRTREQILDSRMLVQQHLENAPAGAAVYFRAQLRQLQRQTEKVEQQIRQAWQAVPEMALAMSWLTSIPGIGEITAATILAILPPVEQMRSARQLAAFAGVSPCQKQSGNSPGRTRLSKLGHRRLRKALYWPAITALRCNPRAQALAQRLAEKGKRKMVIIGAVMRLLTHLIYGVLKNRHPFDPNYLQVPVAS

SEQ ID NO: 262094 - protein, 481 aa, unidentified
MFEFATIPFRRVPVLRDSGRRLVAGEKTMARKRKKEAKTNHAMLPVLRPDAAGIDIGATEIFVAVPANRAAENVRSFPTFTQDLYALADWLHQCGVKTVAMESTGVYWIPLFQILEDRGLEVCLVNARHVKNVPGRRTDVSDCQWLQFLHSVGLLRASYRPEQEVCAVRSLLRHRESLVQMAATHVHHMQKALDQMNLQVHHVISDITGQTGQAIIDAILAGERDPLVLAKLRNERIQATEAVIAKSLVGDYRAEHLFTLRQSLVAYRSYQSLIDDCDGEIRRSLEGFKPPRQQDASAEDNPQAHPKRTTNPGVLRSELRRVFGIDLTQIPGIRVGIAQTLFGEIGPDFTKFRSASAFASWMGLCPDNDISGGKVLWTGTRKVKCRAATALRMAAQSLHHSKSALGNFYRRMRAKLGAPKAITAAAHKLARIIFHLITTGQEFNDSHFAADQWRYQKRQEAKLRAKAKAMGFELIPLDQAG

SEQ ID NO: 262095 - protein, 401 aa, unidentified
MEGPIVSIDVSNGNSHYMCFIKNNKRFGKVKKIDHDIEGFKRLLEDIQKLEAETNEKVCAVFEATGVYTKPLERFLSKNSIKTYIINPLESARKRKEEIHNKKTDKLDPISISKVYYDKEEMMELKKKDETYNWLRKKNRLYEDQLNHLRKYKVTFQNQLSICFPGYLDLFRDGYSDIPMTILKKYPHPDLLKNKKAETVARYLEKNTCHTHKISLEYALKIIGFAKKTYPGCEKDDVEVEIFKILLDKVIETQRECEKTLNEMITVASTLEEYRYISSIDGIGPNLAARIIAEIGDIEEFKSREALVAYAGLDPHIYQSGDQDGKHLKISKKGNKYLRCLLFLAVGCSIRGAKDNPVNRFYQKKKQQSNPLNSKAAKTACTVKLLKIIYGICKNKTTYER

SEQ ID NO: 262096 - protein, 262 aa, unidentified
MKLYAGIDLHANNSVLVVIDEEDRILYQKRLHNELGVLLQALTPYQETLQGIVVESTYNWYWLVDGLMAAGYRVHLANTTAIEQYKGLKHTDDQSDARWLAHLLRLGILPEGYIYPKEERAIRDLLRKRSQLVRQRTSNLLSIQNLLTRNTGSSLSGNRIKQLTIEEVEQLLPQVELALAVKSNLAVLQCLQVQIESIEEVVLAHLKLREGFQPLLTVSGIGQILGMTIMLETGAIGRFATVGDFASYCRCVGSQKLSNGKR

SEQ ID NO: 262097 - protein, 339 aa, unidentified
MKLYSGIDLHSNNHVLVVIDQKDKVLFQKRLPNDLETTLRMLKPYQKNIQGIAVESTFNWYWLVDGLMDNGYPLHLVNTAAVKQYEGLKHTDDEDDAFWLAHLLRLDILPTGYIYPKEQRAIRDLLRKRCRLVQQRTALILSAMSLYTRLTGRNASSNVIKRPHAEDIYLTNMDDQNRKLEMQCSLTLIQAFETQISTIEKVVLKQIKLMPGFMGLQSVPGIGDILSLTIMLETGDINRFATPGNYASYCRCVSSKRVSNGKKKSENNRKNGNKYLSWAYVEAVNFAIRYNPRAKRFYQRKLAQQEHVVTIKTTAHKLARTCYYIMKDHVAFKDSMLFQ

SEQ ID NO: 262098 - protein, 329 aa, unidentified
MKLQHIIGADLSKKSIDLVCHLLNTHIQIENSIAGFKDLLQWLRRQKVNLSEVMIVMEHTGLYSYCFEKFLHQHQIAFCQVNALAIKRSMGLVRGKTDKIDAARIAAYGYEKKDKLAIDVPASDALKRLQMLHSTRERLVKQRASIICAIKEYRYIGIPEKDIIMQTQLQLIKSFDKQIEKLMTEIETIINEQEALKQNFHLLQSIKGVGKILALTAIIKTSNFTRFANARKFACFCGTAPFPHDSGTTIKRKARVSHLADKQMKTLLDLSAKSAIQYDKELREYYLNRTQGGKSKMSTINVVRNKILYRMFAVIKRQTPFIENYLQAA

SEQ ID NO: 262099 - protein, 389 aa, unidentified
MRVMYERCCGLDIHKSSITACALISEKGKTQEETRRFGTMTGDLRELAGWLQQKGIRHVAMESTGVYWKPVWNILEPAGLELLLANAQEVKIVPGRKTDQKDSQWIADLHKHGLLRKSFVPPRAIRDLRDLTRSRAILTQEHTSVCNRIQKVLEDANIKLGSVASDVFGVSGRAILRALMKEEKDPEVLAELSKGRLRNKIPQLRRALEGQVTAHHRSLLTGHWNRMEFLERQIADCETQIAQGMKPTPEEMALTIQTAAKEAPLPLSPREEAIQLWMEIPGVGWTAACSMVAELGVPYGPIPICRPRGELGAGLCPGNNESAGKRLSGKTRKGNVWLRRTMCEVAWGPPHTPKTATLRRNFVASPRAEVINERWWLWRTAFSSRLITC

SEQ ID NO: 262100 - protein, 402 aa, unidentified
MNAVGIDVSKGKSMVAIMRPFGEIVSAPFEIKHTSSDINSLVKLIKSIEGESRIVMEHTGRYYEVLAHQLSEANLFVSAINPKLIKDFDNDSLRKVKSDKADSVKIARYALDKWQNLKQYSVMDELRNQLKTMNRQFGFYMKHKTAMKNNLIGILDQTYPGVNTYFDSPARSDGSQKWVDFASTYWHVDCVRKMSINAFIDHYENWCKRKKYNFSKSKAEEIYGKAKELVPVLPKDDITKLIIKQAVDQLNSASITVESLRTLMNETASKLPEYPVVMAMKGVGTSLGPQLMAEIGDVSRFTHKGAITAFAGVDPGVNESGSYEQKSVPTSKRGSSDLRKTLFQVMDVLIKTHPQDDPVYQFLDKKRAQKKPYYVYMTAGANKFLRIYYGRVKEYLSSLPES

SEQ ID NO: 262101 - protein, 337 aa, unidentified
MSIVAETVEHVVGIDTHARTHTYCLVHTRTGAVVDTATFPTSKSGNARAISWIHRRSPGSVLAAVEGTSSYGAGITAALLEQGFDVAEVRPAARSAHAHAGKSDLLDAEAAARSAIGRDYNTLARPRQTGARTALRVLLASRSIIDQQRTANRNALTALLRSVDLDVDARKPLTDAQIRVIAAWRIGRGATAAAAAASGIARREARRLAVTVLEQTELLKDNHRQLHQLTEQLAPGLQDLPGLGPVTAAIIVCAYSHHGRVRSEAAFAALGGIAPLPASSGNTSRHRLSRSGDRQLNRAFDIAVRTRMSYDPATRAYITRRRTEGRTNREIRRCLIG

SEQ ID NO: 262102 - protein, 320 aa, unidentified
MEHELHYIGIDTAKEKLDVDVLRPDGRHRTKKFANTTKGHDELVSWLKGHKIDHAHICIEATGTYMEPVAECLYDAGYIVSVINPALGKAFAQSEGLRNKTDTVDARMLAEFCRQKRPAAWEAPHPLERALRALVVRHQALTDMHTQELNRTETAREVQRPSIDAHLLWLEAELKRLEKQIKDLTDDDPDMKHRRKLLESIPGIGEKTSAVLLAYIGLKDRFAHARQFAAFAGLTPRRYESGSSVRGASRMSKAGHVSLRRALYMPAMVATSKTEWGRAFRDRLAANGKKGKVILGAMMRKLAQVAYGVLKSGVAFDASA

SEQ ID NO: 262103 - protein, 410 aa, unidentified
MTEDFDFFVGIDLGHEQHQVCAIDGAGEVVGERSFAHTGAGVADLLGWLRARCGAEVERVAIGLENPRGALIEAFLEHHYSVFAINPKQLDRFRDRFSMAGAKDDRRDAWVCARSLRSDRDCFRRLTVDAPGILRLRELSRASDSVGEDFRRAANQLSTLLRRYFPELLTLSPAADEPWLWTLLELAPLPVRAARLSQRRLDRLLAQHRIRRFGGEQLGQLLRHPALPMAAGAAEAIAEQVLLWLPRLKLLHQQRRDLDRRIEALLDELSVPEPTREHRDVEILRSVPGVGRVVTAAVLSEATGAIAERNYPLLRALAGTAPVTHQSGKTRLVSMRYACNRRLRDALYHAACIHMLHDERARQHYQRLRQRGHSHGRAARGLADRLLAMLIAMLQNQTLYDPNRRKLQAA

SEQ ID NO: 262104 - protein, 385 aa, unidentified
MDRATLSRDSANTLHCALELSKKSWLLAIQFPDREQPSLYSIEGGDAEKLMAKLTAARDRWAKVSGAVPVITLCYEVGHDAFWLARFLKARGVECLVIDPGSLQVNRRGRRVKTDRIDAKVLLRSLIAWCRGERHVWSLVRIPSIDEEDLRRSHRERGRLVRERTAHINRIKGLLFGQGIRGINVKSKYKTLAVDKLVTGDGHCLPPRLACEVARELQRLAMVQEQIAEIERERDTAPTPCEATERKRHLLLQLKSIGPAISALLSREVYYRQFANRRQVGSFLGLTPSPYNSGEQEHCQGISRAGSGHVRAVMIETAWLWIRHQPKSALTRWFVERTAGQSKRMRKIMIVAVARKLAIALWRYVELGLVPQGAILNPPMTGNAR

SEQ ID NO: 262105 - protein, 371 aa, unidentified
MGAYYVGLDVHSRETMFVIQDEEGTLVGRGAVPTTPEGLARLCTDYALPAGTAVGLETGTSAFYVARAMAALHLMPIVVDAHEVRRKAHRPTQKSDRRDAFEVCDGVRCGLYRAVVHIPSPAISTLRTALSRRRHFVRIQTAEVNATKRLLRGAGWGVGTRTSLRSATGWDRLLAALATMPELEGHVRLHFAVWQEAGKQVRAVDHLLADLARPLREDMRRLEAVPGVGPVVALTALAVFADVHRFASAKHVASYAGLVPSTYQSGTCDRHGHITKRGSAELRTMLCEAAHHARRPAHPLYPYFMKLCARRGYKIAIVAVAHRLCRLLYALLRDGTDFQPIRLGVEEGPFTQTITRRFRLTPKPAGRLVSG

SEQ ID NO: 262106 - protein, 351 aa, unidentified
MMIIGVDYHPSFQQIAFLMKETGEYDEQQLNHSEGEAERFYRDLHQRGIRVRVGMEATGFSRWFERLLAELGFELWIGDPAEIQAKRVKKRKTDREDARLLLKLMLEDRFPRIWVPSPENRDLRQLLWHRHRLVQMRTRIMNQLQALAMNEGKQWKSKLWSAPGRAAFEKLGLAPWASRRRKELLELLDRLDPSIEELTVAVVQEARKRPDVLRLMTHPGVGPITALAYVLIIGTPERFHCGKQIGTYAGMIPSEESSAGKQRLGHISKQGSSLLRFLLVEAAQAAARSNPEWRRRYIHLAMRRHRSIAKVAMGRRLGVRLYWMWRNGCDYSPSLEFGSHVGQLGTGHGGK

SEQ ID NO: 262107 - protein, 339 aa, unidentified
MSLYAAIDLHSNNCVAAVMDEEGRIIFSKRVPNRPAHAIVEALMPFRDEVQAVAVESTPNWYWLERELRQSKFRVQLVNTAAVEQYTGLKHGDDFTDCRHLADLMRMKRLPTAYICPEEQRAVRDLARKRQNLVQHRTSHLLSAHNLLARDLGEHVTGKELKALARRTVNAMALLPEQKLALKATLTVVGCLTNQIESLERELLRRVRPLPGFKSLKTISGIGDILAWTIALETGEIDRFESAGHYASYARLVDTKRISNGKLKGRGNAKCGNHYLSWAFGEAAHFAIRYDPLIKRWYQRKTAKTKAVVALKAVAHKLARAAFHVMKDGSEFDASRAFS

SEQ ID NO: 262108 - protein, 356 aa, unidentified
MTNMTQDPSVRVTIGVDTHRDVHVAVALDHLGRRLGELAVPTNRAGYADLLSWAEAQGDIEAFGIEGTGSYGSGLSRWLRDRDFAVIEVSRPNRQARRRRGKSDPADAEAAARAVLSGEASGTPKSADDKVEMIRMFRVARSGAHKARTAAINALRGLVVTAPVELAEELKGLSVDDLVGRATRFRPGPLVSTTAGAKAAMASLARRIKALDDEIAALTQALEPLVAEACPALVALYGVGTDSAGALLVSAGDNSGRLSSERAAAKLWGVAPMEASSGMVTRHRLNRGGDRQANAALYRIVFVRMRHHQATRDYVERRIKEGKSKREIMRCLKRYVVREVFAALTATEERSPELVA

SEQ ID NO: 262109 - protein, 483 aa, unidentified
MAGVRRYFADRPQDESWFHSHEEHKPNTRLRSEGIGNGHAYSAAGVARRLTRYDLQPGSAKPKTTMKDDTYAALVALDWGDKTHAFARQIAGADGIERGAIEATPEALHAWLEQLGKTCGGQPVALAVEAGRNALLYALLEHPWLTVYPVHPATSARFRTAFTPSGAKDDGPDAVVILTLLRVHRTQLQPLILDTPATRELAALVVARRGAVDHRTRTANQLGSVLKGYFPQALTLAGDDLTQPQALAFLRRFPALSAVQKVRPATLGAFYREHNVRSAERIAGRLQLAAQARPLLQDRAVIAPAMLEVALLVDLLEVHAHHIALLEARIAEAFAAHPRAELFAALPGAGPALAPRLLVAFGDQPGRYPNAASLQKYAGVAPVREKSGQKSWTHWRWAAPTFLRQSFVEWAGQSVVHCAWAHAYYHQQRRAGKAHHAVLRALAFKWIRILWRCWHEQIPYDEQRYLSALHCHGSSLAVLLPKT

SEQ ID NO: 262110 - protein, 338 aa, unidentified
MYYTGIDLHKFTSYLTTVDSSGAIVKQENLKNVAHNFIQYFSSIPGEHKTTVESTMTWYWLNDLLTSINIPLVLAHAKYVKAIAYAKVKTDKVDSHTLAQLLRMNFIPVAYKISNDKRLLRDALRARLKIVQRHTSVTNSMQLLLAKYNYDSPTELSGIPEFQYEQLSEVEQLLSEQMLDLEKQLYPSLIPDDDIQRLLWIPGIGKMNAFTILLEVDNINRFPDVKNFFSYCRLVPSARNSGGKSKQRSSKDGNKYLKVAFSDAAVHAVHYYPVIRKHNNSLIRKKNKQIAKTIIAKEIAEIVYHVLKNKTDFNNKFKGKELEHKKSLQWPRVVSPYA

SEQ ID NO: 262111 - protein, 323 aa, unidentified
MDYIIGCDAHKHYSQFAVLEEDHTRCKQVRVEHERGAIREFLSEYPEGTPVALESIGNWYWIVEEIEQAGCQALLAHPAKAKAMMGNVNKTDKLDARGLAMLLRNGTLPTVWIAPSEVRDERELPRTQMALCKIRVALKNRVHATLAKYNLSLPTESDIFAPKWSSQLNQVIEQLPVETKNCLQQEMQLLKTVPGVGDILAIVIGTEIGLIERFASAEQLASYAGTVPAVKSSGGKVRYGHTPKESNHYLKWAFVEAANGPAQYHKHPHWQHRHVTRLYERVRLRKGHSVAVARHLAEATFWILNKKEPYREPTRQKVLPRQA

SEQ ID NO: 262112 - protein, 328 aa, unidentified
MHFIGNDVSKLTLDLACFDQRNKAWSKDCKLDNNPKGWSTLIQWAEKQTQAPREDICIVMEATGVYHLKAAAYLSREGLNVIIVNPQQASQYAKSQNQQNKSDKLDARSLQEYGSQLKKYHLFVPDSPEISQLKALLSRIRQLGKDLQRERNRLEKCDFQEGSSWARTSIKRLIGHITSEQKLTQQQIDHLIKKNHTLKHNQKLLCSIKGIGKLTSQWLLPLLSTQRFNNARETAAFLGLVPCHKTSGTSLKTRGRLSGRGDADLRARLYMPAVCAITHDPTMKAFYQQLRAKGKPSKVALTAVMRKLIHVCYGVIKHQTPYIENYAA

SEQ ID NO: 262113 - protein, 345 aa, unidentified
MNIIRVGVDIAKSVFHVHGVDRHGQTRWQGKYSRSKWLDALSRKVPAGAEIGMEACASSHHWARELQKRGYHVRLIAAQFVKPYVKSNKNDRVDAEAICEAMSRPNMRFVAPKTVAQQDIQAAHRIREELVGQRTAKANQIRGLVGEYGIVAPVGIQQLRRALPGWLEDAENELTDSFRILLNGLAEDLRHLDDRITALDDRITESVRQDPVAKRLMTLRGVGPLTASALAGALGDGKAFRKGRDFAASLGLTPRQHSTGGRDRLLGISKRGDSYLRKLLVHGARAVLRHVESKDDGLSHWLKALAARKHVNVATVALANKTARIAWALVHNEEAYNEGLSAAGV

SEQ ID NO: 262114 - protein, 387 aa, unidentified
MGEVAKPKTQNGDKHMKKLDKYVGLDVHKDTRVIAVADGGRSGEVRLYGEISADLGALEKALRKLGGAGVTLHVVYEAGPTGFVIYRRLRQLGIDCIVVAPTKTPQEKGPRQKTDRRDALLLARLHRAGELTAIHVPDAVDESVRDLTRARADAVHDLTRAKQRLKSFLLRQGYRYTGKANWSEAHQRYLRELVLPLPALKAVLEESLLAVEQATQRVVRLEELLAVQVPLWRMFPAVEALMTLRGFQLTAAAVLVAELGDVRRFAHPRHLMAFLGLIPREKSTGNSRRLGAITKAGNAHARWILVEAVQHAFLPPKVSAALALRQQGQPAAYRALSWKVQVRLHKRGWHLLHRGVMKAKVTVALARELSGFVWDLLRQVPPPAPTG

SEQ ID NO: 262115 - protein, 351 aa, unidentified
MNVFGEEANTITYVGVDVHERESQLALLDPSGSLLREKRVQTKNLETFIDSIPGEKHVAIESVGFVYPIYDRLVKLPNCHIAVANPSSVSLIARSKLKHDRADAKVLGELLRTNFLPLSYLPDEKTREQRFLVSDRVKYGLRRAELKGSIRWLLKRRGIAEERKMFSVGGRKKLRELSLRELDMRLDELALVESMVERLDEQIAQTVALEDEKAKLLDTIPGVAPYTALFLSSHIGDVNRFPDSKHMCADIGLVPSLHQSGDVLITGHITKTGNKWLRRNMVECARVAVRRDPELKGFYMRIRLKRGEKKALVAVARKLVSYAYWMLKRNVTYEELSPGKKHEAVEEEEDV

SEQ ID NO: 262116 - protein, 343 aa, unidentified
MKLHVLGIDLGKTVFHLVGLDSTGKVVIRKRCSRRQLLAFTANLQVDLIGMESCSGSHFLGRALREQGHDVRLMPAQHVKPYVQTNKTDYIDAEAVGEAVQRPRMRFVPIKSEEQLDLQSLHWVRERWVMRRTAVVNQIRSLLLERGFTLPKGRCHVEEALPRILEDGALPLSGTFRLLLAQLKLEVEQLSARIDQLDVVILRRAKEDDCCQRLTAIPGVGPVTATALIAAVGNGSAFKRGRDLAAWMGMVPGEHSSGGKQTLLGISKRGNCYLRRLFVQGARSVLQQRHRQAPGLSCWLAQLLARKHQNVVVVALANKVVRMAWAVLCKNESYRAPVLAIST

SEQ ID NO: 262117 - protein, 349 aa, unidentified
MRGPSMGEVSTIGLDIAKSVFQVHGVDADGAVVIRKRISRAKVLEFFATLPSCLVGVEACPSAHHWSRKLQALGHMVRLMPPSYVKAYLKRSKNDANDAAAICEAVTRPSMRFVPTKSDQQQSGLMLHRGRQLLVRQRTMLSNAIRGHMAELGIISAKGRNGTAELLEIIANADDDRIPAVARLSLDALARQYDNTTAEIRAFEKHIHGWHRSCEESRRLEEIPGVGPIVATALVAEVGDWKAFSSGRNLAAWIGLVPKQHSTGGKDRLGGISKQGNRYLRWLLIAGAMAVIRYARQHGTKRLWLARIMERRPIKVAAVALANKIARKAWAMMVRGERCKEPRLLSEVA

SEQ ID NO: 262118 - protein, 323 aa, unidentified
MAKRITICAGIDTGKDKLDVALDGSSEELQIKNTAEGHQELVEWLKHHRVKGVGIEASGGYEQAAVAELRRKRFVVIVFQPIQVRAYATFHLQRAKNDKMDAALIAACTAAVKKIHPAPDPRLQPFAVHLTMIDQIKEDIAKLKNRLESCRNERIQKFWKEQIALLAKHRRAEFKALVAAIRKHRDLAARLDLIYSVGGSGLPTAVAILIRMPEIGQITREQAAALTGLAPYDDDSGKHVGARRIDGGRQRLRQALYTAALPASFRWNPQLMALYSRLIAAGKGHKRALVACARKLIVIINAVVARGTPWVAEPPKTATVPAT

SEQ ID NO: 262119 - protein, 326 aa, unidentified
MTCKVGVDISKMKLDVAWLRADGKYRSKVFPNNAAGFADLLGWLDSHLPQGKAMAHVCMEATGTYHEALALFLHDHAVALSVVNPLQVKRFMELERVRNKTDQGDAKALARFCDRTGPALWQAPSAGVRSLQALVGRLDTLLELRQGELNRLEVAHESVKPSLIAVIASLDAGIKEVRAQIRKTIDDDPDLQQRGELLASIPGLGDRTIPQLLAYIGRPERFASVKALIAYASLTPMIRQSGTSLDKRRGTHPQGHRELRKALYFPAMVAGKYNPLVAQFWQRLKAQNKPGKLIVVACMHKLLAIAYGVLRSGKPFDANYGKTACT

SEQ ID NO: 262120 - protein, 308 aa, unidentified
MGCIGAGIDVSKDTLDVKVDKHGPQLHTSNDSAGWQQVIAWLTPFAPQQVVLEATGGYELQALKALYAAGLPMVRVNPRQARDFARSTGQLAKTDRLDACVLAHMASVLKLNRYQSPNEETQFLHACHRRRQQVVQMLAAEKQRRRLTEQPAMRLMLERNIQRLEADRDELDMHISEQLKGSIQAKVASAIKGVGPVVLSTLVCDMPELGHLNRKAIAKLYGVAPLAKDSGRSHGRRITWGGRANPRAMIYMAALSAVRYDPVLKTFYEGLVGRGKPKKLALVAAMRKLITILNARMREAFQASAQIT

SEQ ID NO: 262121 - protein, 421 aa, unidentified
MKPQAPEAFAAFVGLDWADAKHDICLQVAGSTHRELLRLAHRPEVIDAWVCTLRTRFNGQPLAVCLELNKGPIVSALQNYDFLVLFPVHPLTVAKYREAFTPSRAKDDPTDAELQVEILLKHRDKLTPLVPQSPTMRALAQLVEHRRRLVGDKVRLTHRLTSALKNSFPHVLQWFQDKDTAIFCDFLSRWPTLKSVQLARRATLERFFRAHHVRSADVITTRIEAIKNAVALTTDEGVIAPNTLLVHALVAQLRVTLQAIADFDTAIAQRAQAHPDFPLFDALPGAGAVFAPRLLVAFGEQRERFTFAEELQKYAGIAPVTERSGKKSWVHWRWQCPTFLRQTFVEWAAESIRHSFWAQVYYQQQRDKGKAHQAAVRALAFKWIRILYRCWQERLPYDESTYLQALHRRGSSLIQNLAKAS

SEQ ID NO: 262122 - protein, 370 aa, unidentified
MGNPTPLFVGLDVHKDSIAVAHARGGESAPPVFVGEIGTRQADVQRLIARLQGKAAELRFVYEAGPSGYGLYRYLTGKGLACDVVAPSLIPRRPGDKVKTDRRDAVELARLSRSGDLTAVYVPTVEDEAIRDLCRARDAARVTLKAAKLRLKAFLLRQGLHYVGRADWNAAHKRFLAKVVCPTPAQQIVFQEGVRAVDEQVDRLQRIEDELRALAPTWRLAPVVEALQALRGVQWLVAITVVAELGDLSRFDNPRQLAAFVGLVPSEYSSGGSRRQGGITKAGNSRARRVLVEAAWAYRYPAKVSAHIQTRIDRLPKTLQDIGWKAQVRLCKRYRRLVARGKHPNVVVTAIARELIAFMWAIARAMPTQE

SEQ ID NO: 262123 - protein, 367 aa, unidentified
MQKPTIFVGLDVHQDLIVAAPIREGSDCAHEVRRFGSDYAPLRKYLKKLQSEGEIATCYEAGACGYGLHRRLEADGVLNYVIAPSLIPKKPGDRIKTDKRDAQKLAKNLKNGDLTPVAVPTEEEERVRGLVRCRDGFGLDVGQVKNQILKFCQFKGVKQPAGKKWSKHHRAWLRSVELAEIDRRILNRHLDLLKYLEAELEQLDAEIDEIAKQPQYSKRVDALRVLRGIDTLSAMILVVEIGDIRRFAHPLPLMAYTGLVPSLHASGGPGQGGPITRTGNRRLRRILVESAWHARHLPTLGGAVGRRLQEVNADAATRIFSKKVQTRLHKKFWKLSVKSNKLAVTAVARELVGFVWAALRKAEGLEA

SEQ ID NO: 262124 - protein, 343 aa, unidentified
MQAVTTIGLDIAKSVFQIHGVDAAGNVIVRRQLKRRYVLPFFQKLPPCLVGIEACASSHHWSRELQALGHTVRLMPPAYVKPYVKRQKNDAADAEAICEAVTRANMRFVATKTPEQQSCLMLHRTRHLFIRQQTSVINAIRAHLAELGIVAPVGRNGVEELLGVVADPSDKRVPEIARACLAALGAQLRVLKAQILEFDRMINAWHRSNETSKRLDEIPGVGPALATALVASVADPKAFRSGRNFSAWIGLVPKQHSSGGKDKLGSISKQGDRYLRSLFTAGALAVIRYAKIHGTKHRPWLTALLARRPTKVAAIALANKIARMAWAMMAKGERYKEPVALAA

SEQ ID NO: 262125 - protein, 365 aa, unidentified
MELSRATWLVTCLLPERDRISKYSTPGGDGGALLGLLERMRVRAQQLTGRPVKIVVIQEAGLDGFWVHRLLEANGIESHVVDPASIAVPRRRRRAKTDAIDGETLLRTLLAWTRGEPRVCAMVVPPTPEEEEEDRRRVCRERAILLQERIRHTNRIKGLLAGQGITDFNPLHRDRRQLLDAARTGDGRPLPHQLKAEILREIELIELLLRQIADVEAAREVLAGPKAAKTPSPVVLLEQLKGIGPEIASVLYLEGLFRRFGNRRQLAAYAGLAPTPWRSGTVDQEQGISKAGNPRLRSTMIELAWLWQRHQPASTLSRWFHTRVGNERGRIRRISIVALARKLLIAVWRYVTQGEVPEGAVLKAA

SEQ ID NO: 262126 - protein, 341 aa, unidentified
MMLIGIDPHKGSHTAVVVDRDERVVDEIRVRASSDQIGELREWASGYDDRCWAVESARGMGYLVSQQLVAAGERVVDVPAMLASRVRLLGSGKSQKSDPNDARSVAIAALRHSGLTLVGRDDHARVLALLAKRHRDVARFKNKVACRLHALLMELAPGGLASEMTVNKAISLLEQVDVTDQVTRQRVEIATELIDDIGRLEAQMKASKKRIRVAVAASGTTLCDIRGIGPIGAAIILGSVGDIGRFPTAGHFASYNATAPIEASSGDRRRHRLNPRGNRKLNHALHIAAVTQLRYPSEGRDYYQKKLAEGKTTKEAIRALKRRISDVVYRRLLADARRSIN

SEQ ID NO: 262127 - protein, 379 aa, unidentified
MSSSPAASKIIYLGLDVHQDSVTIAVLPTDAPAPTRIDKYPNDFAKLRRVFERCAKDGELRACYEASGAGYVLQRAMKEWGYHCDVIAPSLIPVKPGVQRKHDKYDAGQLARLYRAGELTVIRIPSESEERVRDVVRCRETLQREVIKSRHYILKFLARRGYIYRDGVNWRAPHYVWLRQLAGASSPLESDDRLVLSEYVALLEYKLSRRDALDQHIEALALTPAYASAVATLQCFRGLQVHSAMVLATELVDWRRFANPRQLMAYLGFVPREHSSGPRERRGSITKAGNSHCRHVLVQAAWAYRLHPKIGPALAVRQRGQPAAVTLHAWKAQQRLYTMYHRISLRRGPQIAVVAVARELIGFLWAVMRDLDVPTSAAA

SEQ ID NO: 262128 - protein, 318 aa, unidentified
MTTQEEVYIGIDVGKSWLDVAIWGEDNVWRVANDAEGIGKVMERMTELEPQIIAVEATGGYEQMAVQTMLLNNLPVAVINPTRVRALSKATGKLAKTDVIDARLIAEYACKVRPEALAPKEASEIRLKALVTRREQLVEMCTMEQNRLGTAPSCTKVDIREHIEWIKERIVEIELQVDELIDSLPEWKEQADRLDSIPGVGRITAVSILAVLPELGQIDRQKIAALAGLAPFNQDSGKKRGKRRIFGGRKGVRRVLYMACLSAIKCNPIIKSLYTRLTEQKGKVFKVAITACMRKMLTIMNAMTRDRLDWSPPVSIIH

SEQ ID NO: 262129 - protein, 348 aa, unidentified
MQITTIGLDLAKSTFQVHAVDAAGRVVLIKALRRGQLQAYFSKLPACLVGMEACATAHHWARELMKLGHDVRLMPPAYVKPYVRRGKNDAADAAAICEAVTRPSMRFVPVKTVEQQAALMAHRSRDLLIRQRTQLLNALRAHLAELGLVAPQGREGIAKLVGIVRTGGTDALPAAVRAALMPLIGQLESLQLQIAALDRAIHTQHDEASQRLETIPGIGIIGATALAATVTDPAAFKSGRDLAAWIGLVPRQNSSGGKEKLGSISKQGDRYLRKLLVVGAAAVLRHARAHPDKHPWLIQLLARRPAKVAVVALANKMARIAWAVLSRGETYRTPTLAAREAKGLAMGA

SEQ ID NO: 262130 - protein, 337 aa, unidentified
MTEVHILAIDLAKRSFQVCATAAGGAVLFNRMVSRAKLETVLREQTPCIVAMEACATSHFWGRFAQGLGHEVRLIPPIYVKPFVKRQKNDAADAAAIAEAALRPNLHYVAVKSAEHQARAVAFRTHQSFVGQRTQLINAMRGHLGEFGLVVAQGPTGLKTVAGMIDDDATELPDAVRDIIRLYLDQIAVLTQKIDELHFKLRAAIKVDDSMRRLCTVPGVGPVTAAAIMAFAPDLRTFASGRNFAAWLGLVPRQRSTGGKTKLGGVSKMGQADIRKLLIVGAMSRIRWIVRKGVLPDNWLGRVLGRKPRMVAAVALANKMARMIWAMMTREENYRMA

SEQ ID NO: 262131 - protein, 370 aa, unidentified
MSNATTFVGLDVHARSVKACAFVPETGETIRKSFGYEPGEIASWVSSLPQPARCVYESGVTGFHLCRELNAMGAACVIGAVSKMHKPAADRGRKTDRRDAQFLAVQLALGVVTGVHVPDAECEGARDLARALADARDDAVRAKQRLSKFLLRHGLVYDERNAAGQRRNRWTGDFWAWVGRIDLGDAAAMATLDHYCERVREADAAKAALEAKVKSLAQQPRWKPTCDALKCLKGIDAVTAASIACEADGFARFATASGFAAWVGLVPSEHSSGESRFRGGITKAGNKHLRKLLVEAAWHYKGASRSPKDLAKGQVVDAATRRHANAGVRRLVDRRRSMDDAGKQSSVANVAVARELACWCWAVGRMAEGA

SEQ ID NO: 262132 - protein, 343 aa, unidentified
MHIATIGIDLGKTTFHLVALDDYGKVVIKKKFSRKQLLTYTANLQSALVGIEACSGAHFMGTALRDQGHQVRLIPAQFVKPFRKSNKNDFLDAEAIAEAVGRKNMRFVPIKTDDQLDLQALHRVRDRLVHRRTALINQIRGFLLERGITFAKGPASLRNPMPIILEDADQNLTPCMRKLLDHLWREWKQLDSDIKDTSEEIDRVAEGDQACQRLRQIPGVGPLVSTATVAAIGNGAAFRKGRDFAAWLGLVPRQHTTGGKAKLLGISKRGNIYLRRMFIHGARAVLLRVKYDTGGLGQWVHQLEARAPRNKVIVAIANKLARIAWAVLAKGENYRAAAAIAPA

SEQ ID NO: 262133 - protein, 378 aa, unidentified
MEWSAPLYKRLQKSHDVSNKQNIKIKERQTVNNNNSKGKVTVLGIDLAKNSFQLHGVDEQGNRVLKKKLTRKQLVAFIAQLPPCLIGLEACGGAHHWVRVFSEFGHTVKMIAPQFVKPYVKSNKNDAVDAEAICEAVQRPSMRFVPSKSIEQQDIQSVHRVRSLLVGRRTAQANQIRGLLMEYGIIIPQGINQLRKAIPDILEDAENSLSSYFRELLRELYEEIVHFDERIETIELKLKVISEQNEDCKRLLTIPGIGLLTATALIAAIGDISVFKSGRELAAWIGLVPRQHSTGGKPTLLGISKRGDSYLRTLLIQIHGGRSVVKVAHKHQDKRNQWIGEIKQRRGENISNVAVANKNARIAWALLTKKQDYCVTGA

SEQ ID NO: 262134 - protein, 341 aa, unidentified
MNDTTIGLDIAKSVFQVHGEDCNGKVVVQKRLRRSQVVAWFSQLPRSLIGIEACGTAHYWARTLRELGHEVRLIPAAYVKPFVRRNKNDARDAAAICAALNRPDMRFVAIKSVEQQASRGLERSRDLLVKQRTQLMNCTRSLLAELGIIAAQGRRGFAELVARVNDGDAAIPPVLLTALLPLIRQIEGLHTTIAALEDRIIAAARENPVMRRLAGIPGIGGLTAHAIVTAVGDGRQFGSARDFAAWCGLTPQEHASAAKRHDKGISRQGDIRLRKLLALGASTVMRNARSRTDRATAWQRGILARRPVKVAVLAQAAKNARIAWALLVSGEIYRTATPTAA

SEQ ID NO: 262135 - protein, 362 aa, unidentified
MRIIGCDLHAHQQTLVMLDTGTGEVVTQTLAHEGDSVREFYSALPGPVRVGIEATGTMKWFLHLMEELGIDCQVGHPATIRAAEPRRQKHDQRDAELLLKLLVENRFPSIWQPSKELLDLRGLLLHRHQWVGLRTRVQNALQAIALANGLRRGSSLWSEDGQQAIASLPLATHTAHRRSELQAMYARFEAEIEQLNQQVLEQAGQRPTAGLLMTHPGVGPITALATDVFLGDPKRFRDGKALASYIGIIPRENSSGGRQRLGGLSKQGNPLLRFLWCEAAVHAVRRDPELQRFYRRKLVQKGLGKARVATARKLGIRLWIMLRDQIDYQEFCSRGQMQQKSGDAYAGMPGRRYGAKSHRLID

SEQ ID NO: 262136 - protein, 408 aa, unidentified
MEVLHPRCAGLDVHKDSVVAAVRCVSPPTHHEVRSFATTTQGLLALVDWLTSHRCTHVAMEATGVYWKPVWHVLEGQVELVLANAQHIRNVPGRKTDVADAAWIADLLAHGLIRSSFVPPAAIQELRDLTRTRKQLVREISKHSLRIQKVLEDANLKLGSVLSDVLGQSGRAMLAAIIAGEEDPERLAALALGTARRKQAALVEALRGRITPHHRAMLQLHLGLVDALDAALAEIDGRVGKALEPIRASARLLTTMPGVSDLVANVIVAEIGIDMSRFPTSGHLISWAGLCPRNDESAGKRRSTRVRKGAPWLKTTLVTSAWAGVRVKDSYLHAQFLRIKARRGAKKAILAVAASMLTAAYFMLRDGVEYKDLGVDHFDRRDRSKVIHRLVRRLRDLGCQVAITPEAA

SEQ ID NO: 262137 - protein, 459 aa, unidentified
MRKKAQNQTKRKQKVSINQVWPLINAQAAGVDLGSREHWVAVPPDRDPQPVRRFGTCTADLAALADWLKVCQVTSVAMEATGVYWIPLFQLLERRGFAVLLVNARQIKNVAGRKSDVLDCQWIQRLHTYGLLGGSFRPADAYCVVRSYLRYRDELVGARSTQIQHMQKALQQMNVQLTQVLSNINGLSGQAIIAAILQGERNPLTLAGLVDKRVRASRSEVAKALVGDYRAEHLFQLKVAADLYQIYEAKIAACDAALTAELARLPDRVPATAQPLPAQTGHKHVAEDLRWELYRKLGVDLTAVEGFGVLVALTVLSEVGPDLSRFKTEKHFTSWLGLCPDNRISGGKVLSCHTRRVVNRLTDVLRLAATTLERSPTALGAYYRRMKAKLGGAAGVTATAHKLARILYALLTKGEAYVRQGLEDYERKHRERKLKHLQSTADALGFQLVEIQKVANPVS

SEQ ID NO: 262138 - protein, 334 aa, unidentified
MEQVTTVGIDLAKRVFALHGVDGAGRVVLRRTVKRDELVELVAGLSPCLIGMEAGSGAHEWARRFQAFGHTVRLMAAKFVTPYRRNGKNDGNDAEAICEAVGRPGMRFVPIKSAEQQAVLAVHRVRQGFVEERTSTINRIRGLLAEFGVVLPLRSESIRRHAREAAETLPDIARRPIQDLCAHLRELDARVLAYDREIERLARQSEAARRLMKIRGVGPLSALAIVATVGAARDFRSGRQFAAWLGLTPRQHSSGGKSRLGHITKRGDAYLRTLLVLGARSVLNTAMRHKDRISRWVLALQTRRGYHRALIAIANKNARIAWALLSRNQELRTA

SEQ ID NO: 262139 - protein, 412 aa, unidentified
MEVMYPCCCGLDVHKKSITACVLWAEVKGKSRKEKKRFGTFTHDLLQLADWLEQCGVTHVAMESTGVYWKPVWNILAEQFEVLLVNAQHIKAVPGRKTDQKDSEWIADLLQHGLLRGSFVPPQPIRELRDLTRYRVSLVQEINRIANRIQKVLEDANIKLASVATDAWGASGRAILQAMLAGEQDAARLAEMSKGLLRNKIPELKLALEGRMTEHHRFLLRQLFEHLRFTESKLSEIEQEIDKRMRPFEDKVTRLCTIPGVDRVTAWGMLAEIGMNMNQFPSSGHLASWACLCPGSFESAGKRLSGKMRKGNVSLRRCLAQAAWAISMMKNNYLSALYRRIAARRGAKRAIMAVAHALLVIAYHMLKRKEDYRELGADHFDRIDVNRIRRSLVGRLERLGHKVTLEPLTQTA

SEQ ID NO: 262140 - protein, 341 aa, unidentified
MTEVSTIGLDIAKRVFQAHGADASGAAVFSKKLTRVKLLGFFASQPRCVVAIEACGGAHYWGREIGRLGHTVRLIPPAYVKPFVKRHKNDAADAEAICEAAQRPSMRFVAVKEEEQQASAIVFRARDLLVRQRTQIINALRGHLMEYGWVVPQGPSHMAVLIEGIEASSCPLPESARTALKVLTDSLRVLDEQIAGLDGEIARRSREDAVARRLMTIPGIGPITATAIVALAPPAGMFRKGRDFAAWLGLAPLQKSTGGKQKLGAISKMGERTLRRLLIIGASAVVLQAGRRGAPKGSWLAQMMARKPRMLVTVALANKMARIVLALLTTGGIYRAPTAAA

SEQ ID NO: 262141 - protein, 358 aa, unidentified
MSKRTTKSPRCKGVVVTRKDRVFVGLDVHKKSYHAAVRVNGVEVQTTVLAPKAAAVLAFLEPYRSARLHVVYEAGPTGFGLVRALRAAQIPAEVIAPSKTPQTPGRENKTDRLDCRHLALYDEKGMLRRVAVPTPQEEADRQVIRLRDQVVKARRCVKQQIKSFLLQHGLAEPPGLKNWSKASVRALETMPLVPALRFCLDVMLAELAHRNESLQQVNRAVENLGQEPQHARAVAPLCEHSGVGVITAMQFRTELFRPERFANARQVAAYVGLAPRVSQSGGRCRTGPLLKAGRGRLRALLVEAAWVWIREDPEAAAVYRRLLRNTGQPNKAITGMARRLAIRLWRLLVPPEARGQAA

SEQ ID NO: 262142 - protein, 349 aa, unidentified
MRYLGVDLHKTNFVVCFLASDETTHTESYPLTKAGINRFITELEAEDEVAVEVTANIYYFYDQIRPHVARVVLVDTYGFAVIAKSKKKTDKADASALARFLKLDYLPSVSMPSEKVRQLRHLLQARETLVGMRTKLKNMAHGALTRNGIALSRSAFASRLSRARLAERAELAPADALIMQAALRQIEELDREVEALGTEIVRVGKGLAGVKRLLQVHGMNLLSAISLLAEIGDIALFETSKQLTAYAGLATSTRQSNETTRHGGITKRGRKRLRTVAISAVLSMVNRTRTPLMEFYQKKKREKGSGKAICATARKLLTIIFVMLKKELDYWYLEDRLYNRKLRALDAAA

SEQ ID NO: 262143 - protein, 356 aa, unidentified
MSRDIKYIGMDVHQEGIVIAVLNGSGKLVMETILETKASSLVQFLQGLRGELHVTWEEGTWAAWLYDLLQPQVEQVLVCNPRRNALLKEGNKSDKVDARKLAELLRTGMLRPVYHGENGLRTLRELGRSYQTISKDLTRVMNRLKALYRGWGIACAGTKVYAPRYREEWLSKIAQAGVRRRAELLYQQLDGLQALRRSLRPEFLAESRKHKATKLLVQIPCIGPIRAARLIALMQTPYRFRSKRQLWTYSGLGIETHDRAQYRYVGGQLQRSKKPQQLRGLNRNHNHEMKEIFKSTATRASCSKGPFHDFYAALLAKGMKPEMARLTLARKIAAITLTLWKKGGRFDAEQLKTQAA

SEQ ID NO: 262144 - protein, 370 aa, unidentified
MKKSIMYVGLDVHKNSIEVAFADAGRHSEVRNYGKIDGNLTALGKVIRKLEAKGSELHFAYEAGPCGYEIYRHLSNNGYDCIVVAPSMIPRQSGNRIKTDRRDAQMLARLHRAGELTSIYVPALEDEAMRDLTRAREDARAVERKAKQRILAFLLRHGYRYSGKTPWSRAHFRWIALLKMPHPAQQIVLQESLDALSECTERVNRLTEQIQSLLPQWRMFPVAQALQTLRGVSLIVSTTTIAELGDLTRFASPVELMSYLGLVPSEHSSGEQTKRGSITKTGNGHVRRVLVEAAWAYRLPARISTKLHLRQEGMPQNICAISWKAQLRLCNRYKRLLAKGKANQLIITAIARELCGFMWAIANEVETPTA

SEQ ID NO: 262145 - protein, 324 aa, unidentified
MTSAQVFVGIDVSKVRLDLALRPAGRFSAPNDEAGCAQILERLRAVSPTLVVLEATGGLEIPLTGVLAAAGVPVAVVNPRQVRDFAKATGQLAKTDALDAQVLAHFAEVVRPDPRPLPDEQTQRLAAILARRRQLIEMLTAEKNRLGSARTPVRTSLRAHITWLDRDVLRTNTELAEAIKASPVWRENDDLLRSAPGVGPVLTTTLLADLPELGTLSHKQIAALVGVAPLNRDSGQWRGKRSVWGGRAQVRAVLYMAALVATRFNPVIRAFYQRLLATGKAKKVALTACMHKLLTILNAMLKQRSPWRHTVEHGPKLVKVPVRA

SEQ ID NO: 262146 - protein, 341 aa, unidentified
MNHYAGIDVSLECSSVCVVDANGKILREAKVASEPTALIAWFRSSGIDLERIGLEAGPLSQWLFAALREAGLAVELLETRHVRKAFEAMPVKSDRNDARGIAQLMRLGWFRPVHCKSMSAQETRTLLTARKLVQSKLRDVENSLRGILRGFGLKVGKTTEREFAGRIEELVAGHPHLQVIAKALLSVRTVLRSEFAAFEKQVRKMARSDMRTRLLMSTPAVGPIVALTYASAIDDPTRFKSSKQAGAHFGLTPKKYQSGETDYTGRISKIGDAGVRTALYEAAHVMLTRPVKGCSQLKSWAMRIARRAGMSKAKVALARRLAVILHRMLANGTPFNAAAAA

SEQ ID NO: 262147 - protein, 351 aa, unidentified
MNKVCRIGLDIAKSYFQAHGVDKYGNKVFNKKLKRADVLPFFANLPSSLIGLEACGSAHFWARELSQLDAGHTVRLISPRLVKPFVEVKNKNDANDAEAICEVVGRPSTRFVNVKTVEQQDLNAWHRIRDRKIRERTALANQIRALLYEQGITIPVGIANVRKQLPFIYENLDNALSLGARDYLSELYAEFVDCDAYATKYESRIKAFAKTNEVCKRLMKIPGVGPLTATAVFAHVGNAIQFKNGRAFAAYLGLTPKEHSSGGKQKLLGITKRGNSHIRCLLIQGARIVARFCLQKSNYQGEQRIRWVHSIVDRRGKHIAAVALANKTARIIWALLARGEEYNPEYYQEVA

SEQ ID NO: 262148 - protein, 415 aa, unidentified
MTEQRWYAGVDWASESHHVFLTDGAGRKTGEKIFKHSGEGLAEMAAWLLSASGAASSSQIYVAIETPHGPVVETLIERGFTTHALNPKQMDRFRDRFTLAGAKDDSRDAEVMASALRTDPPCFRLLAALDPTVIELREWSRIASELGAERIRLTNRLREQLWRYFPAMLELESDLSAPWLLELWELAPTPAKAARIREATVAKLLKRCRIRRFDAAHVLDVLRKPALQVAGGTVEAASAHIKTLVARIRLVNRQIQEAHGRLDALTARLIPAEEAGAGQQKQRDVEILASLPGVGRIVLATLLAEAWDGLKRRDYAALRSLTGVAPVTKKSGKSCIVIRRQACSNRLADAMYHWARVAIQFDTASKAKYATLRGRGHSHGRALRSVADRLLGVACAMLKKGALFNPSFNAQNAPC

SEQ ID NO: 262149 - protein, 407 aa, unidentified
MISIGIDIAKEKFTACALEQGSKIIWKPFDIHLNKTKIEEFLKKLDSLNEEVKIVMEATGKYHLPILYELKDKGYFVTVVNPLKMKQFCRVLNFRKAKNDNIDAIQIAEYGLMYWKELQEYKVDTEKFRILKELNRSYQHYMELRINQMNFIDQTISQTFPGIKKLIPHGSNDFSKDKLLDFLEIWWHKNLVLEKPEEKFIEDFKNWAKEKRYHPNADKAKSIYKLAEESISTQPSSSSYIKINIQEGIELIKHINQILHTILSQMIEIAEPLEEYQEAKKFSGISDKLAVQITAEFGDLSKFKNKKSLISFVGIDSPPYESGNFKADQRKITKRGNTILRKVGYQAMKCMMSAKNPENEIYLYMVKKEKDGKAKKICKFAGLNKFLRTYYAKVMMSKQENKCLKVA

SEQ ID NO: 262150 - protein, 364 aa, unidentified
MLYLGIDQHKRQLTVNLRSEDGTVILKRQVSTDWEKVRAFFADLAERARSGGGFLAILEVCGMNPWLLAMLQEYGCRETVVIQPTERSRQKTDDRDAGELSHLLWVHRQQFLEGRRPLGLRRVEPPTPQEADDRQLTALRARLTKKRTAVLNGLHKILRKHNLEQQCPTKKFQTQKVRRWLTEIELPALDRLEVNLLLPQWELSDAQLEVVEAKIAERAEADEQVKLLESVPGVGHYSAVAIASRIGNVDRFRRPDSLANYFGLTPSCRNSGEATQRLGSITKRGSKMVRYLLNQAVIKVLRFDGAMRAWFKRIKKRRGSKIARVAVMRRLATILWHMLKRKQKYRYESPIKKHQEFEAFEGAA

SEQ ID NO: 262151 - protein, 351 aa, unidentified
MKYYTSTTEFNCGIDLHARQMYVCVMDREGKILVHTNIAGNDFAYFLKRVQPYRHSLTVVCECIFNWYWMADACVAAGIRFVLAHALYLKAIHGGKNKNDRIDSEKLTHLLRTNLIPLAYAYPAAKRPVRALLRQRISYVWRRAELLARIEMGQLAEGFEPVKQSRPERDSWEERLMEAYTNPLHQFSAKMDLDMVRAYDRKIALLEQELLRITKRDSWKEFMLIQTVPGIGEALGLTILYEMDTADRFPTVKDFSSYCRLVKGSVASAGKIKGVRGGKLGNPYLRWAFGEAAVIAKRSHPLIHEYAKKLEVKHGKFVANAILANKLARAMYFMLKSGTGFDVERLIATSI

SEQ ID NO: 262152 - protein, 387 aa, unidentified
MAQVNDLSRSLTAFDLISTLVVVVEMSKASWLVSGAVPGVERQPLKKLEPDATALLRLIERWRNEALRAGRPISRIALAYEAGRDGFWLARWLIARGIEAHVIHSASVAVSRERKRAKTDRLDAAMLMRVFLGWLRGERGHCGMVAIPTMEEEDARRPSRERESLINERSRITNRMKSALARLGVRGFKPHLRKAPERLAGLRTAEGTGLPANIIEEFRRDMARLALVREQINSIEKTRAERLKRAPDTGPHAMVRLLARVIGIGIETADMLVREILSRKLRDRRAVARYAGLTGSPDESGLKRREKGLPKAGNARVRRGLIQLAWRFLTFQKDSALARWYRARTEGPSGARKTTMIVALARKLLIALWRLVTTGEVPDGVELRPAG

SEQ ID NO: 262153 - protein, 425 aa, unidentified
MSETRSEVRRWYAGVDWGSESHCVFLSDDQGRKVGQKFFKHSGEGLAEMASWLLKASGANEPGQVLVAIEVPHGPVVENLIERGFAVHAINPKQMDRFRDRFSMAGAKDDSRDAEVMSSCLRTDAKCFRRLVCAEPIFVELREWSRIAEELGVERNRLANRLREQLWRYFPALLQLEDDCSAEWLLDLLALASTPAKAVRLREAKLTQLLKQRRIRRLDAATILKSVQAPPPKLAAGTVEAASAHVLSILPRLQLVNRQIKEADRKIGALIDSLTANEDNQESEPGQKKQHDAAILASLPGVGRTVLATLLAEAWEPLQRRDYAALRSLAGVAPVTKQSGKSRFVVRRQACHDRLANALYHWARVAVQHDPRSRAKYAELRKRGCTHGRALRTVADRNLSVACAMLKTGTLFDPALQAEKNKKTV

SEQ ID NO: 262154 - protein, 351 aa, unidentified
MDHIGIDVHKRDSQIYILAEGGEIVEQRIRTEPERFAAVLGTRPRARIVIEASTDSEWVARCLEALGHEVIVADPNFAPMYATRTRKVKTDRRDARALAEACLLGAYRPAHRLSDPQRHVRGRLLVRDAVVRTRTRYISLIRALLRQHGYRVPSGSAESFIHRVRGLPLPGRLLSVVAPLLALMRPLNRQLSYSDERIEHLAVQDPRVPRLRSVPSVGPVTAATVIAAIDDAQRFRHAHQLEAYLGLVPREYSSGETQRRGPITKAGHSRTRWLLIQVAVSLLRRRPPQAEELRTWALRIAARRGKQVAVVALARRLAGILYALLRDGSVFEPQRVRHPRRPAAAAAPVGM

SEQ ID NO: 262155 - protein, 373 aa, unidentified
MTSITVDASHRKQKDEQDRRIVVGVDTHKYAHVAVALDNLGARVGAQHVAANREGYAQLEAWAASLGRVSVFGVEGTGSYGVGLASFLRRTGHRVVEVNRGDRRSRRSNGKSDTLDAEAAARSVLSGQAVAVPKSADGTAEMIRQIKIVRDTARKARTSAIVTLKAMIVTAPAELREQLQGLSDKVLIDRCASLRPGAMTSPTASSKHALRVLARRHQALDAEIRGHDSILDDLTRSCSPTLREGLGIGADTAAELLIVFGDNPARIRSEAAFAKLCGVSPIPAASGLTNRHRLSRAGHREANAALYRAVIVRMRFHQPTIDYVARRTTEGLSKKDVIRCLKRYLAREVYQRVMTDHHAQDPQPHPAPTSLDL

SEQ ID NO: 262156 - protein, 366 aa, unidentified
MSEIIRIGVDTSKSVFQLHGVDAAEQPVLRKKLRRRDLLAFFERLPATKVGMEACGGTYYWARELTALGHEVKLMPPQHVKPYVRRGKNDRNDADAICEAMSRPRMSFVAIKTADQQAAQMLMTTRERLVAYRTQLINTIRGHAAEFGLTAAKGPAHVEPLLARVAEDGRVPELAKELFAMHGQELSRLKIELREIEAKLKAWHRQNEMSRRLAEVDGIGPIGGCLLAIKAPDPQAFRCGRDFAAWMGLTPKDHSTAGKVRLGVITRAGDEALRRTLVVGATSVIKQVSKGNPSPWLRDLVARKPPKLAAVALANKVARIAWRLMVSGERYDAARAGIVSPIARIAPCSRRQGRCAPPAAVASGQP

SEQ ID NO: 262157 - protein, 349 aa, unidentified
MAKNEQVNGAVYGVDLGKTIFHIVGLDERGAVVQRLKFRREKLLAFFEQTEKALVGMEACPGSQWLARKLQAMGHRVRIIPAQFVRPYVKSNKNDTIDAEAIAEAVTRPTMRFTQVRSTEQVDLQALHRIRDQLVTSRTRLINQARAFCIEYGIAIRQGAGLFRRDLPLILDDEANDLTPAMRRMLRQIFDDVIRLDQRIAEVTREVEGLAARDDRARRLMSIPGIGPLAATALLAAIGDGRQFRRARDLAAWLGLVPREHSTGGKTTLLGISKRGNRYVRRLLIHGARSCVIHLDRGRDRLGGWIDALQGRMHLNKVTVALASKIARTAWAIITQPGAIYERQDPAVA

SEQ ID NO: 262158 - protein, 460 aa, unidentified
MKKRKRAQVSALEGLEPVQPNVAGIDVSSTQAHVCGPGREDGLERLALFRTTTNELLALARWLKQREVESVALESTGVYWIPVAEVLEGQGIEVLLVDSRPLRRVPGRKTDFSDAQWIQTLHSYGLLKGCFRPAGEVGQIRSLVRNKGVLVAEQGDWMRRMQKCLDQMNVRVHHAVADVSGATGMAILRAIVAGERDPRRLAALRDPRCRKSEEEIAEHLTGHWREDHLFSLGQALRIYDRLGESVEEYSREIERRLEQITPAERRGEKAPPPVQKEKARTLKRRKQTARRDLLFALAGCDLTMIDGVGVETAETVVSEYGLDFSRFATESEFVSHLRLSPKQAISGGKPLPQRKHSLTSSRTAKVLRMAAVSLKHSATALGAYFRRIASRKGLGVAIFACARKLAQLIYRMMRWGQGYVDIGVQAYEERFRAQQIRRIRSTAQQLGLVVVEGGGRGGLR

SEQ ID NO: 262159 - protein, 337 aa, unidentified
MYYIGLDIHKKTISYCVKDAAGCVHREGKIGSSRRELDAWIRTLPQPRMMAMEATIFTGWIYDYLLPHAEKLKVAHPLMLRAIAAAKKKNDKIDAAKIADCLRCDFLPECHIARTEIRDRRRVLRYRNLVVKQMVQMKNRVSGLLLETGVNYNKRQLHKVGYFGELMSTNAEINDAVRPLLNLSRGMIRRSSKLEYDLVSSLERDPLLRERLRRLRTVPGVGSITALTWALEIGDYTRFSSNRQAISYCGLCADEKSSADKVMRMPLSKQRNKHIQRVLVEAAKLAPRLSPELAMIRARELERGNPNRATLAVARKMVCYMLAVERRQQDFVQTAAA

SEQ ID NO: 262160 - protein, 339 aa, unidentified
MQVTTIGLDLAKNVFQVHGITKDDEVAFNRPLRRAQLLSFFSKLEPCLIGMEACSSAHHWGRELTELGHEVRLIPPIYVKPYVKRGKSDAIDAEAICEAVTRPTMRFVAIKTVEQQSLLSLHRARDLLVRQRTQLINGLRGMVAEFGVCIARGLARIIDFAENILAGEVLDLPDIANEVIHNMCEHLMALHGRIRWYENRLKQVAKEDARVRLLRTIPGVGAVTASAIIASIGDGHQFENGRAFAAWLGLTPSNKSSGGKEKLGRITKMGDQYLRSLLVVGMTSLVRQTKSHPERASKWLTSLLERKPARVATVAMANKTARIVWAVLTRNEPYTPHTA

SEQ ID NO: 262161 - protein, 354 aa, unidentified
MSQTLNAAIAVVGIDIGKNSFHIVGHDERGAIVLRQKWSRSQVEARFANMPPCLIGMEACVGAHHLSRKLNSLGHDARLMPAKYVRPYSKGQKNDFRDAEAIAEAVQRPTMKWVATKTADQLDLQALHRVRERLVSQRTGITNQIRAFLLERGIAVRQGQRFLRAELPRILATPPDVLSPRMVRVIEGLAGDWRRLDERIEGLSGEIEAIARQEPGCERLMSVPGIGPIISSAMVAAIGTGDAFSKGRDFAAWLGLVPKQMSTGDRTILGKISKRGNRYLRVLFVQAAWVVLIKPMSWERHGLKPWIEAAKKRLHRNVLAIALANKLARIAWSVLARGRSFEARTITNVAAQAA

SEQ ID NO: 262162 - protein, 356 aa, unidentified
MLERTVITFPYSKKSVLFGMEDTGHYHIALLKFLLNNGYTVALINPKTTDLTRKMEGGITKNDKLDTITICDVLDTPERKKQYRITKVNSFDLYEQKQLTRHHHNLKEELNVYCNRLQKSIDLVFPEFNTLFRSKYGVVYMNLLKTFGSAEVIASTDIRTIRKCFEIRGKGNRIPLTPEELKECAKNSVGISSEVETIQIKHLVSQIMLIKEQIAEIDKKIEEFSIKNNSPILTIPGISHFSGTSILAELGDIGNYSKPSKIIKYAGVAPYHYESSQFNAQHTSITKKGSKYLRKTLYQIILPVINNNPVFKRYYQLKISQGKGHRCAQGHCIRKLLRIIYHLLDTGQAFEPALLR

SEQ ID NO: 262163 - protein, 387 aa, unidentified
MYIVGIDIGKNHHEASIVSPKGKQIGRSLRFATTHKGADSLMSFIFKNIGNSPCVFGMEATGHYWYPIYSFLKAKGYTIYVINPIQSDSLRKMYIRQTKNDSIDSFLIAEVIRFGQFGTTSMADENILAMRQLCRYRDSVISSRTEIKLRIGTIMEQIFPEYEKQFSSLWVSTSMGILEKYLTPENIENTPIDELFEIIKDKSHNRLTRAKAISIKEAAADTFGIKIAQDAFSFQLKQLIDRMNFLDKQIEALDIEIMKYYEQFDCYLHTIPGIGIIGAATILAEIGDISRFKNSSALVAFAGIDPTVRQSGEFNSTHNHMSKRGSPYLRHAIFLAATTCSFHNSPLNAYYKKKRDQGKHHLTATGAVARKLKMVCERLAGNKGILR

SEQ ID NO: 262164 - protein, 313 aa, unidentified
MMASQDVFVGIDVSKDRLDVHVRPLGVGFSVGNEAAGYAALIARLRPLRVKRIVLEATGGYERALWLALSEAGLVAAVVNPRQVREFARAAGRLAKTDRLDAAVIAHFAETFAPRIGKPDAVADRLGEHVLYRRSLQDELVALEHQRRRLETPALRERADRRHAALRAEVKEIEREMRAIVDGDPAKKALFACLTALKGVGLVLACTLIANMRELGSLSRHQAAALIGVAPLNHDSGARRGYRAIAGGRRRVRNVLYVATLSAVRSNPPIKEFYRRLSANGKPPKVALVACMRKMLVMLNGRVRDELAAATIP

SEQ ID NO: 262165 - protein, 338 aa, unidentified
MSVYVGIDVHRKRSQVAVVTEDGKVQLNKNVVNGSEPMLRLIGDLPSGTPVAFEAAFGWGWLAQLLEDYGFEAHLVHPLRCKAIASARLKNDKAGAAILAQLLRADLLPEAWIAPAEVRQLRALLRHRVSLVRLGTQQRNRIHAVAADHGYDRSASYWTGPGRGWLAELDLPPASREIVTDCLAVIDGLVPLIERIDGELHARAKADPRVKVLRALPGVGEFTALVMLAEIGDISRFASARKLASWAGLTPTVRGSDLTVRHGHISKQGSAWLRWVMNQAAQTAKRSPEFAAAYAAISQRRGKKIATIAISRKLLTRAWHLLASMQADGTATPPQRRP

SEQ ID NO: 262166 - protein, 366 aa, unidentified
MRSVPHDAEAVYVGLDVHKDSITAGVLQPGRQTPELERFFHDEVSVRRFLDRLGDRRRLRVCYEAGPTGFELARLLEALRVDYLVAAPSLIPRAPGDRVKTDRRDARRLTRLFQGGQLTAIHVPTRQEEAVRDLCRTRTDMVIDLNRARHRLSKFLLRHDHPYRGGTEWTDRHSRWLTGIRFQDPALRATFGHYRGVVTTRTAELRAVETDLVPWCDREPFADAVHRLGAYRGITHLGALSIAAEVTDWRRFPKAGTFMGFCGLVPSEYSSGTHTTRGHITRTGNTNLRTHFLESAWSYRHQPAIGLTLARRHQGVEPHTLARAWQTQLRLCARFQRLAHRKNAAKLVAVAVARELAGFCWAEMTA

SEQ ID NO: 262167 - protein, 400 aa, unidentified
MKIIGMDIHRSFAQVAILDDGTITKQLRVELTHEPLVAFAKTLSLEDEVVIEVTGNSAAVERLMRPHVKRIVVANPRLVRAIAYARVKTDKIDAATLAKLHAAGFVPEVWVADEDTYSRRRQAAERAGVLAQLVRTKGRMKAILHANLIGPYRGHLFGKAGQRWLDSLPLPDEERGMLRRLIAEMERVSAQLAEIDKTLAKQTLADPRALKLMTIPGIGSVVASVVLASIGDIARFPSPDKLSSYFGLTPRVRQSGDHPARHGRISKQGNADARKMLVEAAWSAKTAPGPLRAFFNRVQKKRGAASAAVAPARKLAVMIWHVLSSGREYAYARPSFTAMKLRKVELTAGAPRAYGKAGSARDYWIKEIRDREANYVARAEQAYERMVAAWKPKPEKSAAG

SEQ ID NO: 262168 - protein, 403 aa, unidentified
MNSVGIDISKGRSTIAVMRPFGEVVISPFEVRHTGSELSKLARQLKSLDGETRVVMEATGNYHASVAKLLHDAGLYVSVVNAKLVHGYGNNELRRVKTDRKDAVKLANYGLDRWLTLPRYIPEEDTRLLLKNCYRQYRQYSKVQTVLKNNLISLLDTVFPNANRLFSSPIRGDGSEKWVDFVAEFWHCRCVSEKSERAFTSKYLRWCRKHGYNFSEAKAHTIYAEASGHIGVMPKSETTKLLVEQAVAQLRATSTALAALKLEMQTLASQLPEYPVVMDLFGVGPTLGPQLIAEIGDVRRFYSKKALVAYAGLDAPPNDSGDVTGRHKSMSKIGASSLRRTLFLVMSVYLQTAPLDEPVYQFMDRKRAEGKLYRVYMMASANKFLRIYYATVKAYLESLEHTA

SEQ ID NO: 262169 - protein, 318 aa, unidentified
MERNTIEFEQVIERGCGIDVHKETAVGTVQGKGIKTETRTFSTFTSSLKDMKEWLSSIGITHIAMESTGIYWKPVFNILEDAFEILLVNARHLKNVPGRKTDKADSRWICKLLISGLLKGSFVPPENIRELRDMSRYRSKLTGQIASEKNRMQRILEDANIKLSSVVTDTSGVVATKLIDGLIAGRKDLDVLINECYHGKLSASKEELKEALNGRLTAHHAFMLKQMKAHIVYLESQIALIDEEMDNKLAEYNKQLELLQTIPGVGRDGAKGILSEIGANMEVFPNEQHLSSWAGICPGNNESAGKKKVQGPGTEINT

SEQ ID NO: 262170 - protein, 339 aa, unidentified
MENNNNPYYKHYLSIDWSQQDVSIARMRAGSNQPETKMFPSDIKKIKEYLKGLQGKKILTIEETTGSHWLYVELLESVDKILICDPYRNSLLKEGAKNDKIDARKLCLLLRSGLLKEVYHTSNEDYKIRKLASAYIALVKSGVRIKNQNSALYRGEGLKYKKDKIKKGEEILSFVEGQQKRAIKLYEEEKKKYEEVFKELKKKNEVIEMLCQVSGIKETSAVKIYSVVIEARRFENKYKYWAMCGLVKHDRESGGKNYGKKNPRYSRILKNVYKSAALAAIGGNNDIREYYEVLLQKGYPIAEAKNQIARYIAKVTYAVMKNKKPYKAYQWRELNKQKS

SEQ ID NO: 262171 - protein, 330 aa, unidentified
MKNYEEVVGIDVSKKTIEAYCYHAQVHKVFVNDVVGYKSLIKWVLKVTKTSSVFYCFENTGYYSLKLALYLHSQTIVYVEESPLKIKRSSGIVKEKTDLIDAVLIARYAWLYREELEPSAVKSMSHLELGRLLALRDQLVRNNAGLKGTLKELKVLLSSPSTDAGCLSLKRSIDYLEKQVKGIESRINEILLQDASMSKNYELLTSLKGVGFVVACQLIYHTGNFTRFASWRAFSSYCGTAPFDYQSGTSIHRRKQCHYLGDRKMKSLLSMASVSAIQHDSELRLYYKRKLAEGKDKMLAINNVRNKLIARAFAVVKRGTPYVVLQQHVA

SEQ ID NO: 262172 - protein, 418 aa, unidentified
MNTKNDNFSAYVGLDWADKKHDICVQVKDEESRAFSVISHSPESIHDWVEGLHKKVKGNIAVAVELNKGPIVYALQKYSFVTVYPIHGLTLARYRQAMFPSGSKDDPSDAELALDMMLNYPKKITPLKPSSEKTRALALLVEQRRLLVDDKRRHANRIINALKQYYTQPLEWFSHRDTELFCNFLIKFPNLNELKRVRTNTVAKLLNSRGGPTVKKTPERIASIKEAIPLTNDESLIIPYQTFVMALAKQMLVLINNIREYDSQINSIFTSMDDASIFASLPGTGPCLAPRLLAALGEDKSRFSSAQEIQNYAGLSPVTERSGQKSWVHWRWQCSKFVRQSFIEWASKSVAQSYWAGIYYAQQKAKGNSHQSAIRALAYKWVRILFRCWKTGKAYDESKYLKALKEKGSPLLVVEKAC

SEQ ID NO: 262173 - protein, 344 aa, unidentified
MKFNRCGLDIAKQVFQVHGVNEHGVVKGRKTLPRAKVLEFFAQLPSCHVGIEACGSSHYWARELSKLGHTVKLMATQYVMAYRKRGKNDANDAEAICEAVGRPNMRFVAIKSEEQQAVLMVHRARTLTMANRTAQVNQVRGLLGEFGLVVPKGVARLRRELPGILEDAENGLPVLAREVLAGLLEQLRESDVRITAYDRRIRALAEASEPARRLMRMESIGPQTATALVATVGDPHVFKNGQGFAAWLGITPRQHSSGGKERLGQITRQGDSYLRTLLVHGARAHLRVIDKKTDAKSQWARRLKERRHANVAAVALAAKHARIAWAILAHGTEYRPGGPQSAAA

SEQ ID NO: 262174 - protein, 336 aa, unidentified
MSYIGVDLHTTQITVGYLTEKDEISIRKYQLWEIEKFVSGLSGTDEIAVEATGNTGWFAEQVKDKVRRVVLVNPRQFEVVKNSVKKTDKNDAINLARFLKANLLPEVRAKREEAEKVQSLVNTRTKLVRLKTSLLNKIHALYVSNGLKLRRASLSSEKGLEKVFSIQWSEIEKLELEIIIDQIRSLKMSIKKLEKAIDQEAMKLKGFENLKTMSGIGSLSAGILLSVIGNIKDFASEEKLASYFGIVPRVSNSADSVNHGRITKRGNKTGRTTLVQCSLSAIKKSEYLKKYYDGVKARRGHGKAKIALARKYLGIIYKTLINGWVFADFNNFELAE

SEQ ID NO: 262175 - protein, 420 aa, unidentified
MKVTYKTCCGVDVHKSFLVATIITTTGGIEPSYQKKRYSTFNNSILEFKQWLLDNDCHDLCMESTGKYWIPVFNLLEDEINVTIANPKWVKAVKGNKDDTKDSKWIGDLFRLGLVKGSYIPCKKIRILREFTRYRYKIVSCRSSEKNRYQNALTVCNVALDSVVSDIFGKSSTSIIDYLLEQSGNSINHEEIASKLLKSLKSKEDAVIESIEGYQMTDSQKYRMHLVRAHMDYITAEINDVDREIEKLISSDPDFENAIQFLMTIPGVKRDSAITVISEIGIDMTQFSSSKRLCCWAGLTPGSNESGGKKKSVRVTRAGVYLKPALIQCAHAAVKSEKSPYYKKKYESLMKRRGKKRAIVAIARMILTAIYQMLSTGESWNPSDLYKIDIPEALLEKQKAKAIKQAMKLLQREGLYPPPE

SEQ ID NO: 262176 - protein, 316 aa, unidentified
MNEMIVEKFVGIDVSKATLDVCIEPAIQSLLVAYDEAGIRQIVERLNEVSPTLIVIEATGGLEVRIATELASKGLPVAVINPRQARDFAKATGRLAKTDQVDAAVLAAFAKAVRPQVRPLKDEDTRALSDMVSRRRQLIDMRVQETLRLGTAASKPLQKSLNQHIAWLDKRITELDDDLTKRLRESDAWRAKDDLLRSIPGVGAVTTTTMLAKCPELGTLNRREIAALTGVAPLANDSGKHRGRRFVWGGRADVRAVLYMATVSAMRCNAVIKAFAERLKQAGKPPKVVIVACMRKLLTIMNSMLKNNTPWNPKMA

SEQ ID NO: 262177 - protein, 413 aa, unidentified
MNYSKRTLYCGIDVALKINVIALIDNEGKEVIKPFKVSNDQSGAEEIEKKLEEICLNQGFEALKIGTESTSFYDYHLADFLAESEKLAKFETEIYRLNPKITHNFKKTLAELEKTDLVDAQVIAERLRFGRLPCPYHSLKEYFPLQRLTRYRFHLIGNLIREKGFLLSHLFLKYSSFNSKKPIRRILGETSRAIISEYLTPEEIANCPLEKLTALIIKQSKNRYEDSEKIAKKLKQVAKESYRIRASLANSLNLILVSSFRTIRAYQDSLKEIDKAIRDELNGFSQTLTSVPGIGPVFAAGIIAEIGEVTRFKSPDALAKYAGLWWPQNQSGDFKGQDRKLRKSGNKYLRYYLVEAANSLRIHNEEYKAFYQKKYKEVRLHQHKRALVLSAKKLIRLVFSLLKTKQFYRQKRT

SEQ ID NO: 262178 - protein, 400 aa, unidentified
MRVVFGIDVSKASSEVAILVNGEKVHDYTIPNDAIGFNRLLGDLKTVHQPEIVFEATGVYSRRLQAFFENNSYAYTRLNPLESKKQLDSLRVRKTDKIDAEKLAASQFILNRKPSYVQEALYQELRDLSRFYQNLTEDIVCAKNRLHKVLQVTFPELENILSAPTGEQYWNLVMTFPCNSFVLESDDATLTAIIRQSTVKRISEKRVTYLVDKLTKLANQSYCAVKKTSPVIEEVKYYAGELLRLSEHRQGVLEEMVTLAQSLPEYEILLSIPGIAETTATSIIGELGDIRRFHSANQINAFIGIDLRHYESGNFLAKEHITKRGNPYARKILFKCIHNIASASHTNPCHIADFYEKRKRQSQVTSTKPHTIASIHRLIRTMYYLITHNKLYDYTSTQNR

SEQ ID NO: 262179 - protein, 365 aa, unidentified
MKEEKKAAARFVGIDLGKRTYEVAIVGANGKVTMSNGRTTVEGRQKLYQKLTAQDKVALEAGNLAFIMAKEMEAAVGCEIRVLNPSHLALIYGSMKKTDKEDALKLAHIIEDYKDDRLPVVPIPSEQEMKRRKMVGSYRREQKMRNQAINRLHGLFLAQGITDVVKSDLATAEARAETVKALSGLEREEAEHLLACLKLYEGRIKAVEGQMKKEAEGDKEIEQLQTVPGVGPMISFAFAAHVAAERFENGAQVSNYIGLVPRVYMSGDTVRYGQITKRGNGFLRALLVQGAWALVRSKAGGSLKERYEYMTAEKGISKKKAIVAIARRLAELLYTLMKNGTSYEVRRFKAEKGEGKKLAQLAISA

SEQ ID NO: 262180 - protein, 364 aa, unidentified
MYDSTTTVAVGLDVHARSIRLAAVRADELLEERTLPYDEEAVERLLRRWPLLRCCYEAGPTGFGLYRHLVERGIDCVVVAPGLVPQRPGDRVKTDPRDARKLARLLAGGLLEPIHVPSPEYEAARDLVRVREDARLDRMRDRHRLSKFCLRHGRILPTRSWTVVRRKWLGEQRFEHTAEQLTFDTYVHAVDLVDARIEQLERAIRETAEQEPWRQLVARLRCLRGIDTLTALALVAEIGDFNRFRSAAEFMAFVGLVPSERSSGEKRRQGSITKVGNSHVRRLLVESAWHARRRPKVGYDLGRRQRGQDALTVERAWRCQQRLYQRWQRMAGRGKPQQKIVVACARELAGFVWAIATEQPLRTT

SEQ ID NO: 262181 - protein, 344 aa, unidentified
MPSIVGGMDIHRKQVTFDYLDLVTGEVKCGQIAPADRAGLRAWLRRFDGVPGVAFAVEACTGWRYVTEELQRAGIDAHLAEPADTAAARGRKMRAKTDKADSRLLRDLLTGGRLPECWIPPAQVLEYRALLETYHDLRREHTAWVQRVHAVLFHHGAPVFHDLSRTDAPQELAALARAHLSPAGQQQIALYLRMLEVTGGEADVLRAQLAAAAGQLRGAIVLAGQLYGVGPVTALALCCWLGGAGRFSSARKAVRFTGLDITVYSSDSKRSPGHLSRQGPPVLRWCVYEAGKTHARTGAPDHGYYAAVKDRKGGKRAALSEARKIVRRACHILGEPGDDAFATA

SEQ ID NO: 262182 - protein, 313 aa, unidentified
MTHACAAGVDVGRDWLDVGLAPSGKVFREANAPSGIVALVARLKREGAGKVVLESIGGYGARLVRSLAEAGFEVGVIDPKRIRALRVAEGRRRAKTDRLDAGLIARFALLMQDAARPVPDAKAFEIRALSTRRRQLVEMAAMEKVRLKQTLDEAVADSCRQMIAWLSQERANIEAQLELMLLETQAGQARRGLLQTIPGVGPAVSMTLLADLPELGSLDRKAVGSLAGLAPHPNQSGTRTGAAQIGGGRPCVRAALYMAAVSATRTDKGFKREYLAMRQAGKPAKVALVAIARKIVVAANSMLKSGQPWQKPA

SEQ ID NO: 262183 - protein, 338 aa, unidentified
MKLYAGVDLHSNNNYLGIIDQKDKRVYKKKLPNELPAVLEELEPYREELEGIVVESTFNWYWLVDGLMENGYKVHLANPCAIKQYDGLKHSDDTKESFHLAHLLKLGILPEGYIYPKEERPVRDLLRKRSLLVRQKTAHILSFQNLVSRTIGTKMDGDEVIKLCEEDVERIFGEKHLVLSGKANIAAIRFLLEKIKEIEKAVLKVARLKGEYKKLLTVPGIGKILALTIMYETGDTERFPGVGNYASYCRCVRSTRLSNGKQKGKGNRKNGNKYLSWAYVEAANFAVWSYPYIKKYYQKKMSKTNKIVAIKTIAHKLARASYYIMKDQEVFIPRKAFR

SEQ ID NO: 262184 - protein, 367 aa, unidentified
MEYFAGLDVSMAETQVCVVTRNGSVIHKAKVPSTPADIAAELARLPTCRRIVFETGRMAPMLYHGLRQLGLPVICIESRQAYQALKLLATHKTDHNDARGLAHLARTGFFKPVHVKSLPAHAVRSLIIARKKLVGQRVTLENQIRGLAVVFGVRLPRALSSTFIRQALRASEGIPGLSAAMQGLVAARTAVLAAIMAIDGDIRRMVRASDACRRLMSIPGVGQLTALAFTAAVDDPGRFRRSRDIGAYLGLVPRRHQSGEIDYTGSISKCGDRRVRTLLYEAANVMLTRYKGALKLKEWAFAVAKRSTMRKARIALARRLAIIMHAMLRTVPSSNRYSRSGISETEVPPSSRAERRPGRAQMTAPIL

SEQ ID NO: 262185 - protein, 345 aa, unidentified
MSEFYEGRQFVGMDLHRRRSVLVRMSETGEHLETVRILNDRDVLAEVMSRAGESPEAVLEATYGWYWAADALAELGATVHLAHPLGVKAFSYRRVKNDQRDAADLADLLRMGRLPHAWIAPPETRELRELVRHRAKLVAMRSQCKAHVHAVLAKGGIWVPMTDLFGVEGNLLLDKVTMPAPYKARIASLRRFIEAFDAEIDLFTGLAQRRLTHDAGYTAIQQIPGIGPVLAAVFVAEIGDVHRFPGPAQLTCWAGLTPSHHESDTTVRRGRITKQGSRLVRWAAIESVKILPDTSRIGAIRETVAHRRGNRNIGAVAAARRQLELVFYGLRDHHIRALHHPPRAA

SEQ ID NO: 262186 - protein, 399 aa, unidentified
MFVGWDWASTAHDVTVIDSAGELVHRMAIPHTEDGIARAVAKLADYGDPGELPVAIEATRGLVVDRLLGVGHPVIAVHPNAFHAVRPRWGAARAKNDPGDSFKLADYARTDIHRLPMLVPTLPETLELQALTRQRDCQLALRIAAVSQLAALLDQYWPGGKTIFAQLHSPIALDFLDRYPTPRAAASLTPARIEAFCHRRGYSGRRSGAELLDRLRSAPISASRLGEPVVAQMIRGQVAVVRALQAGIDALDIVIAEKVTAHPYAGLLADLPRIGTLNLAQIIGEVGPILERATSFDQLAAETGLAPVTRSSGKTHTVAFRYATNRRARQALHTWLDNSRRSNDWAQQRYAAARARGQRHPHALRTLGRAWLRIIWACWRTKTAYDPARDERAKQPTAA

SEQ ID NO: 262187 - protein, 401 aa, unidentified
MISVGIDVSKGKSTVCILKSYGEVIASPLEVVHTESELKNLYQMIQRFDGEVRVVMEATGIYHLPVLLALQEQGLFVAVINPFEMKEYASRGLRRVKTDKKDSIIISNYGIDNWYRLENHRGRDDVYSELKLLGRQYCHYMELHVKALLELTHMLDYTMPGVKKEFRSWNESNGKDKLSDFVERYWHFDNITVMNKDEFIDDYIVWAAEKKYHQNQSKAAELYDLASDGIPTLSANTPSTKMLVLEAIRILREIDSTLFKIITRMKELAKSLPEYETVRSMGGVGDVLAPKLIAEIGDIRRFHNGKALIAFAGIDTPPYQSGQFTGTNRKISKRGSTVLRKIGYETMRVLKTHKAPEDDAVYRFILKKESEGKSKRQAKIAGLNKFLRIYYARVNEVYQRV

SEQ ID NO: 262188 - protein, 436 aa, unidentified
MASHCRSCNHKISGGVLLAFKIFRFNCCGLDVHKTWIFACIGLTDANGRTEYKEKRFSSFSRGLRELAAWLASYKCTDVCMESTGKYWIPVFNVLEKTCNVILAHPKYTKPQKGNKTDRKDAKWICDLFMCEMIKPSFIPPAEIRHLRDLVRYRSKLTNMLTGEKNRAQNCLTVSNLKLDDVFSDVFGKSSRSITEYILAHPGEAFDVTPFVDKRCKTPIEEIQAAVDGAVSPEQAIKLRQCLDHIDELEKHKAEMEREILRVSNSYLDALELIRTVPGLDKNPFTAIQILSEIGGDMSVFPTDKHLVSWAGCCPRNDQSNFKIKSTRISRAGSYLKPVLVQVANALIKSKKHPEITERYRRIKSHRGHKKAIIAICRMLLTAIWHILTDLKPYTAEGYLAPRPVKTEKILTTSQALNLLKFRCYVIKDDLPSTAS

SEQ ID NO: 262189 - protein, 449 aa, unidentified
MSRPQVIDDEQHERVHDRVAAIDVAKDSGMVCTRTPHPSRPGARRSTVWTVQARTGAVRVLGRQLVKDGIEIVTLESTSDYWRIWFFVLEACGLAVQLVHAAQAKNLPGRPKTDKLDAQWLARLTEMGLLRPAFVPPKPIRDLRDYTRARTRLVRERTRCWQRLEKLLEGALIKVSSVASKLTTVSAQDMITAMIAGQRDPRVLAGLARGRMKARHDDLVAALDGMFDDHHGELAALLLDQIAFLGERIAALAARAAQLTAAMPGAWGTDPDGTTGPDAGTAPDAPVLNAVARLAQIPGVSEDLARAIIAETGLDMTRFPTAGHLVSWAGLCPSARQSGPRTRAGTKGQGDTWLRGALGQAATGAARTATFLGERHHRIARRRGKAKAQVATARSILVIIWHLLADPAARFTDLGPGYYQARTDTDRRLRNHIRQIQALGFEVTLTKAP

SEQ ID NO: 262190 - protein, 346 aa, unidentified
MNSMNYIGLDIHKKSISCCVRQADGTIIQESTITATRHALDEWMRQLPDPWIAGMEATLFTGWIYDHLVLGGAVVKVAHPAMLQAIAVGKKKNDRVDARKIADLLRCDYFPECHMAPREIRDRRRVLRYRNLLVRQAVQMKNKVSGLLMEAGVPYNQQKVHQKKYFAELLQKQKKDMPPSMPELLRLSRSTVEALTGMQRQLIRALESDALLAARVERLASIPGVGRVVALTWALEMGDISRFASVKKAVSYCGLCGAEKSSGGKTERTPISKQRNKHLQTMLIEAAKLAPRWNAELALVYDREKQRGNRNRATLAVARKLVAYLMAVDREERLFDTQVRVAGNAA

SEQ ID NO: 262191 - protein, 431 aa, unidentified
MLKIRKNAAGIDIGARKVFVFVEGQEVRSFFTFTEDFQLLAQYLLEHKVQTVAMEATGVYWAILYDILEEVGIDVWLVDGRQTKQVPGRKTDVKDCQWIQELHSHGLLNRCFVAKDLVKELRSYHRLREDHLNSAAMHINHMQKALTEMNIRLKEVLSQIHGVSGLNIIEAILHGERNSNVLLELCDKRLIKNKQKEILKALNGRYTMSGLFALQQAWDAYHFYQGQISQCDKEIQRIIHLMGNGSSDKDLPAKRKPIRHNKPDVDDLGANLMDIFDGKDATRISGITDYTWLQLLAETGTDLSKWPTAKHFTSWLGLAPGQHNSGKMKRNKRKHGKPKAGQIFRKIAQSLLTSKTIALGVFGRRIRSKKGPAIAIKAMARKLAALYWNVIVNGTEFAEMGIKKYEMQLLAQKKKSVERMAKELNLQLVVM

SEQ ID NO: 262192 - protein, 410 aa, unidentified
MTASVAGIDVHKRVLMVVVLTPDQAGVEAGSLPSRRFRTTIQELRHLVAWLQQLGVQEAVMESTAQYWKPVWLVLEQHFRLYLAQAWSNRAPRGKKADFKDAQRLVRRHLAGELTLSFVPDGEQRLARTLTRRRTQLTRDRVRIQNQVESLLEETQVKLSSLVSDLFGASGVRILQAISEGVADPVKLAQLGDARLQHTPEELAEALTGNVSPWHRQLLKQHLEQLRLVDKQLQELSELTASALKIHAEAIERLVQVPGIRVVAAQQIVAEAGPEASAFATAGRFSSWIGVCPGSQQSAGENHSSRCAKGNLYLRRVLCLAAQAAVRTKNSSFQQRFRQLLPRLGYTKAIWATAHRLAIVIWKILHDRVAYKEYGLETTPQARKRRIQRVQRELRALGYDDQLKLLAPQP

SEQ ID NO: 262193 - protein, 458 aa, unidentified
MGKRKQQKGEKVTSHFEHLNPHAAGIDVGSRSHFVAVPEDADEKPVREFSCFTGDLYRLAKWLHACGVKTVAMESTGVYWIPVFEILEHEGFEVRLVHAHHVKNVPGRKTDVSDCQWLQRLHSYGLLEGAFRPPEQVCILRSYIRQRMTLARYAASHIQHMQKALSQMNLLLHNVVSDITGMTGMRIIKAILAGEREPLALAGLRDPRCKNSAATIARSLEGHYKSEHLFSLKQAVELYEFYQAKIADCDHQIEEQLALFDDRSAGGEIPPSRKGKSESNGPGFNVREDLYRMTGVDLTRIEGIDSYTALKVVSEVGADMNRWRSSKQFASWMGLCPGNKVSGGKNLSGKTKRVANRAAIALRLAAYGLHKSKSALGAYYRRQRARLGAPKAITATAHKLARLIYSMLKHGTHYVDAGQDYYEKCYRTRVVENLQKRATELGFTLVKATFPSPKMCAT

SEQ ID NO: 262194 - protein, 475 aa, unidentified
MSKRAISKQASAQKRTRQGQKRKAKAKAKAQGVVTLPVFRPDTAGIDIGAMEIFVAVPADRDAEPVRSFGTFTQDLEAAVEWLESCEVKSVAMESTGVYWIPLYQILAEHKIEVCLVNARHFHNVPGRKTDVLDCQWLQYLHSVGLLRGSFRPEQDICAIRTLLRHRQNLVQMAAEHTLHMQKAMEQMNVKLAHVISDITGVSGLRIIDAILQGERDPRALAKLRDQRIQADEETMLKSLEGDYRAEHLITLKQSLAGYRFYQQQIAELDQEMEGFLGALPAKIDLREHPLPPTTKRQTRQHNAPAYDLRTQCYRAFGVDLTAIPGFQAPTAQVMLTEVGPDLSMFPSGSAFANWLTLCPNNVITGGKILSAKTRPGKSRAALALRQAAQTLEHSENHLGQFFRRMRGKLGRAEAITAVAHKLARIFFAMVSTGQAYDESALAKADVRQRAQQEAKLRRQAREIGFQLVPLEAHC

SEQ ID NO: 262195 - protein, 479 aa, unidentified
MIKSVGIDLACAGEHKVRCLDERAQPCDGFSFQTSLEGLTKLEERIFGDGSNPVIIFEPTGLAWLIVAIYLKARHPDCRLVRVQARKVVALRKYLRRSSKSDKIDALTLAKMSFIDSEQLEEVYLPPAKIYAMQRLARQRKRLESDIAAHKTRIGSIIDGYLPGLRGAFSDPWSAHARAFFCSRLNPMAVVRASERALHAFLTKARRHGKANAAESHMVYLSCKDAATVYELSQPVGTINDDFFADLQDEISREFRIMEMTEAESDAIAKRLEQLYLELHPSDNLRTIPGVGEHTAPIFLAAVGDPVRFRSQSAFANYSGVVPAAKQSSNAEAKGLRMTKAGPATLKWALYQSGQIGRRYDLQLACVYYREMVHHGKNHKQAMGAVMSHMGARVLAVLREDKPYELRDMQGKPITREEARKLILSNFQVPEEIKQDRRRRKATSSSTKPRRKNQEMAAHMTNEAAVAPQPVVTVAISRT

SEQ ID NO: 262196 - protein, 346 aa, unidentified
MNYIGIDVHKSICTAVVMNDDEKVIDQIIDFGTNDEGCSAIVDRYSPEDSYILFENLTTAHRVYHFFKDRGYRVEGLHTGHGCVTEISKTDFKTDLEDATKLARMCKDHFTGRRKYALVHFADIDSMKAKELCRVMNDCSEQRDKLNLRIQAYMDLFDIHLPKGLKNVYSNKAMTYLKSLDHPALTIMVEDMASVMAHIETSREGLESLFKDNEDVKNLMSIKGIAIQTAATIYTAIDGIERFETPESLVSYFGLKITRHESGGDRDLHGHINKRGDPLVRKYLANVVVNHSKYYPDSDLARFYKRKKEVMPHWKATTAAMRKLVCIIWAMLTRHQVYRFSSPVKA

SEQ ID NO: 262197 - protein, 412 aa, unidentified
MLFIGDDWAEGHHDVVAQDDAGKALARRRLPEGADGIARFHEMVASCLGEDAEPDPARVVVVIETDRGPWVKALAAAGYRVYPANPKQAARHKETIAVSGKKDDFFDAGALADMGRTRRHQMRELAADSDIAEAVKIAARAHQKLVWERTRHLLRMRSALREYFPAALEAYAGLSLTGPDTLGLLRKAPDPAPAARLTVTQVTAALRRAGRRGALDERARNIQAALRAPHLSQPAVIAEAHAASVQAGAAVIAALNEQCKVMEAKVSEFFRRHPDAGVYLSQPGIGDITGARILGEFGDAPGRYASAKARKNYAGTSPLTIQSGKKKTVHARYIRNRHLIDALRAQALSALIASPGARAYYDELRAHDTGHDDALRRVAGRLAGILHGCVKTSREYDETTAWSHRPEFPQAA

SEQ ID NO: 262198 - protein, 376 aa, unidentified
MSNVRFIGLDVHAETIAVAVAEPDGEVRALGIIPNRAESIRRLVKKLGPVDQLRVCYEAGPTGYVVYWQLTALGVACDVVAPTLVPTKAGDRVKTDRRDAMKLARSYRARDLTPVWVPDAAHEALRDLVRARGAAKKDQLRARHRLGKFLLRQGRRPPTAMKAWTLRHLTWLNTVHFEHAAQEATLLDYLHEVEHVTDRIKRLERAVDEAVQQAPTQMRAVIEALQALRGIAQVSAVTIVAEVGELSRFAKPRQLMGYTGAVASEDSSGERTHRGAITKAGNAHLRHIVVEAAWAYRHPPALTARLRKRQALLDDPVKAIAWKAQHRLHARYRTLTAKGKCSQQAVTAVARELLGFVWAIGVAVEAKGRDARSAAA

SEQ ID NO: 262199 - protein, 308 aa, unidentified
MPQPVIGCDLSRAFLDIYDLLSGRMQRIPNAHDAVTQWVATLAPDILVVFEATSGCDDLIITALTGRAHPFSRVNPRQAREFARATGVLAKTDRVDARVLAQMGAALDLPVTRPVSPARATLTDFLRRRRQLVDMRKAEKLRRHSAGHDDIIKQIDAMITLLSTQISALDQRIKALIAKDQTLTEQATLMSAVPGIGPTVLATLLGELPELGTLCRRKIASLAGLAPHARESGTWKGARRIWGGRRKVREALYIAALSASRRVPVLTAMRDRMRANGKAPKTILIAVARQLLVILNAMIQKGRPLQIT

SEQ ID NO: 262200 - protein, 322 aa, unidentified
MAVYLGIDIASKKFDVAMLCEDSYRCRTFDNSSAGFKALLNWTDGVDVSEIHACLEATGNYGTALATFLYEKEFKVSVVNPARVRGFAAAEMSRTKTDKADSKLIARFCKAANPALWKPVPESLRKLQALVRRVNALNGMLRMECNRAGQADESVRSSLRRITEHLEQEIKIVRHEIQKHIDSHNELKIQHTLICSVPGIGVVTGAVILSFIADKKFSKAKEAAAFLGLNPRQHQSGSSVRGKTRMSKTGSAYLRSVMYMPALVALKHNPDIRAFGQRLRLAGKPGMLIVGAAMRKLIHITFGVLRSGRIYTPRPEEEPVYG

SEQ ID NO: 262201 - protein, 334 aa, unidentified
MDTHADVHVAAALDPIGGLLGVQEFPATPAGYGRLLGWLSGFGTVCLVGIEGTGSYGAGLARHVTAAGVRVVEVDRSDRQDRRRQGKSDPLDAVSAARAAQSGRARGAPKGRDGAVEAIRALMVAKRTARSERTQTINQARSLVLTGPDDLRARFASHTAAGLVAGLAALRPRPGDVVGYATRIALRELGRRAEFLDGQLERLDELIIPLVTARAPGLLARYGIGPDTAALLLVAAGDHPERLRSEAAWAHLCATAPIPASSGKRTRHRLNPGGDRQANHALWRIVITRMSSHPPTRAYVERRSKEGLPKKEIIRCLKRYVAREVYPSLRAPGG

SEQ ID NO: 262202 - protein, 331 aa, unidentified
MKKVTETIGIDVSKLTLDVFVRTTNVHKQFSNDTKGFKQIISWITKQKINLEQTLFCFEHTGWYCLQLGYFLFENKHCYCCINAIEIKRSMGLKRGKSDKADAWEIANYAWLRREELIPSTPPAKNLIELQRMMSLREQLVKQQTASKNLLKGMASIVENDTNDVSMLILTDNINHLEKQILTTEKAMNELIKQDEKMVTNYKLSKTVKGVGMVLAVQMLLHTHNYTRFESSRQFSAYCGLVPYPYQSGTSINGRNKIHPISDRKMKSLLSMSAISAIQHDNELKIYYKKRLEEGKPKMVVLNIIRNKIVSRVFATVNRGTPYVEMNKFLA

SEQ ID NO: 262203 - protein, 452 aa, unidentified
MEEEKISMEIVNPHAAGIDVGSRSHWVAVGQRETDIREFGVFNQDLFEMAVWLREKQVKTVAMESTGTYWQNLYAVLLSKGFHVILCNGKFTKNIKGKKTDVKDCQWIQKLHSLGLLSSSFLPDGKTEELRTYCRQRANLLHQAAATSKKMQKNLRLLNLRLDVVVKDICGLTGLLIIRAICDGEANPQKLASLRHGNCRKSEEEIAKALQSNSRKDYLFALRQELDTYDHLQKKIQQCDVEIEKMLEEIIASDNNKRQHHIDPKPHKRYNKNTPENIDLNLKSYQMFEGTDLLAIEGVSYSTVLALMSEVGIEGIRKFPSAKHFCSWLRLAPNNKVSGGKVLSSKVPKGSNRLKIALRNAANAIGNLKESTPLRDFFQRINFRKGRVSAISATARKLAVIIWNMVVNGTPYHNPAGYLFLDQKRKLGLVKRIKKQIDKFGLTNEELGIIST

SEQ ID NO: 262204 - protein, 412 aa, unidentified
MRIVHEICCGIDVHAKMLVACLILADGKKEIHSFSTMTADLLRLRDWLVGTGCTHVAIESTGVYWKPVFNILEDALTVILINPDHARALRGRKTDVKDAEWLGDLLRHGLLKASFIPPLEIRELRELTRYRQSLVHEQSAVANRIQKVIESANIKLGQVASDALGASGRAILWELTRGETDPVKLASLAKGKLKEKRSELERSLQGRLTPNQGFVLRELLSRWEELERAEGRVTKRIDQYLNDHPKLAQARDNLDSIPGLATRAAENIVAEIGVEMEGNFPSDAHLASWAGMCPGNKATGGKRLSGRTRKGNTYLRSALVQAAWGATMKKNCYLSSQYTRLAKRLGRKKALVAVGHSLLIIIYHVLQSGQSYTELGGDYFDRNHVEQQRDYFIRRLQMLGLKVSVEESPVAA

SEQ ID NO: 262205 - protein, 316 aa, unidentified
MTEDGVVVGIDVSKQRLDVCLRPGRQPWSIDHTEAGIAGLLERLAEHRVKLVVVEATGGLEIAVTAALALAHVPVAVVNPRQVRDFAKATGRLAKTDALDAAVLAHFAEAVHPEPRMLPDKQTEALSALVTRRRQLVEMLIAEENRQRTAPANLRSGIRQHVEWLRQRLKQIDDDLAAAIRESPVWREKDDLLRSVPGVGRVVATTLLAELPELGKLNRKQIAALVGVAPLNRDSGTLRGHRTIWGGRAQVRSVLYMGALVGIRYNEILRGFYAHLLAAGKTKKVALTACMRKLLTILNAMLKNKEPWRPGVAHSP

SEQ ID NO: 262206 - protein, 347 aa, unidentified
MDVHQATISVAVMDAQGNLIMECLLETKAATIVEFIQGLQGTLSLTFEEGTSAAWLHDLLKPHVSRLVVCDPRKAALLKEGNKSDRIDARKLAEMLRTNQLKPVYHGEHGIRTLKELGRSYLTITKDVTRSMNRIKALYRSWAIPCAGTSVYAPRHRAEWLAKLVEPGVRIRAEHLYQQLDSLQPLRLQARGELLRESHTHPAVKLLRQIPSIGPIRAGLLVALLQTPQRFRTKRQLWAYSGFAVETHDSGEYRWVRGKLQRNRERMTVRGLNDNHNRDVKNLFKSAAISASTRPGPLQDFYVALVAKGIRPTMARLTLARKIAAITLTLWKKGVSFDPKQLHRQAA

SEQ ID NO: 262207 - protein, 320 aa, unidentified
MIGVVENFRSEEELELYVAKQTTSAEQVVVVYEAGPLGYTLYRKLTAAGVLCYVCAPDSGEQRKKRRKNNKIDARSLTSKLFNYLNGDQNALQLARVPTEAQEQLRMTSRQHDQLVEERKRLGATGNAMLLSQGFGSWSNWWRPKAWAQLSSKLPPWLLERLEVWVDVLKVLDEKIAQAKAAFVRSCKGPRPKGVGALSQMQLQSEVLDWSLFSNRRKIACLAGMVPSEWSTGDKEWRGSITKVGVPALRRIIVEMVWRIIFFQPQYKPVQKWLEVLRGPNPGRKKKAVIAIGRQLIVDLWRLQTGRVTAQELNLIMVTD

SEQ ID NO: 262208 - protein, 410 aa, unidentified
MNLTTLFVGIDVDKKNNTVRFMDGGGDTLSLFSVPNNADGAAKLQEKLRDKLLHTDYSEVTIGMEATSVYADHIATYLKNDEFLQKWKCKVYVINPKHINKFKESYPDLPKTDSIDTLIIADFLRFDRLPKSVCHDEKHLALRNLTRARFQAAQNLSREKARFLETLFQKFSSLDTAKVFSDTFGAASLAAICDFLSVDDIIYTPIEELADFVNQKGKGKFADPEAVAKALQAAARSSYRIGKTVNDSLNQLLAVRLVGIRSIEEQIKALDKAIVSYMAAFQNVLISIPGIGPVYSAGLMAEIADVRRFDGQASLAKYGGLTWKKHQSGGFEAANTKMISSGNKYLKYYLLEAANKVRMHDTEFARYYKVKHREVPKHQHKRALALTARKLVRLVYSLLSTNRLYTPPQR

SEQ ID NO: 262209 - protein, 371 aa, unidentified
MNYTTKYVGLDVSKETIAVAVAESGRDAARYVGAIKHEAGAIRKLLKQLGKKEELEVCYEAGPTGYGLHRLLTSLGVRCMVVAPSLIPVRRGDQVKTDRRDALRLSELLRAGELSGVYVPSAEDEALRDLVRAREDAREDLHRAKQRLLKFLLRYSITPPAGIKRRWTKRYRLWLEGLKLEQEAQAITFREYLHAVKEGEERLKRIETGLLEQAAQGANGALVKALQGLRGVAFVTAVSLVAEIGSFRRFRSPMQLMAYLGLVPREYSSGQSVRRGKLTKTGNRHARRLLVEAAWSYRHKPAVRGEIAKRQEELNPQIQLISWKAQERLHTKYRKLVQRGKAKNLAVAAVARELCGFVWAVACEVESAAAH

SEQ ID NO: 262210 - protein, 317 aa, unidentified
MSIYHNFIGIDIGKFSFTVAAYGKHPVKEYENTSSGISTFFKEFKKEISKALVILEATGGYETELLLTLCDKDIAVHRANTRKVKSFIRSFGNAAKTDSLDAKALALYGCERHKILDLFVPASPHLLTLYTLVQRRHDLRKLLVAEKNRAKGPKAAPILDSCQVIIETVNKQIELISSKIEELIGKDPVLLERQKVLMTIPGVGKIIAQELLTLMPELGTLNRKQIASLAGLAPRANDSGKYQGYRSTGHGRQGVKPMLFLAAMAARNSHSHLKEFYNNLVNRGKKKMVALTALMRKIIVIANARLKELAQRKLLTT

SEQ ID NO: 262211 - protein, 376 aa, unidentified
MDAIYIGVDFHARQQTICYLKTETGELVISELQHQDKAQVRAFYQQFQGYLIIGLEASGYSPWFEAMLEELGHQVWLGDATEIRRRARWRQKSDRRDAELIWDLMVHNEFPLLHQPAPQSREILRMLRYRQKLIKVRTMSKNSLQAIALQAGLAKGSRLFTKDGQAQFQATAMSPALQWQRDHWFELLKPLNQQLLETMVWFKAQSKDDPVIARLRTHPGIGLLTALCIWHTLQPVSRFRNQRKVVAYAGFDPMVRSSAERAIYLGISKAGSRMLRYLLVEAVHTAIRYDDDLKRFYKRVAERRGRPKAKVAAARKLLIRAYIMLRDEIDYAEFRRRAVAVGLPDEVKGQQKGPRGTDWAVDLSRCLASTAARRAR

SEQ ID NO: 262212 - protein, 336 aa, unidentified
MEITTIGLDLAKQVFQVHGVDGAGQVVLKRRLRRAQVITYFAALPSCLIGMEACATAHFWARELRSLGHEVRLMPPQYVKAYVKRGKNDAADAAAICEAVTRPSMRFVPVKTEEQQSALTMHRVRELLVRQRTQLINAVRGHLAEFGLVGPQGPWNVPRLLASMHEDRRVPELARQVLELLAAQLDELGQRIAEVDARITVWHKANPISRRLVTIPGIGPLTATAIAATVPDPDVFRGGREFAAWLGLVPRQRSTGGKPRLGRISRLGDKYIRQLLIVGAQTVLLRSKAARSNVWIQGLLARRPRLVVAVALANKMARIVWAVMAQGQNYRQGVPA

SEQ ID NO: 262213 - protein, 385 aa, unidentified
MQKPNDLNQSRIVLKQDSTLIAVIEMSLSSWLVAGIVPGVERQPLKKLAVDESALLKLLNRWREEAEKAGRRIERIAVAFEAGRDGFWLARWLRARGIEAHVIHASSVAVSREHRRAKTDRLDTELLKRAFLGWLRGERDHCKMVAIPTTKDEDAKRPNRERQSLVGEQTRIVNRMKAALIRLGIRGFNPKLKKAAGRLEDLRTPEGEPIPPNTLAELRRDMERRRLVSDQIRQIEQARLVRMEQAPGDGPHAMVRLIARVIGVGIETADMLVHEVLSRKLRDRRAVARYAGLTGAPDESGSKRREKGLAKAGNARVRVGMIQLAWRFLLFQKDSALAQWYRTRTEGAGRNRKTMIVALARKLLIALWRLVTTGEVPAGVVLRAA

SEQ ID NO: 262214 - protein, 413 aa, unidentified
MQVLYERCCGLDVHNKTVVACVLITSPDGQVQKQGRTFATTTASLLALADWLASLDISHVALESTGIYWRPVFNLLEEGRTIILVHAQHMRAVPGHKTDIKDSEWLADLLRHGLLKASFIPSKPTRDLRDLVRYRKTLVQERAQEVNRLHKVLETANVKVSSVVSDVLGKSGRRMLAAIIEGVSDAEALADLARGTLRHKLPQLQEALHGQIESQHRVLLGQIFAHISFLEHSLEHLQQEIEQRLCPFEEAMQVLLSIPGIQAITAAAILAEIGVEMSRFPSAKHLASWAGVCPGNKQSGGKRLSGKTTKGNVRLRAVVVEAVWNISRMKDNYLSAQYHRLARRLGKLQAAIAVAHSLLIVIYHVLRDKKPYHDLGTDYFDSLDKERLTRQALRRLEALGYAVTLTPKEEVVI

SEQ ID NO: 262215 - protein, 414 aa, unidentified
MEKERINIYHKRNTCFVGIDMHKDAHCAVVIDCWMNKLGEVNFENRPSRYPAFVEDVRKICGTKEMVFGLEDTRGFGRNLAAYLVGRKFEVKHVNPAYTSAVRLANPIIYKDDSYDAYCVARVLRDMVDTLQDAKHEDIFWTIRQIVKRRDLIVKSNVMNKNQLHSQLAYSYPSYRKFFAMIDSKSALCFWENYPSPEYIWNTTPEEIYQTIKPVHQALKIQRIHEIISMIERDGDTRKDYQPERDFIVRNIVKDIRHNKELIAEIDDELRKLIPLTGYKLHTMPGIDLVTEAQIISEIGDINRFPDSDKLARFMGLAPVQFSSAGKGKDQRCRNGNRALNAIFHFLAIQMVAVSASGKPRHPVFREYFEQKVKEGKNKPQALVCVARRLVRIIYGMMKTKTEYRPYEKADSKN

SEQ ID NO: 262216 - protein, 465 aa, unidentified
MKKKVYSAVGLAHIQLDGILERHRRQAAVVGIDVGKLSAFVVVRWGGDDFERPWVVNNPRQVQDLAAVLVQLKSNGPMQVAMESTGTYGDALRQALSDAAIELHLVSGKRAHDYAEVFDGVPSQHDGKDAAVVAELCALGKSMPWSIAKQTDAEQQIGLLVDQMQAALRIKIQWLGRLEALVARHWPEACSGLKLGGGTMLRALSGYGGPQAIAADEQARQQLLSWGHGKVSAARVDEIIASARATQGMSQSAVDVQRVKWCAAEALARRLELRQYRRQLRQLGEEHPVIKLQGKVIGVASAGVLWRHLGDPRRYHCAGAYRKAMGLNLIERSSGMHQGELKISKRGPGPVRRTLHLASLRLIQDQKKVQRWYQRKLKIRNTGKQAVIMALSRKLALALWSIVHHQQPFDIDRLLGRPLQANRKLETRQSSAGQKRNASEQSNTARGGQLQRQSRRKGKPMTAGT

SEQ ID NO: 262217 - protein, 422 aa, unidentified
MEMSEFRIVGFDCAEEEHSAVMLDEDGEIILKTKVVNRRDAVEDALSELALSVGSGTGLIVALESERSHGRLVTDVASALGIRVWKVKPVALNRFREVEGQPHKDDDWDAYLAARMVYLRAKGCREIVEHTDEERALSRLGRSYERLSRDKTQHTLQLRAHLLELAPEVLHRGWTGPKVGSKAMEYLLERWPGFMGMEKAQLRSIEKILNRCRYGEEARSVAKLLRDMARRINIDERERSVIALEIGFLIRQIQFCEAGRAEVRTEISVRVRQDSIGKKLLEMPGIGEIVAGVLLSELWPVARTTTEAKSAAFSGVTPLNRKTGKMPEHRRLARGVNKRILTALYRSSVVAIGCSAIDKAYYTKKIHDYNGHPKPHVAAFIALSRQRHKVIFKLLTTEARFDKEVLIGRHLDRLEEVRGAAA

SEQ ID NO: 262218 - protein, 340 aa, unidentified
MKDLLEVCCGLDVHKDNVVACLLTGQLGSDPVDEILEFSTLLSGLDKLKSWLIENNCRDIAMESTGVYWFQIYNVLESMFADEGGVNITVTNPHHMKNVPGKKTDPNDARWIAKLLRAGLLDPSYIPPRNVRELRDWTRYRKTLVAEMTGHKNRIEKQLQLCGFKLSTFLSDIFGMSGMAIIKRLCTVGYVLVADLDLIVQGTAKKKIPELRQALNGKLSVHEREFLSMLVRIYEQNLVEIERVEAKIMECAQKYDAAVTLLETIPGISNLSAVSIISEVGTNLSMFPTAGHLCSWVGLSPGNNESAKKEINSDYAGEQLFEKRVVSMCMGIKSVEEELS

SEQ ID NO: 262219 - protein, 344 aa, unidentified
MNIHTIGIDLGKTSFHVVGLNERGEVVVRKRFSRAQLLCFTANRKVHVIGMEACGGSHFLGRALQEQGHEVRLIPAQYVKPYVKTNKSDYIDAEAIAEAVGRPTMRFVPIKSDEQLDLQSLHRVRERWVMRRTAVLNQIRGLLLERGITLRKGRRYVEEALPWILEDAEAKLSGALRLLLAQLKVEFEQLDTRVSEADAVIQKMVCENEACQRLVKIPGIGPVTATAVMAAIGNGAAFRKGREFAAWMGVVPREHSTGGKQKLLGISKRGNSYLRRLFVQCARAVLQQKAKQSPGLKAWLEQLTSRTHYNVAGVALANKLARMAWAVLATGEAYRPPQLAAACV

SEQ ID NO: 262220 - protein, 330 aa, unidentified
MKKWKFTLGVDVSKHTLDVSCSELNEHIKIKNGSEGFTQFLKWCRQLKIDLPDSFLVLEYTGGYEYKLLQFCEAHTIVYARIPGLAIKNSMGITRGKNDKVDSARIAQYGEEKYKSLQPSKPLNAAIIRLKELLAFRKRLVRENAGYQSSIKEREHMYGKNTKDIIVKSLQQKQKANSKIIENLEGEMMQIVTKDEQMHVNFTLITSIKGIGKVNGLMTIAYTENFTSFTNPRSYAVYVGVIPFDHSSGTSIRGRKRVSHIANKELKQELNQAARSALVWDKEMNAYAVNKLKTKCYKIVLNNIKFKLILRMFAVVKKGEMYVDNYKNVA

SEQ ID NO: 262221 - protein, 414 aa, unidentified
MDVLHQRCAALDIGKKDLKACVRTPNPDGRRSRRQEIRTFATMTNALLELRDWLVAEQVTLVVMEATGDYWRPAFYLLEDCLNVILVNAAHAKGLPGRKTDVADSQWLCQLGECGLLKASFVPPEPIRHLRDLTRYRTSLTMERSREAQRLEKELEDAGIKLSSVATDILGVSGRAMLTALIDGERDVHTLAEMAKARMRPKIPVLVEALTGNFGEHHAFLCRLHLERIDHLTETIAELSARIEEEMLPFARQLELLETIPGVGRATAEAVIAETGGDMGRFRTAGHLASWAGVCPGHHESAGKHKSGRRRHGNRWLNAALGTAAMAASRTKEKTYLGARYHRLVPRLGKKKALVALEHSMLTAVWHILTDNVPYTDLGGDYYAKYDPERAMRRIARQANVLGFTVRFDPIEAA

SEQ ID NO: 262222 - protein, 335 aa, unidentified
MQIKHFIGIDVSKDTLDFSVVVDGKNIQHYRIKNSTKEIKSTVNKIMKAFSATVDDTIFCMEHTGMYNLPLVKWLQSQQGKMWLESGVHIRKTLGLVRGKNDKVDSARIAMYAFTNRHQIRLWKAPRKVIERIAALLSQRSRLNKAKKQLNTANQEQRLFLDKDIMSSLNKYTSKTVVVIDKQMEAIGKEILELIKEDEKLNRMYQIITSVNGIGFVTASYILVTTNEFININNPKKYACYSGVVPFEHSSGSSVRGRTRVSQMANKNIKTLLHMAALSTIRMQGDLQEYYNRKVAEGKNKMSVLNAIRNKLVLRIFACINQDREYEKIYCYKFG

SEQ ID NO: 262223 - protein, 359 aa, unidentified
MNKNSMYFVGLDLGDKYSYIAILDKEGELIEETRLPTTKTSFHQRFSMLSPCRVAMEVGTHSRWASHLLTGLGHDVLVANARKLRAIYHNPRKDDRADAETLARLARLDPELLSPIHHRSPQAQADLDVLRSRDAIVRSRTLLVNHTRSIVKSSGARLPSCSANCFASKAAPAVPETLRPALSPILETIASLTQQIREYDLQVEQLCQDQYPETKLLRKVSGVGPITALAYVLTLEDPKRFLKSRDVGPAIGLVPRRDQSGDRDPQLRITKTGDAFLRRLLVSSAQYILGPFGPDCDLRRWGLKLAERGGKNAKKRAVVAVARKLAVLLHHLWKTGEIYDPFYHVPKGEAVSVALPAVA

SEQ ID NO: 262224 - protein, 407 aa, unidentified
MIFVGVDWAEANHDVYIEDEEGKRPGGGRLPEGVDGIARFHEMVGVHVEEPSEVVIGIETDRGLFVAALVAADYAVFAVNPMSTSRYRDRHSSSGAKSDPGDAKVLADMVRTDRHNHREVAGDSEVVEAVKVLARAHQSMIWSRGRQTNALRSTLREFYPAALVAFDDLASGDATEVLKIAPTPSLGAGLSLSKIASALRRGGRQRRIDDRAQEIQAALRAPQLQGSAVVANAMGASVKASVTVISTMTTEIANLAEALEAGFEQHPAAKVVRSLPGLGTILGARVLGELGDDPDRYATAKCRKNYAGTSPITPASGTKRVVLARYARNMRLADAIYLWAFASLSASPGARTYYDARRKAGDTHHAALRALGNRLVGILHGCLANGSFYDEHTGWAHRSENEPSVAA

SEQ ID NO: 262225 - protein, 416 aa, unidentified
MKKHSKSCQRSEATLKRTKSRGPVQREAKEVMAEVLGKLTGRGALDVGAVSVSGKKDRRENTVGPNRDRLTVGVDLGDRWSQYCILGLEGETLAEGQLRTTQEDIGEFFQALTAARVVIEVGTHSAWVQDVITEWGHEVLVANPRLMEGSKRRKRKSDRIDANKLARLGRVDPQSLYPIRHRSREVRQDLVVLRARDALVSVRTELINTARGLVKSMGTRLPRCSSPSFAQKVKDAIPIEVREALLPLVQLVETVNDCIARYDENIEELGRKKYGHTTLLRQVKGVGPITSLSYVLTLENPQRFASSREVGPYLGLVPKQEDSGDSQPQLGISKAGDRMLRRLLVGSSQYMLGAFGPDTDLRRYGLRLCERGGKNAKKRAVVAVARKLAVLLHRLWVTGDVYEPLRQAGTAQTVAA

SEQ ID NO: 262226 - protein, 426 aa, unidentified
MKLEEKELEKPIRAWIGIDWADEKHDVSRYDVATGKPEALTIRQSPEALQEWLGQLRSRYEDGYVAVVLEQGRGGLLNALMGCEFLVLYIINPKSLSSFREAFYGSGATSDPVDAQLMRDMVRQNPGRFRAWRPDDVMTRSLRLLTEGRRHLVNQSTALTNQLTALLKGYYPQALAWIGTLDTAWACDFLEQWPTLQSLQASRRRQILRFYEKHPRASLDLDEQLKQIHNARALTRDEAVLQSSALMVQALVSQLRPLLASIAEFDRKIAMIFRKHPDRPIFESFPGAGAALAPRLTAAFGTDRDRFQAATEMQELAGIAPVTEKSGKKSFVHWRYACPKFMRQTFQEFADHSRRWCKWAKALYELLRRRGKSHNAAVRALAYKWIRILFRCWKDRQLYHDEVYTKSLLKHGSPLSSLLAEPVENP

SEQ ID NO: 262227 - protein, 378 aa, unidentified
MSVVASATSKIFCNNQKLRPMVKLKEKVNFSGQEIYVGMDVHLKSWSVAIVYEKRFIRRFSQPPNVEALCTTLNRDYPGATLHVAYEAGFCGFGIQRELSIRGINCLVVNAADVPKSDKERKNKTDSMDAKSIAENLAVGKLTAIHVPDTKTESDRQLVRCRLSILRDLQRTKNRIKSALYFKGIQIPEKFDNSNWSKAFVEWLKGIETEYPSGKLMLTRMIEQLEWQRGQLLQITRDVRAILKETLYEPNTQLLLSVPGIGPLNAVTILTEVGDIKRFSRAIHFNSFLGLCPTEHSSGGSEHKGGMTIRCNNMLRPMIIEAAWVAIRHDPALMLAFEKYKKKGINPKRAIVKIAHKLTNRIYHILKEKDLYEKGTVK

SEQ ID NO: 262228 - protein, 357 aa, unidentified
MTIQRIACKFIPRDYDVFAGLDVDKRSMAVVFADHDGAQRALRMAHDATPLLNYVRKHYPGQRVAFAYEAGPTGFGLHDELVRQAYTCVVVAPSKVPRAPGERVKTNRLDSRKLAENLRGGQLQSIHVPSPIYRDLRHLVQLRDTHVRQLTASKLRIKSLLLYEGIPFPDPQEKWTARALRALQTLPCSETVRFKLDDLLDTLHFHFQAAARATKQIRQHCLQDPELQQSIDLLLSLPGIGWIVASHLVARLGDPQQIKNGKQIAGFLGIVSSEHSTGEKENRGEITRSGDSRLRSKLIQSAWTALKKDPELRDFYRRIYQRHPKKVAARKAIVAVARKLTQRIYVVLKEQNVRFHK

SEQ ID NO: 262229 - protein, 458 aa, unidentified
MNNFYLGCDVSKGYADFIIINEEKQIELDSFQLDDTTLGHQQLCNILDRFYFDHSAPIIYSAVESTGGYENNWFNALSNLQDKRNIYVARVNPLGTNHNSRASMSRIITDKNAAKNIAEYLINHKKKVIFNKDDKFSSLRKQWTFVRMLTKQRTQLYNQLESILYIANPEMLIYSKHGYPSWLLTVILNYPTAKRLSKARVTSLSSIPYLNKQKAVSLINKARASVAASDDDVTANLVTSLVKQIIGLSKTIDKQSKFIADNCKLPEIEILKSFPGIGNYSAIGLLLNICSTEYYQSTKNLASYFGVHPIWKQSGDGIWGMHMSKQGKKEVRNILYMVAKTAIVHNELIREIYARHLKKGMNKTAAIGVCMHKILRIIFGMLKHNEKFNPEKDRANSQKMLKDNKQVKTITNKLRRYQKLDLAAPISNRQTKKRKEQEKSQNEIISLSTGSIPHSFKD

SEQ ID NO: 262230 - protein, 400 aa, unidentified
MSVIIGMDPHRRSATIEVIDQGGRVLQVGRFDTDQAGYAAMLAAGRGHGVIGERVWAVEGCNGIGRHIAHRLVHDGERVLDVPTKLSAQVRVFATGNARKTDPVDAHSVALAALYAPAEPGLRPVVVEDDLVVMGMMVDRRDELGRTRTQTVNRLHRLLLELIPGGAKTFLSAPQARALVAKVKPRDLVGKTRRRLVVELIGELEVIDRKIKTAEKELTALVTERGSTLLELTGIGPTGAARLLADVGDIHRFRDKDRFASWNGTAPLDASSGAQQRHRLSRAGNRRINRTLHIMAVVQLRNPTPGREFYDARKAGGTPSLMAMRSLKRRLSNIVYTRMVADQNRRDLARQAGEVTGPGGHRGNVSDSSVTGSQPHTGSSEKPLPGPVTTQRRTPVLARS

SEQ ID NO: 262231 - protein, 316 aa, unidentified
MLYVGIDIAKNKHDVTALNVPGKTVLKPLTFSNNKAGFELLDLSLRQLNQDCLIALENTGHYAFNLLNFLHEQGYKVYTYTPLLIKEFAKSLSLRKTKTNKKDAHGIALKLLSDPNREQFQHDNRQVELKILARHIHRLKKKQSDWKVQYTRCLDIIFPELDKIVGKHSEYTYQLLTCYPNPQKRLEAGFDKLIEIKRLTASKIQDILSVAPRSIGTTSPAREFEIIENIKHYKRLIDKAETCVNDLMAEFNSIITTVTGIGNRLGAVILAEIQNIHAFDNPAQLQAFAGLDSSIYQSGQIDLAGRMVKRGSPHLR

SEQ ID NO: 262232 - protein, 443 aa, unidentified
MACKVHVDDLVVIQPDTAGIDIGSQSHWVSVPADRDTEPVREFSAMTHGLLALADWLQQCGIRRVAMESTGVYWIPLYELLCERGFEVALVDGRKIKHVSGRKSDPIDCRWLRKLHSCGLLQGAFRPEQEVCELRAIVRHRGRLIEDAARYVQRMQKALTEMNLKLDRVLSDIAGTTGMAIIRAIVAGERDPALLAQHRDKRCQRSVEEITQALTGTWRDEHLYVLAQALSTYDHFHAQVRACDAEIERRLAQWPTRTDAPAPAASKRKRQRNTPQIDLHTALYHILGVDVAGMPGMDPYTVLRVLSEVGTTLERFESVKAFAAWLGLCPGTRISGGKVLCGKTARIANRAARAFRLAAQAVGKTDTALGAFYRRLKARLGAPKALTATAHKMARQFYALIKHGEGYVEQGAAEYEARYKQRVLNNLSRRAKALGFNLVPTAA

SEQ ID NO: 262233 - protein, 392 aa, unidentified
MRTCIGIDAAKTTHWAVGVDEMGRVVLDRAVENDTEAIDTLIAALHRLDGEVVIGLDVVGSFARFLEAMLLAEGFTLVHTPGIAVNRAGQGFAGGERKSDPRDARTIAELVRTRDLRPILPDDDTHVALRLKVGRRRDLIQDQTRRLARLRGLLCGIHPGLERGLDVTCKGPLALLSKYVTPAEIRRAGKARLVAHLKKTPHLHGVHALAERALQAARAQKIAVPGEAATAELIRELANEALETRRKIARLDTDLEGLLADHPDGTLIRSLPGMGVVLAAEFIACTGDIARFDSPDALASAAGLAPVLRQSGNRTGWRRAFGGDKALKRVFYQSAFCAVSTKDPLSKAFYDRKRREGKHHTQALIALARRRVNVLWAMLQCREAFDPNKNAA

SEQ ID NO: 262234 - protein, 353 aa, unidentified
MNSIGIDLHKASISVCVMSPDRQVLARQRMACNDPAGIVAFFQDWGPFQAVIEATASYEWLFQLLEPLAQRVVLAHPKKLRIIAESTRKSDRLDAQVLAEFLALDMIPPAFRPAPRQRQHRQPAVGDRRLVRHRSYVSGRITSVCCKIRVILADYNADRKDLFTPSGLKYLAQVKVSEADRFVLDQLVAERKRLRDQLAAVEKQLRAFARSAPVAEAEARAVTDRWLAVVDSIPYVGPVTVDVVVSELGDVQRFRSQKRAAAYAGLALGHRESGGRSKELGITKEGSPLLRWAMIQTAWRLVQRTQRWRSIFEPLARRRGKKRAIVAVARRVLCMIVSLMQSGQRYRHAMTSA

SEQ ID NO: 262235 - protein, 400 aa, unidentified
MIDTGDIDVFLGLDVGKGEHNATAVTPAGKKAFDKRLPNTEPRLRELFAKLKAKHGTVLVVVDQPASIGALPLAVARDMGCPVAYLPGLTMRRIADLYPGEAKTDARDAFIIADAARAMPHTLRAIDGEDETIAELEMIVGFDDDLAGEATRVANRLHGLLTQIHPLLERVLGPRLQHPAVLTLLERFGSPAQIRKAGRRRQVTLLQAKAPRMAERLVEDIFAALDEQTVTVPGTEAAALIVPSLAASLGVVLDQRKLLAGRIEELLEAHPLSKVLTSMPGVGVRTGARILIEVGDGSTFPTAGHLAAYAGLAPATRSSGSSIRGKQPSRRGNKQLKRAFFLSAFAALGDPASRAYYDKKITQGKHHTQALLCLARRRADVLFAMLRDGTFYEPQPVRSG

SEQ ID NO: 262236 - protein, 377 aa, unidentified
MGEDTAFVGLDVHKETIAVAVAEDRRGGEVRYLGEIENTREAIRKLVRKLTKAHDTLHFCYEAGPCGYGIHRQLTEMGHDCDLVAPSKTPARPGDRVKTDRRDAVLLARLHRAGELTAVWVPDEGHEAMRDLVRARTAAMESLRRARQQLSGFLLRHDRVFRAGCNWTKKHRVWLSGLRFQHPAHQIVLQEYIHAVDDAAARLARIEDQIRTLVPIWSLAPVVEAIQAMRGVSFISAVTVMAETGDLGRFDNPRQLMSWLGLVPSEYSSGPRTARGGITKAGSKDARRMLIEGAWTYRCHAAVGKVHMARLEGLPQEIRDIAWKAQIRLCARYRRLSGRGKPATLVVTAIARELAAFIWAIARKVTPNTQPAAAAAC

SEQ ID NO: 262237 - protein, 421 aa, unidentified
MQVIYERCAAVDVGKDVIAVAVRKPGDGPGGRVTVRRTYKTFYGVLREAARWLMAEGVTHVAMEATGIYSMPVYHALIEHGDFEKVLVCNAGHVKNVPGRKTDMADAEWLCQLLECGLLAGSFIPPAEVKAARDVIRYRAKIAQQRVSEISRLGNVLQDAGIKLDSVAWSVSTKSGRLMIEALIDGERRGAVLADLAIGRMRSKIADLSMALEGRFGDHHAMLCRLHLDHLDHLDGMLAKLDAQIEAMMQPFRAARGLLTTIPGIGPLSAAAVISEIGTDVRGYFPDAAHLASWTGLCPGNHESAGKRRGGKPRKGNTHLQTLLVECAWSAVRHDGYLKSLYHRHVMKNGGYRSSTAKKKAIVVVTHAMIVIIWHIMVTGKPYYELGAGYFASLQDPERETRRLIARLQALGHTVTINPAA

SEQ ID NO: 262238 - protein, 400 aa, unidentified
MALREQAFIGLDIGKTHHWVCALDGEGKPLLSRKIANDETEIVTLLTTASALAHQLVWAVDIIGAPSALILSLLTRARQSVRYASGRIVSAMSRAYPGEGKSDAKDAYVIAETARIRRDLPMIDEDTDLVRNLAVLTGYRADLIADRVRMINRLRDLMTSVFPSLEREFDYSSHKGALVLLTGYASPDRIRRLGQTRLAGWLRHRKVPDSASIAARAVDAAKAQSIMLPGQDLASTIVAELAASILALDERLKTLDKQIEQTFQQHPQATIIQSMPGFGPFLGAALLVGAGDLRAFPSAGHLAAAAGLVPVPNDSGRRTGNLHRPHRYSRPLRHVFYLSAQTSMMRAGPNRDYYLKKRARGHTHSQAVISLARRRVDVLWSLLRDNRCWVADPPEHAQAA

SEQ ID NO: 262239 - protein, 370 aa, unidentified
MKGGLPGGSLRVVTWEATMRRPLNIMLHVGMDLSRHRLDVRVLEDGGATVAELVVAPTEPELRQLAARFKPGGPVRGVIESMNGARFVHDTLELAGWEVEIADAQKVKGLAPLACKTDRIDAWVLAELSRRDLVPAIWLPDPAVRAHRERARFRLHLVHHRVELKNRIHASLITFGHACPTSDLFGRVGRQRLTELEFPEPWASDITAAVELIDHLNAQIATIDTDLRREGADHPYVPLLMTVPGIGWILAYTIAAELGDITRFPTPKKLCGYTGLCPRVYQSGSVDRRGRLAHNGPKYLRWALIEAAVHACRHEHYRDHHQATKVRLGRQRGAKVARVETARKLTEAIWHMLTKGEPFAPQVPRQSLAA

SEQ ID NO: 262240 - protein, 328 aa, unidentified
MEPDYIGIDLHKAFFQGCSVRGNGERRWEQRWPTTDAGIADLLARCGPESRLAVEASSPTWAFVDRIVEHVGSVQVVDARKTRLKAGYAAKTDRLDAQRLADALRRDSVVGIYYPPPAIRELRELCRYRCQLARVQASVKQRIQALLLRHGVVVPVRSLFSARGHQWLTALALPGWGGASLTGWRQVLADVRARLGPVLAAIRTTAADDPIAHALDARPGFGPVFSVTLRAEVGTITRFPDGPHLASYAGLVPRVERSGSRQWSGRITKAGSPWLRWALIEAAIHQLRRQDDFGRWAHQLAVRKGILKARVAVARALCDELFVVWPRA

SEQ ID NO: 262241 - protein, 396 aa, unidentified
MENPIIACDVSKGSSHIQGFIGLSNPVGNPFVVQHLKNDLKQIKELAKSLEKKTKKKPVFVFEYTGIYHECIAKYVRDIGLEAYAISPLESAKVRKSSIRVTKTDSKDCLNITTVYYHRNVRKFNSDNNDIKALSRRKRELRNELIHLKCVYHRYIDLIWPCFDSIFNIDTQSSLIVISKYKHPYKLKKWSAKDIAIFLLNHGHFSKSRAFEYADKFKDYASNCVSGVDEDSEYVNGLINTYDQMQIIKEEIEAINIRLERMVEASIPYKLLKTIPGFGENILLQTSAEIGDYTRFKTAKQFVAYCGLDPSILQSGKDDGEHYSITRKGNRILRSMLYLAVSQMLTRKIDNQITRFYFKKKSSGLSHKVAAVASCRKLACCVFGMLSNGTCFETTI

SEQ ID NO: 262242 - protein, 360 aa, unidentified
MSEIYCGIDFHKNTSMVIAVNDKGEKVVQDNIKSANLKTYFSSTQKAGWKIAIEATGGSNHVAQMLRDLNLSVTLINPNQFRGIGIGGKKTDERDALALANGLRMGFAPAVHLKTLQSRQLKTLLTSREILVRHRCSLMNHIRGTLREYGVVFPAGAEEFYMNAEEKVKSLTDGMIREFLLTQVTEVKRLLAQEKKLEADLESTYGQDDRIKRLRSIPGVGPMVSLSMLAIVDGDIDRFPNASCFAAFLGLVPSVSASANKRMMGSITRSGPEMLRRYLIHGARAWMRYSAENGDKNRKWAEQVKGRRGQNKAVVALAHRIARICYAVLRDGTYYSFPKKPSRTVQDSPENPVKQEGQAA

SEQ ID NO: 262243 - protein, 328 aa, unidentified
MHFIGADISKLTIDIAYFDVTAKRWSKPCKVRNIKCGWNELIRTVEKQTQASCDSICIVMEATGVYHLKVAAYLSKAGLNVIVANPGRSAQYAKSQNQDNKTDPLDAKSLQRYGSNLEKFHLFTPDSPEISELKTLLSRLRQLDKDLQRERNRLEKCAFLEASALLSTSLKRSIRIIIKEQKWVQAHIDKLIASNAKLERDQQLMCSIKGIGKVTSQWLLPLLSDKRFNSAREVGAFLGLAPCHKSSGTTLKTRGKLTGRGNAALRARLFMPAMSAATNDPEMRAFYQGLIAKGKPKKVALTAVMRKLAHLCYGVVKNQTPYKANYAT

SEQ ID NO: 262244 - protein, 342 aa, unidentified
MQWTVAIGIDTHKHTHVAVALDRLGAQLDAFEAPASSAGYLALYRWAHELGEPVFALEGSGSYGAGLARFLQAAGCSVYECERPKRGERRRGKNDLIDALLAARRLLTGEPLGSPRGLSGPREDLRLLLLERRSAIRARTATLNQLQAIVVTAPARLRARLGDRTSEQLARAVARLRPGKSEQAVVRGVLRRLGRRVLSLDAELAELERELEAIVSALVPELIAECGVGPVCAAQLVVSSGDPSRMASEASFAALAGTSPVDASSGQQQRHRLNRGGDRQLNRALHVIALSRVRYHGETAAYHQRLVASGKTTREARRCVKRMLARYFHRKLCSLPALALTT

SEQ ID NO: 262245 - protein, 347 aa, unidentified
MNFYNRQHRYYCGIDLHARKMYVCILDQKGKTMVHENINTDPDLFFQLVSPYLKDIVVGVECVFCWYWVSDLCAMHQIPFVLGHALYMKAIHGGKTKNDKIDSYKIALLLKGGNFPTAYPYPAEWRATRDLLRRRMYLVRRCGELVSHIQNTRTQYNLPGFNKKLARKYNHAGVAEQFENPEVRKSVEVDLAAIASLNQILNQLEWHIEKTAEQHDYHTLYLLRSIPGVGLILALVFLYEIQDIKRFPSVQDFSSYARLIKPVKTSDGKWAGKSNGKIGNHHLKWACNEAAILMLRESEKAKQYVAKLERKYNKGKALGIFTHKIGRAVYFILKNKEAFNMDRFFSQ

SEQ ID NO: 262246 - protein, 355 aa, unidentified
MTSTKYIGMDVHKESISIAVINASGKIGMECVIETKASMILQFFDGLRGDLQVTFEEGTSAAWLYDLLKPHVTKLLVCDPRKNASMREGNQSDKIDARRLAELLRLNHLHPVYHGEHGLRTLKELVRSYLTITKDLGRVMSRVKAIYRSWAIPCTGKQVYAPRHRGEWLGKIGEPGVRRRAEFYYQQLDALRAVRQQVRRELLAEGKKHSAWKRLCGIPSIGPIRAAVLLGILQTPHRFRTKRQLWSYSGFGIETQSSADHRRVNGQLERAKKQVCIRGLNRNCNHDLKNLFKGAAIVASSKPGPFQEFYTALLSKGIRPEMARLTLARKIATIVLIVWKRGACFDAQHLKPQTA

SEQ ID NO: 262247 - protein, 364 aa, unidentified
MKIVGCDLHAGQQSIAMMDSETGELTEKVLKHEGNAVREFYGSLPGPVVVGIEATGAMQWFLELLEELGIECRVGHPAKIRAAETRQQKHDRRDAEVILELLLMKDRFPDIWMPSTEQRDLRSLLRDRHQWVKMRARLQHTLQAIALNHALRKGKALWTVTGRQALQDLALPDYTAQRRDELLRLYTQLEQRIQQLDRQVEKEARARPRARQLLTHPGVGPVTALATEVFLGDPHRFSTANEVASYIGMIPCEHSSGKRRRLGKLTKEGNSLLRYLWTEATLHAAVKDPELKRFYRRKLVQKGMGKARVATARKLGIRLWIMLRDEIDYEEFCRRGRLPQKGKTHAGMPDFNSGPARAVTGSTE

SEQ ID NO: 262248 - protein, 340 aa, unidentified
MNATTYGLDVAKRVFQLYWVDAHTGEIVNRRFGRDELIGFLAQRPAGRVALEACGSGHWWARKIRALGHEVVLLHAKFIRPFVQTNKTDAADARAIWTAVQQPEMRTVAAKTEDQQAMLALHRMRALLVKSRTMQVNQLRGLLYEFGVTFRAGRLAGLAEMRARMAELEDALPAMLFDGLRDQLQRIDGLEQDIDQLEKRIGAWQKQEAACRAIAEVPGIGRLTATALVAMIGDARTFKSGREFASFLGLVPRQTGTGGKTRLGSISKRGDPYLRTLLIHGARSVMHHAKVPTPWLTEIQARRPANVAAVALAHKMARTAWAILAHGRAYQKDYVSVKPA

SEQ ID NO: 262249 - protein, 385 aa, unidentified
MKESKKQIRRFGTMTRDLLELSLWLQQLGGTHVAMESTGVYWKPAWNLLAGQFELLLVNAQHIKQVPGRKTDIRDCEWIADLLQHGLLRGSYVPEQEQRDLRDLTRYRVRLNEDKVRLANRIQKTLEDANIKLASVATDVLGASGRTMLQAIASGEDDPEKLAQMARKGLRKKLPQLWLALQGRIRDHHRFLLRQLLEELRFTEEKINELDQRIQQCMLPHHHAISLWTSMPGVRVTTAWSLVAEIGTNPEQFPLGSNLASWAGMCPGNNESAGRRKSGKARRGNRCLRRALNQAAWAAARTKNTYLAARFHRLAARRGSKRAIVVIGHKILVLAHYMLQHNTPFRELGAEYFQRLRTPSLSQSLVRRLQRLGFQPTLTPAQQVG

SEQ ID NO: 262250 - protein, 350 aa, unidentified
MWYAGIDWANEHHDSLVIDEKGGQVGTLRVDHSPQGISRLNTFLEQIIGAESKEQMACIIETTHGLLIAHLLEAGWPVYPVNPRTVDRRRAASGAKTDTIDAYLLAKTGRADLADLHRLTPDSEKIAELKLLTRDQDALIQMQTRLVNQLTACLKAYYPVALELFAKLQQKSTLRFLQTYPTPQAAMAVSAEQIQEVLRQAKHSNPTPVAVKIFERLHQPHLQADAVITRTKSRLMLVSQLVPLIEQIAQYDKEIETLFLTHEDHEIFASLPRAGKRLAPRLLAEIGDDRKRYQDASSLQALGGTSPVLFQSGMYSKAHRRLGCIKPLRNALHQFAWQTTQSEPWAMQYY

SEQ ID NO: 262251 - protein, 346 aa, unidentified
MLIIGNDFHARYQRIAMLNTETGEFERRRLDHTNGEVRAFYASLSEPALVGIEATSYTLWFAELLSELGHELAVGDAAKIRASQTRKQKYDDRDAGHMMELLAEGKFPRIWLPGAEDRDVRVLLHHRHSLVEMRTRAKNGLQALALSHNLCQGPKLWTAAGQQAFQALKLREPAARRREDLLQLVTQLDGWIQEAEHRLEQEAGKRPQVQRLRTHPGVGLLTALAMVVVLGPVSRFANGRKVASYVGLIPSEHSSGGRQRFGHLTKQGSRLLRFLLVEAAQSACRWDPEFKQDYKRVAFRHGWARARVMIARKLAIRLYIMLRDQIDYAEFVQRGTSAGMPGVALV

SEQ ID NO: 262252 - protein, 379 aa, unidentified
MEQSSTLYVGLDVHKDSIDIAVADAPRDAEVRHLGSVAGGVTAVSKSMRRLVSAGHRLHIVYEAGPCGFVLQRHFTALGWRCDVVAPSSIPHPCGERIKTDRRDAMKLARLARSNDLAVVRVPDGADEAIRDLVRARDDAVREQRNGRHRLKALLLRNGTPYAGKCSWTAAHLRWLATVKLEHAAQQISFQEYLHSITESGARIGRLEQAMRDALPDWSLRPLVQALQALRGVQLIAAMTLVAELQDFLRFDNARKLMAYVGLVPGEHSSGPKRRQGSITKAGNSAARRMLVEIAWHYQQGARVSASIATRQADLPAAVTAIAWAAQLRLSAKFKRLVARRVMKTKVVVAIARELAGFVWAIGREVQISGWQGVKPATA

SEQ ID NO: 262253 - protein, 394 aa, unidentified
MEAVTSQPHTPAAIRTDLAAIFVSLELSRSTWLITSLSPGNGEKMSKHSVAGGDVAALLHRFAQLQEKVRSRTGNHVPIVSIQEAGLDGFWIDRVLKANGIESYVVDPASIAISRRRRRAKTDKLDGEALVRALLAFKRGEPRVCAMVNPPSPEEEDRRRICRERKVLIAERVKHVNRIKGLLFGQGISGYEPLRKNRRKQLDELHTGDGRPLPTHLKTQISRELDRLELLLEQITAVENERDTLLAAQKDSVAATATLIPAWAMLCDVKGIGLELAAVLWTEGLFRHFDNRRQVAAYAGLAPTPWQSGTIDHEQGVSKAGNPRLRTTMIQLSWLWLRHQPQSALSLWFTARVQSSGGRTKKSAIVALARKLLVALWKYVTAGVVIEGAVLKTA

SEQ ID NO: 262254 - protein, 451 aa, unidentified
MWVSIIHPDAAGIDVSSEDYYVAVPDDRDAEPVRKFGCFTQNLHEIAGWLQKCGITSVAMESTSVYWTQLFIVLQDYGLEVFLVNAHQIKNVSGKKTDVEDCQWIQQLHTYGLLTNSFQPDNITRELRAYVRQRKNLSEDASKEVLRIQKSLTLMNIKLDIVISDIMGKFGKNIIAAILNGERNPEELINLTDTRLKASKEDLLKSLEADWRQEYLFTLQQNYELHQFYQMKITECDDQIKSLLEAYPRYEYQRKEGNDMFNPFKKKKKYKQKTDLVFDPDGYLKEIYGIDVTKIPGFSSLTAVTILSETGSDLKNKFPTKKQFLSWLNLVPNNRKTAGKVISSKIKKKKNKAGQSFRLAANALKNSKCPLGDYFRKVKSRDGHGRAVIATSHKLASIFYTLVTTKSEFNYDTYLKSNKINIERHLNRLNRRVIDLKSQLLQLSELQPVKK

SEQ ID NO: 262255 - protein, 324 aa, unidentified
MGSEQRTKVYVGIDVSKEWLDVANEDGTFEARFGNDEAGHAELVARLKEVLPDLVVMEATGNYQLELSIVLATAKLPMAVVNPRQVRDFAKALGILAKTDAIDARAIARFGASVKPRAQPLPSDEVLEMEALMTRRRQLVGMIASEKNRLQALFGPAKKSWAEKSIRDTLSHLIKQLSQIDKDLTKRIERSPVWKAKDDLLKSVPGVGKVTSMTLSIDLPELGTLDRKKIAALVGVAPLNRDSGRAQGKRRIWGGRASVRTALYMACVASLRCNPVIRALYDHLISAKKPVKVALVACMRKLLTILNAMVRSQRPWNPSALTGA

SEQ ID NO: 262256 - protein, 420 aa, unidentified
MLSIKHFVCCGMDVHKKFVVATIAVTDYRGVTSYIKKKFATFNSDLKALKKWLLSHNCTEVCMESTGKYWIPVFNVLEDSCHVVVANPKYVRAIKGQKTDDKDSAWIADLFKFDIVPSSYIPCKEIRALRELFRYRQKLIGHRSSEKNRFQNSLTVSNIALSSVLTDTFGKSATAIVDYILTCDVFDPEYCKSLLLKKAKEKADDVVKSIIGYELRGDQSLKMRVCRKHFDYINECISTLEEAILDLSQPYHKFIELATTIPGITEKSASFIIAEIGVDMAVFKSSKRLCSWAGLTPQNNESAGKKKSVHISRAGAYLKPLLVQCANAAIKDKKNPYFKYKYDRIKKRRGHKRAIIAIARMMLTCLYHMFSKQEAFNPADTDYSAIPEEMYQKFQEQYDKNAIKRLEKRGFTIIPPVATA

SEQ ID NO: 262257 - protein, 354 aa, unidentified
MLYVGMDIHKRFSQVAVIDPSGEVIDQRRLNHTPCEELTTYFNQFPKDTQVIMEPTCGWSWLSDCISDLGLEVVLAHPLKVRLIAESQIKTDKVDALVLAQLQRTGFLPKAYLAPPEVRKLRELIRCRCRLVQLRTMLKLQIHALLDRLGISHPLSDLFGKTGRVFLESLELESPYKENLSRQLRVIDLLTEEIKQIEKIIQSRVKKDPQTKRLMSIPGVGFILAYLFTSEIGDITRFASAKKLASYCGLVPLVKQSGNRLHYGHLTRRGNSLLRWGFIEAAHVAIRWNPELKAWASKIRNKKGSGVAICAVARKLVNIVYQLLTQKREYLPRETRANRSSRPDLLLVAPPVAG

SEQ ID NO: 262258 - protein, 415 aa, unidentified
MALKIVYKICCGIDVHKTFVVACIASTNDKGVTSYESHRFSTYTSGLKTLLQWLLDRNCKDVCMESTGKYWIPVYNILEKDCSIVLAHPKYVKAIRGKKTDKKDAKWIADLFKHDLVAGSFMPPADIRQLRDLMRYRFKLTCFKSSEKNRLQNCLTVSNIQLGNVVSDTFGKSAQAILDKILEDPADTSFDLEPLVFKSLKKKLPELRDAIDGYITPEQAGKLKVIKAHYENLEARKAELEELILALATPYQQELAILQTAPGISSDFTAIGIISEIGTNMEAFPSAKHLCSWAGLTPTNNESAGKKKSVRVSKAGCYIKPLLVQCANAVVKSNKHPEIRNRYLRIKKRRGHKKAIIAIARMLLTALYHMLKNGENYNAELYRKSDLPPVDREITVEQAILIARNQGYKIKSATA

SEQ ID NO: 262259 - protein, 392 aa, unidentified
MIYVGIDVAKDKHDCFIASSNGELSFNPFIIPNNRKGFDALYQKIRSVSDGLTKVKVGLEATGHYSYNLLGFLLDKGLPTYVINPLHTNLYRKSLSLRKTKTDQVDSRTIATMMMSDMNLKPYSDTSYHNEELKSLTRYRFDKVKERAKLKSSVSRLVCILFPELEKLVPTLHMASVYDLLSEFPGADAVAAAHLTRLSNLLSESSKGRYGKDTAVMFREAAKSSIGSLMPAKSLELKHTIKLIHELTIEIDEIETAIKRIMDEEIQSPILTIPGISYRMGAMIIAEIGDFSRFDSADKILAYAGMSPSTYQSGQLNNCHSHMEKRGSRYLRYALYNATKYVCHWDESFGTYLEKKRSEGKHYNVALSHATKKLVRLIFAMEKSRRAYIPVP

SEQ ID NO: 262260 - protein, 343 aa, unidentified
MQVVRIGLDLAKYVFEVHGVDKHGKVIVRKRLRRDAVARFFANLPACLVGMEASNGAHYWARMFTELGHQVRLISPQFVTPYVKSNKNDRNDAEAICEAVGRPSMRFVPQKSTDQLAVQAVHRIRRRLVADRVRLVNQIRGLLSEHGIVIARDIAQLRRGLAVIVGNINDGLSEMVRALMRELQAELAEVDARITAYDRRIREIFRASEQCQRLGKIEGIGPVTATALIAAVGDRSCFKNGRQFAAWLGLVPKQRSSGGRTRLFGISKRGDRYLRTLMIHGARAALSRAGGKQDPRSLWLGKMRQRRHPNVAAVALANKNARIVWAMLTGDTAYEPALSVKAA

SEQ ID NO: 262261 - protein, 371 aa, unidentified
MNEFIKYVGMDVHKETIAVAVAPSGGGEVRYVGEIANTPQAIEKLVKQLCKDKADLKFCYEAGPCGYGIHRQLTDFGWACQVVAPSLIPKKAGDRVKTDRRDSLSLARLHRAGELTAVWVPDGAQEALRDLTRAREDMKHLQRQAKQRLLAFLLRHGRSYDGKSNWTQAHYRWFEEVKFAQPVQQIVFQEYVDMVKAMDKRIDALDKQISTAASESVFWETIQALMALRGVSLLTATTIVAEIGDLKRFASAPQLMAYLGVVPSEHSSGGKKSRGGITKTGNGHVRRVLVEAAWTYRHPARKTATLQRRAEKTPEAIQEIAWTAQKRMCGRYKLLEGRGKLKVQVCTAIARELTGFIWAIGQTMAQPANKT

SEQ ID NO: 262262 - protein, 386 aa, unidentified
MRNDHSPEQGAIRTDLGAIFVSLELSRSTWLITSLSPGVGEKLSKHSIPAGDAGALLARLTLLRQKATARTGREFPIIVIQEAGLDGFWVHRVLESEHVESHVVDAASILTSRRRRQAKTDRIDGETLVRTLLAYKRGEPRVCSMVRVPTPNQEDRRRICRERKALLTERIGHTNRIKGLLCTQGVFNYNPLLRDRRARLEVLQTGDGRPLPERMKAQISRELDRIELIIAQLKAVEVDRDLLLEQEEATPTVPAVMLGRLKGIGPQIATLLWSEALYRHFDNRRQVAAYAGLAPTPWKSGSIDHEQGVSKAGNPRLRTTMIQVAWLWTRHQPGSALTLWFKDRVERNGGRMRKTAIVALARKLLVAFWKYVTSGVVIEGAVMQAA

SEQ ID NO: 262263 - protein, 369 aa, unidentified
MGQGIPSIGMDVHKRDILVWVQLPGRKGGVEEKIPNEKRAIGRWVRRWQRESPGRVVCAYEAGPTGYALQRQLGALGFECRVVAPSLIPRKPGDRIKTDRRDARKLGELLKAGLLTEVHAPSEEEESARDLCRAREDLKQDQMRARHRATKFLLRRGIRYTSGRKHWTGAHRTWLRQQVISHSAGQAALDDYRLHLEQLDSRLQGLDEKIRALSESKPYASSVGALRCFRGIDTITAMVLVTELHGIARFGTAAELMAYLGLVPSEHSSGERQRRGPITKAGNGHARRVLIESAWHARHTPRISRALATRRVDQSGEAIAIADRAMQRLHRRYWHLLQRGKAPSKVATAIARELAGFVWAALQAIEARN

SEQ ID NO: 262264 - protein, 369 aa, unidentified
MPHVTSIGLDVHARSVAAAAFNPFTGEVVHRDFGTDAAEIAEWALGFEEPRACYESGPTGFRMARELRALGLDCAVAAVSRMQRPAADARRKNDRRDAEFIARMLATHNIVEVPLPDAAAEAARDLDRALDDATADYLRARQRLNMFLIRIGRVWDERNADGTRKKGWTRAHWRWISETRLEGPQRDVLEHYVTAARRAESDKRQLERKVVALAGTDRWRPAVEALSCIKGIDTLTAFRLAAEAGSFSRFRSAPAFASWCGLTPSERSSGETERRGGITKAGNRLVRTALIESAWRYSMCTPRPKAPAPGADVPAAIRSRADECTARLCRRREALSAAGKNACKANAAVARELACWVWEIGCRAEGTLG

SEQ ID NO: 262265 - protein, 311 aa, unidentified
MTEHTNVGIDIAKETFDVFISPDGIFLHLDNTPQGHQLLLDALSSRTVTRIVMEATGRYHNLLAATLELAGLPVAVVNPAQVKHFARALGTLFKTDPNDARIICEFGRRMTPDIRPAPDEQTQRLAMMVSRRRQLVDNRTMEQNRYGSCTDELIRMGIKRHIDWLNAEIKDTDDDIDQQIKVMPLWQEKVKLLEEVKGIGRTTLAVLLSMLPELGQLNRRKISALVGVCPYAHDSGKMKGKRCIWGGRSAVRAALYMAAMSAVRYNPTIQAFFEKLRSKGKAFKVAMTACVRKLVTILNAMVRDNKKWAAA

SEQ ID NO: 262266 - protein, 381 aa, unidentified
MRKDTRFVGLDVHAETIAVAVAEAAGEVRSMGVIPNRPDPVRRLIKRLGPVQRLRVCYEAGPTGYVLYWQLTQMGVHCDVVAPSLVPVKAGDRVKTDRRDAEKLARSYRSGDLTPVWVPDAAHEALRDLLRAREAAKADQLRARHRLGKFLLRHGRRPGKGIRPWTGKHLEWIKREVHFELAAQEDTLIDYITEVEHAARRIERLEHAIDDAVSAVPDKMRAVIDALQALRGIRLVSATTIVAEVGELSRFSRPRQLMGYSGAVPREHSSGARTRRGGITKTGNAHLRRIVGEAAWAYRYRPNLSPALRKRQAGLSEQVNEIAWKAQHRLHQRFGRLPAKGKTRQQVVTAVGRELLGFIWAIGVNVERNFGEKAVARRRVA

SEQ ID NO: 262267 - protein, 411 aa, unidentified
MLNMLYIGIDLSDKFFDSCITDSQGIVLSTKRFDLSHGGFCSFIKLVHEHEKDSHKCIVGLENPRSRLVDFLAGRGYTVMLTNPNAISSYRKSRKPSRAKSDKGDAKLIADYLREHHTSLRCIQIPDETMRELSLLLEDRDRLVQQKVRFSNQLTSTLKEYFPQALDAFKSIDNKCTINFLKTIDTYAQLKALSAKKLEQLLKECGVYRTDSKERFYQAIRKPVYHISQAVVKTKTRLKNTLVAHLDLLLQQIQEYETQIQNLIDDSPNGHIFTSLPGADYILGAKLLVLYSTRDFTDASEAQQLFGTAPYTAASGQSRFVGFRRGANKLGRNTFQQFARCSINSSNWAKKQYTRRRNQGKGSQHSYRCLANTWVKITFAMWRSKTIYDENKHMASITNHIVNQPAFVNGD

SEQ ID NO: 262268 - protein, 453 aa, unidentified
MDVIYPRCAGLDVHKKTVRVCLLLRGENGRNHKEYRTYGTTTQEVLELLEWLLSQECSHVALEGTGVYWKPIFNLFEGQIQVLVVNAQHIKAVPGRKTDTKDAEWIADLLQHGLLKASFIPSAPQRELRELTRYRVRLTEERTREVNRVQKTLEGCNLKLGDVVSDVVGKASRMILSAIADGESDPTRLASLAVGRVRASQEELEAALTGTVSAHHRFLLREHLTHIAHLDQSIERITAEITRRLTPPDPPDEDEMGKAKASQDQKLQGEEDQTVTSSQESERSWEEAVRIAMSLPGIAERAASGILAEIGINMQQFPTDAHLASWIGLCPGNHESAGKRLSGKMRKGNPWARRLLLQAAQVVSRQKKGYLPAFYHRIAARRGKKRALMALAHRILVILYHLLRDGTLYEEKGEGFLEERDRDIMEKRLVRQLERLGNQVTLQPLAQAGSFLT

SEQ ID NO: 262269 - protein, 360 aa, unidentified
MIVIGTDPHKHSHTAAALDARKAEQLDTLTVLARDSGHERLLVWARALDDERIWAIEDCRHVSGGLERFLLRSGERVVRVAPKLMAGARRSARDFGKSDALDADAVARAAIREGTETLPAARLSGSEREIALLLDHREDLVAERTRIQQRLRWLLHDIDPEIEIRERSLDQAVTLTRLSGRLRRLEQTTQVRICREHVRRCSELSRSANELERQLRPLVNAQAPQLLELPGCGMLTAAKLIAEVAGVERFSSDAKLAKLAGVAPLDASSGKQQRHRLNRKGNRQLNLALHRVAITQARIHAPAKVYLARREAEGKTRKEALRALKRHLARRIHRLLSTSPIHHERARVQLNGAISVPCLT

SEQ ID NO: 262270 - protein, 340 aa, unidentified
MDTIGLDLHKRESQLCILTDDGEVIERRIVTSRERFTAVLGAQPPARILLEASTESEWVARHLESLGHEVVVADPNFAPMYATRRRGVKTDRRDARTLAEACRLGAYRRAHRTSDEQRHIRAELAVRDALIRTRTRYVALTKALVRRDGLRLPSGTPAHTDAKLAVLPLLPALAAELAPLRALWEPVNTQIAAADARLAHVAAADPVVVQLMTTPGIGPVTAVAFVATLDDVTRFASAHQVEAYLGLTPREYSSGEQQRRGRISKTGNARMRYLLVEAAWRVLRTKDPAAAALQAWAATIAHRRGRSIAAVALARRLAGILFAMWRDGKDYRAPQPAAVA

SEQ ID NO: 262271 - protein, 351 aa, unidentified
MWIIGCDFHPRYQQVAAMNQETGEIVERRLSHETKEAEQFYESLPPGARIGMEATCTAQWFERLLHRCGHQLLVGDPAAIRASVVRKQKTDTRDARQALELLLSDRFPSIWIPTPAERDVRQLLVHRHKLVSWRTQVRNQLTALARSQGIFPRTRWWTASGRQQMESLPLDRWAAQRRTNLLHLLDELDARIAEWTGEVEQQARSRADAVELMKQDGVGPIVSLAFVLTLGTAKRFHRGKQVASYLGLNPSERSSGGKQRFGPISKQGNRMMRWLLIEAAWMAVRKDPELQRVYQRLAFRRGRKIAAVAVARKLAVKLYWRLREFEQHNAPQSPAPMQGSSYRGLMHTSTP

SEQ ID NO: 262272 - protein, 381 aa, unidentified
MLYVGIDVAKNKHDVTALNVQGKTVLKPLTFSNTRAGFELLDQSLRQLNQDCLIALEDTGHYAFNLLKFLHEQGYKVYTYNPLLIKEFAKSLSLRKTKTDKKDARIIALKLLSDPNREQFQHDNRQEELKILTRHIHRLKKKQSDWKVQYTRCLDIIFPELDKIVGKHSEYTHQLLTRYPSPQKMLEAGFDNLIEIKRLTASKIQDSLSVAPLSIGTTSPAREFELIEIIENIKHYNRLIDKAEKQANELMAEINSVITTVTGIGNRLGAVILAEIRNIHAFDNPAQLQAFAGLDPSIYQSGKIDLAGKMVKRGSPHLRWALIQAAKACARFSPAFKAYLRTKLDQGKHYNVAIIHLAKKLIRTLFYLLKNKLPFDEQKVI

SEQ ID NO: 262273 - protein, 313 aa, unidentified
MAKCFVGIDVAKAELVVAIAPQGDVFTVGNTEQGMASLVMRLRKVRPHRIVLEATGGYETLAAISLGVARLPVAVVNPRQVRDFGRSTGQLAKTDQIDARLLAAFAQAVPVEVRPLPDDAARALQAVVSRRRQVVEMLTAERNRLHLADNTVAPSIREVIRVLVRQVQDLDHDLRQRLRESPVWREAQDLLKSVPGVGDGVSSTLLALLPELGQLNRKAIAKLVGVAPLNRDSGQYRGRRQVWGGRATVRAALYMAALVGSRHNPVLKGFYQRLLDAGKPKKVALTACIHKLLLMLNAILRTQRPWTLEFSHA

SEQ ID NO: 262274 - protein, 312 aa, unidentified
MTETNSVVHAGLDIAKAQLQLHLQNQQHVLPNTVTGHQRLIRLLRVVAGVHVVCEATGGYERKVVAALHTANLPVSVVNPAHVRHFALAQGQRAKNDPIDAALLTAYGHALRPNATPVPQAVLAELRELVQWRDHLKEQLVRARQPAEHATLAFVRRQQSKEVTHLEKQMAAVEKELAAALARHPRWRELVQRLAELDGVGTLTAVSVLSQMPELGQLNRGQAAALAGLAPWTRQSGPWEGQRHIGGGRAVVRRALYMSAVALARQTGSTLGKFYARLRATGKPAKVALTAVMRKLLLQMNQVLKYHVPDPA

SEQ ID NO: 262275 - protein, 424 aa, unidentified
MLGVGIDWAETFHMVALGRPGEGVVQVLRVEHDKPALEALLERLRSLEPDPGEVRVVIETRHGLLVERLLEAGFVVMPVNPDLIARRRGPAKKKDDIEDARIACLLALDRFQPLRPLIPHGELAAELRLLGRDDERACQDERRLLNRLRADLLAVFPAAVQIAGPDMGAPTFLRMLQRWPTAAALASTSRQDLVAFARAAHSGYPDRFADRVQQALAREHFTARPRLAQAKVDTIQLTIAQLLLIGAQRRTWERRMGQLLLGAPRRRGGALPAQAERDQGQALPGGELYLSFPGLGDRLAARIAGEIGDHPEQFPTPNSLQCYAGQAPVTRRSGKRELVITRRLACNRHLADAVHQWAFASLRRSAWAKDYYDRQRDRGKDHHAALRTLGNRWLEILWHCLQRQVPYNEAIHVANRTRALQPAA

SEQ ID NO: 262276 - protein, 436 aa, unidentified
MRGCRCSMIMGFTKPIEHFNLQRKKVITMNTLYVGIDVSSKSNVVYLMLPNGDKHSNFSVANSHEGSTLLVKKIYSALTSHSLDTVLIGLEATSVYGDNLVYFLREDATLAPFNRKIHVLNPKQVKKFHDTYNDLPKNDYVDSFVIADCLRFGRINKEVYMGDYRYKALQNLTRARFFAVQNLVKEKQRFMNVLFKKYSTMTQEKVFSDAFSTTALAVYDEFESAEALANMDLHELTDFIIEKGKNRFPDPDAVAKAIQKAARSSYRLPKTVNDSVNQVLSISITSMKALESQIKEFDKAIKAQMELLPNVLISIPGIGPVYSAGIMAEIGDINRFNSQAALAKYAGLAWKQHQSGGFESEVTRLIPSGNRFLKYYLCEAAFSLVRCDKEYSDFYRLKYKEVNRCQHKRALALTARKFVRLVFRLLKDNRLYCPAK

SEQ ID NO: 262277 - protein, 375 aa, unidentified
MKEKVRFLGLDVHAETIAVAIAEPDGEVRSLGTIANRAESIRKMIKKLGSVEQLKACYEAGPTGYVLYWQLTELGVACEVIAPTLAPMKAGDRVKTDRRDAERLARSFRSGDLTAVWVPDEGSESLRDLVRAREAAKQDQLRARHRLGKFLLRTGQRPALGMKAWTQSYQAWVKQIHFAQAARESALLDYLHEVEHMAERVMRLEQAITEAVKQASPQMQQVVRGLQAMRGIAQISAVTIVAELGELSRFESARQLMGYSGAVPSEESSGKRTRRGSITKTGNAHLRRIAVEAAWNYRLRPCVGPALRKRQEGVSEEIKEIAWKAQHRLHKRYMRLSAAGKDQRKIITAVGRELLGFIWAIGIKAEAACKQQMAA

SEQ ID NO: 262278 - protein, 448 aa, unidentified
MGSNGSGLSRGDRRRNERLTGLRSIVRPDRAIVAIDLADDKQAVVVTDHDSRVLARRRVRARAWQLQPTLQWALDQALAAGFEGAVVGCEPTGHRWRVVDQLAGGLGMALVCVQPLLVGRAREAEDFTKDKTDDRDAVLIARLVSELRCYVPERPDETWARLRHLGSRRARLITESTACIQQLRDLLECAWPAVLDAAAQPFDSMSWQASLAVVLERADDGDLTKVRRMGWERFARAVRRELPRWGTARWFSAIVRAVFDALADPTGVTAQRPAALERAQFVVEDWHDCRRRLTDVEARMTDILDELDLTGLVTSIPGLSAVGAAQILAQCGDPSRFSSPRALVKHAGLSPRENTSGNHHGTSRISSRGRPGLRLAAWRAVWGALHANPVYAARFQHLTTRADNPLAPGQARAAIAAALLRQLHVVVTRRVHWDPALAAPPATEALAA

SEQ ID NO: 262279 - protein, 399 aa, unidentified
MFVGWDWASAGHDVTVIDSAGERVHRMAIPHTEDGIARAVAKLADYGDPGGLPVAIETTRGLVVDRLLAAGHSVIPVHPNAFHAARPRWGAARAKNDPGDSFKLADYARTDIHRLPVLAPTLPETLELQALTRQRDDQLALRIAAVNQLAALLDQHWPGGKTIFAQLHSPIALEFLDRFPTPRAATGLTPARIEAFCRRRAYSGRRTGAELLGRLRDAPISASRLGEPVVGQMIRAQVAVVRALQAGIDTLDTVIAAKATAHPYAGLLAALPRIGTLNLAQIIGEVGPILERATSFDQLSAETGLAPVTRASGKTHTVAFRHATNRRARQALHTWLDNSRRSSDWAQQRYAAARARGQRHPHALRTIGRAWLRIIWACWRTKTAYDPVRHQPAKQPAAA

SEQ ID NO: 262280 - protein, 411 aa, unidentified
MHNRQNYLYVGVDLHKEHHTAVIINCWQEKLGEIQFDNKPSAFSKFLLEVETYVSAGITVVFDLEDVGGYGRALAKYLVDHEQVVKEVNPALSFLERKSHVTTQKSDSWDAECVARILINKLNQLPDAKPNDLFWSIQQLVSTRNALVKAQSALKNQLHIQLNHHYPSYKKFFSELDGKTALAFWQQYPSPFCLEGANIKQLTAFLLDVSNNTCSVKKASDILKLVKEDGQTMKEYQETRDFLVRSIVRDIEFKKKEMKYIERELKRLVNLLDYQLETMPGIELVTASALIAEIGDVRRFPNANKLARFAGIAPVYFGSGGKGKTHKSKQGNRALHALFYNLAVQQVQVAKGSKLPRNPVFHVYYQKKLKEGKTKGQALVCIMRRLVNIVYGMMKYKTAYELPVVEEKEVV

SEQ ID NO: 262281 - protein, 367 aa, unidentified
MKKVSTAAAKATKNFSQQKLTIGLDLGDRSSWYCLLDEVGEVLLEQKLSTTPKAMREVFGSLPRCRIALETGMHSPWVSRVLSELGHEVIVAHARNVRLIGESRKKDDRLDAQTLARLARIDPQLLCPVKHRSAKAQADPTVIRARAGLVRARTALVNTVRGLAKSYGERLRGCNVRNMNPEKAEGLSPELERALEPLLAGIESLSERIREYNERIEELTQESYPQVALLKQVKGVGTLIALTFLLTLEDAHRFRKSRDVGCYLGLQPGRRNSGQSEPQMHISKEGDPYLRTLLVQGAQHILGPFGADSDLRRWGLKLAERGGRNGKKRAIVATARKLAVLLHHLWVSGEVYVPLHNSNQMAMPAAA

SEQ ID NO: 262282 - protein, 351 aa, unidentified
MSEKTGSHIAVVGVDIGKNSFHVIGLSSRGAIVLRQKWSRAQIEVPFANMPPCLVGMEACVGAHHLSRRLKALGHDARLMPAKYVRPYSKGQKNDFRDAEAIAEAVQRPTMKFVATKTVEQLDLQALHRVRERLVSQRTGIINQIRAFLLERGIAVRQGQRFLHTELPGILASPADVLSPQMARIIEGLAADWRHLDERIDQLSNEIHAMAREDTGCERLMCVPGVGPIISSAMVAAIGSGDAFSKGRDFAAWLGLVPKQMSTGDRTVLGPISRRGNRYLRVLFVQAAWAVLIRPGSWERYGLKSWVESAQKRLHRNVLAIALANKLARIAWSVLAHGRGFEANAIASSIA

SEQ ID NO: 262283 - protein, 366 aa, unidentified
MKKRSTVTKEAGAKANGLNGEVVGVDLGDRTSDLCVLAEDGAIVEEGRVQTTQAGMTRWFEGKKRMRVVMEVGTHSPWVSRLLTELGHEVLVANPRKLRFIYQSRKKGDKVDARSLARVGRLDPELLFPVTHRPEGMAQDLAVLRTRDVMVRTRVQLVNHVRGAVKATGNRLRKCSTRRFVEKTGEQLPASLKETLAPVMAAIEAISEQIRRLDRRIQELGKKKYPETLVLRQVTGVGPKVALGYVLTLQDPNRFAVSRAVGAYLGLVPGRRQSGASDPQLRITKEGDGLERRLLVQSAQYILGPFGPDCDLKRYGLELARRGGANAKKRAVVAVARKLAVLLHHLWRSGEVYEPMRARLAAKKVA

SEQ ID NO: 262284 - protein, 346 aa, unidentified
MKKVESLQLVYPFIVGIDVSKESMDVCMIEMITQRQFTTVLTNTSEGYTKLKRWMKQHGNDNHEQTLFCMEHMGIYTQNLVKYLMSRGGKVWLESSLHIKRSIGLVRGKSDKIDAERIARFAMIHQQEAKLVKLTHPTLQRLQYLMRLRARLLKSKQSQELAISETEHFDKKAANEMKRLSKTALEGLAKSLKKVEEKMLEVIHMDREVRALYELITSVKCVGKVLATDLIVYTHGFTRMLDGKKLACYCGVAPFEYSSGTSIKGSPGTSSFANRVLKYHLHMAAMSAIRHCPELKAYYQRKREEGKGKMTILNAIRNKLLHRIVAVVKRGAPYEDRIVLKKVEMA

SEQ ID NO: 262285 - protein, 438 aa, unidentified
MSNKVIFNLDELFISVGIDVGADFSWMSIALPNQQFVGKPYKILHNSIDSLTTAVSKIKEAEELYSLESRIFLESTGIYHYPLFCYLRDKGFNCSVINPIITKNSTNINIRKVHNDRFDSKKAALVGLKPDLKVSLMPSDLALNCRNLCREYYDLMDNRSAYVNKLQGELRMAFPQYLGIFSKVTINTSLTLLETYTSPSAFLKADKQEIIDIIKSTARFGLTYAQNKYNAIIQAATDANQFGYIIDSNIKRIRLYISFIRKYDEEINSILESLHELVDANEDSDFVKQIHLIETFKGAGFLSAVSIMGEIGDFSAFSKPKQLFAYFGLDPAVKQSGKFEGTKVQMSKRGSAIARRVIHTLTLHRIRISRNREAKNPVLREYYLKKCDSKPKLVAMGAVSHKVCNMIFAILRDNKPFKIIAPQEHIKQYNSAKCDIAA

SEQ ID NO: 262286 - protein, 355 aa, unidentified
MKRGSSAVPKLTTGLDVGDRWTALCTVDEGGAALERGRIATTPAGVERRFRQGPVQRIVLEAGKQSPWMSRLLASWGHEVIVANPRRVKLIAAAANKDDPRDAETLARLGRLDPQLLRPITHRSAEAQQDLAVVRARDALVRSRTLLINHVRGVVKSLGSRVPRCSAHAFARQADRVVPDALRPALAPMIAIIEQLTGEIRRQTRAIEALVQTRYPEALPLQQVKGVGPITALAYVLVLEDPTRFATARSVGPYLGLVPRRRQSSRADPQLRITKTGDGLLRRLLVQSAHYILGPFGPDCDLRRYGERISARGGKNAKKRAVVAVARKLSAVLYHLWVTGDVYEPVHRAASQVAA

SEQ ID NO: 262287 - protein, 313 aa, unidentified
MNTDKITYVGIDVSKNTLVVFHPSWSKPRSFPNNSAGFERLLRCLRSLESSCQFILEPTGGYETALVDFLHRHQFLLSLVCPTQARAFAKASNRVAKTDPIDAKTLADFGALHTPEPIPAQSPLQRQLKALSRRRSFLIAQRTKEIAQLDREQDSFVRADMRALIRVLDGRIAKFERQIELLIASSTQATERKRRMLQIKGVGPVLANTLIAEMPELGSLNDKQVAALAGLAPYNRDSGKWKGQRFIQGGRSRVRRALHMPALTAVSHNPILKSFYQRLINSGKPHKVALTATMRKLLCLINRMIADPQFQLS

SEQ ID NO: 262288 - protein, 412 aa, unidentified
MDVIIDRVCGVDIGKAILAATIRAPGEGSGRKRREETRKFSTFAGDLERLAEWLIGEGVSVVAMEATSDYWRPVWWVLEQAGLELVLVNARDVHQLPGRKTDVADSAWLAQLLECGLLRSSFVPPPEIRELRDLTRYRKRLVQDRTREAQRIEKVLEDTGIKLSVVVSSVLTKSARAMIEALIDGERDPKVLAELAQSRMRSKIDELTLALRGRFTDHHGLLLRVHLDHIDQIDAHIATLDARTKERTGPFERQLAHLVTVPGIAEVAARVVIAEIGVDMSIFPTAGHLASWAGLCPGNNESAGKHRSGRTTHGNPWLREALVQAAWAATRTKDSWLRARYYRLAKRLGRKRAIVAVAHSMLIAIWWMLSEDCDYQDLGGEFYDRFNNTEAEARRLVRRLQHLGHTVTIGAA

SEQ ID NO: 262289 - protein, 369 aa, unidentified
MKNAITEANRKRRPPRKSRQRELTIGLDLGDKTSRYCIIDRDGEVLLERSTATTKKGLAQAFASLSASRIALEVGTHSPWVKRLLESWNHEVVVANAHRVKLITSSTRKDDRLDARTLGRLARIDPHLLSPIRHRSEKAQSHLVMIRARAGLVEARSKLISSLRGLVKSFGERLSSCDADQMSVERLATLTAPLQAALQPMVSVVESLTRQIREYDQKIAQIARTEYPETGRLRQVTGVGELIALSFVLTLDDPHRFRRSRDVGPYLGFRPKRRDSGASRPQLRITKEGDAYLRKLLVQGAHYILGWRGPDTDLRRWGLKLAAHGGKNAKKRAVIAVARKLAVLLHRLWITGEVYEPLRHSQAAGTIAA

SEQ ID NO: 262290 - protein, 348 aa, unidentified
MLAEVVDAVVGGDTHRDTHALELTAPSGATIATLMIGNDERGFAEAIAWVAEHAPGPRVVVGLEGTRSYGIGLARVLQAAGLTVVEIERPRRGERRRGKSDPIDAHLAALHALRLDADRLPTPRADGDREALRILLGARRELTTAKTRTINRLRALLLTGSDADRALSRGALSSDRLAAITRRRGGQHETREYAVRRAEARRIALAISGIDRELADNKWHLADLVTHLAPQLLAKRGVGPVSAAQAIVSWSHPGRCRNDAAYAALAGASPIPASSGRIVRHRLNRGGDRHLNRTLHDILLTRWRTCPRTRAYIARRRAEGKTDPEIRRCLKRYIARELYRSLNTAMAA

SEQ ID NO: 262291 - protein, 356 aa, unidentified
MSYDVKYIGMDVHKEAIVIAVLNESGKLVMESVIETKASSILQFLHGLRGELHVTWEEGTWAAWLYDLLQPQVQHIVVCNPRRNALLKEGSKSDKVDARKLAELLRTGMLRPVYHGEHGLRTLRELGRSYQTISKDLTRVMNRLKALYRGWGIPCAGTQVYAARSREEWLSKIPQAGVRRRAELLYQQLDGLQILRRNVRPEFLAESRKHKAAKLLRQIPCIGPIRAARLIALMQTPHRFRSKRQLWTYSGLGIETHDSAQFRFVSGQLQRSKKPQQLRGLNRNHNHEMKEIFKSAATRASCGRGPFHDFYAGLLAKGMKPEMARLTLARKIAAITLTLWKKEERFDAEQLKTQAA

SEQ ID NO: 262292 - protein, 411 aa, unidentified
MDKIYDKCCGIDVHKKLIVACFRCGKKQEVREFGATTRELLELADWLKDGGCEMVAMESTASYWKPLYNILESSNLNAIVVNARHMKAVPGRKTDVKDAEWIADLLQHGLLQPSYIPDKDQRELRELVRYRKSLVGERTRELNRLQKMLEGANIKLSGTVSDINGKSARSILEYLLTGKSIDGSKYDEMYEQKIIAHNLKATKEQIVDDLNGVMSPLQRRMMKELLVHLDELNIHIKNLDDEIDNFMKPEEKQASQAIQDVTGIGNTSAQAIISVIGSDMGRFPTDRHISSWAGLCPSDNESAKKRKSGKTRKGNALLRTTLITCAHAAVKNKKSYFYAQYVRISAHRGPKRAYVAVAHSMLISIYHILKDGVVFKDLGADYYNQFNKERKINAYLKKLKALGWEAPIVAA

SEQ ID NO: 262293 - protein, 397 aa, unidentified
MSLLFVGIDVSKDYCSSQGLDQEGKKIFYLEFPMNGEGFSRFLDTVKSYRQNLSEVTVAMESTGCYHINLFAFLCSKGMACVVVNPLLIANFARLSLRKTKTDKKDALTIAQFLLAHRSKLSEVSYSQGSQDLKDLARERESLAVMIAGLKNDVRRLLQMTFPELEHRCKLFTETMLRFLMKFPSARAIQMAKTKEIAKALIHMEGKRKRVWIDAEEIVALAKVSVAPESVAKEWILSEKIETLLYLEEKKKRMTEVLIEACRSMRVDELDIITSVDGISAITGSTFLAELGDIHAFSSSKHVIAFAGLDPSIHQSGQYEGISRISKRGNRHLRRIVFLMTLCVVRSQNVFREYFLRRKEEGLPPKKAILATAHKLLRVLFAMLSSKSYFRKGVVEV

SEQ ID NO: 262294 - protein, 480 aa, unidentified
MNVKARKAKKQVNVENQGINLLSKEELSRKIEVVEKELKSYTWRELETNGKFAKNDKLSFITDDMLIVGCDIGSETHYIRAIDVRGRELSHGAFGFSNTSEGFENARAWVLELAAVNDKKQIVLGLEPTGHYWFSLAAWMISKGISVVQVNPYAVKQSKEIEDNSQHKDDRKDPKLIANLVKDGNYGMPYLPEKVYADMRRLSMFRDQLTEDRIRNINRLHRELRIYFPEYMDAFGKIDGAFTLEVLKESAIPSDIAALGAEGMKKIWHDAKLRGRGYRRAGEIVNYAEKSVGLTDGTDAGRVAVKWYAEQILKLDEQLEAIESALHRKCREIPYAENILAILGVGENILAGILSEMGDISRFDDVKEIQKLSGMGLVACSSGKHKGQTKISHRGRKRLRYWLFQAAKSAVSHAEEFKQLHEYYTARADNPLKKKQSLVVIACKILRVIYTILKTGTTYDPEKLLKDIRRPISERKPLAA

SEQ ID NO: 262295 - protein, 410 aa, unidentified
MEPILINCAGMDVHEKKVDVCIAHGPFDKPPKFEIRTFSTMTSDLEDLKTWLKKYEITTIGMESTGVYWKPIFNVMEGDFEIVLANAQRLKAIPRKKTDIIDCKRIANLLRYGLLPNSFIPPREIRELRDLNRTRRKLVGMMTSEKNRLIKVLEAANIKLSSVVSKIYGVSSLAMIRCLLEKDKLSREDISQMAKGKLRKKLDLQEKALNGKITDHHRFLLKMHLQNIDHLSKQIIMIDEEIQKKMVPFQKEARLIQTIPGISEVNASAILAEIGVNMSQFPDEAHLFSWAGVCPGNNESAGKKKSGKTQKGNSFLKGALTESAWSASKTKDSNYSAIYQNIVRRRGKKRALVAVAHRMLIDIYFVLTKGEPYQDTGAKAVRERTIKRKERSMIRSLEKAGYSVTRAVTA

SEQ ID NO: 262296 - protein, 438 aa, unidentified
MKVLHERVAGIDVHKDMIKVAIRSPGEKPWTRKTEVFEFRTFYGVLQEMARELRRRGVTHVVMEASGVYTEPVYHALTELDFTEVMVVNPAHVKALKGHKTDARDCARMAELLECGLLHGSFIPSAEQKEVRDLTRYRMKTVQARTSEIQRLHKALESAGIKLGSVLSDITGVSARLMIDALIDGERRAQVLADLAKGTLRSAGKQADLSMALTARFTDHHAMMCRLHRDQIKLADHAIAKLDEQIAGMTGRWPRELGLLRSVPGFGDVVSAAWLAEIGPAPHRWFPSHDKLASWATLCPGNNISARKRKSGRTGDAGTYIKPMLVQAAWGAVQVRGRLQARYRRLVRRFGGDKNPGAKKKAITAIAHTLLKIAYQVLKTGQPYTDLGADFYTRRESPEQQQAYLERRLQKLHPGCTVTITISPPPGSPPPGTPAEAA

SEQ ID NO: 262297 - protein, 347 aa, unidentified
MTIVEAARGIAGGVDTHRDVHVAAALDPLGGLLGTESFSTDPAGYKALLSWLASFGDVTKIGVQGTGSYGAGLARHLRRSGVEVIEVDRPNRQKRRSSGKSDPLDAVEAARAALGGRASGRPKSRDGAVEAIRVLVVAKRSARQARVKALIQMRHLGYSAPEQLRCRMKGLSVPALVAEGAKLRPTRSADPVTAATKASLSSLAHRIEALDRELAELDERIEALLVATVPDLLDLFGVGPDTAAALVMAAGDNPERLHSEAAWAHLCGVAPVPDGSGKTSGRVKAHDGGDRQANSALWRIVMVRIAHDPETRVYFERRVKEGKTKSEVIRILKRYVAREIYRYLPRG

SEQ ID NO: 262298 - protein, 343 aa, unidentified
MNPVTLIGIDLGKHCFHLHGQDAQGRMVFRKKLSRSQMLTQLANFPVCRVVMEACAGAHWIARRLSAMGHEAKLISPQFVKPFVQGNKNDFADAQAICEAASRPNMRFVSPRNESQQTISATHRVREALVRDRTSTTNQIHAFLLEFGISLPKGPAIIKRLPAILAEHEAALPPRLMALLERLREHYKYLDEQINAVERELTRQLAEDERSQRLLEIPGVGPITASVLAVELGDAHQFANARQFAASIGLVPRQYSTGGKPTLLGISKRGDKNLRRLLVQGARTIMQRIQTRADVLGEWVRDMLCRRHSNVVACALANKMARIAWAILAKGTHYQSQSAVAAA

SEQ ID NO: 262299 - protein, 351 aa, unidentified
MLIIGCDFHPGFQQVAIFDNRTGAIQKRRLPHREEAEQFYRSLSGPVRVGMEACGHYPWFERLLEELGFELWWGDAAEVRASVVRKQKTDRRDAQHLLHLLLENRFPKIWVPSREVRDVRQLLVHRHKQVQARTRTKNQLQAMALSQGVQKKWKLWTKLGRAELEQLPLLPYAAERRQRLLEALDGLEAELVELNRRVDEEVRKRPEAMRLRTHPGVGPVTALAMVLTLGPAERFASGKDVGSYFGLIPREDSSGGKQRLGKISKQGSSFLRFLLVEAGPTAARYDPQLKRFYRRLAMRKHRGVAKVAVARKLATRLYLMLREQWTYPQLCQAVMQVSPSHSVVEPEKPTA

SEQ ID NO: 262300 - protein, 388 aa, unidentified
MIYVGIDIAKLNHFAAALSSDGEVLIEPFQFTNDNDGFCLLISRLSSFSKDELIIGLESTAHYGNNLLLFLVPKGYKVVLINPIQTAVLRKNNIRKTKTDRVDTILICKVLMTSQPLRFVSLQDIGLMQLKNLGRFRLVSVKQRTRLKIQLTSYVDQVFPELQYFFKSGIHHKGCYSLLKEASSPASIASMHLTHLTHLLSSNSHGRFKKETAVELRVLAQKSVGNSDKSLSIQIAQTVEQIELLDSQVERIESEMKDIVSSLDSVIMSIPGIGYVNGGMILGEIGDIHRFSSPHKLLAFAGLDPTVYQSGNFQAKSTRMSKRGSRAFRYALMNAAHNVVKNNQTFRSYYDQKKSEGRSHYSALGHCAGKLVRIIYKMLYDDVTFDLK

SEQ ID NO: 262301 - protein, 333 aa, unidentified
MKYTHILGIDLSKATIDLALSQNTANANISHKKFSNNIKGFNDLLAWLKQLKVDIHQVLVCLENTGIYGRCLVAFLQSEQAFVWVVNPVEIKRSIGLVRGKNDQADAQRICQYAFRHQDKAQAYIQPEKSLEKLAVLLSARESLIKAKKLLITPMEEKESVGLSEQAALMREVCQENIACLNKGIKEIEKKLEEVMEQEKELDHNYELVRSVKGVGMITALYLLVYTGNFTKFSSAKKLASYCGIVPFGYSSGTSIRGKSKVHPMANKRLKTALHMCALSAIQQEGEMQTYYVKKVAEGKNKMSVINAVRNKLVHIVYACVRDQQVYSYNQAA

SEQ ID NO: 262302 - protein, 368 aa, unidentified
MKKGSTAATMQSRNFSAQQKLTIGLDLGDRNSWYCVLDEAGQIQLEQRVRTNAKALQAVFGAMPRSRIALETGTHSPWISRLLSELGHEVIVANARKVRLIGESRKKDDRLDAQTLARLARIDPELLCPVKHGSAQAQADLMMIRARAGLVRARTGLVNTVRGLAKSYGERLRGCNVRNMNPDKAEGLSPELQRALEPLLSGIEELSERICEYNDRIEALAQESYPQVALLKQIKGVGTLIALTFLLTLEDPHRFHKSRDVGCYLGLQPGRRKSGQSEPQLHISKEGDPYLRTLLVQGAQHILGPFGVDCDLRRWGLKLAERGGRNGKKRAIVAIARKLAVLLHHLWVSGEVYEPLHNSSTTAAAAAA

SEQ ID NO: 262303 - protein, 342 aa, unidentified
MNLTTIGIDLAKNVFQVHGANEKGKAVLKKQLKRAQMLPFFANLTPCRIGMEACGSAHHWARKLQALGHTVQLIAPQYVKPFVKRNKNDAADAEAICEAMARPNMPTVPIKNASQQAILSVHRARQGFVKARTAQANQIRGLLTEYGIVIPKGIGHISKRVPEILEDGENDLPGSFRLLIQRLSDHLKELDRQVGELEAQIKLWHRDNSASQKLAKIPGIGPMTASATVASVGDARNFKNGRQLAAWLGIVPRQHSTGGKSTLLGISKRGDSYLRTLLIHGARAVIRVAERKPNADPWLKNLLARRHKNIAAVALANKNVRTIWALLAHDRDYEPGYARAVA

SEQ ID NO: 262304 - protein, 414 aa, unidentified
MALKIVYKICCGIDVHKTFVVACIASTNKQGITTYKSHRFSTYTKGLKELLQWLLEFNCKDVCMESTGKYWIPVYNVLEKYCSIVLAHPKYVKAIRGKKTDKKDAKWIADLFKHDLVAGSFMPPADIRQLRDLMRYRYKLTCFMSSEKNRLQNCLTVSNIQLRNVVSDVLGKSSARILDKILENPLDTSFDIEPLIHGSMKNKISELELAVDGYITPEQAGKLKIIKRHLEDLESRKTELEKLILALASPYQQELDLILTAPSFKNSFSAITVISEIGVNMEAFPSAKHLCSWAGLTPANNESAGKKKSVRVSKAGCYIKPLLVQCANSVVKSEKHPEIRNRYLRIRKRHGHKKAIIAIARMLLTALYNMLKNKETYNAELYRKSDVIPIEREITVEQAILMAQFQGYKIKSAT

SEQ ID NO: 262305 - protein, 339 aa, unidentified
MKVSTLGIDLAKNVFQLHGVGCNGQTVLKKKLTRDKFLPFLMQLEPCLIGMEACASSHHFARVLRQYGHEVKLIPPQYVKPYVKTNKTDAADAEAICEAVARPNMRFVQIKTAEQQAILVLHTERNILIRERTACANSMRAILAEFGIIMPRTLSQLYKKIPEILEEYDNELSPFVRCSVARQLEHLQGVEDQITLIEQELSSWAKTQPACQRVLKVPGVGLMTATHLVASVGNGQQFHSAKQFAAWLGLVPREFSSGGKQRLGRISKRGDRYFRYLLVHGARAVAAVIERHKDNMPWLYRLLSKKAYNVAVVAQANKTARILWSMLVHHTEYRTLSAV

SEQ ID NO: 262306 - protein, 343 aa, unidentified
MSIDTMIGVDLAKSVFQVHGASMNGEIQFQRKLSRQAFRTLMARHPAAAVVMEACGSAHYWARVLSGFGHEVRLIAPRYVRPFVKRQKNDAADAEAIVVAAQRPEMRFVEPKSEAQQSAAILYRSRQRLVRQRTETVNALRAALYEFGHVIPQGIQHVGRIRAILEAPNSDLPTLMREECLAMLEQIAVLNGWIDTKTAKIKELAAATPVSKRLQTMPGIGPLVAMAVETFAPDMASFHNGRDFAAWLGLVPRQFSSGGKERLGRITKAGQADIRQMLIIGAMSRLNWMGRKAIPESSWLARMMARKPRMLVAIALANKMARQIWAMLTKNEDYKNPMPVMAA

SEQ ID NO: 262307 - protein, 340 aa, unidentified
MPLYGGIDLHANNSVIVLLNEQDEVIYGKRLPNALSTVLDQLAPYHTEIKGLVVESTYNWYWLVDRLMEADYQVHLANPAAIQQYSGLKYSDDHSDARWLAHLLRLGVLPEGYIYPKAERAVRDLLRKRAHLVRQHTSNVLSVQNILARNTGARFSVKRIQELTKQELKSLLAEEPQVLAVTSSLAVLDCLRQQIKTLEKTVHKRLHHTPAYEQLLTVDGIGTILAQTITLETGAISRFPTVGNYASYCRCVDSNKISNGKSKGTGNVKNGNPYLAWAYMEAAQFALRFQPAAQRFYQRKLAKSRNNTVLARKAVAHKLSRACYYIMRDLVPFEAAKAFG

SEQ ID NO: 262308 - protein, 355 aa, unidentified
MSSEKYIGLDVHQATISVAVMDSQGKVVMESILETKASTILEFLAGLRGSLFVTFEEGTWAAWLYDLLKPHVSEVLVCNPGKIPLLKQGNKSDKIDARKLAERLRLHDLKPVYHGETGVRMLRELARSYLTVVKDLSRVMNRLKALYRSWGIPCAGRDVYYTGHRSQWLEKIPEPGTRRRAEQLYQQLDMLQHLRQQARRELLAEGRKHTISAKLRQIPALGPIRSALAVALIQTPHRFRSKRQLWTYSGLGLETRDSGEYHYVRGQVRRRKKQATIRGLNKDYNHDLKSLFKGAAPWASVQPGPFQEFYQRALAKGIKPTMVRLTLARKIAAITLTLWKKGEDFDIHKLNSQAA

SEQ ID NO: 262309 - protein, 526 aa, unidentified
MCAVTHRRPSSRRRRQQGHLGKPRGNLSPRVQAVGPEHFGIVAVDCAKARSKWMLTDFYGRVLVPPTVVEHDRTAFDQMLLVLRNALVEYKIKDVVVAVERTGRYHRPVQHAFANAGYDTRIVHPSISSYFREAAAYDNKTDDTDLEGIFRATVNGFGFQEQPWDAIYGPLQIWSRRRSDMVGKTTLLRCQIGEYLEACLPGYSRCFEDIFRSKTALPVARHFATPQSIVKAGTSGLTKVARLAGVQVHRRTLVRILAWAQAAPVPDEGAPLYHELVCSLDDDRITKEKQIAAIERELVSLLVQAPYVRLLALAGINVVLASQFAAEAGPIVNYASAKVITGRAGLYPRRYQSDEVDHTSGKLARRGNRRLRCALLMSADTLLRCNDYFGVLGRKWADQGKDPHDIHVRIAGRYTRIAFQMVSGKEGFRHPACHDTPAVLSKLIKFHNDHDIEPETVRTNMKRAAAQLPPAEQARERVALNAQLEAARGSRGRGPKSLRDILPAVLDQLGGNLAELIQSTMSGENL

SEQ ID NO: 262310 - protein, 342 aa, unidentified
MKSATTIGIDLAKNSFSVYGVDDKGKTVLSRTLTRAGVVRFFANLPSCLVGMEACASSDYWARTIESLGHEVRRIHPQYVKAYLLGAKNDTNDAAAICEAVQRPNMRFVPHKSPEQIDIQCIHRTRQGYIKSRTALVNQARGLLAEYGIIIRQGISAIRNQLPLIIADEENALSGLMRRNIASLYESICFFDSQILEQDKLLKTVAKENEACQQLMQVPGIGIMTATILLTVAGVASNFKNGREFAAFVGLVPRQNSTGGKTRLLSISKRGDCYIRTLFIHGARSAITRILAGQTPKYRPNPWVIELIARRGRNKACVAMANKTARIAWSMLAQGTEYRHAA

SEQ ID NO: 262311 - protein, 358 aa, unidentified
MVDKVTEAAVVGGVDTHKDLHVAAVVDQNNKVLGTQYFSTTRQGYRQMLAWMTSFGTLKRIGVECTGTYGSGLLRYFQNAGLEVLEVTAPDRMERRKRGKSDTIDAECAAHAAFSGIRTVTPKTRDGMIESLRVLKTCRKTAISARRVALQIIHSNIISAPDELREQLRNMTRMQLIRTLGSWRPDASEYRNVTNVYRISLKSLARRYLELHDEIADLDVMIAAIVDELAPELIKRNAIGYESASQLLITAGDNPQRLRSESGFAALCGVSPVPVSSGKTNRYRLNRGGDRAANSALHIIGIGRLRTDAKTKEYVARRVAEGHTKMEAIRCLKRYISREVYTLLRNQNRRINSIPITA

SEQ ID NO: 262312 - protein, 404 aa, unidentified
MTSEAAQDIADQDVFGGVDSHADTVHVAVISDNGGRLADAEFTTTAAGYAAALAFLDAHGQVITIGVEGTSSYGAGFTRAARKHGHAVVEVNRPDRAERRRIGKSDPIDAYAAARAVMSGRASSAPKDDTVAGIRALHNAARSAVKARTAALNQITHILFTAPESIRAKYGQLSGTDRTNALARLRPAGDAVHTAVLAALKILARRVKELTAEHATLTKALDSEATVQNPGLRAAYGVGPDTAAQLLITAGGNPERMRTEASFAALCGAAPVPASSGRTNRHRLSRGGDRAANAALYRIALVRMSSDSRTREYVARQTAAGRTKREIIRLLKRAIAREIFRCLTTTVTVPAIADLRPLRQSKNITLTAAARHFGLWPATISTLERGIRRDDDLAHAYRDWLTAA

SEQ ID NO: 262313 - protein, 418 aa, unidentified
MRVETDEPEVIERVAALDVGKAEVVCCARVPGPGGQRMQEVRTISTMTAAVLALGDWLADLGVTRVVMEATSDYWRAPFYLLEDRFQTWLVNAHDVKHLPGRPKTDRLDAVWLCKVAERQMLRPSFVPPPAIRQLRDLTRYRVDLLAVRTAEKQRVEKLLEDALIKLSVVVSDLFGVSGRAMMAALIAGERDPAVLAELARGSMRSKTARLNEALTGRFTEHHAFLLTQMLARVDAITADIATVQARIDARIGELAPAVARLDAIPGIGPVAAQMILAEIGTDMTRFPTPAHLASWARFAPGVSESAGRPKGNAGTGKGNRYLARVVGEAAVSAARTDTFLGERYRRIARRRGKKRAIVAVGRSILVIIWALLSDHEAQFIDLGPDYYASRAKSERKVRNHVRELRALGYTVTLNPAA

SEQ ID NO: 262314 - protein, 412 aa, unidentified
MEVLYPHCAGLDVHKDTVVACVRHMVNGTVSREVRTFKTTTKELLALSEWLATEGCTHIAMEATGVYWKPVWHILNDGDFALVLANAAHVKNVPGRKTDVNDATWLADLLAHGLIRGSFVPDQQTQEMRDLLRTRKQLVREASRHIQRLQKTLEDANIKLDSVISDVMGLSGRRMIEALIAGQSDPEELAQLAHRRIKASPEELREALRGRVTRHHRFLLSLHLQQIDAVDAAIGAIDQEVDAQIEPFRTTVHLLTTIPGVDELSACVILAEIGRDMSRFPTAGHLISWAGLCPRNDESAGKRRSTRMRKGAAWLKTTLVQCAAAAARKKASYLQALFHRLRARRGAQKALGGVAASILTAAYEMLKSGALYEDLGCDHFEKRGKARQINRLVSRLQNLGFAVQITPVPAAA

SEQ ID NO: 262315 - protein, 314 aa, unidentified
MKSQESFDYVVGVDVSKAKLDVALPKEALTIENNTKAIQQLVDRMKSDSVIVVMEATGGYENQLVQALHNHGIALAVVNPRRVRDFAKGIGRDAKTDPIDARVIAFYGEIVKPAPQLAKSDEAKKLGALVERRRQLLGLIGQEKNRLQQVDDTDIKELIQKSLEMLKKQLKTVDQRLAKAIKTPGTNNQRKIEILESAKGIGPVAISTFLAELPELGELNRNEIAKLVGVAPINNDSGQQAGKRRTIGGRSYVRRVLYMATLSATRFNPTIRKFYQHLLANGKEKKVALVAAMRKFLTILNTLIKKDELWKTSA

SEQ ID NO: 262316 - protein, 413 aa, unidentified
MIYCGIDWAERHHDVALVNNTGELLAKRRITDDAAGYQLLMDLLAEYGDTEDAPIPIAIETSRGLLVAVLRTGKRQVFAINPMAAARYRDRHSVSRKKSDPGDALVLANILRTDMHAHRPLPQDSDLARAIAVLARAQQDATWNRQQNSNQLHSLLREYYPSALDAFATWQNGLCRREARELLRLAPTPSQAARLSRTQIQAALKRAGRKRGIEAEADRIRDVFRAEWAHQPPLVENALGKQMLALLIQLEAACTAADDLAKAVEEAFPQHPDAEVILSFPSLGVQLGARVLAEIGDDRSRFADARGLKAYAGASPITRASGKKSSITRRRVKNDRLNHAGYLWAFAAPNGSPGAKAHYRRRRDVHGDWHAAALRNLFNRMLGQLYCCLQEHTLFDELVAFPAPALEAEKAAA

SEQ ID NO: 262317 - protein, 405 aa, unidentified
MVRYIGMDVHREFAQIAVSEDGIVRDEGRIGVTPEELRAWAETLQPDDHVALEATGNSDAIATLLAGVVTRVVVSNPVKTRAIAEAKVKTDKVDARTLAQLLAVDFLPPVWLPDDRTRMLRRQVARRAHLVRQRTRLKNQVHGILNRNLVPTPPVSDLFGGTGRHWLSRQALPADERSTVEALIRQLDFHGDELKIVDRELAAEALPDPIVRRLMTIPGVDAISAVAVLAAVGDFSRFSSPDKLVAYFGLNPKVRQSGNSAPVHGRITKAGRAQVRGVLVEAAWSAARAPGPLRAFYQRIKARRGPQVAIVATARKMSVLAWHLVSNDQDYAFARPSFVAHKRRKLELTAGMPSRRGNRRGAGYEYNDKQHRTAEKALVEQAERHYAVLVAGWQTRGPQRGAGKP

SEQ ID NO: 262318 - protein, 347 aa, unidentified
MRFYNEQRPFYCGVDLHARTMYLCILDRDGNVVLHKNIKTRPAALLRAVEPFREGLVIGCECMFAWYWLADLCAEEGIEFVLGHALYMGAIHGGKSKNDRIDSEKIARLIRGGTFPLSYVYPAQMRSTRDLMRRRMYLMRRRSELLAHIHMTYQQYNLDCPARRLRYAGNREGLTDPFDDGSVKKMMAVDVAVIDQLDKLINDLELFIVRHAKVHDGQTFYLLRSVPGIGKVLALILMYEINIIRRFGSVGDFVSYCRLVKCSHSSAGKISGSGGRKIGNAFLRWAFGEAACLLIRQLPQAKRWIDRKEKKYGKGKALSLLAAKLGRAVYWMLRREEVFNVEKFFQD

SEQ ID NO: 262319 - protein, 392 aa, unidentified
MPDVSSNASAKTTRVWVALDVHKNAITAGVLPAESGEVELVQLEHSEKAIRRLIGRFGGPEGLAVCYEAGPCGYELYRLLVSLGVACDIVAPSLTPVRPGDRVKTDRRDARRLARLYRAGELTFVRPPTPEQEGLRDLVRCREDLRRARTAARHRVGKQLLRYGRVYREGKKSWTLQHGAWVRRQRLDEPLAQAALEHMLCHLDAVDVQISAVDRQLAQVAASHPWCDPVRWLCCFRGISTLTALGLLAEIGDFRRFGSARELMSLLGLTLSEYSSGERRVRGSMTKTGNRHARRLLIEAAWHYQHPPRLSARIKANEPLVPPEALARAWQAQIRLHQRHRHLVGSGKLPTVATAAVARELCGFIWAAMTHQPLREQEHPAQARSRKGALAA

SEQ ID NO: 262320 - protein, 463 aa, unidentified
MARKKNSKKQKMPVRSLKTIQPYAAGIDLGSREHWVACPPLKDNTPNVHRFGTTTPELLRLADWLKEQKVETVAMESTGVYWIPLFEILDSRGFEVILANARQISHVPGRKTDMLDCQWLQLLHACGLLRGSFRPSDDICRLRALFRERNTMIDQRSDWVRRIQKSLDQMNVCVHHAVSDITGVTGMAIIRAIVDGERDPRTLAKMRDRRCKKSEKQITEELTGNWRPEHLFNLRQALKMYDQFCQIVTEYDTEIFAYIKTLQPDVDDDQSVPPPASKSKARNIAKKGQEPMRQALYQLTGFDMTIIDGIGVDTASVVLSELGFDYSAFPDEAHFVSFLRLAPNLSISAGKKVPSKLKGTTTSRVATALRMAALALRNSKTALGAFYRRISRRKGASVAVFATARKLAQIIYRFVRHGQAYIDIGVKAYEAQFNNRRFKYYTMALKDMGYKVEPLTAPAVQAG

SEQ ID NO: 262321 - protein, 362 aa, unidentified
MFKIFRKNCCGLDVHKTWIYACIGITDVNGRTDYKEARFSTFSRGMRELADWLAKYECKEVCMESAGRYWFPVFNILEKTCWVTLAHPKYTKPQKGNKTDWKDAKWICDLFMCDMIKPSFIPPPDIRHLRDLVRYRFKLTNILTGKKNCAQNCLTISNLKLDDVFSDVFGKSASSITTYILDHPGEQFDIAPFVDGRCKTPIEEIQVAVDGSISPEHAIKLRTVLSHIDEIKAHKQTIEAEILRLAAPYETLLELIRTVPGLSAAPMTAIALISEIGVDMSVFPTAKNLSSWAGCCPHNDSSGGKRKSTRISRTGVYLKPILVQVANAVVKSNKYPGCKERYRRLKAHCGHKKPSLPSAVCS

SEQ ID NO: 262322 - protein, 409 aa, unidentified
MNKLYVGIDVGSLDNAVYIMLPDGEKHSSFAVKNNPDGARTISARVVAALTELEIPAAVIGMEATSVYGNNLLYFLREDAALSRFDRQFHVLNPKQVKKFKDAHADLPKTDAIDAFVIADDLRFGRITKAVFEDDYRYTALQTLTRSRYFAVQNLVREKQRFMNLLFMKCSGLAQGDAFSDNFGVAAMELYDSFETPDALANMDVKQLSAFLAEKGKNRFPDPDKVAKAVIQAAKNSYCLPDPVNASVSQALSISTSSIRAMQIQIKALDAEIERQFENMPNVLTSIHGIGHVYSAGIIAEIGDINRFGGQASLAKYAGLAWGKHKSGKFEGEETRLIKSGNRYLKYYLCEAAFSLVRCDTEYKRFYNLKYKEVNKFQHKRALALTARKLVRLVFRLLKDNRIYKPATA

SEQ ID NO: 262323 - protein, 460 aa, unidentified
MIRSVGIDLSRTGSHQVRCLDEQAKPCDSFSFESTLGGLEAFEKRVFSEGATPTIVFEPTGLSWIPMAAYLRARHPECRLVKAKLQKVAALRRYLRSHAKSDRVDGVTLAKMPFIDAEQLDEAYLPPAEYHALQRLTRQRERLMKGLTTRKNRIGSIINGYLPGLRKAFSNEWSVRARAFYRQRLNPYGVVREGERALETFLTSVKARGALTESHHLYQACQKLVEFYNRSKAAGMVNEGFFDDLQDEIACELRLMETEEAEVERVSKRIEELYRHLHPSDHLRTIPGIGVRTAQVFMALVGDPHRFRSQAAFANWTGVVPGARQSADTEGKGLRMTKAGPSMMKRALFQAGDIARRYDPQLADLYYREMVHHGKTHLQAMGAVMSHLAARILVVLREGRPYELRDTQGRPISDRGARDLIRSEHKVPEETRQARRHRKSNAGRLTDPRTREAAKLLVLD

SEQ ID NO: 262324 - protein, 343 aa, unidentified
MDLGDRWSCYCVLDEAGEILLEQKVATTPEAMKQIFEKIPRGLIAMETGTHSPWVSRLLRELEHQVLVAHAQKVQLISKSNRKDDRHDARTLARLARIDPELLGPVRHRSAQAQIHLTVIRARAELVRARTSLVNSARGLVKSYGQRLPKCGTQQVSRELAAGLNAELREILEPLLKEIESLNEHIQEYEVRMEKIARESYPQVELLKQVKGVGTQIALTFVLTLEDPHRFPKSREVGCFLGLRPGRRDSGESQPQMHISKEGDRYLRTMLVQGAHYILGPFGADRDLRRWGLNLAARGGKNAKKRAVVAVARKLAVLLHRLWVSGEVYEPLRNSQKAMRAAA

SEQ ID NO: 262325 - protein, 355 aa, unidentified
MSKGKAEDLSELSVIGVDIGKDVFHLVGFDAAGNLVLRRRIKRLALTATFEALPRCVVGMEACLSAHFVSRTLRGLGFEPRIIPAIYVRPFIKGQKNDYNDAEAIAEAALRPNLKTVTEKSQNQLDLQALHRVRSRLVSRRTATINQIRAFLIEQGITVRKGLRALKSSFLTILDERQDEMSPRMRAILTGLYGDWLWLDERLETVTGEIEDISRTEENCANAMTIPGIGPLISTAMVAAIGQGDAFDRGRDFAAWIGLIPRQYSTGGRTVLGRISKRGSRYLRMLFVQAANVVLMRPHHWPGFSFGTWLARASSRMHRNKLAVALANKLARIAWSVLRHGTPFDAPRDEVMVGV

SEQ ID NO: 262326 - protein, 405 aa, unidentified
MNAVGIDVSKGKSTVTIRKPGDVVIMPPCDIPHTQSAINTLIKQIKSLEGETKVCMEHTGRYYEPVASWLSDAGIFVSAVNPILIRTFDDDSLRTPKTDKADSKKIARYTLDRWTKLKQYGNMDKTRNQLKTMNRQFGFYMAQKTAMKNNLIALIDQTYPGANDFFDSPARSDGSQKWVDFIHTYWHVDCVRSKSLNAFTEHYQNWCKRKNYNFSAEKAAKIYRISSDLIAIFPKDDITKMLIWQAVALLNTASETVESLRSKMNELASTLPEYPVVMDMNGVGATLGPQLIAEIGDVTRFTHREALTAFAGVDPGKNDSGKHIQNSVRTSKKGSSYLRKALFQIMDSLIKRSPADDPVYTFMDKKLSEGKPYYVYMTAGANKFLRIYYGRVKEYLSNLTNNETI

SEQ ID NO: 262327 - protein, 436 aa, unidentified
MKKIRKNAAGIDIGAKKVFVYVEDQKVESFFTFTEDFEKLCSYLFKHKVKTVAMEATGVYWYVLYEILEEAGIDVWLVDGGQTKQVPGRKTDVKDCQWIQELHSHGLLRRCFVVKKDIKELRSYHRLREDHIRSAATRVRHMQKALTEMNIRLTEVLSQVHGASGTRMIEAILDGERDRKVLLNMCDRRIVKNKKDDVLKALKGKYTGSGLFALKHAYEGYNFFQKLIYHCDKEIEKIIHRMGNGKKDEDLPVKRKRIRHNKPNIENMGANLLEIFQGKDAATISGINDYSWIQLLSETGTDLSKWPSEKHFTSWLGLSPGQHWSGKMRRNRRKKGNPKTGQIFRQIAQSILNSKKIALGAFGRKLRARKRPGIAIKAVARKLAEQYWRLMVKGVDFVEYGIKNYEEQIIARKRKSLEKLALELNMDITNSQHLTL

SEQ ID NO: 262328 - protein, 325 aa, unidentified
MSELIERFVGIDVSKGSLDVFADPPSQHVPRHSGYDEAALKELCDAVASLAPTLVVMEASGGLERRVAVELASRAVALAVVNPRQVRNYARAAGELAKTDAIDARILCAFARAIRPVARPPRDADTREFADLLSRRRQLVDMRVQELQRQHSAASRPMSKSLTEHLAWLDKRIQRLDEAMGQRLRQCDVWRAKDDLLRSIPGVGPVLSRTMLGMCPELGELNRREISKLIGLAPLANDSGNHRGRRRIWGGRADVRRVLYMATQAAIRHNPDIAVFAQRLTAAGKLPKVVIVACMRKLLTVMNTMLKTGQPWHACHSAPALIADA

SEQ ID NO: 262329 - protein, 374 aa, unidentified
MKNVCGLDVHKDSIFMCIIKKNGDKVEEKFGVLTPELDRLRDLLVYHSVGDIAMESTSIYWVPIWRVLCSDFNIKIVNPYFIKQLPGRKTDVKDAQWIATVLQKELIKGSFIPDPIIQELRLYDRRIFYLNRNLQHAEQNIDLILQRCNIRLSNYVSDIGGKSMQKVIDSIIEGKTDPDILLLLVHKRTRNKHGDEVIKAALTGVISKTDRMMLKLSREETCMYERQIEECYVEMNSICQTYFSQEIELLQTIPGIKKDSAMRIVAEIGVDMKAFITASAIVGWAGLKPRNDESAGKIKGRKTLHGNKFLRVLLVQCAWAACRTKGSRFFYKYQTLTKRMNHNKALLANARKILVIIWNILSKKQPFTTTYIAA

SEQ ID NO: 262330 - protein, 344 aa, unidentified
MDNHTQYLGFAGVDLAKKVMQIHFVTEDGEITDKSAKRAEFLDFFRNRTKCLIGMEACGASQDWARKLEAMGHEVHLMSPKAVKPFVSGQKNDYNDAIGIYKAMFNGVRRVPVKSTEIRDLQTLRRIRSQVTKDKVKEINHVRGLLAEYGIVMGKSITAFNKGISSALESLKERGDVSPLVAEELQTTVESIKTKIERQKKLDQEIEQLARGCKNYENFLKTPGVGPFTAAMLCVLLCDPSIFANGRQFAAYIGLAPRSRGSGGKNYVTGIPSKFNCDSESRAVLVECAQALARYKNKSPWVDGILRRKPKKVAVIAIANKLARQVWAMANKGESFKQMAVLTA

SEQ ID NO: 262331 - protein, 343 aa, unidentified
MQTITTIGLDIAKSVFQVHGVDAGGQVVVRRQIKRRYVLAFFQKLTPCLVGIEACASSHHWSRELQELGHTVRLIPPAYVKPYVKRQKNDAADAEAICEAVTRANMRFVPTKTPEQQSGLVLHRARHLFIRQQTSVINAIRAHLAEFGIVAPVGRHGVEELLNVVADPSDRRVPEMARVCLLAFGAQLRRIKEQILEFDRLIRAWHRSNEMSMRLDEAPGVGPVLATALVAAVADPKSFRSGRNFSAWIGIVPKQHSSGGKNRLGNISKQGDRYLRGLFVAGALSVIRYAKIHGTKHRPWLTALLARRPTKVAAIALANKIARMVWAMMARGERYKEPVALAR

SEQ ID NO: 262332 - protein, 402 aa, unidentified
MNAVGIDVSKGKSMVAIMRPFGEIVSAPFEIKHTASDIHSLVELINSVEGESRIVMEHTGRYYEVLAHQLSKANLFVSAINPKLIKDFDNDSLRKVKSDKADAVKIARYALDKWQNLKQYNVMDELRNQLKTMNRQFGFYMKHKTAMKNNLIGILDQTYPGVNTYFDSPARSDGSQKWVDFASTYWHVDCVRKMSLNAFIDHYQNWCKRKKYNFSQSKAEEIYGKAKELVPVLPKDAITKLIIKQAVDQLNSASTTVESLRTLMNETASKLPEYPIVMAMKGVGASLGPQLMAEIGDVSRFTHKGAITAFAGVDPGVNESGSYEQKSVPTSKRGSSDLRKTLFQVMDVLIKTHPQDDPVYQFIDKKRAQGKPYYVYMTAGANKFLRIYYGRVKEYLSSLPES

SEQ ID NO: 262333 - protein, 343 aa, unidentified
MDIAVLGVDLGKNVCSVVGLDASGAVVMRRKVRRETLIALVAKLPPCVVGMEACCGAHHLGRLFAAHGHEVRLMSPEYVRPYVKAQKNDDRDAEGVAEAATRPTMRFVGLKSQDQLDMQTLHRSRDRLVGERTALINQLRAILLERGLVAPQGKRKLEQFLGVLMDEQGGAGLSPRMIALVADARTQWAGLDRRIAAFDAEFVRWANENEDTRRLTTIPGIGTIVATALVAAIGRAEVFDRGRDLSAWLGVVPRQFTTGGKPKLLGISKRGNTYLRKQLIHGARAALPHVAERDTPLGRWAKALMERAHHNVAVVAFANKLARIAWAVLRSGERFAVTRTTAA

SEQ ID NO: 262334 - protein, 459 aa, unidentified
MSPRHSAKKKARSVSKTTPSLPVMHPHAAGIDIGAREIYVAIPPDRDAKPVRAFATFTEDLLALRDWLLKCGVLTVAMESTGVYWIPLFQILEAAGIEVCLVNARHCKNLPGRKTDVQDCQWLQYLHAVGLLRGSFRPPETVCAVRSLLRHRDGLVRAAATCVSRLHKALTQMNVQLQHVIADITGVTGLAILEAILAGERDPRALAKLKDGRIRATTDVIAKSLRGDWRSEHLFTLRQCLETWQHYQAQITACDEETARLLQAFGAKVDVATQPLPPRTSTHKTPQKNEPRFEAREELYRTCGVDLTQVPGIQSGTALVLVAELGPDFADRFPTAKHFGSWLGVSPDNRITGGKIMSSSTRDVKSRAATALRLAAQGLSSAKNYFGDLYRRWKARLGTPKAITAMAHKLARILWHLFKHREAFNPEVFRQSEAKLQRKKLARLHNSAAALGLKLIPVQ

SEQ ID NO: 262335 - protein, 406 aa, unidentified
MRYILGVDWADTTHAVWVVDEGGTKVATRTVPHTAEGLSEWGRELDEWRALGIELWAGIERPDGRVVDCLLDHGVVVYPVNPKTLDRARDRFRQSGAKSDPFDARVLADFVRTDHPHLQPLQPNSEAAQELKLLTEDYLRQVRQQTRLLNQLTATLKAYYPRALEVAELKTALAREFLQAYPTPEALETLTERRWQRWARAHRLSAARTAELWEQLKAPQVPVPAHVVRAKARLMHTLVAQLAPVIEAVGAYQEAVESFFATLPAAKWARTLPVGEHGITVPTLWARLGDAPERWESFRHLQAHAGAVPVTARSGKQHVVKFRFACDKQLRYVVDHLAFLSLRSSEWAAAYYKQHRARGHSHRRALRALGAKWLKIIFVMWQRQIPYDEQHHLATMAHQQLLQATG

SEQ ID NO: 262336 - protein, 419 aa, unidentified
MSDSNIAKKIMQVEPGSLHAGVDLALDENLAVVIDGQARRWDRFRFDQDAHGYRYFLDRLEKVRMQSGASQVIVAMEPTNYFWKLLAQELERQNLPYHLVNSYTVKKHREGDLLDRSKDDPRDGFMIADLSRTGKHTETRLQHGIYADLRQYATLYYQVTKAIDRELSMISGLAGQVFPELRSVFKEMDGLTIRAILSACPAAASIRQLSEAAFVDRVKAAFTGQRLPLKRLLRVYQRAQTSVGLTEGLKAYQHAIHTHLNLWKQLETEKQAVTQALFECLKGIEVAPYLASIPGVHPLWVALLLAEIGDPAAYTSASQLIKLAGTQPTPNASGRKQRSRTPMSHLGRGRLRYLLYWTCLNLVQVNPDFKRRYQELQTRPKNALTKMQALGVLMNKLLRVSWALMSQKVLYDPALTVGA

SEQ ID NO: 262337 - protein, 415 aa, unidentified
MQFIILGGTNMYNAVGIDVSKGKSTVAVLQPGGIVVKKPYDVSHTASNLKDLTDYIRSLDGETKVVMESTGRYHEPILHTLSGAGLFVSAVNPHLIKNYGNNTLRNNKSDPIDSRKIARYTLDNWTELREYSSMDTTREQLKTLNTQMSFFTNQKVAAKSNLISLLDMTYPGVNDLFDSPTRDDGSEKWVDYAASFWHVDCVRKISLNAFTERYRAFCKRHGYCFQPSKPEELYNASKELVPVFPKEKEYKEMILMCIKQLNVISANVERTRQKMNQLASTLPEYSTVMGMCGVGPTFGPQLIAEIGDVSRFTHREALTAFAGVDPGVNESGKFKSKSNKASKCGSARLRKTLFLIMSCLLQTQPADDPVYCFLDKKRSEGKPYHVYMTAGSNKFLRIYYGKVKECLRAQAEADN

SEQ ID NO: 262338 - protein, 337 aa, unidentified
MKSYLFIGIDISKATLDVCVLSPSDITDSHHHPFCNNAKGFSQLMKWLKQNSEGLAPEEWRVCMENTGVYSFELNFFLHEKGIWQSMENALQIKRSMGVVRGKTDKADSKIIAMYAYRFIDKLKPYVLPTSTLLRLRALFAQRERLVGMHSQLLVASQSIKGYPKELVKDIQDQNEMLLKNLTVQIKGIDKSIKECLQEDKDLQRKSKLIQSVPGIGQQTAAYLLIVSQGMKGFTSARQFACYSGCAPFAHQSGASIRGKTKVHFIANRKMKVLLHMAAMNAITFNDELKAYYQRKVAEGKNPMSVLNAVRFKLICRIYSVVKRNEEYQKEYGKIAA

SEQ ID NO: 262339 - protein, 443 aa, unidentified
MNAAGIDVGSKSYMVAIDQERENVTEFGVYTKDHQKMIDHLRSHDIKTVAMESTGSYWQTLFSSLQAAGFEVLLVNGSQTKNVKGRKTDVIDCMWIQKLHSLGLLSGSFLLSNVFQELRTYYFHRQHLIEQTVMYANKMEKSLRLMNIRLDIVLRDVTGKSGLNIIEAILAGNRDSKNLEGLADIRAKKSQEEIANALQGSWRSELLFELKASLQFYKQYEQALNECDVIIEEKLLEYVPKENLSAQQSTQIKITNKKSRKHSPAFNVAKISYEYFETDLFAIPGISHTTVLCLMTNVGHDIHKFATGKSFASWLRLVPNNKISGGKIISSRSPSGKNHLAIAFRQAANSIGNQKDHPLTPFFKRIACRKGRISAITATARKLAVIIWNMITKIQPYNKENEEVHNARHKHVMLRNIEKRIGSLQLNQEELKKLFVRTSLLTT

SEQ ID NO: 262340 - protein, 356 aa, unidentified
MNNPNKYIGFDIGDKSTTACVIQDGQPERFKTFRSDVPSMQAFLQQQRQEDGGSIHLTFEVSGQAGYFYDHLVDRVDSLTVSNPSQMTWIYRTPKKNDRMDSRKQAVLLSVGEIPAVHRPSREGRQWRMAIQHRKRLVEQGVVIKNRIRTLLKSQGYKRPIKGCSGWTQAHEQWMKEVADEGPLTRQTLWRLGLKDLLDGLELVDKQGAALKRYLDGYLAKQAGWPWLRSIPGVGPRTAEAVLAHTDEVKRFGRGKEYGAYFGLTPKLDESGDSRRIGHISKQGPSVVRGLLVESAWRAIRSSEALRKFYERVTAGPPARRKIAIVAVARKRAVIRRAVLLHGCMYDESLVGGGKE

SEQ ID NO: 262341 - protein, 355 aa, unidentified
MSQEKYIGMDVHQATISVAVMDRDGKLIMECLLETKAATIVEFIRGLHGTVSLTFEEGTSAAWLHDLLKPHVSRLVVCDPRKAALLKEGNKSDRVDARKLAELLRTNQLKSVYHGEHGIRTLKELGRSYLTVSKDVTRTMNRIKSLYRSWAIPCSGTTVYAPRQRLQWLAKIVEPGVRVRAQHLYEQLDHLQPIRQQTRHELLRESQKHEAVKLLRQIPSIGPIRAALLVALLQTPHRFRTKRQLWAYSGFAVETHDSGEYRLVRGKVHRNRERITVRGLNDNHNRELKNLFKGAAISASTRPGPLQDFYLARVAKGMRPTMARLTLARKIAAITLTMWKKGVHFDTQQLHRQAA

SEQ ID NO: 262342 - protein, 310 aa, unidentified
MDATYVGIDVSKEKLDVHLRPSAEAFAVARDGKGLHELVERLRGVAPELIVVEATGGFETIVTAALAAAALPVVVVNPAQVRHFAKALGQRAKSDPIDAAVIADFAAAVKPQLRPLPDVAARLLAELVGRRAQLVEMLAAERQREERVANARVRKSLKRLIAALAKELKTIEDDIDGLIRSSPLWREKEDLLKTFPGVGETLARVFLADLPELGQLDRRKIASLVGVAPFTQQSGHWKGKSMIAGGRAAVRSAVFMAAMSAIRCNDVLRAFYQHLLALGKPKMVALIAVARKLLTILNTMLRDQKPWQHA

SEQ ID NO: 262343 - protein, 394 aa, unidentified
MGFASAPPILVITKSSIVGLFREEWPAADLSPRQAAGDRIVPILSSLWLPCSMIAPAPSSDPDGCRNNLVRFTRQGSRKMTQTNITTAGIDTSKSKLDIAVYGRAERWQVPNTLPGWRLLVSNLAKTGVTRVGIEATGGYERGVVEHLRAAGFMVLVLQPMQVKAFGRVHLRHAKNDALDAILIAACAAAMGPPRIAPDPRLADLAGYLTFLEQIEEDLARFKTRLEHIDEPRLRSLVGSDIRRLKARRKAQIRTIAKLLRGHDDLASRLDLVLSIPGIGERTALALIIRMPELGQVSREEAAALAGLAPFDNDSGLRKGQRHIAGGRGRLRKSLFAAALPAAFRWNKALIALYARLIANGKAHNAALIACARKLLVYANTVVQRGTPWVENAA

SEQ ID NO: 262344 - protein, 359 aa, unidentified
MTSMQDAPRRRRVVVGVDTHKHIHVAVALDELGGRIEARSFAADRSGYEQLIDWASSLGREVMFGVEGTGSYGAGLASAIRRRSIGVLEVLRTDRRDRRLRGKSDTIDAENAARAVLNGQASAVPKSADGTVEMIRLVKVAKDVAVKARTSAMISLKAVLVNAPAELREQLQPLTKMALIRRCAALRPGPVTDPMTAAKHTLRAIARRWLALDAEIKAHEQVLNRLTTELVPDLVAAFGIGADIAAEMLIVAGDNPERVHSEPAFARLCGVAPIPASSGMTTRHRLNRGGHRQANAALYRAVIVRLQYHQPTQAYYQRRTAEGRTKAEIIRCLKRLLAREIWSYLRPLRQARQPLVLAA

SEQ ID NO: 262345 - protein, 347 aa, unidentified
MTIIVEPTRAVTGGVDTHLDVHVAAVLDEIGGLLATESFVADQGGEHQLVDWLESFGRLARVGVEGTGSYGAGLARLLASSGVDVVEVDRPNRQVRRRQGKTDTLDAVEAARAAQSGRATGRAKSRDGNVEAIRALVVAKRSARTTKTKSLNQIRHLGFTAPNPLRERLSGLTAARLAVEAASMRPRAGTDVVTFATKTSMRILGRRVLALDAELVELDDLLSALVTTTAPRLLELHGIGIHTAALLLVTAGDNPQRLRSEASWAHLCGVSPIQASSGKVTRHRLNRGGDRQANHALWRIALTRMSSDERTRVYVERRTADGKSKAEIMRILKRYIAREIFALLPRN

SEQ ID NO: 262346 - protein, 348 aa, unidentified
MKLKRLGLDTSKAVFTVHGVDHDEKVVLRRNIRRAEMEAFFAKLPPTHVALEACGGSHHWGRRLAALGHTVQLIPPHYVKPFVRRGKNDRNDAEAISEAASRPGMPSVPVKAPEQQAEAIVLSARELLVRQRTQLVNAVRGHAAEFGIVAAKGTSQLPALLEAVAAEAAVPDAAKEMLGFLGAQVAQLDERIAELEQRMKRQHKANAMSRALAEVPGIGPIGALSLVLTIDPGRFTSGRHFAAWLGLTPKEHSTGGRQRLGGISRAGNERLRQLLVLGATAVIRYAKPGSKTASAWLLALLERKPRKLAAVALANKMARIVWAMMATGEAYRGNKAAAMQAAESAAVA

SEQ ID NO: 262347 - protein, 376 aa, unidentified
MKKIRFVGLDVHAETITVAVAEPDGEVRSLGTIPNREESVRKLVKKLGSPEQLRACYEAGPTGYVLYWLLTSLGVKCDVVAPTLIPVKAGDRVKTDRRDGLKLARLHRSGDLTAVWVPDEAHEALRDLVRAREAAKQDQLRARHRLSKFLLRHGKRFPEAGKAWTLKYMAWVRQVRFTQPAQEYTMLDYLHEVEHMNERVLRLEQAIEEAVKLSPAWMQEVVQALQSLRGVAKISAATLVSELGEISRFDNPRKLMAYSGAVPGENSSGERVRRGAITKTGNAHLRRVVIEAAWSYRLRPGIGPALRQRQKGVSEEVKEIAWKAQNRLHKKYQRLMAAGKDQRKIITAVGRELLGFIWAIGRATETRCRQQSAMTA

SEQ ID NO: 262348 - protein, 346 aa, unidentified
MAIPVIGVDLSKSVFQLSITDGKHHVVDRKRLSRAQFHRFLAQNKPAHLVMEACGTSHYWARTAQSLDHKVKLLHANYVKAYVRRTKTDAADADALVLADSDKSLYPIPIKPEELQALQGVHRIREQWKRARVARICEARALLAEFGLSTPTGVRGISKKLTLATEQAPMLIQPTLLDLIQEIGELEQRLKRVDNALAAYAETNPDVQSLLGIQGIGITIATAFVARVSDIHTFKRGRSFASWLGLTCREYSSGQTRRLGRITRQGDRYLRTMLIHGARAALMAARRKQANGKELTRLETWAVNTQARVGHNKATVALANKMARIIWAVWTRHDTFNGNDALRFAA

SEQ ID NO: 262349 - protein, 349 aa, unidentified
MKIIGCDFHPSYQQIAVLDLASGEMVEKALSHEGKEEVRAFYAGLEGSVRVGLEASGQSQWFERMLAELGHEVWIGDAAKIRASCERKQKTDRRDAELLLRLLAEDRFPRIWVPTAAERDDRQLLLHRHKLVRMRTQVKNQLQALALNQGVQRKWKLWSKVGRKQLESLPLLPWASRRRAELLQLLDQLEGSIGELDRAVAEQAQARPAARRLMTHPGVGPVTALAFTLTMGPAERFCSGKQVASYLGLIPSEHSSGGRQQRLGHISKQGSPFLRGLLVEAAQSAVRQEPEMRRAYQRLAQRKCRALAKVAMARKLAVRLYWMLRLQRNYAQLIQGSHAGQPGTFCGRG

SEQ ID NO: 262350 - protein, 358 aa, unidentified
MQSNKKSFKGQKIFVGIDVHAKTWAVETLTESGFTKRHAQEASAKVLFDFLSKNFPDGEYHAVYESGFSGFSTYYQLKEYGIHCVVVHAADVPSTQYEQVMKTDKIDAGKLARALRKGDIKPIYIRERENLDDRAVVRLRKTIQKQLSGYKTRVKHLLHTNGVKLPARFDKPGTHWSRAFMNWLKDEVVLLSSTRLSLDLLINQVESIRKNLLEATRAMRILAATDKYKANYELLLSIPGIGFNVAMCLLTEIYDFRRFGNENCFAHYLGLVPTCHDTGDKHSTGGKTFRGNKLLGPMIIEACWVAIHKDYGLSQAYCSYKQKMKPQLAIVKVARKMSNIIFSVIKNGKKYEPYKWEE

SEQ ID NO: 262351 - protein, 398 aa, unidentified
MLSIGIDVSKGKSTVCGMKPGGEIVYTPFEVQHTREGMSELVSLLHNSGEEVRAVLESTGSYHCPVVAALLENGIFVSVVNSLRMKRFCSQSIRRVKTDQIDAMQIALYGLAYWQELQPTRLPENTYRELQLLARQYYQMTSLLIKAKVDFNALCDQVLPGMQELMNDHAGRHKLSDFVLRYRHTTHILEMGETRFRKDYCKWAEKKGYRNRERMAALIFATAQNGIPVLPNAPSTQIVITEAIRVLHTVEASRDAILTQMQALAKTLPEYSLVREMPCIGDTLAPRLIAEIGDVRRFHSKRALIAYAGIDAPPYQSGKFCANNRHISKRGNRYLRKTGYEVMQSYVMHKPANDPIFTFIEKKRSEGKSGKLAMVAGLNKFLRVYYGKVTELYRSLPQ

SEQ ID NO: 262352 - protein, 389 aa, unidentified
MNQPSPAIIAPAAIRIDLGAIFVSLELSRSRWVVTALSPGSGEKMSKYSVQGGDLAGLMELFQLLAAKAKARTGRDFTIVAIQEAGLDGFWIYRALVKEGIESHVVDPASIATSRRRRRAKTDRIDGEALVRTLLAFKRGEPRVCAMVRAPSPEDEDVRRIMRERKTLTGERVAHVNRIKGLLFAQGVSGYEPLRRDRRKRLDELRTGDGRDLPRHLRAQVLRELDRLELVLAQIKAVETARDEELAQAREAALPASAARLMEIRGIGPEFATLIWSEGLYRHFDNRRQVAAFAGLAPTPWQSGAVEQEQGVSKAGNPRLRTTMIQLAWLWLQHQPSSALTQWFRDRVAHQGGRSRKPAIVALARKLLVALWKYVAAGVVIEGAAMKTA

SEQ ID NO: 262353 - protein, 353 aa, unidentified
MMVFVAVDVGKRRCVTCVMGQDGSILDSGSYPNTMFDASHYARLMVERYGECKAVVESTGNMCMKTYEAFESNGVEVKLANPVKTRAIAEARVKTDKLDARILAHLLRADLIAECYVPSKDVRLARALLTHRVNITREQTRIKNRIHSLLDKYDLECEYDDIFGAHGMRWLHTLQLNGHDHEILQSLLRELEFLQDEEEKADSTIAKDALHSQYVPTIMSMTGFDYYSASVLAAYIADVSRFPSPSHLVSWVGLCPSVYQTGESLYMGRMKGGSRKVKWIMIQAANTAIRSDHRMKAYYERKLRRHHHNVAVTHVANKMLRIIWHMLRENRLYNERKERLYESKLKRMTHTAQ

SEQ ID NO: 262354 - protein, 400 aa, unidentified
MAVMIGTGPHQGSRTAVAVGAAGEPLGKLRVRACPDQAAKLVAWAQAWPERTWAVEGARGLGRLLARQLAAAGERVLDVQPKLAARVRLLEAGDTNKTDPDDARPVAVAALRSKGRQEVTADGRAVVLKVRAKRHRDLSRTRNQVVCRLHAVLCELIPGGVPDEITAGQAARIRGQVAPAGAVAQARCELAAELLAGIRHLDAQRREVKKKLAAAVTASGTSLTEVSGAGPVIAATVIGDVITVARFPSRDHFAAYNGTAPVEVSSGQRKIHRLSLRGNRRLNHAVHMAAITQIRHKHSDGRAYYQRKLAEGKTHKEALRCLKRRISDAIYARLRADARKAGPGGQPGNDTGSSVTGSHPERRLFGQATSGPEPSLRAPATFTQATPAPEPSAKKIQRAT

SEQ ID NO: 262355 - protein, 419 aa, unidentified
MDPEQKGKATMILVGIDWAEDHHVVGVMDQDGRVLAHERVAEGIQGVGRLHALIGDYTDDPEQVAVGIETDRGLLVTSLVAADYQVYAINPKAVDRYRDRHSVSGAKSDRGDAKVLADMVRTDRHNLRRIAGDSDLAEAIKVTARAHQNLVWTRQRQINQLRSALREFYPGALAAFGTELAHSDALAVLGKAPTPELGRRLSTAQIASALRRGGRQRNIDKRAAVIRDALRAEQLAARALTVDAYGDTARALVAVITVLTAQIADLGSALADRFEQHPDAVILRSLAGLGIILGARVLSEFGDDPNRYEHAKARKNYAGTSPITRQSGKRKTVLARYIRNRRLADALTWWAFSSLTASPGARAFYDRHRSAGDGHHQALRALANRWVGILHGCLRHRTEYDEATAWPAAHTKKEVDIAA

SEQ ID NO: 262356 - protein, 518 aa, unidentified
MNLQYERMLALCDSLNLPFVAQNYVGAAQEAAAQESAYSDFLEALLKAEVAGRQVRKQNMLTRLAGFPAIKTLEEFDYAFAAGVKRSQIDELAGLAFVERNENVVLVGPSGVGKTHLAIALGYRAAQAGIKTRFTTAADLLLTLSAAHAQNQLKAVMHRAIAAYRLLIIDEIGYLPMSREQANLFFQVIAARYEKGSLIVTSNLSFGQWDATFAQDATLTAALLDRLLHHAQIVPIAGELIPLSERIGVVPLEATGGFERQAAAALCAAGLAVMVVNPRQARDFSKSMGYLSKTDAIDARVLSHFARTLHQSAQRERLLMKLPDANQEALEALLIRHHQLVGMRVAEGNTLAQSHPSQHKRIKAVLKMLDRQMASVDNDMSGMLKAHFADKLALLKDFKGIGPCTQASLMGALPELGQLSHAQIGKLVGVAPLNADSGHHKGKRITWGGRTAVRSALYMAALSAVRYNPVIKAFHQRLIAKGKPKKVALVACMHKILTILNAIVKSGSPWNPEHHKCA

SEQ ID NO: 262357 - protein, 331 aa, unidentified
MQFSHYIGVDISKSTLDAAIYASEMKKADTKHVTNDAAGLKELMSWAKTNGVKPKTMVVCAEHTGVYGNALQLFCEKKGISLCLESPLQIKRSMGLVRGKNDQIDAIRIAQYAYDHREKLELFHRPSVNITTLSNLLRERRLYVRQKATLTAAQGELGQYETSQSRSRRDCLIDKLSSMTKAIEKQMIDIINKDEDLKRTYDLITSVVGIGPITAIDTIVYTNNFQNFSTPRQYASFIGVAPFDHTSGTSVNGRTRVSQFCRKQQKTSITMAARSAIVNDPWMKNYYRRKMKEKGEQRNQHGVVLNAVKFKLILRMFSVVKSGTPYKVMNY

SEQ ID NO: 262358 - protein, 320 aa, unidentified
MMAQDDLVVVGIDVAKNKVDACIRALCVRRTFPSTAQGRRKLVCWLRKHKASAAVMEASGGYEREWAKVLREKAVEVRIVDPKRVRNFARSAGRLAKNDVIDAEMIAWFAGTFAEASSQGHDAAREKLAHIVNARCALIDLQIKLQNREEHPAPEPVQKMQARLLRQLAREIAELEAAIAAMIKATAHFAELAEIIESVPGLGPITSAGLIAAMPELGQVSNQAISALLGVAPYDDDSGKRRGERQIKGGRRKMRNLFYMACLGAATRHNAVLKAFYDRLIAKGKERKVALVACMRKLIVILSTMIARRQKWDASRYAVS

SEQ ID NO: 262359 - protein, 418 aa, unidentified
MENDYAAFIAIDWADQKHAFRLQVAGQNQQETGTLEQKPEVIGPWVAKLRERFGGRPVALALEQSRGALIHALLTYDFLVLYPLHPTTVAKFREAFKSSGAKSDPLDTQQILQILTKHRELLKPLNPDTEPTRLLARQVEDRRKIVDTRTGHIQGGVASLKEYFPQAIELCSANLTSRLAWDLLKKWPTFEAFQQAKPNTIKRFFYGHNVRSPELIQRAIQIATQGQALTTDPAIVESGHYLALMHLEMIQRLNPIIDAYDRRIEKLFNDHAEAPLFQKLPGAGPAMAPRLLSFFGTDRSRYAAAANAQSFSGIAPVTKSSGKSRAVYVRRACPKFDRQTFHEFARLSVAKSQWARNYVDYYTAKGKKYHTIIRSLAFKWIRILFRCWQNRTPYNEDQYMQTLAKRGSSFATRHLKPS

SEQ ID NO: 262360 - protein, 422 aa, unidentified
MLAESVDDEEIIARVAALDIGKAELVCCVRVPAEGGAKRRLQEVSTHSTMTRSLGDLANRLVDLRVERVVMEATSDYWRPVFYMLEAHGLQPWLVNARDVRHLPGRPKTDVLDAVWLCKVAERQMLRSSFVPPRPIRRLRDLTRYRIDLVGTRTAEKNRVEKLLEDACIKLSVVASDIFGVSGRAMMAALIAGERDPKVLAEMARTRMRVKIPQLVEAFTGHFDDHHRFLLAQMLARIDGIDADIAVLDAEIEAHLVPLKVAVERLDEIPGIGPVAAAVIIAEIGVDMTRFPTAGHLCSWAKFSPGIKSSAGKNKSNGSTGHGDRYLARVLGEAAPIAGRTDTFLGERYRRIARRRGKKKAIVAVGRSMLVIIWHLLADPETRFNDLGADYFTRHVNTETKKRQHVRQLEALGYRVTLEPAA

SEQ ID NO: 262361 - protein, 340 aa, unidentified
MKHIGIDVHSTTTDACVRNDKGTIVLRRRIQTKASELEKFVLGITGKKRIVLEEDQMADWVTRVLQPLADEVIRCQPQYNRLIIGSEDKCDKMDAESLSELLYLNRIKPVHHPEMHFRTLREAVRAYWIASRDLTRAKNRLKGWFLFNGLHEPGRRIYSSRKRTKYLKPLQEQGRNIELAELLYERMDVCRQLKAKHIRMLRKVSRPVKDLVELVQTIPAIGPISSYTLVSLLEDGRRIPNKRKLWRYAGLSLRRHESRDIGFQGASKTGNRLLKHVVMSAAITIVSRGERNGLLNLWERDIRKNVDPKRARRNLARKIVVIAQHLLRSKQEYIDELIRA

SEQ ID NO: 262362 - protein, 383 aa, unidentified
MMIIGVDFHPEFQQIALVDKDTGEFQEKRLAHREEAEKFYRGLAAAGQQVRVGMEASGHARWFERLLAELQIELWIGDAAEIRTKRVRKQKTDRQDARLILQLLLEDRFPQIWVPSWENRDLRQLLWHRHRMVQARTRIMNQLQAVALNEGLRCKKKLWRAQGREQLESFRLAPWASRRRRDLLDLLDRLNPTIAELSQAIEQEVEKCPEAQRLMTYPGVGPLTALAFVLIIGDAERFQCGKQVASYLGLVPLEDSSGNRRRLGHITKQGSSMMRFLLVEAAQVTARSLPQWRSKYVHLMMRRGRKTAKVAMARRLAVHLYWMMRQGWDYRQWIKFGSQSRKPGSHAGVPTASTRYPRLRSSRIIRLVRLRLDFAFTAGPRSS

SEQ ID NO: 262363 - protein, 339 aa, unidentified
MREVSTIGVDIAKNVFQVHGVDQAGALVIRRALRRSQVLVWFAKQPRCLIGMEACATAHHWGRELTKLGHEVRLIPPAYAKAYVRRNKNDAADAAAICEAVSRPAMRFVAIKTAPQQALAGIHRVRDLLIKQRTMLMNQLRGLMGEFGVMAAKGRRGLNELLAILSDPEERRLPSPLREALVAVMETLRGLERKLEGVDRQIVAAAREDATCRHLVTAPGYGPILSSAMAALVIDPGAFRRSGDFAASLGLVPRQDGTGGKVRLGPISKRGNGYLRRLLVNGATALIKYQHTRRDPWIAKLLAAKPRKVVAVALANKLARTGWALMTRQEDFRGRPAAA

SEQ ID NO: 262364 - protein, 354 aa, unidentified
MQSQIIATPKLFIGVDVHKKTWSVHMRTDISDHKGFSMPANPDILIDYVLKHFSNHEVAITYEAGCCGFSAARAFLNLGWSVTVVNPADIPRMDKQCYQKTDKIDCRNLSKQLQQQQLKAIYIPTEAEEQLRSLLRQRNQIVQLLRKTKNQIKALLLFHGTKVPDEFDNPNWSKAFILWMQQLPWVHITGLQTMQSKLRVLKILQQEYLQTSNELRAYCRKIHTKDYYLLKSIPGIGGLLAAAILAELGDIRRFNNERQFANCIGIVPGIHQSSETNSTMGITPRCKPLLRSYLIEAAWVAIRTDPSIQTYYRKHAARNSKSVIVKVAHKMCRRILSVIKTETPYQISYKPEYK

SEQ ID NO: 262365 - protein, 344 aa, unidentified
MKNRTIAVDLAKNVFEIGVSDRPGHVKKTYRLSRAKFLKFFVDQVPSRVVMEACGSSHYWAREIAKLGHEVKLISPQYVKPYVLRNKTDRADVKGLLEADRNSDIHSVPVKTVAQQQLTALHRIRSRWMSTRIARINTLRGLLREFGFIIPVGARHVIPTALELIEDAEVDLPDVLRDVFNEMCTEIRELEARLGSVEQRLEALASQTPAVRRLRSIPGIGLLTATALVGFVGDVSRFRSSRHFASYLGLTPREHSSGNVRRLGRISKRGDVYLRTMLIHGARSLLWSAHRKSITPSPLQRWGLHIHEQRGYNKATVALANKLARRVWAVWKRDSDYQSDYRAA

SEQ ID NO: 262366 - protein, 412 aa, unidentified
MEAIYECVSGLDVHSKSVQACVRRLIGGGRTKQEVRTFGTMTRDLVMLADWLNEEGVTHVAMESTGVFWKPIYNILEGRCTVLLVNAHHVKHLPGRKTDVKDSQWLAQLLQCGLLQGSFIPERAQREWRELTRQRAQLVNQHSSVINRIHKTLEDANIKLGTVASNILGASGRDMLRALIEGRQTPTEMADLARRKLREKIPALQEALYGHVTDHHRWLLGELLDQVEDLERRIERFSRRIEELSGPFEDAIKKVDAIPGFDRRGAENVLAEIGVTMKQFPTGGHLAVWAGICPGNNKTGGKSKSGRTTKGNRWLRTALVQAAWAASHAKGSYFHAQFRRLVGRRGKKRALVAVAHSLLVVIHVLLSTGAEYEDLGADYFDRRDEDRIVRSHVNRLERLGYKVTLETYEEAA

SEQ ID NO: 262367 - protein, 290 aa, unidentified
MSIYAGLDVSDKTTHICVVDADGKVLRRDVVPSDPDVLAKWLTRHCPDLVRVVLETGTLSTFLYHGLAERGVAVECICARHAKGVLSARVNKSDVHDAEGLAQLARTGWFKRVHMKASATHIDRAALRIRAQLITAGTAMANQLRGLLKLFGLRMGTARTPGRRAERLTAFYAQRPDLKALSAPLIASMEAIEEQLCASNRLLNERAKADEVCARLMSVPGVGPITALTYTSTIEDPHRFARSEDVGAYAGLVPRRSQSGERDTSGHISKAGDPMLRKALYEPPTSRCPR

SEQ ID NO: 262368 - protein, 365 aa, unidentified
MWEAPVEIYRTSVGLDVHARSVVACGLERSTGEVFERRLTPDHREILEWIGALPGPAMVTYEAGPTGFGLARALGAAGIECVVAAPSKLHRPAGDRVKTDARDARHLARLLHLGEITAVTVPSVEQEAARDLVRAREDCRGDLMAARHRVSKLLLRQGIVYCGGHAWTTRHERWLQSHRFDTPGLQLAYDTGLDTMLATLDRRNRLDEAITEMAADSVFTPVVTRLGCVRGIATLTAFGLATEIGDWYRLDGRTIGAYLGLVPTESSSGGTRSQGGVTKTGNSHARRLLVEAAWHHRTRYRPGAELRRRWHAASPAARARGQAANRRLHARWARFDERKKRPVVANAAIARELAGWCWSLAVLDD

SEQ ID NO: 262369 - protein, 303 aa, unidentified
MYYSGIDLHSDNSYITTMDDNGTIVKRQRVANDDKRVLEYFHSLPDPHKAVVESTTGWYWLDDLLTDNGIELILAHAKYLKAICYAKVKTDKIDSKTLALLLRLGLIPRAHKISRELRGLRDTMRIRLRLVQQRTACLLRLYSIHAKFNGAVPDPYRFQLAALEHTRDTFSDQILALEKSLHPVLVPNDDIQRLLNIPGIGKISAFTIYLEIDGIERFDSDKHFVSYCRLVPAADNSNRTVHHRSSKDGNKYLKIAFSDTAVHAIQFYPEYKRLFQKLARRSGEATARVQLLPRNLLKLSIMS

SEQ ID NO: 262370 - protein, 343 aa, unidentified
MQVSTIGVDLAKNVFQVHGVDSAAKVVISRQLRRKQVIDFFSKTPPCLVGMEACGTAHHWAREISKLGHTVRLMPPSYVKGYVKRSKNDAADAAAVCEAVTRPSMRFVPTKSADQQALLMLHRTRDLLIRQRTQLINALRAHLAEFGLVAEIGREGLAQLAEIVSDESNREALPSAMKQALQAIIDQLAALELQIGALDRAIHAHHRANDMSCRLETVPGIGVIGATAIASTVTDPSTFKSGRDFAAWIGLVPRQHSTGGKERLGGISKQGDCYLRRLLVIGATAVVQHARRHPQKHPWVMRLLAKKPAKLVAVAVANKMARIAWAIMAKGGHYRAPELAAAA

SEQ ID NO: 262371 - protein, 449 aa, unidentified
MMEPAEIVDEEYEQILERVAAVDVAKATGMVCTRVPDDSRPGRRVSRVWEVAATTNALIELGEYLAGLGVQKVTLESTSDYWRPFYYLLEAAGLDVQLVRAQDVKQAPGRPKSDKLDCVWQAKCTERGLLRPSFVPPAEIRQLRDYTRLRVDLTRDRSRYAQRLEKLLEDALIKLSVVATDIMGVSGRAMIEALIAGERDPEVLARLARGRMKVKHAALVQALTGRFDAHHGELARLLLDQYDALTAQIGRLTIRIEELIAAIPAARGVDADGSTGPGAGEAPDAAVRSAIARLDEIPGVGRHGAQLILAETGLDMTRFPTAGHLVSWAKLCPRTIQSGTRSRGGRTGKGNPYLKGLLGEAAAAAAKTDTFLGERYRRIVRRRGKLKALVAVARSILVIIWHLLADPAARFTDLGSGYYASRTDKDKKIRNHVRQLEALGLTVTLAHAA

SEQ ID NO: 262372 - protein, 387 aa, unidentified
MKKINSNVACAGMDVHYKFSNVTFRDASGKVVSRQRLDHPDRKQLAERLSSWPRGIPVVMEASFGWGWLSDLVEQAGQDVHLSNCYKVEQMRKARGWVKTNKKDADLVSLLVFEQSDWWKVWRAPPEVRNRREQMRFRGDLVGSQTRVKSRIHAVFHRHGIFHEFSDLFGGKGRKFLVELCLHNPANLPPEALLALRGQLKLLDHLRRQLADVERRLHKQLPKTPLTMRLKTIPGIGLILAHVLAAEIGKIERFKNQKSLAGYSLLAPRSNDTGEDDPNHSPKGRHLGLRGNRTLKWAFIEAAHGAVRSGGKWRAIFDRVTNGGKKNRNRGYIKVARELVKVVYAVWAKGIDYQVVPPVRPGRQRNKKKSRSETGQLYHPMVHALPA

SEQ ID NO: 262373 - protein, 346 aa, unidentified
MAIVGGLDIHRRQITFDYLDTATGETCRGQLSPAIRLELRAWLDQFDPQQASFALEATTGWRFVTEELERVGIDVHLAEPADTRALRGPTRRAKTDRTDARHLRELLRAGTLPESWPPPAHIADARTQVRLRRALVGARTGWYQRIHAVLFHHGLPDRCYLLTADGRAWLASIQLPTVARGAVDLALRMIDHLDAELDTLDTALARIARAQPGCKALTRRYGIGWLTAVAIWAEFGDVRRFANSRQAVRFTGLDITISESDGRRARGHLARQGAPILRWALHEAAMCAARPGSPDHAYYLAVKQRLGGKRAALSVARKLAREAYHTLHDLGDQALAPVAVQLPTAA

SEQ ID NO: 262374 - protein, 392 aa, unidentified
MYIVGIDIGKNHHEASIVSPEGKQIGRSLRFATTHKGADSLMSFIFNNIGNSSCIFGMEATGHYWYPIYSFLKARGYTIYVINPIQSDSLRKMYIRQTKNDSIDSFLIAEVIRFGQFTTTSMADENILAMRQLCRYRDSVISSRTEIKLRISTIMEQIFPEYEKQFSSLWLSTSMGILEKYLTPENIENAPIDELFEIIKDKSHNKLTMKKAISIREAAADTFGIKIAQDAFSFQLKQLIDRMNFHDKQIEALDIEIMKYYEQFDCYLHTIPGIGIIGAATILAEIGDISRFKNSSALVAFAGIDPTVRQSGEFNSTHNHMSKRGSPYLRHAIFLAATTCSFHNSPLNAYYKKKRDQGKHHLTATGAVARKLTTVIYAVLRDGKPYKPKKFC

SEQ ID NO: 262375 - protein, 323 aa, unidentified
MAKHITICAGIDTGKRKLDVALEGNREQLQVENTSDGHAVLLAWLRRHRVKRVGIEASGGYEQPVVAALRRKRFVVVVFQPAQVRAYAKFHLQRAKNDKIDAALIAVCTAAVRKIHAAPDPRLLPFAEQLTMIDQIGEDIARLKNRIESCRDVEINKLWHEDIVRLEQREKASLKALVASIRKHPDLAKRLALINSVDGIGLPTAVAILVRLPEIGRITREQAVALAGLAPYDDDSGDQVGVRHIEGGRKRLRRALYTASLAASFRWNQQLIQLYQRLTAAGKEHKRALVACARKMLIFANTVVARGTPWQDCPPEKAALITG

SEQ ID NO: 262376 - protein, 353 aa, unidentified
MNATTVAVDLAKNVFEIALADVHWKILERARLTRAQFERWFDNRKVDLVVMEACGSAHHWARTLRARGIEVRLLPAQYVRAYVKRNKTDAADCLALLEAARVQDIKPVAVKSVEQQALQALHRTRSGWMSTRTRRINTLRGFCREFGLVVPEGAATGLASIARYLADERSGLPAMLRPSMRLVLEEIRLMEARIGQLEQELAALAKQSPACQVLLSVPGIGLLTSTAMVAAVGDPRSFPSGRRYSSFLGLTPREYSSGNTRYLGRISKRGDRYIRMLLTHGARSILRAATVARRAGRQIDRLKTWALQVQARTNHNKAACALANKLARIAWAVWVKHEKYRAEPAPATPSLSA

SEQ ID NO: 262377 - protein, 356 aa, unidentified
MAIIAHTRPFVIGVDTHARKHSYAILTATTGELVDAKEFPTTPAGLKRSLNWVARQTGGDLATLWVIECAATFGARLTRTVTDAGYQVVEAARMDARAHRSVGKTDPLDAHRIGAAVLPLEEDKLRHPRADSGVRAALRVLTTAREHMSTERTACVNALTAVLRAVELGLDARRALTYRQINEVVSWRTRTEDVALSVARAEAIRLAKRIQALDKQLADNRAQLTMLIEQSKAAPLLEYAGIGPVTVAVAYTAWSHKGRVRSEAAFAALAGVSPIPASSGNTTRHRLNRGGDRRLNRALHMATVTRMTHDPETRAYVDKRRAQGHTTKEIRRCLKRYLARRIYRSLEALHAAPVAA

SEQ ID NO: 262378 - protein, 389 aa, unidentified
MLLDHLSDGLTAIRTQFGAIFVSLELSRSNWLITSLSPGKGEKMSKHSVTAGDVAGLMKLFADFRRKAEARTGESYPIITIQEAGLDGFWLHRVLQQNGIESHVVDPASIATPRRRRRAKTDRLDGEALLRALLAYKRGEPRVCAMVVAPSPEEEDRRRICRERQALIAERITHVNRIKGLLFAQGVSGYEPLRRDRRARLEALRTGDGRELPAHLKTQIGRELDRTELLLEQIEAVETERDDLLAAARKPASEEAAPDAVTMLLALKGMGANFAAVLWSEAFYRQFSNRRQVAAYAGLAATPWQSGGIRHEQGVSKAGNPRLRTTMIQIAWLWIRHQPQSALTRWFKERSPQGRKRAIVALARKLLVALWKYVTQGVVIEGAVMKPAA

SEQ ID NO: 262379 - protein, 347 aa, unidentified
MGKSITDLSSVTTVGLDLAKHVFQVHAIGAFGRVIVAKALRRKDVLFFFAQLPKCLVGMEACGSAHHWARELIKLGHDARMMPPAYVKPYVRRQKNDAADAAGICEAVTRPSMRFVGVRTLENQAALMHHKAREMLVTQRTQLITALRGHLAEIGVIAAQGPKNARELAGVVMAEGNETIPACVRAALAPLVRQLHVLDQEIACSDRTIAAMARGDERARRLMTIPGLGPVTASAMAASVQDVSAFSGPRAFAAFLGLTPKQNSSGGKERLGRISKMGNRYLRTLLVVGAHAVLYHRKPHDDALRSFAKKLMQGKPFKLVAVALANKMARIAFAIMRGRTSYCAVSA

SEQ ID NO: 262380 - protein, 391 aa, unidentified
MPMYFVGIDISKYKHDCCIISAADQQIISKFTITNDKDGFEQLLTALNSLSNPEDIKIGFESTAHYALNLELFLENANHSFMEVNPVLIKEYKKSTTLRRTKTDSVDCESIARWLITVEYKPHSKGFYHAYSLKSLTRLRDRLIRQRSFYLVKITNVLDHTFPEFKPFFNERLSKTALYLLENYGSAEKMARMNSASYDKLRCISRGKFSIQQFLRLKELAANTVGVNNSIFDLELNTLLTLYKSLSDEINTLETEIIKLIEEVHPHYMSIPGIGPISAAVIYAEYGDISNFSNPGQMLAFAGIEPGINDSGTESHGGRMVKHGSSQLRYVLLNACLPLIRFDLTFATYYEKKRAEGKKHRVAITHVAKKLIRVIYALERQDVDFNAQKLR

SEQ ID NO: 262381 - protein, 335 aa, unidentified
MELYCGIDLHATNHLVVVIDETDRRVLEKRLANDISITVDTLTPYRDQLAGIAVESTFNWYWLVDGLEDAGFSPCLANPTAIKQYSGLKHSDDPYDAFFLAHLMRLGILPTGYIYPREQRGVRDLLRRRLSMVQMATRLLLAVQSQIWRSTGIKISSAQIHHPGFELPLPSGPVYEGAAAQWHLLQHTQEAILNLERLALKLYRGEESYALLQTIKGIGKILALTIGLETGSINRFRRAGNYASYCRCVASQRISNGKKKGENNRKAGNRYLSWAFHEAAHFAVRFEPNVQRFYERKRQKRHAIVAIRAVAHKLARAVFHMLKHHEPFDVNRAFG

SEQ ID NO: 262382 - protein, 415 aa, unidentified
MLFVGDDWAEEHHDVELVDEAGHRLAKARLPEGFDGITRLHGLIASHMPADLVDLDPGDAAAKVLIGIETDRGPWVQALLAAGYQVYPINPVQVARYRQRHSTSGAKSDAADAHVLAEIVRLDHAHHRRIASDSADSEAIKLVARSHQTLIWDRSRQLLRLRSALREFFPAALAAFGDLDAPDALELLGRAPDPDRAAALSRAQIAAALRRAHRRDVDTKAARLQEVLRAAQLRQPPPMQAAYAAIVTAQVRLLVTLNNQIDELGEVVDAHFGRHRDAKRYLSHPGLGVVLAARILGEFGDDLHRFADAKARKNYAGTSPITRASGNRRVVIARYARNRRLGDAVHQWAFCSLRGSPGARAYYRALRNRGIGHQAALRQLGNRLVGILHGCLKTDTPYSETTAWAHHHDDLAPTS

SEQ ID NO: 262383 - protein, 348 aa, unidentified
MVVIGVDSHKRTHTVVAADEAGRKVAERTVAATSEGHLELVGWSRRWPERTWALEDCRNLTRRLEADLLKAGEAVRRVPTKLMAGARRSAREPGKSDPIDALSVARAALREPDLPTARLDGVERELRLLVDYRDVLIADRTRHQSRLRWFLVELGIPEPPSRKLAVPLVLASVDLQLVGRTEPCARIARDLVARISELTVAIDALARQIGELTETLAPTLLALFGCGPLTAAKLVAETAGIGRFRSRAAFAAHTGTAPVPVWSGNLVRHRLNRGGNRQLNAALHRIAVTQLRCPGLGQAYVAKRLAAGDTKTEAIRALRRRLSDEVFRRLQTDEAARASIEGVTSVAA

SEQ ID NO: 262384 - protein, 358 aa, unidentified
MQIIGIDVSKDTLHVALAESRDARNDKVLASHRFTNNDAGFKSFADWMEKKKAEAGTVCLMEATGVYHERLADWLHRHGVAVAIELPNKIKYYAKCLNVKTKNDKVDAEIIARYGLHNVCTPWHPMTENLYQMRSLLRQVQSMTKERTRCKNQLHALEHSAHTPETVVVNLRGLIENYDRLIDSYHDEVVRLAKEDEAFYAKVEMVCTIKGVREMTALTVLCETDGFQLCRSARQAVSYAGLDVSEYQSGTILKDKRISKKGNARIRHALYLPAVVAGTTGGPVSLMNLYKRVKQKHPTAKKVAIIAVERKLLMLIYTLWKKQEPFDPEKDGKPPLHNAYKSTQAVGSQDSEGSIPCK

SEQ ID NO: 262385 - protein, 475 aa, unidentified
MARRRKKKQPARPPVSHGGLPLSNAPLPKNLQQINLHAAGIDIGSRQHHVSVPEGCDEVVVRAFGTFTADLESLADWLQQCGITSVAMESTGVYWIPVFELLEARGFEVKLVQPAKLKNVPGRKTDVLDCQWIQQLHTYGLLEGSFRPTDQICVLRSYLRQRDRLVHLAAQHIQHMQKALMEMNVQLHHVISDITGSTGMRIIEALVGGERDPLRLAELRHPNCKNDVGTIALALQGNWRDEHLFALQQALELYRFYHQQLSELDLRIEANLQTFDDRSENRELPELSSKAKKSKSSGKKKNNAPQFDARPLLFRMAGVDLTSLDGIGEHVALQLVSEIGTDMSAWPTEKHFCSWLTLCPGNHRTGGKQHRSKTGTRTSSNRAAHLFRMAANSLWNANCALGAYFRRMKSRRGVPKAIVATAHKLARLVYQMLKYGKTYEDYGAVWYETQYRDQQVKGLRRRASEMGFELVPTSC

SEQ ID NO: 262386 - protein, 469 aa, unidentified
MPFAALDLHKKEIEACVLDDQGHITHRQRFACTAAALAAFAQTHLSPQHKVALEATFNTWAVVDVLAPYVASVTISNPLLTRAIAQAKIKTDKIDCTVLGHLLRLEYLPPVWRPDPHTRELRLRTTERATLTQDRTRLKNRIHGLLNQRLIQAPARLFDSPQGLPWLQQLALDPVGRRALDRLLTQLELAEKQIQETHQPLAQLAYADQSTRLLMTLPGVGAATALALRAALGDITRFASADRAAAYLGLVPSTSQSGEKAYHGRITKRGNSHARRMLTEAAQSVARHPGPLGHFFRKIAKKKCRNVAVVATARKLVTIAWHMLTRQEPYRYALPDATRTKLLSLRVLATGRRKKGVAPQGHKSVSKLAPGIGSREVKSLPQLYQEEGLPALWLPHKPAERRMLQEHAAAGFADAVLVSQRVPRNSSHLPGLPPNIRSPFQLGYARFDIFDFDCLGGVVQNAICGPHFG

SEQ ID NO: 262387 - protein, 352 aa, unidentified
MMVLGADTHKGSHSIAAVAAVTGELLGDKTARVSDAGFVALLDWARSLDGERVWALEDCRHVSGSLERFLLVSGERVIRVATKLMADARRGSSSRGKSDVIDALAVARAALREGVESLPSAQLAGVELDIRLLVDHRERLVRQRVAINNDLLWHLHDLWPELKLPGSALVLKKWSAKISRRLARAEQTARVRIARDELRRLRELTAAADALEGELAELVAQVAPQLLSEPGFGPLTAAKLIGEIAGAGRFSSDAKLARAAGVAPIPASSGKTNRHRLDRGGNRQINSALYRIALTRARCHPETKDYIARKRAEGKTQREAIRSLKRHLIRRIWHLLQPPHPDHCGFAESNIS

SEQ ID NO: 262388 - protein, 358 aa, unidentified
MTLTSIADISASVTVGVDTHKHTHFATAKDGLGRDLGHMEIDTNPRGYAALLKWSQAFSRQVVFGVEGTSSYGAGLARYLRANGQTTIEVLRPTRQDRRLRGKSDRIDAAAAAAAVQAGKARAVPKAGDEGVEMIRPLKVAKSTAIKARTQCMNAIKALIMTAPDALREQLRDLTPKTLITTASAFRVPEVVDPISATKWSIRSMARRYATLDEEVTELEGRLDELTQKLVPELRQCIGVGQDVAASLVLAAGLNGDRIRSEASFSMLCGSSPIPASSGMTNRHRLNRGGDRQANAALHRIVLVRMRYHEPTRAYVAKRTAEGRTKAEIFRCLKRYVAREVFKLLVIPVARVEEPEAA

SEQ ID NO: 262389 - protein, 370 aa, unidentified
MEEGIKFFVGLDVHKDTIAVAAAEAGREPARWVGTIAHDVGKLLKRLARYGEPAQVQVVYEAGPTGYGLQRELTRRGYGCQVIAPSLIPKRAGDRIKTDGRDSVRLAELSRAGELRAIWIPDPADEAIRDLARAREDAVNARTQVRQQRKGFLLRHDVRYAGRTSWSKTFYRWLATLNFGLSGAQTAFTEYWQAVAAADERVARLTQALAGSIAGWRFESVVMALQALRGIDQISAIGLVAEIGDIGRFAHPRQLMAYLGLVPAEHSSGERVARGSITKTGNAHARRLLTEAAWNYRFQPRIGYRARRRAEDLPQELRDLAWKAQLRLTGRFARLRARGVQINKVCVAVARELAGFVWAIAQARAKLPQS

SEQ ID NO: 262390 - protein, 399 aa, unidentified
MLNPVSLQLRVGVDVGSRCHTVAIGLSDGSLLEEFEIPHTAEGFQDFFARIEACGRCYRVPVAVAMEGYNGHIRPLDSLVRARGWRLFNVNNLKLARFKEIFPAAAKNDRIDTRKTLELFQLGDHLPMAGDVLQEVMATPAENDILKRLSRRRRRLVNERTRVLNSMQADLQAVCPGLLEITRDVGNLWFLNFVTCRKGLLKLAGVRRASLLKVHGIGANYAGAIQAWQGRAYFAPDASLVGDMIQQDAARILELRKQIKALEEQMAQVAEKSFIAGQLASIPGYGSICTAELAGEIGTIERFRKEASLALYLGMATLDRSSGKSRGSKPPKHVNARAKAAMMIAIDRHRKLVPQSQRYYERKRAEGKKHNQAIRALGRHLCRVIFKMLTQNRPYRINP

SEQ ID NO: 262391 - protein, 351 aa, unidentified
MKVTTIGIDLAKDVFGLHGVDGEGRVTFKRRLVRSRLLEFLSQLPRCLVGLEACSSAHYWAREIERLGHRVRLMSPRFVKPYRKSDKNDANDAEAICEAVTRASMRFVPIKSEAQHEVQALHRVREQLLKSRTALVNQVRGLLAEHGVVAPHGIARARRLLLGILADPERHGLSGLFRETLQEMAERLRFFDERVGAYDDRIERVFKEDERCRRLAKVEGVGPLVATAVVAAVGNASEFKSGRELSAWLGLVPRQHSSGNRSQLLGISKRGDRYLRTILIHGARAALRRADHKRDQRSRWAMRIKLARGYNKAAVALANKNARIIWALLTRGENYRPAAISVASAGSVESV

SEQ ID NO: 262392 - protein, 367 aa, unidentified
MIVNEVAKNVEKIISIDTAKNSFQVLVVNQKTGKKKNTKVQRSKFVEYILKQGPCLIFMESCSASQHWARLFESFGFTVKLIAAQHVKAFLRNRRVKNDERDAEAIYKCGIQPDTKFVRIKTVEEQTVALLHTLRKAAVSQRVELSNRIRGILAEFGIVVARGRGSFNSEIEALFNECEKIHDVNLRVAISSLFEDYHRLEQREKELSEKIESLNKDNELVKIALTCPGVGPLTASAIVAEVGDASQFRNGREMAAWSGVVPSQHSTGGRSSLGGITKTGNRYLRTLLAQCACAVIQNASRHLEQGKDTHLDRFALRLKLNGKPVKKIMIAVANKIIRILWAMLTQRKTFENKAEETSDISAELQLA

SEQ ID NO: 262393 - protein, 344 aa, unidentified
MTWTVAIGIDTHGDEHVAVAFDRLGRQLDARSEPASTAGYLALWRWATALGEPAFAIEGVGSYGAGLTRFLHASGGCVYECERPRRRERRRGKSDLRDAALAGRRLLSGEGLSRPRGGGRREDLRLLLSERRGAVRAQTATLNQLQAVLVVAPERLRRRLAELRGERLVAACACLRPGPASARVPASVLRRLGRRAQALAEELAALDSELEQLVAELVPELLTECGVGPVCAAQLVVSSGDPRRMRKESAFAALAGTSPVDASSGKQQRHRLNRGGDRQLNRALHVIALNRVRHHEQTAAYYRRLLDSGKSAREARRCVKRALARHFYRRLCELSPLQEVPLHA

SEQ ID NO: 262394 - protein, 345 aa, unidentified
MQHYVGLDVSMKKTSICIVNSQGKIVYESNVNTDPHDLADAIEKTGLKIELVGFESGSLSHYLLRGLRERVLNVVCIDARKMSAILSLRINKTDKNDARGIADALRTGMFSTVHEKPQEAIDRGAVLSMRRCLVKHRTDIKNHIRGILKNYGIRLGSVGPTRFSKTVKLSIQQVDDLVQKTIEGVLETFDLLTKQISQIDQKLLQLIRTDTEVKLLMTAHGIGPITALTYKAEIHDPCRFTNSRAVGAYLGMTPRQYSSGETNKQGRISKCGSSELRALLTEAGIVILTRSQKWSKLKAWGLKLMRKKGIKKASLAVGRKLAIIMHRMLIDHKEFIWGEKPSIAV

SEQ ID NO: 262395 - protein, 413 aa, unidentified
MLWGSGGEGMDTLERRDHAMEHPMSQSFDASRSLTAFEQDSTLVAAIEMSQSKWLVAAVIPGVARQPLKKLDADAGALLKQLQRWRDEASKAGRAIRRIVCAYEAGRDGFWLARWLQARAIETSVIHAASIAVSREHRRAKTDRIDTELLMRSFLGWLRGEKRHCSMVAIPTMAEEDARRPSRERESLVGEQTRIVNRIKALLALFGIGGFNPRLRKAAQKLATLRTAEGTPLPDNADAELRRDLERLRLVREQIRTIESERVRRLALAPAAATGPHAMVRLIARVFGIGIETADMLVNEALARNLRDRRAVARYAGLTGAPDESGERHREKGLARAGNGRVRRGMIQLAWRFLIFQKDSRLVRWFRERTADGRSTTRKTMIVALARKLLLAPCRLAPTGATTAAPKLPPART

SEQ ID NO: 262396 - protein, 408 aa, unidentified
MELMYKRCAGLDVHQKTVVACVRIAEDGKVSEEVRTFETTTTGLLDLSGWLESEGCTHVAMEATGVYWKPVWHILEAKFQLVLANAAHIKNVPGRKTDVADATWIADLLAHGLIRGSFVPPTPIQDLRALMRTRKQLVREAARNTQRIQKALEDANIKLTGVVSNVLGKSGRLVLDALVAGETDPERLVELTQGRLKAPREALVEALRGNVRDHHRFLIKLHLDQVDALNTAVRELEARVEEHLGPFRKNVEILTTMPGISEVAASVIVSEIGFDMARFPTSAHLVSWAGLCPRSDQSAGKRRSSRIRHGAPWLKTTLVQCAWAAIRTKDSYLRAQFHRLKSRLGPMKAIIAVASSMLTATFHMLTNGTAYKELTGSYFDRRDHAKLAKRLVRRLEDLGLKVTVSEAA

SEQ ID NO: 262397 - protein, 398 aa, unidentified
MISVGIDVSKEKSTVCVLKPYGEIVMKPKDVQHTESELSKLVGELQELQEEIRVVMEATGAYHLPILSYLKEKGFFVALVNPLEMKRYRCQGIRNAKTDKIDSKIIANYGIDFWYHLSDFKGSEEHYLELRLLGRQYRQYMKFRVENVLALANMLDQTMPGIKTLLCDWNKYTGKDKLADFAYDYWHFDNITKKSEKQFLESYSKWAKKKGYRQNESKAKQIYALAKEGIPTLPSSTPSTKMLVQESVKIVREVDDTLTQILTRMSEIAKMLPEYQVVHDMGGVGDALAARLIGEIGDVRRFHNAKSLIAYAGIDAPPYQSGKFTGTDRHISKRGSSTLRKVGFETMTCLVMQKKHGDPVYDFIKKKQDEGKACKVAKIAGFNKFLRIYYARVMEVYQ

SEQ ID NO: 262398 - protein, 477 aa, unidentified
MNSEKAAVSGKQLTRKQRKELARRLWSQDPGLDVVHRDAAGIDIGSREHYVAVGPDRDPQPVRCFGCFTADLHRMAEWLKACGVKTVAMQSTGVYWVPVYDILQQHGLEVWLVNARHTRSLPGRKSDVQESQWLLKLHTYGLLNNSFRPPAEIRALRTYWRQRAEHVGAAGTAIQRMQKALTEMNVQLAQVISDLSGVTGQAILRAIVAGERDGVRLAQLKDPRIQSSQEEIAKSLQGHWLPEQVFVLRQQLELYDYHHKQMAECDQQLQAGLQSLPSQPCRPAESSEAARPDRAGGRKRKPKGNQPVFDLQAEQVRIAGVDLTRIDGVDVMTAQTIYSEFGPDMSPWRTEAHFASHLGLCPDNRISGGKVLKRGTRKVVHPVATALRLAATTLIRSKSYLGAQFRRLRTKLGAPKAITAMAHKLARLVYRMLKYGQEYVDKGLAFYEQKYRQQQRQQLAKKAKELGFQLVEIKAVA

SEQ ID NO: 262399 - protein, 428 aa, unidentified
MNYNRNSKIRQITEQTLIIGVDVAKHKHVARAQDYRGMDLSKAVVFENSRIGFQTFLNWVHTLMNQHEKRDVIVGMEPTGHYWLNLAYFLTSHDILCVTVNPMHVKRSKELDDNSPTKNDVKDAKVIAQLVKDDRYSIPILPEGIYAELREGVKLHDMMTQDLYAVQAQVHNWLDRYFPEFLTVFKDWTGKAALQLLKLGYLPNEIVKIPSERLLVEVKKVAKRAVGMKRMEQFKEAAKVSIGLQPGTQMAKEELRYLLEKYEYLTHRLDELEKQLSEMVQTIPGAKEMCEIKGIGEMTVVGFFAEVGNLHPYQHPRQIIKLAGLNLKKNESGKHRGKTTISKRGRKRLRALLFRVVMPLSTKNKGFKALHEYYRTRTHNPLTGKQSLVALCSKLIRILFVTGRRPISFSEEKMIQDIPHLKTLQEIA

SEQ ID NO: 262400 - protein, 363 aa, unidentified
MEYIAFDAHKHYTLVSVARPDGQLVREQRLPHERGALQQFLARCEPGSPVAVETIGNWYWIVDEIEAAGCVPKLGHARKAKLMMGEINKTDRLDVRGLNRLQRNGTLPTVWIPPGELRDLRDLPRTRMVFVRQRTQLKNRVHATLAKYALHDFTVSDIFGVRGRELLRQRLELLPPHTAYASQHLLRQVEELGGQIRQFEQRIQATFKPTPAIQHLMTVPGVGLTLAVVIALEVGDVARFATAEKLASYAGTTPRVHASGGKTRFGRSRPDVNRYLKWAFGEAANAICVTRRRSSCRHVSRLYERIARRKGHPKAIGALARHLAEATFWILSKQEPYRKPKLSTVSSTGDKREIPLSSRKLDR

SEQ ID NO: 262401 - protein, 366 aa, unidentified
MKKTSTIRVNGNMIFKGHKLTIGLDLGDRWSFYCVLDEAGQIILEQKLPTTPEAMKQTFESIPRSLIALETGTHSPWVSRLLRELGHEVLVAHAQKVQLISKSNRKDDRHDARTLARLARIDPELLGPVRHRSAKAQIHLTVIRARAELVSARTALVNAARGLAKSYGERLRKCGTQQVSRELAAELSVELREVLEPLLQEVESLNERIKEYDARMEKIARESYPQVELLKQVKGVGTQIALTFVLTLDDPHRFPKSREVGCFLGLRPGRRDSGESQPQMHISKEGDPYLRTMLVQGAHYILGPFGQDSDLRRWGLKLAARGGKNAKKRAVIAVARKLAVLLHRLWVGGEVYEPLRNSHQAMRAVA

SEQ ID NO: 262402 - protein, 412 aa, unidentified
MNAVGIDVSKGKSMVAVLRPLGAVVAKPFEVLHTAAELKKLTDFLKSLDGETKVVMEHTGRYYEPVAHTIHHQGPAVSAVNPLLIREYGGNSLRRVKTDKADARKIARYTLDNWADLREYTPMDTIRYQLKTLNRQLHLASKNRTSCSNNLIALLDMSFPGARAWFDSPVRKDGSQKWVDFVLAFWHVDCVRSLSHTAFSQRYRNWCKRQGYQFSAGKAEQIHREAREMIALVPKSPTTKLLIREAALQLTSLSRTVEVLRAEMNRLAAELPEYPVVMAMYGVGESLGPQLIAEIGDIRRFAGKQSLVAFAGVDPMPNQSGAKETRSNRSSKRGSPYLRKTLFNVMKVLIQKSPPDVAVYQFLDRKRAEGKPYYVYMTASSNKFLRIYFGKVRDHLAALDAPPNDTSLANPL

SEQ ID NO: 262403 - protein, 343 aa, unidentified
MKPTPVGIDIAKNVFQVHYVDEQTGEIVSKQVKRAKFLEFFINRNPCLIGMEACGGAHHWARQLIQMGHQVRLMPAKLVKAFNIRNKNDVADAQAIWLAVQQPNKPVAVKTEMQQAMLSLHRMREQLVKFRTMQVNGLRGLLAEYGEVAGQGRASLAESLPELLGRLSERLPAALIESLREQWAEIARIDGRIAVLERRMNEWKKEDPAVKAISEIPGVGLLTATAAVAAMGDAKAFRSGREFAAWAGLVPRQTGTGGKTKLHGISKRGDTYLRTLLIHGARSVLANAKKNAREPASWVEQLQKRRPHNVVAVALANKMARTIWAVLAHGRAYQNGYVRERPA

SEQ ID NO: 262404 - protein, 343 aa, unidentified
MDHFVGLDVSVKETSVCIVDEVGKIVREVKVASEPEALLAVLKKPAYRFKRIGLEAGPLSQWLFGALAEAELPVVCVETRHMQVVLKAQINKTDRNDARGIAQMIRAGLYRPVHVKTLRSQKLRMLLTHRKLLQSKAIAIENDLRGTLRNFGLKVGIAGTVKFEARIRELVENLPDLAALVEPLLIVRRVLHEQISVLHRRLLAIVRDDAVCRRLMTIPGVGPVVALTYRATIDVPARFKNSKAVGAVFGLTPSKYQSGEINRTGAISKCGDEMMRVMLYEAAQVMLTRTNKWSWLKAWAMKIARQRGMKKAIVALARRLAVIMHRIWVDGTEFRWTRKVIAA

SEQ ID NO: 262405 - protein, 409 aa, unidentified
MDQLIERCCGLDVHRDTVAACVRVPGPNGKRQQEVRTFGTTTAELLALRDWLEAHRVTHVAMESTGVYWKPVFYVLEEAFTCLLVNATHIKQVPGRKTDIKDCVWIAQCLECGLLRGSFVPPAPIRELRDLTRYRKVLIQDRTRAANRLHKLLQDAGIKLASVATNILGVSGRAMLQALVDGTTDPQVLADLARGRLRKKLPALRQALAGRFRPHHAFLVSQLLSDVDYLEEAIELVSEEVDRRLAPFARPLAQLDTIPGVDKRTAQVLIAELGVDMSFFPSDAHLASWAALCPGNNESAGKHRSGKTRGGNRWLRTTLVEAAWAATRVENSALAARYRRVMRHRGHQKALIAVAHAILRTAYHLLAEGTTFREPGADYYDRRHAERVKRRAIQLLERQGYRVVLEPAA

SEQ ID NO: 262406 - protein, 389 aa, unidentified
MEARTLNHLPPAASHDGAVRCLLAIELSKKSWIVAVNTPLSDKISRHTLQACDWKGLLELIERIRTRVSQTFSRLVEVISCYEAGYDGFWLHRLLEAHGVRNFVIDPASVQVDRRARRVKTDNIDVGRLLRSLMAYLRGEPKVWSVVRVPSVTEEDDRRLHRERDRLINERVQHVNRIKGLCAVHGIYDYEPLRPNRLARLEQLRAAGKRELPPRVKAEIARELQRLELVLNMIKTIEAERDAIASAGKSSTHANAKKIQDLTRLKSIGPEIGTTLVGEVFYRQFNNRQQLGSYVGLTPSHFQSGPLSRDQGISKAGNPKARTVMIELAWLWLRHQPNSPLSIWFRERVGTAKGRIRRIAIVAVARKLLIALWRYLETGVVPTATVLKV

SEQ ID NO: 262407 - protein, 350 aa, unidentified
MDKELYIGVDVSKQTLDLAYYDGESIDWKKAHIKVSNNNAGFKKIGSWVAKVSKGFDIVLFCMEYTGLYTQNFRLWLEEKHYIYRMVEPRKMHRFEPDLDDGLRSLDRIKTDELDSFRIAIYCEQNHRKILRNPSKLPSPVYFKLKRLLAERKQTVKQSVLYKQQLHDICSYDTDLSVERKNGQLKTLNDALKGIDNEIDMYIKEDADISKNFSLLTSIPGIGRVVALETIVLTENFMAIDNPRKYACYIGVAPFKKESGTSVRKGSSVSKKGFKQAKADLSIACLVCMQHIPNIRDYWERKRKEKCSGIVFNAIKFKMILRMFAVIKRGTPYVETDNYRNGKNKQPGVN

SEQ ID NO: 262408 - protein, 415 aa, unidentified
MEGMELLHEDVAGIDVHRKSLSVCVRHVGADRRVRQEVRTFGTMTRDLLQLRDWLEAEGVTHMVMEATGVLWKPVYNLLEDRVVVLLVNPRHVKQVEGRKTDVKDCQWLAQLLSCGLLQASFVPPKPQRELRDLTRMRSQLVGERTRVVNRIHKVLEDANIQLGAVASDILGMSGRQMIEALIAGEQNIETMAQMARRRMRAKLPQLRLALDGRVSEHHRFLLQMLLEQYDGIDKQVQQLAERIEKVCVPFAAAVEKIVEIPGYDRTSAQNVVAEIGSDMSRFASDNHLCSWATICPGNHQSAGKQTSGRSVHGNHWLKAALCQSAWAASRQKGSYFGAQFHRLAGRRGKRRAVLAVAHSQLKVIYHLLSSGQSYQDLGSDYFQKLNTARVARYHRKVLESLGYKVIPPQADEAA

SEQ ID NO: 262409 - protein, 342 aa, unidentified
MQITTIGLDIAKNVFQVHGIDAKEKVVVRKQLRRSHVIAFFKALPPCLIGMEACATAHYWARELRKLGHEVRLMPARDVKAYVKRNKNDAADAEAICEAVRRPTMRFVQIKSAEQQGQLMQHRTRDLLIRQRTQSINAFRAHLAELGIVAAQGDAGVTELLAIVADEQDTRLPIDARASVIVLAAQLEAMRTLIGSIEKRIKTQHRSNEVIQRVETIPGIGVLGATAIVATAADPKVFRSGRDFAAWIGLVPRQDSTGGKQKLGPISKQGDHYLRRILIVGAIAVLRRAQENPGKYPWLTQLLARRPFKVVAVALANKMARTAWALMVHGGTYRAPELAEAA

SEQ ID NO: 262410 - protein, 454 aa, unidentified
MSRRNEKVIPKPGKFRASALTITHPNAAGIDIGSAAHFVAVPPDRDDEPVREFPSFTVDLNAIADWLEACGVDTVAMESTGVYWIPLFELLESRGFTVLLVNARHVKNVSGRKSDVLDCQWLQQLMTYGLLSGAFRPAEQVCVLRSLWRQRGMLLRSQARDVQHMQKALTQMNIQLANVIADVVGETGQKILRAIVAGERDGLVLGAMKNVRIHASVDEIAKCLQGNWRGEHMFALKQALAAFDFVGTQLCECDQEIEAQLQRLQVHDGEPAKGKKRGRARNAPKFDLRTQLFKMCGVDLTRIDGIDVTTALAVISETGADMSRFPSAGHFASWMGLCPGTKITGGKVMSSKTKRCANRAAQALRLAAAALRTSHSALGAYFRRMCSRMDKPKAVTAAAHKLARLIYTMLTKGQEYTDQGQAYYEERYRERVVRQLTLRATKLGMRLVADEQPA

SEQ ID NO: 262411 - protein, 557 aa, unidentified
MFIVGIDIAKRSHEAIIIAEDGQVVRKAFSFRNNCTGYNLLLEQVRRLTLVKSQIVFAMESTAHYWLALYARLLKDGYAVMVLNPIQSHSLRELYIRKAKTDARDSLIIADLVRFGRCKASNVPQDKILALRELCRSRAYLVDMAADLKRKLIALLDRIFPEYESLFDSVFSKASIAVLSKYSTPQKVKNANLRKLTDILMESSNGHFGEWKAHQLKEAACSSFGIDDSGGAYSTLLGMFLEQILSLTAQADSLEKQISVFFQEFNNPLTSIPGVGTVLAATILSEIGDITRFSSADKLLAYAGLDPSVKQSGEFKSNQNRMSKRGSPYLRRAIWLASTVAVHRDPMFQTYYEKKISEGLHYMNVIGHVSRKMTAVIFAVLRDGQPYQPIFANYRLTELHHFHSARKGLGSLHPFPIYPLYTRAVILSLDKPIADCFLFRPRKRLKKHRKALYKTPTQHAQSPTISAVIFILTVSFHSCFGHSPTNGSRSLSLPKASTHSPSPAKSHTAAHRGKQGVFSCMAKQRQGQFLSLPLLIFYAMYMRIVHRKACLHLTHEL

SEQ ID NO: 262412 - protein, 423 aa, unidentified
MMKLKYSICCGLDVHKNVIVATIVITNADGISEYKQKSFSTFNSDIRKFHSWLIENNCYHVCMESTGKYWIPIFNYLENDIEVCLTHPKYVKAIKGKKTDKKDSKWIADLYKFDLVRCSFIPPKDFRQLREIARYRFKLVCMKSSEKNRIQNCMTVSNVGIASVLSDPFGKTATEIMSYLLTHTSDSIDEKAVRRLIKKGAKAKSDEIIAAISGYNIESDQAKKLELARSHLEYLDGMITQSEVELYVRMKPYYKFVELVSTMPGMTELSSTIVLAETGVDISIFDDAKHLCSWCGLSPTNNESAGKKKSVRISKAGDYLKPMMVQCALAAIKSKKQPYFAIKYGRVKKRRGHKKAIIAIARMMIVCIYHMVSEEKPFNPIDYEELMSPKNQIERVILNENNVFAYLESLGYDSSKLVKRNDN

SEQ ID NO: 262413 - protein, 451 aa, unidentified
MRSSKKQVKSLSLECIEPNAAGIDVGATEIYVCVAAERDAKPVRCYATFTHDLEAMAAWLQRCGIVTVAMESTGVYWIPVYEVLEAAGLRVWLVNSRHVKHVPGRKSDVSDCQWLQYLHSVGLLQASFHPDSAIRALRALNRHRASLVEVASVHVQHMQKALTQMNLQIHHVLSDLTGKSGLAILDAIVTGQRDAEQLAELADGRIQADKETVAKSLVGHYRSEHLFTLRQSLEAYRHYQQMLADCDREIEQHLVQLPGHGDGGEPPPPSYKGGRGKRRKNQFHFDMGKELYRVLGTDLTAVPGLNALTVHTLVSEIGTDVSRFANAGAFASWLTLCPSNKKSGGKVLSSGTRKSKSRAGKALRLAARTLHKSQSFLGSYYRRMRARLGGPQAITAAAHKLARIVYHLISTRTAYDESIFAKEEQKYNLRHQHRLHKQASALGFQLVPLSN

SEQ ID NO: 262414 - protein, 396 aa, unidentified
MAKLWIGVDIGKTHHHVAAVDGDGRLVYSRRVANDETALLTVMAEVSTHGRPVCWAVDVTTGLSALLLTLLWRRQVQVRYVSGTVAFHMAAAFAGENKTDARDAVVVAQTIRMRPDIPLLEPSDRLLAELTVLTGYRSDLVGQRVATLFRLQELLTGISPALERAVDLNRKAPMMVLACWQTPAAIRHAGVDRITALLRRGHVKNATQVAEAMVTAARQQTVTLPGQRAAAVVVGQMATEILALEQRIAAVDDLIAEHLDQHPLTPIIGSLPGMGNLLTAELLVHTAGMTEYDSPTKLAAHAGLAPVSRDSGTISGNHRPPRRYHRRLRHILWMAAFTAARECPTSRAYYEKKRAEGKNHRQAILALARRRVDVLWALIRDRKTFARPAPVIRAAA

SEQ ID NO: 262415 - protein, 312 aa, unidentified
MIEQCFVGIDVSQDRLDVLLLPQTTGFSVANNEAGWNALIARLRDLPVAAIGLEPSGGYERGVIRALLTASLSVRRINPNRLRQFARARGALAKNDRLDARLIAAYVATMPTHVVRHDPAAARIAEIVTVRRQLCDEHVAVENQAAQLEDAMLRRLAKRRLARIETDIRLLDKRLAEMIAAEADLARRYARLTSMPGVGPVLAFTLIALLPELGRMSRKQIAALVGLAPYDFDSGKLRGHRSIYGGRMPVRNVLYMAALSACRYNPALKTFHNRLAAAGKKPKVILVAVMRKMITTLNAMLRDGAGWQPQAA

SEQ ID NO: 262416 - protein, 380 aa, unidentified
MAIGQQGMGGKATVYAAIELSKKSWVVGIAHPDRDRPSIHRFVGGNLAGVVARLRKAAGDERRILVCYEAGYDGVWVARSRTTLGIDCRVLDPASIQVNRRARRVKTDRIDTLALLRALIAIDRGERHVCSVVRVPAIEEEDARRSHRERQRLIRERTAHINRIKGLLFGQGIRGIEPKLQRTRIDFNALITAEGKPLPERLRRELERECQRLDLVQRQLRAVEEERDNADAQDPAVERKRELLCALHGVGNASAAILAREVFARSFASRRQLGSYLGLTPSAYDSGSTTRCQGISKAGNSWARRVLIEVAWLWRKYQPDSPLSRWYAQRTSGQSPRIRRIMLVAMARKLAISLWRYVETGLVPAGTVMSKTALHGSAAA

SEQ ID NO: 262417 - protein, 416 aa, unidentified
MKLFVGIDVSSEKLDTCYLTDEMVVLLNHTYGNDTQGAWELKEQVLAFYEMYSFDQIVIGMESTSMYSYHPAVNFHQDEQLQAIHAITTIENPHRIKQYIKMFDEDKTDPIDAFMIADYLRIQRYTNSPIKEEKYMALQRLTRTRYQFVRQLVEVKQHFIENLSYKCNTLKKELREAEGSTTVFSAAIMELFTQDLSLDDLANLPLKDFAEWLQTKGRGRFKDPEGLAKTIQRAIRSSYRLDQVVSESVDMILGILVREIRSLEKAIKDCDQGIEDLVQTVPEYQCLTSIPGVGPVYAAGLLAEIGQIQRFPDQASLAKYAGLTWPRHQSGRHEAEDTPLTKKGNRYFRYYLIEAANSVRRHLPEYQAFYRKKYQETPKHQHKRAIVLTARKFVRLVDTLLRNHQLYTPPRSVIEK

SEQ ID NO: 262418 - protein, 372 aa, unidentified
MQIMYHRCCGIDVHKKMIVACLLIITDQGVHKEIQTFTTMVPDLLRLRDWLNAQRCEAVAMESTGVYWKCIWNVLEGEMELLLCNAQHIKAVPGRKTDIKDAEWIADLLQHGLLRASFVPARPQRDLRDLTRYRSSLAADRARLVNRIQKTLEDTTIKLASVATDITGKSGRAILEAMLHGEQNPQKLAELARGRMKEKREQLAQALQGTLTDHHRFLLASQLRQLDFLTVQVREIDQEIAHRLGLQSDPDDPEPADSTGSLPAKEETPDPSETPESSLPSCVQLDSPHPLSSAEAIRILDEVPGINARVGAIVVAELELEMDRFPDEAHLVSWVGLCPAAKIRGMGQKKAIVALAHRILIIIYQLLKEQQP

SEQ ID NO: 262419 - protein, 391 aa, unidentified
MRREPVMEKGITWVGLDAHKKTIAVAVLHDNATKPIEWTIEHDAPSLKKLVKKLEREANGREIRACYEAGPCGFALARTLEKSSLVCEVIAPSLIPRKPGERIKTDARDAQKLASLLRAGLLTQVRPPTPQEEAMRDLCRCREHARLDLGRARHRLQKMLVRRGIVFSGTSRLWSDRHRRWLREVHFDDAIEQSIFDDYALAIEQIEERLRTLDRKLEEAAQLPLYRDVVARLRCFRAIDTCTAMIFACELHGFERFESPQKLAAYLGLVPKLYASGDTAHRGGITKTGNKHVRRALLQSAWHYRHRPGVGAALRERRKGQSPRVIAIADRAQRRLYTKFQRMLARRKTPNKVVVAVMRELVGFLWAALQRESRAPQQASAARHGKEKRAI

SEQ ID NO: 262420 - protein, 339 aa, unidentified
MQVTTVGLDLAKNVFHVHGVTHDGQVAFNRPLRRAQVLSFFQRFEPCLVGIEACASSHHWARALSKLGHTVRLMPPMYVKPYVKRGKSDAVDAEAICEAVTRPTMRFVEIKSQEQQALLSLHRARDFMVRQRSQLINMLRSLVAEFGITIARSIARAIDFVKGVIEGPSDDLPELSWDVLRILSRQLVELHNRLRWYEITMRIQARLSRQAQLLQTIPGVGPVTASAVAATIGSGHQFRSGREFAAWLGLTPRNHSSDGKERLGKITKMGDRYLRQLIVVGMTSRVRQVTNHPERADPWLADLLKRKPARLATVAMANKTARIMWAVLARNEPYRPHAA

SEQ ID NO: 262421 - protein, 407 aa, unidentified
MFVGIDWAMETHAICVVDAAGRVVDRFTVEHSAEGFERLVGRLTRHGEAATLPVAIERPDGRLVDRLLGAGHPVVPVGTTAIKAWREAEVGSGAKSDPGDAKVIADYLRLRRHDLRELRPFSEETRALRAVVRARGDLVEARVAAANQLSAALAAFWPGAGELFADAWSEISLAFLERYPTPAAAARLGEARMAGFLRKHGYSGRRSPAELLERLRSAPRGIEDGPESEARRDTLLAMVRVLRALNASIKDLDRSVVAHLGEHPDAEVFRSLPRAGQVNAAQMLAEWGDCREAYDGPEAVAALSGMAPVTRRSGKHVAVGFRWACDTRFRNAMATFADNSRHASPWAAAVYRAAVDRGADHPHAVRILARAWIRVIHRCWLDRVAYEPAKHVAARRLESQLEGSLAA

SEQ ID NO: 262422 - protein, 431 aa, unidentified
MEQHEQLTHFAGFDWAKDHHDIIVIDAKGTVVADFRFDHTPSGWKLWHDKIAAWPKLGVAIETSFGTVIEQLLESGVTVYPVNPMNAKRYRERKCSSGNKTDRHDAWALADALRMDGHAWRSLGVQDPIIAELRILCRDEVALIGERTALVNQLQQALHEYYPTALEAFEDWTSPNAWAFVEAFPSAAALLKAGKSKWDKFLHSHKLFRPQTYAARIAAFEKAAEWKASTPMVAAKSLYAIARCKQLRVLQNQLDEYRQRIEAIFASHPDSGLFGSLPGAGPKLAPRLLGEIGSDRSLYDDAQGLQCMAGTAPVSYQTGQVHKVNLRRRCNKNLRHAMHLFADKSRAQCAWASKYYESLRERGKSHAQALRCLGQRWLKIIWKMWQTGTSYDPELHMKNQLAHGSWVLQINPQTTPSNHANNIQKKNTCNR

SEQ ID NO: 262423 - protein, 344 aa, unidentified
MNKITIGLDIAKSVFHLVFMNQSGRVLRKKKLRRHQMLSYFSHLEPSIVVMEACGSCHYWCRELTKAGHEVKAIAPQYVVAYRKGNKHDYNDAEAIAEASQREGMRFVPFKSQEQQDVQLMHRIRERMIAQQTALSNQIRGLLSEYGIVYARGVAALVKELPFTLEEADNGLSMLARRQFQGLLNDLRELRERIKEMDKELKAFSQSQPVCERLMSMTGIGPLIATALYAGIGQGQAFNSGRHLAAWLGVVPKQHTTGDNPRLLGISKRGNTYLRTQMINGARAALRHIGDKTDNVSQWCRACLARMSFNKACVALANKMVRMAWAMLHYQQDYQPGLINKAAA

SEQ ID NO: 262424 - protein, 347 aa, unidentified
MKFYTQQHKYYCGIDLHARSLYVCIIDQAGETCVHKEISANPDKLARLLEPYLSQVVVGVECMHCWYWVADFCDDIGVDFILGHALYMKAIHGGKAKNDRIDSFKIANLIRGGNFPVAYVYPKAMRATRDLLRRRMKIVRHGADLKAHVANTTSQYNLPPNKVNLKNVSAREHIRSAFPDPVVQRNMDLNMSILECYAKELSKLEWFIEQQAKQHNPVHFHILKSIHGIGRILALTIIYEIGDINRFKSVQDFASYSRLVKCKAESAGKSYGAQGNKIGNAHLKWAFGEAAVIYLRGNDKAKAYLLKLQKRMSKAKALSALAHKLGRCVYFMLKNETVFDERKFLNG

SEQ ID NO: 262425 - protein, 329 aa, unidentified
MKKLFIGIDISKDVFDFYGISETGETVIPSGILFNSKKGIKSFLTMVKKYTGYEPHMCMEHTGLYGYLLMTEFSSASMRFSVINPLEMKLSSGLARGKNDAIDALRIAKYALANRFDLKPFTLASREIRRLKILMAMRDGQVKIMVQQKNSLKAFKLVAADTSLAKELKEHQKLIDAHQKVIAKLEKQMLEIIRGNVQLSESYRKITKVIGVGPLTAIKCLVETENFSKFDDPRKFACHSGLAPFEYQSGSSVRKRARTSPISDKNMKAILFKAASSALQHDPQLKNYYKRKTEEGKHKLSVINAIANKLILRIFAVVKRDEPFVKLSA

SEQ ID NO: 262426 - protein, 396 aa, unidentified
MYYLGVDIGKNKHVASMIDDEGKSVFKAFSFTNTTEGGESLLAKMSSCAVALCDVEVGLEATGHYWLATYSYLHDRGYKIHVINPIQTDGWRKGVEIRRRKTDIIDSVLIAELVRYGGFIESGLPDEHLISLKNLTRFRSYLVDSIADLKRKVICVLDQVFPEYEDVFADVFGKTSKEILLHFSTPAELEDISPDDLANMLAALSRRRHGKFTAQKLSDAAAKSFGVTFCRDSFSFQLRMLIEQMKYIESQVKDTEAEIEAIMEEIDSPITSIPGIGKITGAVILGEIGNIERFDSPIKLVAFAGIDATVRQSGEFDGTSNRMSKRGSPYLRRALYQSAVVASIGRNPDPILHAFYNKKRSQGKHHGTCIGAVCRKLCYIIYTILKENRPFELRNP

SEQ ID NO: 262427 - protein, 353 aa, unidentified
MTNDKYVAMDVHKSSVSIGVRDAAGKLISRAVVETKAQTLKDNLRGLSGTIHLTFEEGTQAAWLYDLLRPLVAECIVCDPRRNKLLDSGNKSDALDVDKLSELLYLGRLQAVYHGAQGTRALKELAHNYDALVKDNTRIKNRLKAIFRGRGISYEGGEIYDYEQREQWLVQLPERGVRERASQLYEQLRQLDEWVHKARLQMLRESRKQKARPILEQIPTLGEISVAQLIATIDTPFRFRSKRQFWTYCGLAVVRHTSADYRFEQGELRRRTKPGPTRGLNRNYNRRLKRIFKTAALAGSLKGPFKPYYERLVARGLDSELAQVTLARKIAAITLTLWKRGASFDREKLITPE

SEQ ID NO: 262428 - protein, 412 aa, unidentified
MEAYYVAGIDVHKRMLAVVVAEVKTGEWEFQRQRFGTTREQLRELSDWLAERGVREVVMESTARYWRPVWVALEETGIRRQLAQAHSNGARRGRKSDFRDAERLVHRLVAGELVLSYVPDEEQQGWRCLTRTRFQLVCERGRIQSQIENLLEDAQIKLSSVITDLLGASGRRILEALAQQQGTHDPGKLAELGHPKLRASRAELIEALDGRWLERHRVLLQMHLRRLQLLDADIEQLRQYTGIAMRSCEQAVARLIEVPGIRLEGALQMLAEIGPTAATFPSPGQMASWVGVCPGQHESAGQSYSRRSAKGNWQMRRLLNQAAHAAVHAKGSFFQRLYRRWVVKIGPQKAIWAVAHRLCRLIWKILHQGVRYQEQGQLTSNPKYIRQRQKRVQAEFQRLGFQVQFTPLTSAG

SEQ ID NO: 262429 - protein, 346 aa, unidentified
MRYSTTVGVDLAKNVIQVSVVNGRGKETLNRSLTRTKFAEFLGKQKPSLVAFESCATAHYWARASERHGHEARIIPAKAVAPFRQGHKTDSNDALAVAEAARRPNIKEAPVKTVEQQGLQAMLRARDRLIQECIAQSNHLRGILLEFGIAIPQGFASLLRTLPEVLEDGDNELPDFYRPTLQRMYHRMLELREDIDAMTKEVSELVKQHPVCSKLTALEGIGPIGAMSLYATLGSGHAFSKGREASAYVGLTPKQYSSGGKANIVGLSKKVGNRKLRSVLIQGALAYVYRMKEPRSCKDRWLKDLIERAGQRRAAVALANKNVRTAWALIAQGTEYQRRLQLEVAA

SEQ ID NO: 262430 - protein, 358 aa, unidentified
MNYVGIDVHKQSFQAAIIDETGKLLDEFRLRNNREGIQRFIDMARCHDDFKAVVESSANYWTKLFDVLEENGISVKLSNPYKTKAIAEAKVKTDKIDARTLAQLLRADLVAECYVPSKENREKRGLIRERASLTKIRTEHRNKIHDLLAKYEYRHGFSDLFGKEGMAWLKTLKLSQYDQVILDTNLRLLESFDTEIETLSIEIAKLAINHTDEHQQNQVRLLLGLKGIDYYGAMILLSEIGDIKRFPSPEKLVSWAGLAPRTHQSGETSYNGHITKKGSSRVRWILGQAAQTARLYDPKFKTFYERIASRKGHNKALVATMRKMLVIIWTILTRNEPYSGEDRELTERKIKRLIRISL

SEQ ID NO: 262431 - protein, 332 aa, unidentified
MGSSSRMQGKVLSEQATRMQSSAGIDVGKSWLDAHILPAGQRRRVANNPEGIRQLKRWLLGFDCTIVVVEATGKWHRPLYRSLHADGLPVAVSDPYRVRMFAKAHGVAAKTDRLDARVLAQFGAVMNPAIRPPAPEAFEELGELLAARRSAVDTQTALKNQAGITTSKFLVRQIKRRLSALAKDIDALECEIQRHIAAEEPLAKRYAILISIPSFGFVVAATLLASLAELGICSAKQIGMLAGLAPIADDSGQRQGTRFIGRGRSAVRNVLYLAALAATRCNPDMKAFYRRLIANGKPPKLAIIAVARKLAVLANTLITEGRNWLPQHPKHA

SEQ ID NO: 262432 - protein, 314 aa, unidentified
MQATVVAGIDVSKRTLEVALSSGGGFSVTNDEDGIGELLARLRPSGVALVVLEASGGYESPAYLALWEAGVPTALINPRDAYHFAQANRQLAKTDQLDARGLCEFGLRMQPEPLPPPEAADEELKALAVRRRQVIKMLAAERTRVQQAPRSVRSSVKRIVRALERELGAVDHQIEQRLRDNPRLAHRCAQLEQVPGLGPVTSAILVSRLPELGLLGPKQIAALVGVAPYDHQSGEWRGRSSIFGGRAEVRSALYMATLSAIRCNPVLRTFYRRLRAAGKPAKVAIIAAMRKLLVILNAMLKTNLPWNPPCAVTV

SEQ ID NO: 262433 - protein, 391 aa, unidentified
MRVMIERVAGLDVHQETVVVCVLIGKPGERPTKEVRTFRTMTRDLEALREWLLSLGVTHVGMESTGIYWKPVYAVLEGSFELIVGNARHIRNVPGRKTDVKDAEWIADLVRHGLIAKSFVPPPPLRELRDLLRYRRKLVESQAAERNRLLKLLETANIKLASVVSDVFGVSGRAMLKALIEGTASAQAMADLAKGQLRRKRADLVLALEGRVEEHHRFLLDLQLRRLEAAEEEIAALDARIDEKLEPYRAPHALLMQIPGVDRLVAAVLIAEIGIDMSVFLSVYHLASWAGVCPGNHESAGKQKSGRARNGNVHLRTMLVGAAISASRAKGSYLKDKFYRLKARRGSMRAALGSPTRSSSPPITCSPKALDTAKSARPISTKSARPEPSPT

SEQ ID NO: 262434 - protein, 353 aa, unidentified
MLIIGCDYHPSVQQIAFVDRETGECGERKLTHKEEAESFYRDLNGRSVRVGMEATGQARWFERLLAEQNFELWIGDPAEIRAKRVRKQKNDRQDAEHLLQLLVEDRFPQIWVPSPENRDLRQLLWHRHRLVQMRTRVKNQVQAIALNEGIRRKKGLWSKLGRVQLESLSLAPWSARRRQDLLELLDRLNPKIDELSTAIQQAAEQRPEVQRLMTHPGVGPITALAFVLILGVPERFQCGKQVGSYLGLIPCEESTGGRQRLGHISKQGNTLLRFLLIESAHAVVRYDPDWRRRFLHLAMRRGRPIAKVAMARRLAVRLYWMWRKAWDYQQTLKFGSQGRKLSSHNVVTTGSTR

SEQ ID NO: 262435 - protein, 405 aa, unidentified
MEFVVALDISMGKSYKVIYHDQTCLSEGEVLHNREGFQTLLEEIQALPTPPVVVFESTGVYSKVIESFCHQHQLRYCLLNPLESKKQLEQGTLRSWKTDQYDAHKLAQVHQHNHRPERSRQLEIFYELRDLSRFYQEIEEEIKRTRMHLHNALQLSFPELEQFFSSRVTPYALTLIDLFPHPEMVLKTSQTKIKNLLMKTTTKKISEARAKQKASQIMDFARESYPAVSATSVQAQKVQYYARQLLQLLEEKKQIADQLIDQAKTIPTFNIRKSFPGIGEISAALFMGEMGDLSRFSHHKKVNAFIGIDIRRYQSGKYTGQDHINKRGNPKGRKILYLIVRNMIRQQKAAPNHIVDYYYKLKKQPIPKKDKVATVACMNKLLKCIYSMIGNNTLYDYSHAVSKDQ

SEQ ID NO: 262436 - protein, 446 aa, unidentified
MQVVSTHCAGLDVHKKTVVACRSRLQKNGGGVEQERKTFGTTTPDLLELVEWLKEWGCSQVAMESTGDYWKPVYNLMEGVFEVLLTNAHHVKYVPGRKTDLSDAEWLTDLLRHGLLKGSFIPPKGQRDLRELTRYQTKLVQERVRQVNRVQKLLEGANIKLASVASDIFGVSGRAMLAELVAGQTDPVVMAELAKGRLRNKLRELEKALTGQVEEHHRFMLGHLLSHVDYLDEKLGLLEKEIDQQLEMMGAQSLPALAQEQDMKDWLIEQALTYPLDQPLPAILAVALLTTIPGVDWKIAVVIVAELGPDMSHFPNANHAAAWSGLAPGNHESAGKRYSGKTKPGNQALKTILSQAAWAASRTKNTYLSAQYRQLVRRRGKKRAIIAVAHSIIISAYHMLSRHQVYRDLGDNYFDERKKAAVVNRLSRRLSKLGYSVRLEPLVEAA

SEQ ID NO: 262437 - protein, 336 aa, unidentified
MDRRYVGIDLHRRRSVIYAMNAEGDKLFCERIANDSLRLLEVVSQAGAGAEVVIEATYGWYWAVDLLREAGFSVHLAHPSGNDWGKRRVKNDERDARGLADLLRLGRLAEAWIAPPAVREARELVRYRARLVQLRSGLKAQVHAVMAKEGVLPGVTDMFGPKGQQLLDAMELADAYLVRVESLRDLIEIYDREVVMLERRIHELLRDDRGYQAIQALDGVGRTIAAIFVTEIGDVSRFRSPEALCSWAGLTPRHRESDTKVVRGKITKQGSKLVRWAALEAIVRYHGGPPLRDGFHRIAERRGTNKARIATARRLMTLVYYGLRDGEIRCLQRAAA

SEQ ID NO: 262438 - protein, 341 aa, unidentified
MTLYVGLDVSQKTTAICIVDETGQRVWRGECRTLPEEIAAVIRQHTGEDVRIGIETGPMTPWLVHELRSRSHSVVCLDARHARAALKMQVNKNDRNDAEGLAQIMRTGWYRPVHVKSFEAHRARALLAARLQLIETTTRLSNHIRGVLKTFGMLPGTVRGLRFDRRVELLLEGRSELATIVMPLLAAWRQLREQIAVFDKSILAIVRASAVCRLLMSVPGIGALSVLAYVSTVEDPTRFSSSRSVGAHLGLTPRQYQSGEVDRSGRISRCGDHLARTLMYEAAVVILTRIKRDLPLKSWALAIARKSGSGKARVALARKLSVILHAVWRSGEPFRAISSQA

SEQ ID NO: 262439 - protein, 350 aa, unidentified
MDVVFTHCAGLDVHKKSITACRIVPDPTGQDREGVADLERFGTMTIELLALVDWLTAAGITHVAMESTGEYWKPVYNLLEGAFTVLLVHAAHVKNVPGRKTDKTDARWLAKLMRYGLLQASFIPPKGQRDLRDLTRYRTKLVQERAREVHRVQGVLERANIKLASVASDIMGVSGRAMLDALIAGRADPQTMAALATRRMRRKLPLLEQALTGLVRDHPRRLFAIQLAHIDCLDAPIEALSTAIATSLAARSADEMTPSSEGASLSTAPEAPPVLTFTRAVELLDTIPGVDRRGAELLVAEIGIDMTRFETAPRLAAWAGVAPGNNESAGKQRSSTTRKGNQALRAGLTP

SEQ ID NO: 262440 - protein, 451 aa, unidentified
MPTESISTPKRKRSRSAPVTPAASRDRAGVPTATRRAGRRSGKKLADLSAEASAAATPTRSEGAITTRGKERPAVRNVALDLGTRKIVYCEVADGRVIERWTVTSLETLRLRLGPDQPAATVAIEACREAWHVHDQLTEWGNRVLMIDTTRSKQLGIGAHGRKTDKIDAEVMARAVERGTIPKAHVLSPHRRKLRRQLGVRRALVETRAQLVVTMRALAREHGHRLPSCSTEHFVGKVRKLELDESLRALIEPLLITLETVQTQLARTDEELGKLCSTEPVIPLLCTAPGVGAIVAACFVAVVDEAQRFHRAHQLESYLGLVPGENSSGGRRRIGAITKKGNSYLRALLVQGSWSVLRSAPADDPLRCWGEAVARHRGKRIAVVAIARRLAGVLFGMWRSGKAYDPQLLGRRSAKGLRDHAARIQLDAETLQRVTRKVSCRLLKQEVKATS

SEQ ID NO: 262441 - protein, 308 aa, unidentified
MAKSITYVGLDVHKDTIAVALAEGGLRGEVREHGKIPNTPAALKTLSAKLAPGRELRFCYEAGPCGYSIQRQLTGTGHDCAVVAPSLIPRKPGERIKTDRRDAINLAKLHRAGELTSVWVPDQAHEAIRDLVRARQAAVRSLRQARQQLSGFLLRHGHHYHRPAWTQLHRRWLASLRFEQAVHHIVLEDCIAAVEAATARRDRLEAHIEAALPEWSLAAVVQALQALRGVSVVAAATLVAELGDITRFANPRQLMAYLGLVPSEHSSGNTRRRGGITKAGNGAARRMLIEAAWSYRFPARISREQLLR

SEQ ID NO: 262442 - protein, 579 aa, unidentified
MQSLRYYFRRETQKSRTRPQPDLQIFGESWWADLPVWKERLLKRFWFGAITPNQSIEITKLISVNNMSTGTKKKLMVRSASLRPSLPPPNEIEYSEDFSRMGIGLDVHKDTVAACVSGQTSTGEIIELKYHVFRNDDVGLHEMCRFLHRFNHNPTFLMECTGVYHIAVFRALNKAFPAAKDRIIAMNPLLVHNRIADLGSKNDRADARSISALAFYTKILRPSYVGSDHFFAVRDHMRVYHRNHTQLTRLKNRIHRQLHLANQKFTFDLSREWCLQLLDHYISKSWSLKECYEDLLGILQKEGKGGALKKHFEEIIRHGEVILTDEQRFGLQIDLLQLFHSERVGAIFIKRAEENILHDSELSSHYRMFQMIPGFGPVTILTVLTEIGDYSRFYSLKAFVKFCGVIPSVQQSGATVAKGHVNRFTNKHIRQALCQAAGVLIGLKQRNSDLAAFAYHQRFIRGLPFKKAVLKVAAKYAHTIYQLLTEQREYDPTWDITQKKRIAIAKKLKSKGSLLENSQTRGLRREIKNFLVSHSELLNATSRYHLVNGFTRLIQKSKRFDLKDHSVEEDLDVGVKDKK

SEQ ID NO: 262443 - protein, 345 aa, unidentified
MFYVGVDLHKNFTQVYGFNDDTGEVVERRVRNDRGSIREVMSQFGDNAKVVLEATRNWYWFVDLLQEMGIDVVLSNPLQTKAIAYAKVKTDKVDARMLSHLLRADLIPFAWIPSMEKRGIREMLRTRLTLVRIRSRFKNLVRSILAKLNIVLSYGDIWRGKGRKELKQLNLPFPYNEILPHYLTLIDNLDKYIEEWNRRIERISKETPEVSLLKSVPGIGAISALTILYETGPIDRFPSAKRYSSYAGLVPRVKGSGGKFKTGHLSRQANMYLKWIYVEIATGIVRIGKGYLYEYYKKQMYKKGKNVAKIALARKVSRMVYHLLKQHITYDVFVERNVDKMRRTG

SEQ ID NO: 262444 - protein, 379 aa, unidentified
MERIIYIGMDVHSTSYSLCALEPVFGQENKFFFETKVAAEPSNIIKYIDDIESCFANDECTFVTGYEAGCLGFSLYNYLKGRGIDCKILAPTKMSEEKGGKKVKTDKRDARTIAQNLAYGTYSAVFVPTEEDLAVRDYIRMRNDHKAAVKRIKQQINALCMRHGYIYQRTKWTAEHLKYIKGLTLSPLYREILQEYLATMEQLNNKIKAFDVRIEELSKTKRYKDNVGKLACFTGITRSRALAIIAEIGDFRRFLKPLNFAAYLGLVPGEKSSGKKQKRIAITKAGNSHIRKELIEAAQSICRGLPGYKSRALLARQQGNDTTVINYADKASARLRRRYYKLGRCGKKHNVAVTAAARELSCFICGMMNGLTEVQIKKA

SEQ ID NO: 262445 - protein, 313 aa, unidentified
MTYTSRFIGIDISKSAFDICLLPDQASLTFANTAEGIADFLAFLAPVAGIERLILEPTGGYERRVVEALHAASLPVAKVNAKQIRQFARACGQLSKTDRIDAFVLADYGRRMETRILPPQSGQQAILADLVLRYRQLSHMIVQEKNRREKLSGKTRDWIEETLRFLLDQRQAIVEEMTACLKADQQLGKKAEVLMSLKGIGLRTACFLLAGLPELGLMDKAKIAKLVGVAPLNRDSGLMRGKRMIAGGRKPVRDALYIAALPAIRFDPTIKAFYTSLRNRRKPGKVAVIAAVRKMLIILNARMRDHAATGLDP

SEQ ID NO: 262446 - protein, 453 aa, unidentified
MSKETKKKVKRASSLSMPIVHENAAGIDISARGHAVAIPPGRDEVCVREFGAFTEDLYSIAEWLKNCGITTIAMESTGVYWKPLYRVLLEYGFSVALVNARHVKNVAGRKNDMDDAQWIQKLHSAGLLNSSFLPDETTESLRVLIRHRKRLIEDSSRYVLRMQKALELMNIKIHSVINDITGKTGTAIIEAILQGERNPSNFLQYVDSRIKADHDTICKSLMGSWHEEQIFTLAENYQLYKYIQQRIVICESKIEQHLQKQVAINNEGIIEAPEKEKMISKKKKTKNQPLFNVKNYLMKIHEVDATAIFGISENTALEILAETGTDLSKWETENHFISWLNLCPNNKISGGKLISSMVMKKKAGYATQAFRAAANSVQRSDNWLGDYFRRMKAKGGNKYAIIAVARKIALIYYKMVRYKQEFKPVDADEYRKKYKAAKIGYLEKQLAKLREAA

SEQ ID NO: 262447 - protein, 317 aa, unidentified
MAALICGVDVSSISLDARVGSQGSEARFENSPEGVSRLVEFCRQHDVELVAMEATGGYEKLAFGLLWGSGLAVALLNPRSVRRFAQGMGLEEKTDRIDAGVIAWFAEVKKVAPTPPASAEQARLESLVTRLRQLTELHAAQRNQRLLVSEPSVLDSFSALLALVKAQIRALETSIAELIAADPLWQQLDTAFRSIKGVAARTVSRMMAEMPEIGTASNKAVSKLAGLAPLARDSGKSQGKRVVRGGRRNVRSILYVVADIVRRYNPDFAAFALRLRAAGKPKRVIRIALAHKLLVRLNAKAREVRQQYSMESCSSTC

SEQ ID NO: 262448 - protein, 353 aa, unidentified
MRTYYVGMDVHRATIAIVVLNGAGKVVEQIVVETSATRVRRYLKQLQGRVYVTFEEGTQAQWLYEVVQPLVTAVIVCDPRHNKLLQAGNKSDRIDAQKLAELLRNGSLKAVDHRDHGVRALKELVRNYDCLVSDTTRVMNRLKAMFRRQAIACGGHEVYRQDRREVWLGKLRERGAKERASSLYRQLAALQALRHEAKLAMVREARRGAAYVWLMSVPRLGAVSVAQLLAVVGTPHRFRTKRQFWSYVGLAVVTSSTADMEVVDGVLRRSRRPVATRGLNRNHNHLLKRVFKNAATSACQSEPFKQHYELRLQQGMDPALARLTVARQLSAITLSLWKRGEQFQAERMKRQAA

SEQ ID NO: 262449 - protein, 351 aa, unidentified
MRKIAYLGMDVHSKHCVLGDMDFKGNFKGTQTFPTSEQNITKALEAIKAKNKYLTLEEGNLAYWAAQVAAPYVTEVIPCDPKENALIYRGPQKNDKVDTRKLCRLLRLGELKRVYHSETDERAIFKAAAQHYMDLRDQQIALKQKIKAMYHHWGVIDVAGEAVYSTAKRNDYLRQIKHIEIRNQVSRLYYVMDQTESMQASALKAMKQLGRKYPEIKQFKKIPGIGDILAHFFDAFIQTPHRFANKHRLWRYCRLGVTDRTSDGKPLGFKRLDRSGVAELKSLSYRAWMSALRGDNEVRRFYTTSLQRTFSRVHARLNTQRKIIATMYGMWKRGEPYNPKRFLDSPQSGAV

SEQ ID NO: 262450 - protein, 345 aa, unidentified
MTEAYDGRQVVGMDLHRRRSVLVRMTADGRKLETARIANSPAALRAVIARAGQNPQVVVEATYGWYWAADVLEAAGAEVHLAHPLGVKAFSYRRVKNDERDCADLADLLRLGRLPEAWIAPPPVRALREVTRYRHKLVGQRTSCKDQVHAVLAKCGIPVVRPDIFGRGGGIWLDGLPLPQPYAGKIASLRALIGVLDSEIARLEEQAAGLLAGDRGYAAIRQLPGIGPVLGAVIAAEIGDITRFRTPGQLASWAGLTPRHHESDTKVIRGHVSKQGSRMLRWAVTEAIQRQPAGTRPQQAKEAIIARRGDQARSIAKTAAARQLLTLVFYAMRDGHIRRATSLAA

SEQ ID NO: 262451 - protein, 416 aa, unidentified
MSRVVDIVRPVCCGIDVHKNFLVACIATTDARNHTTHQIRRFSTYKGDLQKLAVWLDANNCKDVCMESTGKYWIPVFNVLEKTVNVCLTHPKYVKAIKGKKTDKKDAKWIAELFKCDLVRSSFIPPPLTRHLRELCRYHAKLTYMNSSEKNRGQNCLTVCNFKLDDVFSDVFGTSATRILDKLIELGHSDFDVAPLLHKRCKATPEQVKAAIDGELSTAQAQKLALIREHMKQLEIFQSTIESSVTKLAAPYQPQIDLLMTVPGIGSEFTAIRILAEIGVDMSVFETAKQLTSWAGLTPQNNESANKKKTTRIARAGAFLKPLLVQCTLAAVSSKNYPWLKDKYQALKKRRGHKKAVIAIARKLLAAIWNMLAKNEPYNHELHQKSDPPPQNRVLTPEQAFALLRKHGFQIAEPAA

SEQ ID NO: 262452 - protein, 349 aa, unidentified
MSQTAQTAVAVIGIDIGKNSFHIVGHDERGAIVLRQKWSRGQVEARFANLPPCLIGMEACVGAHHLSRKLNGLGHDARLMPAKYVRPYSKGQKNDFRDAEAIAEAVQRPTMKFVSTKTADQLDLQALHRVRERLVSQRTGIINQIRAFLLERGIAVRQGQRFLRAELPRILATPPDVLSPRMARVIEDLAGDWRRLDERIEGLSAEIGVLAHADSGCERLMSVPGIGPIISSAIVAAIGAGDAFTKGRDFAAWLGLVPRQMSTGDRTILGKISKRGNRYLRVLFVQAAWVVLIKPKSWERHGLKHWIEAAKKRLHHNVLAIALANKLARIAWSVLARGRGFEASKLQVA

SEQ ID NO: 262453 - protein, 355 aa, unidentified
MSGEKYIGLDVHQATISVAVRDSQGNIIMESILETKASTILDFFAGLRGTLSVTFEEGTSAAWLYDLLKPHVAQVLVCNPRKNAALKQGNKNDKMDARKLAERLRLNDLKPVYHGENGVRMLRELARSYLTIVKDLTRVMSRVKALYRSWAIPCTGRDVYYRRHRNQWLDKIQEAGVRCRAAQLYQQLDMLQQLRQQARRELLAESRKHTITAKLRQIPSLGPIRSALAVALIQTPNRFRTKRQLWTYSGLGLETRDSGEYQFVQGQPRRRKKQVFVRGLNKDYNHDLKGLFKAAAVRASVQPGPFQDFYQRSLAKGIKPTMVRLTLARKIAAVTLTLWKKGENFDAEKLKSQAA

SEQ ID NO: 262454 - protein, 362 aa, unidentified
MPKMIWLGMDVHAASITVAQYEDQAPTATVQTIANDPAQVRRLVRRLPAGSDVRACYEAGSCGYGLHRQLTALGVHCDVIAPALIPRRPGERIKTDRRDAEKLGRFYRSGELTTITVPTPSQEAVRDLVRAREDVRRDRTAARQRLAKFLLRHGHRYPGSHWTKRHWEWVCGHTFDGPARTVFVHYCDHVLALNERLAHLEREIRTLAESAAYQPVVTRLSCLRGLATLSALVLIAELYDLRRFRTPRELMAYLGLVPSEHSSGARERRGRITKTGNALARRLLIEAAWAYRHPARQTRRVHQALTTQPPEVHAISDRALHRLTARYRRLLSRGKTPHHAVTAIARELCGFVWAIALVPDLA

SEQ ID NO: 262455 - protein, 403 aa, unidentified
MGWFAGLDWGSERHAVCVVDRDGKIVANFEVAHDAAGLIDLRVKLAQIGTQEEIPIAIERPSGLIVDALVDAGHAVVPIHPNVVKACRPRYRAAGGKSDLGDAYVLADVLRTDGHRFRPLTQQSDAIKALRALVRTRDDLVAERIALANQLRALLESFWPGAAAIFADIDSPIALAFVQRYPTPKSAASLGEKRLASFLSQHQYCGRKPATALLERLRSAAGGHAKGAEANAKGELVCILARILEALVTELSKLTGRIQHEVEQLADGRIVMSFPRAGRINAAQILSELGDVRERFQSEEQLAAEAGVCPVTHQSGKSRSVTFRWACNHRLRSAITMWADNSRRASPWANDVYARARARGCDHPHAVRILARAWVRVLWRAWTNRTPYAAAQHGAGKRFLPAA

SEQ ID NO: 262456 - protein, 363 aa, unidentified
MKIMTGIDLHSNNALCGLMDESGQRLVHKQLPCDLPAILQLLDPYKERIATVAIESTYNWYWLADGLRDHGYNVVLANPARMKPYDGLKHTDDVSDAFFLTELLRLNILPTGHLYDRKTRPVRDLLRRRLLLVHQRTSLILSFKSLNERTLGQRVALARVKAMKAEEARALFTDPADQLLSGTEIELMGHLTQAIHKIEAHVLNVAGKWSTYQRLQELPGIGKILGLTIALETGDAKRFADAGNFASYCRCVKSLRTSNGKKKGENNRKCGNTYLAWAFVEAAHFACRYDDQCRRFYDRKKQQTNPVIATKALACKLAKAAWHMMAEDVPYDNERVFGPGKKTDFGETGREPAKGSGPTSQTD

SEQ ID NO: 262457 - protein, 350 aa, unidentified
MTMVGGFDVHRQQITFDYVDSDGLVRWGQIRPATRKTLRGWLAEHCPDGDAEFALEGCTGWRYVSEELAAAGVGVHLGDPAEIAAARGPKKRAKTDHADAKLLRTLLLEGRFPESWIPPAHVLEIRALGRLYCTLMDERRAWQQRIHAQLFHQGCPPVRALLSVAGREALANAGLSPTGRQYVDTALRRIDELSVEIEPLRTQLVSFARRQPGCQALQRHYGIGWLCAAIMWAEIGDARRFASSDQLVRFAGLDVTVYSSAGKRSPGHLSRQGSPQLRWAAFEAAKCAARRGSPDCAYYHKLAAKHDGHNGKNPTLAVERKILRRCYHMLRELGDAALALPVPEPEEVAA

SEQ ID NO: 262458 - protein, 350 aa, unidentified
MVMIGTDSHKRTHTVVAVDDVGRRLATKTVRTNSDGHLDLVRWSTQFDDVVFALEDCRHLTRRLESDLLIAGYRVVRVPTRLMAAERRGTKEPGKSDPIDAEAVALAALRYPDLPVAELEGPAREVKLLSDHRRDLVVQRTRIASQVRWFVHELDPDRVVPSRGLRRQCVVIELQEALRGVGGVVARLARELLDRCAELNRQVNQLEAELRRLVQVLAPSLLAIPGCGVLSAAVLIGETAGVHRFRNKDAYARFTGTAPIPVWSGASAGKVRLNRGGNRATNCALHMIAVTQARGIGPGHAYLAKQQARGKDKTASLRLLRRRLSDAVFAALRTAQTVAGDQPVPLPAAA

SEQ ID NO: 262459 - protein, 348 aa, unidentified
MKVHTIGIDLGKTVFHLVGLDQPGNVVVKRRPSRSQLLRQLANTPTCLIGMEACCGAHHLGAALVAQGHEVRLIPPQFVRPFVKSNKNDYRDAEAIAEAVQRPTMRFVPIKTQDQLDLQALHRVRDRLVSRRTAVINQIRAFLLERGITFRRGRKYLQQRMPLILEDAEQNLSPLLGQLLDQLWQEWKVLASQIEAISGQIERIAEQDAICQRLQQIPGVGPLVATATVAAIGNGSAFVTGRDFAAWLGLVPRQHSTGGKAKLLGISKRGNPYLRRLFIHGARSIFRQAHRDRLALDAWMNQLEHRMHRNVAIVAVANKLARIAWAVLAKGANYNWPGADPFEPGEAG

SEQ ID NO: 262460 - protein, 332 aa, unidentified
MFLGIDVHKRYAQVAVMDEAGEIVEEVRVENANLDDLAQRYAGAEAAIEATSNYYHIHDTLSEHLDVTVASPGKLKLIANADTKTDRVDAKELARMVRLNSVPESYVPTDEIREARALVRGRQKLVQSRTEYANKIHGLLADQGLTRKVKPLSVEGREFLRELSLPAPWDELLASYLTMIETLTEEIDRLEAAIEDRAGSLPETQRLMTIPGVSYYSALMIYAELGDISRFDGDKAVVSYAGLNPVIRKSGDSRFEGGISKQGSGRLRWILVQCARTAVHTCDDEYLRRFYDRLAGRKSSNEAIVATARKLLVSIYHMLDRKEVYDPPGVSA

SEQ ID NO: 262461 - protein, 378 aa, unidentified
MNRIIKIGMDVHTTNYTLCIFEPSFEHDGTVHCITQVKPEVKNIIHVIETFKKKHENEELNIVCGYEAGCLGYSLYHELKEKGIECAILAPTTMKTEKGGRKLKNDYRDAKMIAECLAYGGYSAVHVPTELDNSVKEFIRMRDDIKENLKSIKQQIIAFLTRNGKQFEGKSYWTRKHIDWINTVSFSEPLLQDTLNEYMIEYNHLCDRVEILDRQIEEISLKEEYVEKVQQLQCLIGIKTHTALSLIVETSDFNRFKKGNMYSAYLGLIPGDDSSGGHENKVGITKAGNSHLRRLLVEAAQGYTRGRVGFKSKDLKARQEKCGSEVVAYADRANERLRRKYYRMTLRGKRYNVAKTAIARELACFVWGIMTDHIDLCS

SEQ ID NO: 262462 - protein, 340 aa, unidentified
MEKPIDSQAPAFILGVDVSKDSLDVCLAGCSDGRMLHQKFNNNTSGFKRMKAWLKQQGCEAGKETLCCMEHTGLYTRQLVHDLLARDVRVWMESALQIKRSIGMVRGKDDKVDAQRIARYALLHQKEAQCLSLSGVTLERLKDLQANRGRLLKALQSLKVTIKELLQVDPVSGKTLEQVNRKAIKGLEKSMEQVEEKMQQFIEKDTELKRKYDLLTSVKGVGKVLAISLLVYTQGFTKMEDGRKLACYCGVAPFEYRSGTSVMGKTGIFKFANKELKHVLHMAAMNSVRYNQELKTYFERKVGEGKSKMSVLNAVRNKLLHQIVAVVKRGTPYEVRLNNS

SEQ ID NO: 262463 - protein, 408 aa, unidentified
MRSNSFTAVGIDVSKCKSTVAARRPGGEVVWLPFDISHDTKGIQRLLEKLNGLDGEIRIVMEHTGMYWRPVALALQQAGFYVSVVNAILIHDFSDNSLRKVKTDRADALKIANYGLTFWMDLREYSVEDETRQMLKIQSRLYERTTTTGIMLRNGLISLLDQTFPRANKLFRDESRNTKGHVKWVDFIIRFWHKECVAALSLNAFADTFQKWCKRTGYRFSTSDAERIHAAAKNAVATLPKNDSTKLLITQAAISLNSVYDTLQALRTEMDRLASLLPEYELVMGMEGVGKITGPQLMAEVGDVRRFSHKGALVAYAGMDAPPFQSGAFDAKKRHVSKRGSPHLRKVLFEIASMMLVHGNMENPVFCFMDKKRAEGKHFYVYTVAGAAKFLRIYYAKVTQFLNAQAVA

SEQ ID NO: 262464 - protein, 402 aa, unidentified
MKASKQYLRFCGIDVAKQKHVACIIDQDGQYLVQPKSIRNDAAGYQQILNCLKQSGRKKAILLGMEATGHYWYGLHDFLIRHGYSVAVLNPIQTAQQVKQAIRKCKTDKYDAFHIANLLRCGQYKAAVIPGELAMTCRLLTRLRYRMVRQSAMIKQLVNSRLHPVWPEYEQLFSNTFGTTSMELLQTAPTPKELLELEVDDLSERIRKASRGRFGPAHTQKILHSAENSVGMKRGHYGISTGIKSLVEQIVALEPVRKKLDVEIQKLSARLPEYLFTLPGATELTIVSLYGEVDPIETFERPSKLVAFAGLDPKVFQSGQYDAPRRHVSKRGSPYLRRTLWQMAYRSVCTEGDLRDFWRRKHRQKKHHLVAVTAAANKLCHIVWRIMTDRRDYIPKGYNPKS

SEQ ID NO: 262465 - protein, 327 aa, unidentified
MNTSKIILGIDVSKAKLDACLRLPQPRTLTVPNTPAGHAQLLAWATPAGPLHLCLEATSTYGFPVARHAHAAGHTVSLLQPLAVHRYAQATLARNKTDRLDAALIADFGHTQQPRPWTPPTAAQATLQAQSRLRTELIQAQQGWTNRLATAAAVVRPVLRQVIRSLQTQIAKLDAQLAATLQADPELHRQAQLLRSIPAVGPVLCAGLLAELPADLRDARAATAYAGLNPRHRESGSSVRGHTTLSKIGNARLRRLLYVPALAGLQYNPVLRAQAQRLAARGKTGKILVGALMRKLLCLCVGVLRSGQPWNPVGRPTPKTPEQMPSP

SEQ ID NO: 262466 - protein, 364 aa, unidentified
MKKFCIGIDIAKKTFDATAIFFESIDSLNEVGYRQFDNSTSGFRTLVSWAKKLCKQCNGKLSEDGLFCMETTGGYDRQICMYLHDKGQNVWRESALQIHRSSGFRRGKNDKADSRNISEYAAKHQDKLVLFSPDPTVIMELKEIVNYRATMVERRKEAKTRLSEKKFTTVLGKSQTARAINKMSESEIKTLDEIIEKCNQEIERIINSDEDLKRNYLHMTSINGVGLVNAACIIAYSSNFKKITTPNKMSCYAGAHTFYDESGTSVHKKDPSKNVCCKMIKNNLRMAAKSAIIYNREIKAYADRLEKKGKPYSIVLNNVINKLLHITYSLVKNDCDYECNHELLRKHKTEELVLKAEPSLEAAL

SEQ ID NO: 262467 - protein, 342 aa, unidentified
MRIIGCDLHAAQQTIAMLDRDTGEIVERTLSHEGTTVRDFYTNLPPPIVVGIEATGSMRWFLRLMEELGVTCRVGDPAKIRQVETRRQKHDRRDAALLLQLLSEDRFPAIWMPPAELCELRELVRHRDQWVRLRTRVKNALQGLALAHGLRRRAGLWTQRGQATMAALPLAPYASDRRSALQALHEHLTTPIDALDQRVGEQARTRPQARRLMTHPGVGPVTALATEVFVGDPSRFADAKALASYVGLIPSEYSSGDRQRLGKLTKQGNPMLRCLWCEAAIHAVRRDAALGRFYRRKLQQKGLGKARVAVARKLGIRLWILLRDQIDYAEFCRRAPSPTTAR

SEQ ID NO: 262468 - protein, 417 aa, unidentified
MNLYVGLDVSLAKLDVCCLTDDEQFSVLLERSFRNDHDGATELKEWILQAYQDYHFDRIVIGMESTSAYSFHPGYFFKEDPELSELNVVVTIEEPSKIKKYREVFSENKNDALDAFYIADYLRIQRFNLSFLKEDQYIALQHLTRSRYQLIKQLTTVKQHFLENLYYKCNTLSMNLKEDGHSTTALSATVISLMTEDYSLDDLANMPLEEFGQLIQKLGRGRFKAPEDLAKTIQKAIRSSYRLSKVHAQSIDIVLAVLVREIRSLEKAIKDLDKGIEDIVQILPEYQCLTSIPGIGPVYAAGIIAEIGQIERFDSQAKIAKYAGLSWKENQSGKRSSQNTPMIHRGNRFLRYYLVEAANSVKRYLPEYAQFYHKKFQEVPKHQHKRALVLTARKLVRLVDVLLRNHQLYTPPEVLHR

SEQ ID NO: 262469 - protein, 356 aa, unidentified
MVEGSWVGLDVHARSVVAGVLDGESGELRCWRVPALAAETVVWLQRLPGPVRVAYEAGPTGYGLARACAGAGIVCTVAAPSRIPRAAGDKVKTDRRDAERLARLLRLGELVAVRVPEPHEEAARDLVRAREDVRGDLMRARHRLSKLLLRQGLVYEASAWTADHDGWLRRQRFTSRPLAFAFEECYGAVLQAKARRDALDRAIAELALEPPFADAVGRLCCLRGVSTLTALALTVEIGDWTRFRPQSLGPFLGLTPSEDSSGQRRRQGAITKTGNSHARRLLVEAAWQQRRPLRASATLERPRQGQPAAVKARADQSARRLHHRWQTLEARGKPRTIVAVAVARELAGHCWALATM

SEQ ID NO: 262470 - protein, 342 aa, unidentified
MEAPRHIGIDLHRNQFTCCVRLENGRNYLSDWKLEDLPRFVKKLRPNDEIAVEVTGNTRLFHEAVAPHVKRVVAVDPNQFHVISHSVKKTDPNDARNLALYLEKDLLPEVRMKDKTQAQLASVTQTRDTLVKLRTSLKNKVNNILSAHGINLKKEALSSEKKLQEILAMKFDAMVKLELEVIIEEIRSLNQRILKLETAITDEGSKLKGHKNLTSIKGIGPLTGSILLSVIGDIHDFENEGKLAAYFGIVPRVSNSNETEHSGRITKRGSKLGRTALVQCALIAQRYSPYLKRYYEKIKARRGTGKAIIALARKLLGIIYRTLKNNWVFEDFPNFVLAEAAA

SEQ ID NO: 262471 - protein, 362 aa, unidentified
MAHPDVVELFGGVDTHSRTHHAAVIDRLGRHLADAEFPATAAGYRDLHRWLRSHGDLVAIGVEGTGSYGAGLARHLTAAGGIVVEVDRPDRRARRNKGKSDPIDAYAAATAVACGQATGTPKTRCGQVEAIRALRVARTSAVKSRTQAINQIRALLVTAPEQVRGAVADLGTAAVIDKLSKLRPGADLSDPANAVKTALRVLARRYLALDAEACTLQTAIAALVTAYAPALLQVYGAGVETASQLLVTAGDNPQRLRSAASFAALCGVAPVPASSGKTHRHRLCRGGDRQANRALHAIALTRMSHDPRTRAYVARRTAEGLSKKEIMRCLKRYIANEIHRIITPQLAQTTAKTQEHNPHHLT

SEQ ID NO: 262472 - protein, 359 aa, unidentified
MKKRTRPDSLMSIGLDLGDRYSYVVALERDGEVRYDGRVATKLEALVECFSQFPARTRVVCEAGTHSAWVSEALKKLGVDVIVANPTHAGRALAANGKKNDRLDATTLASLGFGLTHLLRPIKHRDRKAQDDLAVIRARHCVVRMRTQAINAVRGLVKTSGHRLPSCSAEAFHHAVLEAIPESLRPALEPLVEQIEKLTASIRSYDKQIEELCKRYPETNRLRAIKGIGPLISLAFVLTIEDPSRFKKSRDVGAYFGLVPAQHESGESSPQLRITKAGNGYMRDLLVAGAHYVLGPRGPDCDLRRFGERIGARGGKKGKKRAVTAVARKLAVLLHRLWVTGGVYDPFHQSKKHKHAKAS

SEQ ID NO: 262473 - protein, 333 aa, unidentified
MGFEPEPSKEGSWTMAQNDLVVAGIDVAKDKVDACIRALSQRQTFPSTAQGRQQLISWLRKHKATKAVMEASGGYEREWAKALREKDVEVRIVDPKRVRSFARSAGRLAKNDTIDAEMIGWFAETFGEAKGQHHDAAREKLRQMVNARQGLLDIKTMLNNKGEQDLPEPVQRMHTRLLKKIIAELAALEVVIAAQVKATPHFAWLAEIIESVPGLAGTTSAGLIAAMPELGLVDGKVAAALLGAAPYDDDSGKRRGERQIKGGRRKVRNLFYMACLGAATRHNPVLKAFYDRLIARGKEKKVALVACMRKLIVILNTMIARGEKWDASRYAVS

SEQ ID NO: 262474 - protein, 351 aa, unidentified
MKELMAGIDLHSNNIMVGIMNQEGGRVTHQKLPCKLASILSFLAPYKERLERLAVESTYNWYWLVDGLQAAGYPVVLANPAGFSPYNGLKHADDKSDAFFLAEMLRLKILPLGYVYAAEQRPVRDLLRRRMSLVQQRTALMLSFQSLYTRTTGGSLTLSRLKELEAQEAQGLYEHPANQLIAGLQLEHIEQLDASIERLEKAVLQVARTLPCYSRLKTLPGVGVILGLMITMEIGDIKRFAGPGEFASYCRTVRAQRTSNDKKKGENNRKCGNKYLAWAFVEAANFARRYDAASRKWFDRKAARTNSIIATKALACKLAKAAWFLVAEDTDYDGRRVFPHLAAGPTKNMKP

SEQ ID NO: 262475 - protein, 389 aa, unidentified
MPSVADRPEAPTAIQTHLAAIFISLELSRSIWLITSLSPGSGEKMSKHSVRAGDVAALLARFSELKQKALERTGKSFPIVVIQEAGRDGFWLHRVLQSEGVESHVVDPASIATSRRRRRAKTDKIDGEALLRALLAYKRGEPRVCAMVKAPTPEEEDRRRLCRERKVLIAERVKHVNRVKGLLFSQGVSGYEPLRRDRRQRLDELTTGDGRPLPMHLKTQISRELDRLELLLDQIKRAEAERDALLAAPQAAAPAPAGKMLVDLKGIGPEFAANLWLEALFRHFDNRRQLASYAGLAPTPWQSGSVDREQGVSKAGNPRLRTTLIQLAWLWLRHQPQSALALWFKERLSGNGGRFKKSTIVALARKLLVALWKYVTAGVVIEGAVMKVA

SEQ ID NO: 262476 - protein, 395 aa, unidentified
MLKIVYPICCGMDVHKSFVVACIATTNDHGVTNYKSKRFSTFTGDLRRCADWLSENNCKDVCMESTGKYWIPIYNILEHTCNIVLAHPKYVKAIRGKKTDKRDAKWIADIFKHDLVSGSFIPPADIRQLRDLVRYHWKLTNFNVGEKNRAQNCLTVSNIKLDDVFSDVFGKAASAITTRLLESNEPFDVKPYLTKNIKKPIEQIQAAVDGEMCAEQAEKLRIIRSHMDSLELCKLNLESLILSTAEKYIPQLNLVMTAPGIQSFAAIGIISEIGVDMSVFPTSKHLCSWAGLTPQNNESAGKKKTTRISRAGAYIKPLLVQCALCAIRTKQFPEVRNRYLALKKRRGHKKAIIAIARMLLTAIYNILKWNEVYNSELLRPHLGGSVLCALFRNGT

SEQ ID NO: 262477 - protein, 317 aa, unidentified
MTKTNTLTAGIDTAKRKLDVAVHESSARWQVDNTLLGWRSLAARLSQVGVTRVGIEASGGYEGGVVRHLRALGFTVLVLQPIQVRAYAKLRLRRAKNDALDAVLIAACAAAITQPRREADPRLADLAAHLTFVEQVEEDIARLKIRLEHVEDKRLRRIALADIVRLKARRTAELLRIANQLRSHEDLARRLDLVLSIPGIGERTALALVIRMPELGCVSREEAAALAGLAPFDHDSGQHKGQRHIAGGRGRLRRSLFAAALPAAFRWNKALIALYARLTARGKAHNAALIACARKLLIYANTVVQRGAPWTEKPVQT

SEQ ID NO: 262478 - protein, 347 aa, unidentified
MTLYIGVDFHPHQQTVSYCNNEEGEVHQTSLIHNVEQVRRFYRQLPKAIVGVEASCTAAWFEQMLFDLGHELKVGNPTAIRARARSRHKSDKRDADLILELLVKDEFPELWRRPLPSQAVLEQLRFRHHLVKQRTQICNRLQALAHGAGLPKKGIQTNRARVALMEARLSETQSFQRDQLFELLEDLTGRIKEVEKWLESKAEGDAKVQLLLTHKGIGLLSALAVAHTLGDVSRFPSSKEAVAYTGLDPLEHSSAGKVRYGSISKAGSSVLRHLLGQAMHVASRYDGELRSFYKRLASRRTKSIAKVATTRKLLIRLFIMLRDGIDYNEFKRRGSTVGMPVLSHGLK

SEQ ID NO: 262479 - protein, 315 aa, unidentified
MDEPRRVTICVGIDVSKDRLDVHLRPSDESFAVTRDGKGLESLVERLTPLDVSLIVLEATGGFETTAAAALAGAGLPLAVVYPRQIRDFARALGKLAKTDAIDAKVIALFAERIGPQARPIASPQAQKLGELVARRRQIVEMIGMEANRKRRAGDKRLVKKIDRHLGFLERELAEIDADIDTDVRACPAWRETEELLTSVPGIGPVTARTLIAELPELGSLDRRKLAALVGVAPFNRDSGTWRGHRMIGGGRTSVRNVMYMAALVATRCNPALKATYARLVQRGKPKKVAIVACIRQLLAILSAIMRNKTKWQNA

SEQ ID NO: 262480 - protein, 312 aa, unidentified
MYHIEEEVVYMGVDIAKAYLDAAMGNEKSRFSNDALGHRQLINWIKQMPAKVQVICEPSGGYERALVRALVGAQLKISLVPANRVRQFARAKGILAKTDRIDAKLLCAFGEAMQPGTISASQLEQQHLRELESQRRHLTHLLVMEQNRAARMSDLCVCKMNRCLITQIKKQIEQLDLLIQGQIKASPELSTKAEKLTAISGVGARTAALLLAQLPELGELNRREIAALVGVAPFNRDSGRMRGKRAIYGGRKPVRHGLYMAALVAAHHNPILRNFYLRLRAAGKPAKLALTATMRKLLIVLNSALKTDLNYA

SEQ ID NO: 262481 - protein, 372 aa, unidentified
MSAAFKPTTKNGSEVEMAVYVGIDVHKKYCHAALMDESGRIQRELRFDNTLQGASSLVNLARSIDPQVKAVVEPSANYWIKVYDRLEDEGVQVKLSNPSRTKAIAEARVKTDGIDAKTLAYLLRGDLVAESYVPARKNRERRTLIRHRASLLKMRVEVKNRIHAILDKYDLSYEYTDLFGKGGLEWLRNLALPGTDEQILRSNLQILETLTTEIRNADIQIAKDAVHEEQAKLLMTMPGVDYYAAMILLSEIGDVKRFASPEKLASWVGLVPQVHQSGETSWTGHITRKGSKRARWILTQCAQSARQHDPRMRQFYERIEEKHGSSKAVVAVARKMLSIMHVMLTRNEPYQGENRQLTEQKHKRLDRIANMA

SEQ ID NO: 262482 - protein, 418 aa, unidentified
MNEDGDTRGAKRYVALDIHKHYCVIAGVDREGRVLLQPVRVEHADLEGWLKKHLCSTDQVVIESTTNAWHVYDLLAPLVERVVVANPIRVKQIAQARVKTDIRDTLILARLLAANLVPDVWVPPPHVRQLRQLLSQRRQFVETHTQIVNRMHSVAHRHHLQHEAGKRFNEKTTLWQKDKTLSSLEQFQLQLEMENLTYIEKQIERISREVRRMCHQKPWAESMTYLMQLPGFGVITAMTVLAAIGEIQRFETPKHLASYSGLTPGLEQSGTKNRGKGITKEGRRELRWALVEAAQMAVKSDPVWKTRFQEMQKRMHRNQAMTAVAHRLLELVWYVLTRRQPYRHFSHERIAYKYLTWAWQMDEAARDGLTRQQFARYYLMRLGIGHNLTRIALDPKHPRKLASETELLALRPELTHLE

SEQ ID NO: 262483 - protein, 343 aa, unidentified
MKIAILGIDLGKNSCSVVGLDHAGTVVKRRRMRPESIPAFTRTMPACTVAMEACCGAHHFGRLLRSQGHTVRLMSPEYVRPYVKAQKNDDRDAEAIAEAATRPTMRFVELKSEEQLDMQTLHRVRDRLVGERTALINQLRAILLERGCAVPQGRRKLEQHLAAMPDPDNDTSLSPRVRRLIDDMRAEWLELDRRIATFDNEFAARARNDADARRLATIPGIGVLNATALVAAIGNGETFARGRDLAAWLGLVPRQVTTGGKPRLVGITKRGNKYLRKLIIHGARSALPVLASGPTPLGEWLRALMKRVHKNVAVVALANKLARITWAVLRRGEEFAATARAAT

SEQ ID NO: 262484 - protein, 354 aa, unidentified
MPKTASAQIAVIGIDIGKNSFHVVGHDSRGAIILRQKWSRGQIEARLANMTLCLIGMEACVGAHHLARKLATFGHDTRLMPAKYVRAYTRGQKNDFNDAEAIAEAVQRPTMKFVATKTADQLDLQALHRVRERLVSQRTGIINQIRAFMLERGIAVRQGIRFLRAELPIILASRTDVLSPRMLRVIEDLAGDWRRLDERIETLSREIETIARQDAGCDRLMSVPGIGPIISSAVVAAIGSGDVFSKGRDFAAWLGLVPKQISTGDRTILGKISKRGNRYLRVLFVQAAWVVLVKPQSWERHGLKHWIEAAKKRLHHNVLAIALANKLARIAWAVLAKGRGFQATRTIDGSTQPV

SEQ ID NO: 262485 - protein, 400 aa, unidentified
MNAVGIDVSKGKSTVAVLRPFGEVVASPFDVIHNDNDLKRLVKLIRSLPGESKVVMEYTGTYFEPIAQFLHNNGIFVSVVNALLVHNYGGNSLRKVKTDKKDALKLASYALDRWTELDEYVPADEQRKILKLLNRQYNQSIKIQTTMKNNLISLTDSVFPGINRLFTSLERQSDGHEKWVDFLHAFPHKDCVAKLYLSAFKAKYKSWCSRNKYRYSESKAEKIHSYAKSVIAVLPLNESVKLIVTQVVSQLNTILETAFSIRTEMNRIASSLPEYDTVMSMFGVGKVYGPQLIAEIGDTRRFRNRRAITAFAGLDAPPYQSGQLDVSSRHISKRGSAALRKVLFQITEIFILSKPENEPVYQFIIKKRSEGKHYYSYRIAAANKFLRIYYAKVNQILNAT

SEQ ID NO: 262486 - protein, 412 aa, unidentified
MEAAYYVAGIDVHKKMLAVVVANVRERELQFVCRRFGTTVSELQNLSTWLRERAVEEVVMEWTAQYWKPVWLALEGQFRLWLAQARSNRGPGGRKTDFRDVKRCVSRLLSDDLRLSYLPDAEQGCWRTLTGTKYQLTRDRVRLQSQLESLLAECQIKLSSVVSDLLGASGQRILRAIAAGETDPAQLRALGDKRLHATDAQLKDALSGQPPPAHRTLLGLYLQRLDLIEAQIAELERMIADAMKAHEAAIVRLSELPGLGADSAQQIVAEIGPRADAFPSAGQLAAWVGVCPGSEESAGESNSNRSAKGNRTLRRLLNQLAHAAVRKRDCYLQILFKRLSVRLGYAKAVWAVAHRLCRLIWRVLHEGVRYVEHGPTANALTLKRRKQRLVTQLKKLGYSVQLTPITASEVGL

SEQ ID NO: 262487 - protein, 349 aa, unidentified
MFAGIDSHKDTLAVAVIDTAGRVVTVRQVANEPVGFSVLAALVAEHAVVRVGIEGSTNFGWAAAMHLVAAGAAVVEVPPLMTSRERQSRPGQGKTDPVDAVAVARITARETSLPPVRPMDGLPAELRVLMDYREQLIDERTALANRIHADLGWLRPGYQRKLPRLTQPAHLQAGLALLQNDRSIRASVTRRRLQRMVEINAELAGLRTQIAELVQQSGTTLTGIYGIGVFVAARILAEVVDVRRYPTRHTFAAANGSAPIPASSGRTVRHRLNRGGNRQLNRALYTIAITEIRADTEGRAYYERKRAEGKTTREALRCLKRRLSDVVYRTLRADQAAAQPQPALLVSAA

SEQ ID NO: 262488 - protein, 406 aa, unidentified
MVVMIGIDPHKASHTAVAIDDKERPLGELRVRSSADQVTQLRVWAAKWPKRTWAVEGAGGLGYLLAQQLVSAGENVLDVPPKLGSRVRLLATGNVNKNDPNDARSVAIAALRSKDLRPVAAEDHAAVLKLWSKRRRDLGSLRTQVVCRLHSVLCDLVPGGHPKKEITAAQAARILASLEPLGAVAQARYELAHDFLADLCRIDAQMAEAKKRLEVAVKASGTTVTEVFGVGPYVAGTVIGYVVDVGRFADRDHFASYNGTAPIEVSSGGHKVFRLSRRGNRRLNHAVHMAAVTQIRFRHSEGRAYYDRKIKEGKTNKEALRCLKRRISDAIFAHLVADAKRKAETVQAGPGGQIGNGSVSSVAGSHPERRLFGQATPRPVPTIRPRVTSKNSKAEELVQKKSRKAS

SEQ ID NO: 262489 - protein, 355 aa, unidentified
MSGEKYIGLDVHQATISVAVMDSHGRLIMESILETKASTILEFLAGLRGALSVTFEEGTWAAWLYDLLKPHVAHLIVCNPRKNALLKHGNKSDKIDARKLADRLRLHDLKPVYHGETGVRMLRELARSYLTVVKDLSRVMNRLKALYRSWAIPCAGRDVYYTRHRSQWLEKIPEAGTRRRAEQLYQQLDMLQHLRQQARRELLAESRKHSITAKLRQIPSLGPIRSALAVALIQTPHRFRSKRQLWTYSGLGLETRDSGEYHFVKGQVRRRKKQVWIRGLNKDYNHDLKGLFKAAAIRASVQPGPFQEFYQRSLAKGIKPTMVRLTLARKIAAIALTLWKKGENFDVEKLNSQAA

SEQ ID NO: 262490 - protein, 418 aa, unidentified
MTVDSVAQKRSVIKPETLVIGIDLAKHTHVARARFHDGSYTRPVKVPNTRAGFLALTEQIGAWKPRSDFSVIVGVESTGSYGVNLVRWLSEHGCRVVLVPSLHVCREKELPDNGRGTSDNKDALIIADLVARGQYLGFVTLSGACLELRPLVSLRARLVREQTGWLNALHQTMDVLFPEFETVFVNLGRPNIRLVLGRFGTVATARAHSPTAMRRLLARDGAVRLSLVKLTRLQAAAAESIGPQEVSAGQERSLHEMLEALAMLDERIAGLEAEIVSLLEQLPEAEYLMSVKGIGAMTAAVILAETGGLAQYSCAAAVQKLAGLNLYQNSSGQYQSGRHISKRGRSQLRRALYMVAVQHAKRGWPLHPYYAALVERGKPKNVALTAVCCRLVRLLYALVRDGRCYSECPPEEGRLQAA

SEQ ID NO: 262491 - protein, 418 aa, unidentified
MVQSHLAEGKQISIMTQINRVVIGGVDTHKDVHVAAVIDEQGRILGTQDFQTNKSGYQELLQWMESFGTVGLIGVEGTGCYGAGLSQHLAAKDITVVEVNRANRQMRRMRGKSDVVDAEAAARAALNRQATAIPKEHDAIIESIRVIRVAFTSARHSRTRVSNQIRDLIVTAPEQLRSILGGLATAERVGLCSRFRPGDPSDCLEANKLALRTLAKRYEALTAEMKELNSILDGLTAKANPALRSIHGVGPDVAAILLIAAGDNPERLRNESAFAALCGVSPVQASSGKTSRHRLNRAGNRQANHALWRIGLVRSRSDSATKEYIARRTAQGKSKREIMRCLKRYIAREVFRILTKPEAIVCGPELREARNAAGITLNTAAVALETRQIRISRIERSLDFDRDFVNRYQAWLTAQQAA

SEQ ID NO: 262492 - protein, 338 aa, unidentified
MNVALLSIDLAKNIFQLYGVDERGHPVLSRRVSRSKLLETVVCLPCCRIVMEACGGAHHWARRFSAMGHHVQIIAPRFVKPFVKSQKNDRNDAEAIVEAASRPTMRYVAVNSVQQQDIQSMHRIRSLLMRDRIAQINQIRGLLAEYGVVIAQTALKVRQQLPTIIDDERNELTGLSRSMMRDMYERLVLLDKQIARYDELIHQVHKASPSSQRLEKIRGVGPLIATAVIAAAGSATEFSNGRQFAAWLGLTPRQHSSGGKDRLFGITKRGNGYLRMLLVHGARSVVQQAIKHTDALSRWILEVQSRRGTNIAVVALANKIARTIWVLLARGQEYAPPL

SEQ ID NO: 262493 - protein, 342 aa, unidentified
MTIKQIGIDIGKATFHVIGIGVDDTIVLRKQFSRSQLIRFFGRRRDEAFNIAFEACSGAHWLAHQLVALGHDVKLLTPETVRPFAKAQKNDWNDALAIAEAAQRPGRHAVGIKSEEQLDMQALHRVRQRLVTARTAIVNQLRGLLRERGLVFRSGRAQFEHFLEQRLLAGEVELNPVSRRLFMTLAAEYHTISARIDEIDCELDSFARSNPICRALLPIPGVGVIVATALFATVANISDFKTGRDLAAFLGLVPRQRSTGGRTVLLGISKRGNTYMRTLMIHGMRSAFYNRKKRTNRITAFMERLAERGLHINKVVVASANKVARIIWAVLSRNQDFQPVAA

SEQ ID NO: 262494 - protein, 432 aa, unidentified
MKELEKPIQAWIGVDWADQKHDVSLYEVSTGKTERYEIRHTPEAIQEWLGDLRSRYRDGYVAVALEQGRGGLLNAFMSCEFLVLYVINPKALSSYREAFYGSGAKSDPVDAELIRDMVRLNPTRFRPWRPDDVLTRSLRLLTEGRRNLVDQSTALTNQMTSLLKGYYPQALAWTGKLDTEWACDFLEQWPTLQILQHSSRRQILGFYGRHPRPSIDLEQQLLDIQQAQPLTQDAAVLEYSALMITALIPQLRALIVSIAEFDRKIAEVFRKHPDRLIFDSFPGAGAALAPRLTAAFGADRDRFSAATEIQQFSGIAPVTEKSGTKCWVHWRLACPKFIRQTFQEFADHSRRWCSWAKAYYQLQIQRGKTHQGAVRALAYKWIRILFRCWKDRTPYRDEIYSKSLLHHQSPIARMIAPAVAQTEKRVRVAATS

SEQ ID NO: 262495 - protein, 401 aa, unidentified
MPEQPLIQRWIGLDIHKAYFVAVGVSAEKCTVFGPHKIPNVQLENWIAKHLLPTDAVVMEMSTNTYLFYDTLVPHVGSVIAVHPPNVRLVTGVKVKTDKKAALTLAQLHAAGMLIGVWIPPVEVRELRAVIAQRSKMVRLQTQAKNRLTSLLHRTHRERPAQPFKPEQKAWWEALPLTAIEKYIVASDLETLAFAGKQIDAIGEVLRQEAAKDERVPLLTQLPGVAMLTALTILAAIGPIERFEDAKHLVGYAGLGASVHDSGQMHATGHITKAGRRDLRGAMVDAANAAVRHHPFWKKEFERLEYRLGRSKAIVAIARRLLVAVWHILTNGVADRHADVISVAASMYKLAYEIKISNLPKGVSSRVFTRQQLDRLGIGQNLDVLPRSGKNVKLPPSQLKT

SEQ ID NO: 262496 - protein, 331 aa, unidentified
MKIKQTIGIDISKLTFDVRMHSNQFYRVFDNTSRGFKELMKWINKNNPIPKENTLFVLEHTGIYSEEISLFFSENDIPFSLVPGLEVKKSLGISRGKNDKVDATKIALYAHRLRDEIKLSKIPSNEINQIKRLLTLRERLVKQRAGHKSTLKEQKRIYQKKENKLLLETQEKIIKYLTKQIKNIELEMKQIIKEKQELNQLYNLIVSVKGIGNQTSLFIITTTNGFTKFESWRKYASYCGIAPFPNTSGTSIRGRTKVSNLGNKKLKSLFDLCAKSAIQNNPEMKIYYHKRLEQGKNKMSTINIIRCKLMARVFAAVKRQTPYVNTLNFIA

SEQ ID NO: 262497 - protein, 386 aa, unidentified
MEHYAGIDVSLERSSVCVVDATGRVIREAKVASEPEALVGFFAGLGVAVTRVGLEAGPLSPWLHAGLGEAGFEAVLLETRHVKAALSAMIVKTDRKDARGIAQLLRMGWYRPVHRKSPPAQEVRALLVGRKLLQGKLLDVELSIRGILRGFGLKVGEVSKGRFAARVRELAAGQPMLERVVEPMLRAREALRAEYQVLHRAVLAIVREDATCRRLMGVPGVGPLVAIAFTSAVDDPARFRRSRAVGAHFGLTPKKYQSGETDVTGGISKVGDAMVRTALYEAANVMLTRAGRFSSLKRWALGVAQRRGMRRAKVALARKLAVVLHRLSGSTGASSASASRRPRRDRLTGEGGEFGAGRIGPAPARPRRRGAGTGKAADPGVASPRR

SEQ ID NO: 262498 - protein, 339 aa, unidentified
MKQKTKFFLGIDVSKPFFDVASMAVVNHEKQAIQTGHFDNSEAGMKSFGKWLKSNKVTMDENSLLVIENTGIYHRLLWAFCSQKGLPIHIGNAAHIKKSFGIARGKNDKIDSIRLCQYACRNADELMVTGLLDPVLMKLKDLTTARARLISQRNGTKTFIRELRNINDKSLQKVMEQSHKHAIEGMSKSIAKVEAEIKKTIEGNEAIKKNHDLVITVPGIGPVTAVYLICCTANFAGNRSGKELACYAGVAPFGNTSGVSIKGKERVHPMANKDLKKLLFLCAMSAIQFAPEFKKYYERKVGSGKHPMSVLNAIKNKILLRVAAVVKNQKPYVDYFQAA

SEQ ID NO: 262499 - protein, 360 aa, unidentified
MRIIGCDLHARQQTLAMLDTQTGEVVNRTLTHEGDEVRKFYSALPRPVLVGIEAIGPMQWFLDLLAQLGIECQVGDAAKIRAAEPRKQKHDRRDAELILKLLVEKRFPAIWMPSKELLDLRALLLHRHQWVRLRTQVQNALQAIALANGLRRGPGLWSYDGQAKIAFLPLPPHASLRRSALQAQYRHMDEEIEKLTVQVAEQAEQRSGAQLLMTHPGVGPVTALATDVFLGDPQRFADGKALASYTGLIPQERSSGRRRRLGRISKQGNPLLRFLWNEAGAHAARRDPDLRRFYRRKLVQKGMGKARVAVARKLGIRLWIMLRDQIDYQEFCRRGQKQSGAVCAGMPETRFGANRHRPVE

SEQ ID NO: 262500 - protein, 337 aa, unidentified
METPIKQTAGIDCGIQELVVSFGLLLIDGNFICKLTKVFANTNKGFKQLMQWIAEVSSKETTVMYVMEATGVYHEKLAYYLFANNCRVSIVLPNKVNAFAKTCTSKKQDDQQASKVLAEFGCVKQLEEWQPPHPIFAALKQLTREKNQLHAEQTKAITTSASIKRMKARCRLIEKQIDEVEKEITHLADQDKVIKEKIDKVCTIPGVGLQTVVTVIAETNGFNLVRNRKQLVSYAGFDIIQKQSGTSVRRRAHISKSGNPHLRHCLYFPSFSAVRHNKPMQNLYTRIFEKQGIKMKGYVAVQRKILMLIYTLWKNNETYNPIKFLEQPVEAALTELD

SEQ ID NO: 262501 - protein, 329 aa, unidentified
MKVQHIIGADLSKKSIDLVCHLFKSHVQIENTTTGFKDLMQWLKEQKINASKTMIVMEHTGLYSYCFEKFLHQHQIPFCKVNALTIKRSMGLVRGKTDKLDAARIAAYGYEKKDKLTIDVPASDSLRRLQMLHSTRERLVRHRASLICSIKEYKCIGISDKDVIMQTQLQLIKNFDKQIEKLMIEIETIIENQKALKQNFRLLQSIRGVGKVVALVTIIKTHNFTRFANARKFACFCGTAPFPHDSGTSIKKRTRVSHLADKQMKSLLDLSAKSAIQYDKELREYYLKRTEGGKSKMSTINVVRNKILYRMFAVIKRQTPFLENYLQAA

SEQ ID NO: 262502 - protein, 460 aa, unidentified
MEKEERSRKTKAIPALQTIQPEVAGVDVGSKEHWVCGPALASGQPNVRVFGTTTDQLKELVAWLRAQGVKSVAMESTGIYWIPLYELLESHGIDAVLANARQLHNVPGRKTDFADCQWIQLLHSCGLLRGSFRPGPNITAMRAIHRHLANLVEQRAHYVQWMQKALDQMNVQVHRAVTDLTGTTGMAIIRAIVAGERDPARLSALRDPRCGKSAEEIARYLTGTWRDEHLFSLASTLELYDAIDKLICTCESHLLDSVQALQPDERKDAALPPHPNPNKERFLRSHGAQPVRTALWRFAGVDLTRIDGISLGSAKIILTEIGPDLSAFPSEHHFVSWLRLCPRTPISGGKPLKKGRNGMGANRVANTLRMAASSLQRGKSALGASYRRIARKKGALVAVFATARRLAQLVYRMLRYGQDYTDIGEAKYQSLFDARRLAGLTEAARSLGYSLTKEPSPALT

SEQ ID NO: 262503 - protein, 493 aa, unidentified
MLSPIQESNKSHPGLPLLHPIIARRQIGMARKSKNVKSKHRQRLPRSLKTIYANAAGIDLGSREHWVCGPPREDGTPNVQRFGTTTPELFRLADWLKEQGVKTVAMESTGVYWIPLFELLDSRGLEVLLVNARHISNVPGRKTDMLDCQWIQLLHSCGLLRGSFRPSDDICRMRALIRERNTMVEQRSDWVRRMQKALDQMNICVHHAVSDITGVTGMAILRAIVDGERDPFALARLRDARCRKSEKQIAEELTGNWRPEHLFNLRQALKMYDQLCAVIEDYDTEILTYITKHQPEQAASHSAPAHSSKSKARTLAKRGQEPLRQALYAFSGFDLTTIDGIGVDTASVILSELGLDFSMFPDESHFVSYLRLAPNLSISAGKKVPSKFKPTTCTRVSNALRMAALTLRNSKSALGGLYRRIAWRKGASVAIFATARKLAQLIYRIVRYGQAYVDTGTEAYDARFNQRRLKFYTKALKEMGYSLQPLTENALTA

SEQ ID NO: 262504 - protein, 394 aa, unidentified
MRFVGIDVAAERHVVAGVDGASAVVLKPAPFTEDAEGYQKLLSLLGPGADTLIAMEATGHYWKNLFATLVAHGFAVALLNPLRTHRFAGEDLQRTQTDAIDALGIARFAAQKRPPATRLPDRATEELRELVRFRDRLVQDFGDRVRQLHRLVDLGFPELTRYVRDLGSELATAILHDYPTAAAFHGISLRRLAGLRYDGRHRLGDELAQALLDAAARSVGRHHGEAYRIQVRYTCADLDLLRRRLRDLERDIERLLGDHEVGTLLTTIDGIGPQTSARLVATFGDFSGFHSGAALACYVGVIPALRQSGKRTSARAGLTPLGDAHLRAKLWMPVLAAVRKNPWLRAYYEGLIARGKLPKVALVAAMRKLLHAVYSVATHRRPFVPHLPLNEAHP

SEQ ID NO: 262505 - protein, 358 aa, unidentified
MKTYFGCDAHKHYSIFASVDETGASGPFVRVENERSLFRRHLRTMPPESEIAVETVGNWYWMIDEMERAGHVPLLTHAGKAKAMMGQINKTDKLDARGLALLLRNGTLPSIWIPPGELRDQRELPRMRMTLVRMKTMLKNRIHATLAKYAIQIDEVRDVFGAAGRKLLEKRIRELPPQTCHSVEQQLELLDDVEAQIKETEIQIKTIIQDTPAMKLLMTLPGVGMILAVVIALEVGDVDRFSGPEKLASYAGTVPRVKASGGKIFHGPVRSDVNRYLKWAFIEAANTIVIFHKRWTGRHVAILYTRLREKRGHAKAVVAVARHLSEATYWVLKKGESYRERNAKKPVSSTREQARQFA

SEQ ID NO: 262506 - protein, 401 aa, unidentified
MVSDFKKGRYNLMKIFVGIDIAKLNHFAAAISSDDEILLEPFKFTNDADGFQLLVSKLESFDKNSIIIGLESTAHYGDNLVRYLVAEFYQVCVLNPIKTCQMRKNNVRKTKTDKVDTFVIAKTLMMQDDLRFITFFDLDMMDLKALGRFRQKTIKQRTRLKIQLTTYVDQVFPEIQYFFKSGLHQHAVYALLKEAPSPKEIASMHMTHLANLLKVNSHGHFTKELAKELRVLAQKSVGANDSAISIQITQTIQQIELLDSQLEKIEAEMTDIMKFNDSVIMTIPGIGYINGGMILGEIGDIHRFSNPNKLLAFAGLDPSVYQSGNFQAKTTRMSKRGSRVLRYALVNAAWNVVRNNATFKAYYDAKRAEGRSHYNALGHCAGKLVRVIWKMLTDEVEFNLE

SEQ ID NO: 262507 - protein, 343 aa, unidentified
MEQISRIGMDTSKYIFQLHGVNTAEQPVLRKKLRRKEMFAFLEKLAPTVIAIEACGASHHCARLLQSFGHSVKLIAPQLVKPYIKRGKNDAADAEALCEAMSRPTMRFVPVKTAEQQAGLMLVGVRDRLIRNRTQLSNAIRGYAGEFGLTAAKGKAHLAPLLERIHADDNLPALARELFAAQAEEYAQLQAQIDEVDARLMAWHRADECSRRLSKIPGVGPIGAVLLTMKTPEPELFRSGRQFAAWIGLTPKDHSTAGKVRLGGITRAGDEGLRSVLVVGATTVIQHAQRGGRPSPWLTELLKRKAPKLAAVALANKNVRTVWAMLAHGREFKADYVPTRMAA

SEQ ID NO: 262508 - protein, 354 aa, unidentified
MIILGCDYHPGLEQIAFVDTETGELQERRLQHREEAEKFYRDLAAQEMKVRVGMEASGHARWFERLLSGLQFELWIGDAAEISSRRVRKQKTDRQDAQLILKLMLKDDFPQIWVPSWENRDLRQLLWHRHRMVQARTRMMNQLQAVALNEGLRCKKKLWREAGRKQLEAFRLAPWASRRRHDLLELLDRLNPTIAALSQAIEQEVEKCPVAQRLMTHPGVGALTALAFVLIIERADRFQCGKQIASYLGLVPLEDSSGNRRRLGHITKQGNSLLRFLLVEAAQVTARSLPEWRSKYVHLTMRRGRKIAKVAMARKLAVRLYWMMRKEWDYEQVKKFGSHAGQPGNRHGVKSNIE

SEQ ID NO: 262509 - protein, 410 aa, unidentified
MERVIERCCGLDVHKKTVVACVRVPGRTGGREQQVRTFGTTTAELLALRDWLGGYGVTHVAMESTGVYWKPIFYVLEDAFTCVLANAAQIAQVPGRKTDVKDCAWIAQLLEHGLVRGSFVPPAPIRELRDLTRYRAALIGEHTRETNRLQKVLEDAGIKLASVASDVLGVSGRAMLDALTQGTRDPDVLADLARGALRRKLPVLRQALTGRFRPHHAFLVSQVLAHLDYLDEVIEALSTHLDEVMAPFAEEVSRLDTIPGVNKRTAEVLIAEIGVDMGVFPTAGHLASWAGLCPGNNESAGKHRSGKIRKGNRWLRGALIQAALAGGTRATKGAFAARYRRVMRHRGHKKAVVAVAHAMLVAAYHLLARHTTYQEPGADYYERRHAERVRQRAVQLLERQGYRVTLEPAA

SEQ ID NO: 262510 - protein, 402 aa, unidentified
MKKCIAEQASQQTLAALDVARGWSRYGVFIGLDVHKETVAVAVAFPGRDKPEYRGEITHEPKAVRKWLDRLNAEFEGNLLLFCYEAGPCGYGLYRQLVAAGHDCQVVAPSLIPKKAGERVKTDRRDALKLARLLRSGDLTAVWVPDTEQEAMRDLTRARDDMKSQERKARQQLNAFVLRRGHHWPRGKTRWTQAHFNWLESIRFEQPWLQIVLQEYTDAVKAATRRVEDLRDQLLRALPGWSLSPVVDALVALRGIDKLAAIVLLAELGDISRFDSPKQLMAYLGLVPSEHSSGARRRQGAITLTGNGHARRMLVECAWSYRFPARQTMHLKRKAKATSAEAKAIAWRAQKRLCGRYRQLTQAGKNVKLVCVAIARELVGFIWDIVRHEMRRLRPRRAAVAG

SEQ ID NO: 262511 - protein, 343 aa, unidentified
MQSISTIGLDIAKSVFQVHGVDEAGQVVIRRQLKRRHVLAFFQKLPPCLVGIEACASSHHWSRELQALGHAVRLMPPAYVKPYVKRQKNDSTDAEAICEAVTRPNMRFVPTKTVEQQSCLMLHRARHLFIRQQTAVINSIRAYLAEFGIIAPVGRRGVEQLLDVVADRADHRLPEIARACVAALGSQLRALKAQILEFDRRIIAWHRTSATSRRLDAIPGVGPALATALVASVADARAFRSGRDFSAWVGLVPKQNSSGGKDRLGSISKQGDRYLRSLFTAGALAVIRYARIHGTGHRPWLTGLLARRPAKVAAIALANKLARMAWAMMARGQRYTEPAALAA

SEQ ID NO: 262512 - protein, 345 aa, unidentified
MKTYFIGADVHCTNTELAVENNGNIVQRFSVPTTIKAISEVLNNISGKKLLTFEEGPMAGWLYRNLKDKVHEIIVCDPRRNKLIAFDGDKDDRIDSSKLAALLRGKFLRNVYHSDDEEKVELKRWVGLYHDRVVEATRYINRIRAQARLYGIKIPSKVIRNLEPRQIWLSSLENKELSGRLSVFWMGLDVATQQKDEAKRRMQILARKYDILKYWSELPGVGTVRSITLFAYLDIPWRFKSKSKLWKYCGVGLIRETSGKDNKGRDKPARLQLTWYANKRLKNVVIGAATSAIMSSGDNIFRKDYESFIKNGMTKSNARHAVARKMLTIMWGMWKSNSRFDSKLC

SEQ ID NO: 262513 - protein, 348 aa, unidentified
MLIIGCDYHPGFQQIAFVDTETGEVGEGRLTHREEAEQFYGTLKERKVRVGMEASGHARWFERLLSDLQFELWIGDAAEIRTKRVRKQKTDRQDAQLLLRLMMEDRFPRIWVADAANRDLRQLLWHRHRLVQMRTRIMNQLHVVALNEGVRRKKALWRPAGRSELESLLLAPWAKRRRQDLLELLDQFTPKIQQLTRALEEEVEKRPVARRLMTHPGVGPLTALAFELVIGTPERFRCGKQIASYVGLVPSEESSGDRRRLGHISKQGNVLLRFLLVEAAQVTVRSQVQWRSKFIHLALRRGRKIAKVAMARKLAVHLYWMWRKGWDYGQFEKLGSHAGEPGNRHGVQ

SEQ ID NO: 262514 - protein, 418 aa, unidentified
MPDLLVGIDVSRDTHHVAFTDATATERWGRLTVPNDAGGALQLDHAIQAQATRHGCDTVRIGCEATGVYAWHLALGLSQPTDPPRPWTVYLLQPRTVHRYAATFASKRAKTDRQDPWRIAAGLSHAAWLPRPFHVAERTLALQRLTRYRHHLVRQLTRHKNYAASYLFLKANGLACQPPWSDPWGGAAEAVLLQYQTVEDIAAAPLTDLVECLQRGARGRLADPDRVAQAVRQAARNSFRLPEVLKEPVHQILSWTLQDIRHLETQIRVVDRRIAHEPAARTNRLLTVPGLGPVFAGGILAEIGDITYFPDDNQLAQFAGLTWPPDASGQRVGEPTPLARTGNAYLRHYLVEAANSVRRHDATYAAYYQRKLTEGTQPAHHRALVLTARKLTRLVFALLRDDRAYDPTHLAVRARRHG

SEQ ID NO: 262515 - protein, 420 aa, unidentified
MKAYNINDFAVLIGIDWADTKHDICEHPINTEKYHYSIIKSKPEALHDWAMSLKQRYPNQKVAVACELKKGPLIYALAKYNHLTLFTINPSSVANYRKAFTPSNAKDDPSDALIQVEILSLHMDKLTVIEPESAAMRSLSQLVEYRRSLVQDSVNLSNKITATLKNYYPQALEWFKEKDTFIFCDFISKWPSLTKVKRAKKQTLLDFFNSHNSHYSQVNDARILSIKSAMPLTEDIGVIEPNQLLVEVLIAQYRVLLKGIESLDKAIKLAYKSHDDKVIFDSFPGAGPQLAPRLLVAFGSNRERYEEASELQKYAGIAPVIERSGKKMWTHWRYSCPTFLRQTFVEWAGFSIRYSFWAKAYYEQQKSKGKPHNSIIRSLAFKWIRIIFRCWKTSTPYDESKYLEALKRRGSPLLKFAINS

SEQ ID NO: 262516 - protein, 385 aa, unidentified
MRWSGALARALQHPTTVMNTNHNDAVREMNHSTGPATAAAVSTEEVFLGIDAASRRHAVARFVLGEGVKPAEGMTTATLVTRVTRWCKAGAAVHCVYEAGPTGFALARQLIALGATCLVVRPRRLDRHGRRRKTDPLDAQHLAEDLTAHHFGRKGLLCPVRVPTEAEELRRLVVRERETLARARHRLLNAAKGRALALGHALPKEWWRPRVLPKLLPALPPALARQLERAAQAAAALKAQLVAVEAELTADAPAAPQGVGALTVGVLEREVCDWHRFASDKKIASFAGLCPSEDSSGQRRRMGAIDKHGSPRLRFWCQETAWRLLKFQPDYRGVVWAREKLREANTSRGKQIAVALARRFLVDWWRVRTGRATCAELGLRFKAAA

SEQ ID NO: 262517 - protein, 338 aa, unidentified
MNYYVGIDVSLEASSVCVIDATGKIVREGKVASEPEALIAWFKSVGVSLARIGLEAGPLSRWLYAAMRQAGLTVELLETRHVRNAFKIMPVKTDRKDARGIAELMRLGWFRPVHCKSMEAQETRAILTSRKLVQKMLHETAMSLRGTLRNFGLKVGKAAAGQFEFRIRELVEGHPTLAAIAASLLATRATLRREFNALEKRLRAIARSDTRARLLMTTPGVGIIVALTYACAIDDPSRFKSSKTVGAHFGLTPTRYQSGETDYTGRISKIGDSSVRTVLYEAAHVILTKPVKGCTDLKSWAMRIAKRAGMNKAKVALARKLAVIMHRMLADGTTFQPA

SEQ ID NO: 262518 - protein, 466 aa, unidentified
MKPFYLGIDVSKGYADFMIINSEKQPVVQGFQLDDTFDGHRSLYNILGRFLATHSDSTLFVGMESTGGYENNWYNSLIEFQGSLEIQTTRLNPFGVSHNSKADLKKNTTDKISAQNIAEYLVAHSEKVVYQKQDRLAGLRKQWGFIRMLTKQCTQFLSQLNGLIYSANPELLSYCQNGVPMWVLKLLVKYPSAANLKKAHAKTVAKIPYVSSQKAQQLIANAKRSIASTKDIITEQLIVATAQQILHLKETIADQNKSMLRECSIPEIELIKTFPGISDFSAVGLIIEIQTIKRFASSKKLASFFGVHPVYKISGDGIGGIKMSKQGRKAPRQILYMITLSAIRCNPLIREIYEKHQKQGKHNMAVIGICMHKILRILYGMLKNNKPFNPTTDIANRLRSVRLKNNTPADNKNRRFQKYDQKAPVSRRQRKKRLEREKSQSVCDTHSGITAPVPLANIIADILPQL

SEQ ID NO: 262519 - protein, 349 aa, unidentified
MGEVSTIGVDIAKSVFQVHGVDAEGTVVIRKRVGRARVLEFFADLPPCRVGMEACATAHQWAREFKKLGHDTRLMPPTYVKAYVKRGKNDAADAAAICEAVTRPSMRFVPIKSVEQQSVLMLHRTRDLLIRQRTQLINALRAHLAELGLVAAKGREGVQQLVAVVMECGDERLPSNARFACQAIVTQLHAAQIEISGLDKRITQIHCVNADSKRLDTIPGFGVLLSTAVVATMTDPKAFKTGREFAAWIGLVPRQNSTGGKERLGSITKQGDRYLRRLLVVGATSVINSARARPYKYPWVIELLGRRPTKVVAVALANKMARIAWAVLAKGEPYRAPTRPWNAVVPAAA

SEQ ID NO: 262520 - protein, 390 aa, unidentified
MRKPKQRKPNDLSRSLAALDVDHTLIAVVEMSLSSWLVAGIVPGVERQPLKKLKTDACALLELLHRWRAEALRVGHKITRVAVAFEAGRDGFWLARWLKAHGIEAHVIHASSIAVSREHRRAKTDRLDTDLLKRSFLGWLRGERDHCKTVAIPTLEEEDAKRPNRERESLVGEQSRLVNRMKATLVRLGIRGFNPKLKRAARDLEALRTPEGAPIPPNTLAELKRDMERRRFICDQIRKIEQARIERLQRAPNTGPNAMVRLLARVVGIGVETAELLVHEVLLRNMRDRRAVARYGGLTGSPDRSGTISREKGIARSGNARVRRGMVQLAWRFLLFQKDSALAQWYRHRTENAPRSRKTMIVALARKLLIALWRLVREGVIPEGIVMRPA

SEQ ID NO: 262521 - protein, 344 aa, unidentified
MDHFAGLDVSVKETSVCIVDDTGRIVREVKVASEPEALLVVLTNPTYHFKRIGLEAGPLSQWLFSALAEAGLPVICVETRHMRAVLKAQINKTDRNDARGIAQMMRVGLYRPVHVKTLRSQKLRMLLTHRQLLLSKAIALENDLRGTLRNFGLKVGMVGKVKFEARIRELVESLPDLAVLVEPMLIVRRVLREQIVILHRGLLAIVRDDEVCQRLMTTPGVGPVVSLTYRATVDIPARFRKSKSVGAVFGLTCAKYQSGEVDWDGRISRCGDEMMRTMLYEAAQAMMRSKKWSWLKAWAMQIARRRGMKKAIVALARRLAVIMHRIWVDGTEFRWTREQAAVAA

SEQ ID NO: 262522 - protein, 417 aa, unidentified
MKCFVGLDVSSTKLDVCIMLSDTSTPVTASLSNDLSGATEIKNHILDLNHTYHFERIVIGMEATSLYSFHPAMFFHEDSQLKELHVEIMVEQPNKIKKYRDAFEENKNDTIDAFYIADYFRIERFSPSFLKEEKYMALQHLTRTRLQIIEQLARTKQHFIENIYYRCNTLAYQFKKEELSTNLWSSTMMTLITDEMTLDELANMPLQELADWLQKLGKGHFKDSEKLAQTIQAAIRGSYRLSKLQQDSVNVILGLLAREIRNLEKMIKEIDKAIEDMVETIPEYQCLTSIPGVGKVYAAGIIAEIGQIERFKDHPQVAKFAGLNWREKQSGNSNSQHTSLVNRGNRYLRYYLVEAANSVRRYDDEYKDFYKKKYHEVPKHQHKRAIVLTARKFVRLVDVLLRNHQLYTPPRRLMEDK

SEQ ID NO: 262523 - protein, 373 aa, unidentified
MKKRSSSQKSQKVTVKTKGAQERVTIGMDLGDKTSRYCMLSNEGEILREGQVATTKTGIVEAFGSLGRARIAIEVGTHSPWVSRLLQKLGHEVVVANPKQVKLITESSRKDDRLDAQTLARLARIDPQLLRPIQHRSEKAQGALMVIRVRAALMVVRTSLVNTARGLAKSMGERLPKCDADQMGVLQAASLPPKLRQLLEPLLKEVESLTEKIKTSDREIEQIARKDYPETALLQQVGGVGPLIALTFILTIEDKDRFQKSRDIGCYAGLRPRRSDSGQSQPQLRITKEGDPYLRTMLVQGAHFIISRRGPDTDLKRWGLHLAKHGGKRGKKKAVVAVARKLGILLHRLWVTGEVYEPLRNQNLRQEQKKVAA

SEQ ID NO: 262524 - protein, 349 aa, unidentified
MEIDTIGIDLGKTVFHLVGLNVAGEVVVRRKFSRLQLLRFTANLRVRLVGMEACGGSHFLGRSLREQGHEVRLMPAQYVKPYVKTNKNDYIDAEAIAEAVGRANMRFVPIKSDEQLDMQSLHRVRDRWVARRTSVINQIRGLLLERGITFRKGRRHAAASLPAVLEDADNRLSGLLRMLLAQLQGELRQLQSQIDDSDALIAKAAGEHEPCRRLMAIPGIGPLTATAVAASIGNGSEFRKGRSFAAWLGLVPKQESTGGKQKLLGISKRGNHYLRRLFVSGARAVLQCRDKQSAGLSAWLGQLASRVHTNVAAVALANKMARVAWAVLAKSEAYRPPLSAISAEALACN

SEQ ID NO: 262525 - protein, 424 aa, unidentified
MPTPPEELIAAWVGIDWADDHHDVALQVAGSDAVEAHRLAHTPDALATWRAQLAARFGGRPVAIALETSRGPLVAALLEAPFVVLYPINPRSLRRFREAFSPSGAKDDAPDARLLLTLLVKHHAQLQPWRPEAPATRLLAYLVQERRAAVELRTALTLQLGAALKDYFPHALEWAGDDLSAPMATAFLQRWPTLAAVQRARVDTVRQFYTQHRCRSRARIAARLAAIRTAVPLTRDAALITARVAVVQLLVAQLRALAPSLARVDALIAEQFAQHPEAPLFAALPGAGAALAPRLLVAFGTDRTRFPSAEAVQTQVGIAPITIRSGRSEQVHWRWTTSTFLRQTFHEYALHSIRESAWARAFYTQQRQRGKSHHAAVRSLAYKWIRILWRCWHDRTAYDEARYQRALHLRHSPLATAVKQHNAA

SEQ ID NO: 262526 - protein, 356 aa, unidentified
MQRISQKSRKVDFRGKRCYVGVDVHKLTYYAAVLSEDGQSMQFSCPANPRTLVFKIQEMGVEIIALSHESGPTGYELAWYCQGSGIQVVVAATTKIPRKITPDSKTDRLDGLKLAEYLSKGMLCGITIPTREEHALRELERRRQQLVRSRRELRQQLKSFLLKNGIESPKGLDHWTDGALRELKEMDLKNPHLRLTLESFLRELEFICSEANQTQKTLTEELSRAGRDGLLQNLRTVPGVGITVSQTFITEIFRPDRFDRAEEICAYVGLAPITSQSGQGKGRARLVRNGQTYLRSILIESAWILVRKDPHYRSFYNKIVGRTNLPQKAIVAVARKLLVILWRLSVENRFYEFRGR

SEQ ID NO: 262527 - protein, 473 aa, unidentified
MGKGNGMTRGDRRRNARREQLRGMLPRDGAVIGIDLADEKQALAVIDHDVRVLARKTVRVKAFRLGEALDWAAGQARAKGLAAVTVACEPTGPRWLQVQRLCAERGLPMVCVQPLVSHIARQQQDYTTHKTDEADCVMIARLAVELHCYIPEELDEVWAGLRHLGRRRAALITSETASVQRIRDFLSVAWPVVPEACAQPFESMTWLAALQAVTSRCGGQPGELAIIGLEAFTALVRDALPGWGGQRIHGPICKTVFAALTSTEGVVRGHRRGLLRRVAAELGDLQRARTQRQETEAAMIAALGDLGLARLGDIPGLTATGAAAILAETGDPGRYDTSSSVVKHAGLSPADNASGAFGGEAHISRRGRPGLRLTVWRAVWAVLIHNPVMAAKYAAMTQAADQAAADARAGNSGHATSAAEAARRRRAKARVACAAALLRWIYSMVIHGTCWDPGVAAGRKDTLAAPSCQSEAA

SEQ ID NO: 262528 - protein, 357 aa, unidentified
MKSQEIKYVGIDCGKKTLEVIRIGDNSLHQRQQFSTTEIGISKLINWLNPNDVVGLEAGSQSFRIAKSILNKGVQVIVLNPGNLATIYQSLKKTDKEDSLKIARLIQRHPIEELPTVPIPNDEEEDNRRLCSEHENWTKQLTQGKNRLHSLFTQAGLTQITKKHLRTKANREISVALLPSRYQKEAERILKVLDLVEQNLKLIEEEIKEALKKNKAYAQTIMSMPGVGMITSLAIMSYMGNCKRLSSAKQAAYYVGLVPRVDISGDSAYYGRIVNRGCHSIRRVIVQAAWSLVRCQYGGKIKEFYQRLYPKKGAKKSIIATSRKMIEILYTMIKTGELFDSMPEKVLNRKLTQYGLM

SEQ ID NO: 262529 - protein, 344 aa, unidentified
MEEIIRIGMDTSKSVFQLHGVNAVEQPVLRKKLSRREMVKFFEKTPPTTIALEACGGSHHWARLLGSFGHEVKLIAPQLAKPYVKRGKNDAADAEALCEAMSRPTMRFVPVKTADQQAALMLVGLRERLIRNRTQLANAIRGFAMEFGIAAAKGMCRIEPLLERIAADQSLPALARELFAMHGVEYRDLLAETKAVEEKLTALHRSDECSRRLAQIPGVGPVGASLLMIKTPDPRLFRSGRDFAAWIGLTPKDHSTAGKVRLGVITRAGDEMLRSILVVGATSLLQHVRAGRSRHASRWLIELLQRKKPKLVAVALANKIARIAWKLMVSGETYRRTEGQSATV

SEQ ID NO: 262530 - protein, 402 aa, unidentified
MNCVGIDVSKGKSMIAVMRPFGEVVVSPFEVRHTANELSELAGLLKSLDGETRVVMESTGNYHAPVAWLLHDAGLYVSVVNAMLVHDYGNNSLRRAKTDKKDAVKLANYGLDHWLTLPRYIPEEDTRLMLKICYRQYQQYSKVQTMLKNNLISLLDTTFPDANRLFTSPPRADGSEKWVDFVATFWHCECVCGRSEKAFTTQYQKWCRKHGYNFSEDKALDIYASACRHFGVIPKTDTAKLLVEQAISQLQTTSSALAALKQEMQSLAASLPEYPVVMGMFGVGPALGPQLMAEIGDVHRFHSKKALVAFAGIDAPPYQSGQMDVRSRSISKRGSASLRRTLFLVMSVILQHAPMNEPVYQFMNKKRSEGKPYRVYMMASANKFLRIYYASVKAYLESLEHD

SEQ ID NO: 262531 - protein, 361 aa, unidentified
MSLSSWLVAGIVPSIERQPLKKLAVDESALLRLLHRWRDEAEKAGCRIERIVVAFEAGRDGFWLARWLKGHSIEAHVIHAASVAVSREHRRAKTDRLDAELLKRAFLGWLRGERDHCKVVAIPTLNEEDAKRPSRERQSLVGEQSRIVNRMKAALTRLGIRGFNPKLKRAAGRLDSLRTPEGEPIPPNTLAELRRDMERRRLISNQIRQIEEGRLKYFEQAPNDGPHAMVRLLARVIGVGIETADMLVHEVLSRNMHDRRAIARYAGLTGSPDESGRKRREKGLARSGNGRVRRGMIQLAWRFLTYQKESALAQWYRARTENARGARKPMIVALARKLLIALWRFVRQGVVLDGVVLRPAQ

SEQ ID NO: 262532 - protein, 347 aa, unidentified
METYIGVDYHLSYSYMTVMDQTGRIRARGRVANDREAVEEFLNRSRNGGRRAAVMEATRNWTVMYDLLEELVGEVHLAHPLKVKAIAEARIKTDKIDSEVLAHLLRCDLLPEAYVPGEAARVARNVLRQRMFFVRVRTMVKNRIRGLLDRYPELARSRPCKDLFCKDGLVWLKAASLKAEDRRLLDEELELYSTLERRIKRSDGMVQKLAEGDERIKLLQTIPGIAKFFGVLIAHEVDDVSRFSNEKKFFSYIGIVPSTYSSGGRTYHGRLTKQGNKYLRWAFVEAIWPAVRSDPELAAYYSRIKARSGPNPAKIATARRLATIAYRVLSQRRPYYSSRGHSRAALG

SEQ ID NO: 262533 - protein, 397 aa, unidentified
MTQVVGIDVGAYKHAAAVCREGERSADKKVLRYDATRLGFNELDRWLEHLGPVDTVVVESSGHYWWPLASHLRQRGVPVAVVNPLESKYFAKSRLQRSKSDPADARTLAALGMVNQPPAREPLVGAEVKEAARFCMRLVRDQANVCQRLLRLIEIGFPELKETFEDPTCDTALAVLREAPTARWAMRRRVSTLADSMRPGGRRRLGEAKARRIQELAKETIAPPELDEQVAFEVGLLIEQYDLLGKQIEAAERRVAELLDSDLALRLQSIPGVGAAIAATIIAEIGDIWRFDDFDQLAAYAGTHPREQSSGEHGKSPETSWRMAKTGNSYLRSALYRMAVVGTRHNPIIKEHYRRKREQGKPPMNAIGHCMAKSLALIWGVWRSGQEFDPKKGGRKA

SEQ ID NO: 262534 - protein, 469 aa, unidentified
MKKTKKPAASKPKGRRKKAAPIQNATINPRYHPDAAGIDVGAEEFVAALPPDRCEQSVRTFATYTSGVEALRDWLLEHRITTVAMESTGNYWIMLYDKLTEAGIDVYLVNARHVKGVPGKKTDVCDAQWLQQLHAAGLLRKSFRPALQIVSLRYLMRHRAEMVEHAATQLHLMQKSLTEMNLKLHHVFSDIDGVSAQAIIGAILAGERDAHVLAKLRDRRCRSPLADILEALKGDYRAEYLFVLKQSWESWQHTQKAIAACDAELTTLAAKVECAVQSTLPAASSKQQHQLAKNSPDMGIYQTGWRFYGVDLSDIPGVSAGVLSTLVSEVGTREQLLGSFRSAAAFASWLGLCPDNRVSGGKVLKAKTRKVPSRLARAMRLAAFGLQRANSEMGQMLRRFKGKLGKAEGITATAHKLARVIYGVIKSQRSYDAAEAFKTTPQKLERRRRRLEEEAAKLGFALTQLPAAA

SEQ ID NO: 262535 - protein, 343 aa, unidentified
MDHFAGLDVSVKETSVCIVDDTGRIVREVKVASEPEALLSVLKKPAYHFKRIGLEAGPLSQWLFSALAEAGLPVICVETRHMRAVLKAQMNKTDRNDARGMAQMMRAGLYRPVHVKTLRSQKLRMLLTHRKLLQSKAIAIDNDLRGTLRNFGLKVGMVGKVRFEARIKELVENLPDLAAMVEPLLIVRRTLREQFCVLHRRLLAIVRDDEVCRRLMTTPGVGPVVSLTYRATVDVPARFRKSKSVGAVFGLTCSKYQSGEVEWSGRISRCGDEMMRVMLYEAAQSMLRSNKWSWLKAWAMQIARRRGIKKAIVALARRLAVIMHRIWVDGTEFRWTREEAAVA

SEQ ID NO: 262536 - protein, 340 aa, unidentified
MQHVAIDLGGRESQVCVRAADGRILHEGKVATTSIESYLKRQPPSRVVLETCAEAFAIADKALALNHEVRVVPATLAPTLGVGSRGIKTDRRDAQMLSEVSCRIDLPSVHLPTRLAREQRSMCGVREELIAVRTALINCVRGWTRTMLLKFPSGVTSTLTKRIREAALKQPGGLPEYIERVLLGIDAIQEQILKADKELEQLAAQDPVCQRLMSVPGVGTVTSMRFLAAIDDIGRFPNAHAVQSYLGLTPGEHSSSDRRQRTGITKAGPAPLRRTLTQAAWSLRRSHPKDPIALWAADIELRRGKFVATIAVARKLAGILYALWRHGSRYNPSHHASLQH

SEQ ID NO: 262537 - protein, 400 aa, unidentified
MRAVFGIDVSKASSEVAILVNGEKVHGYTISNDALGFARLLGDLKTVHKPEIIFEATGVYSRRLQAFLDEHGYAYTRLNPLEAKKQLDSLRVRKTDQIDAEKLAQSQFVLNRKPTYVQEEVYQELRDLSRFYQNLTEDIVRAKNRLHKVLQVTFPELETILSTPTGEQYGNLVVAFPCKDFVLDLSKDELSESIRQSTSKRISDKRVAYLAEKLIALANQSYCAVKKTSPMLEEVRYYAQELLRLSERRKAVLDQMVELAQPLPEYDILLSIPGIAETTATSIIGELGDIRRFQSANQINAFIGIDLRHYESGNFLAKEHITKRGNPYARKILFKCIHNIASASHTNPCHIADFYEKRKRQSQTTSTKPHTIASIHRLIRTMYYLIMHNKLYDYASTQNR

SEQ ID NO: 262538 - protein, 446 aa, unidentified
MDVVFLRCAGLDVHKKSITACRIVPDPTGQEAEGIAELRTFGTMTLELLALADWLTEASITHVAMESTGEYWTPVYNLLEGTFTVFLVNAAHVKNVPGRKTDKADARWLAKLMRFGLLQASFIPPKGQRDVRDLTRYRTKLVQERVREVNRVQGVLERANIKLASVVSDIMGVSGRAMLEALIAGKADPATMADLAKRRMRSKLPLLEQALTGVVRDHHRQLLAMQLAHIDFLDDQIDALNNTIETALSALSADAPLSPPPPPRAAASSALPLPVSTPLTFTRAVELLDTIPGVDQRGAEVIVTEIGIDMSRFETAPRLAAWAGVAPGNDESAGKQRSGKTRKGNRSLRAILTQLAHAAVRTKGTYFSALYQRLAARRGKQRAIIAVAHSMMRSVFHMLSRNEAYRELGANYFDERRRHYTVDRLARRIEHLGYRVSLEPVVAPVV

SEQ ID NO: 262539 - protein, 409 aa, unidentified
MQVVHERCAGLDVHKRTVVVCVLVPEGREVRTFGTMTRELMEMVDWLLGKGVTHVAMESSGVYWRPLFNLLEGRGVELLVVNARHVKAVPGRKTDVKDAEWLADLLRHGLLRASFVPDRSQRELRELVRYRKTLVEERARMVTRIQKVLEGANIKLSSVASNVVGKSGKAMLEQLAAGNEDAEAMAELALSNLRSKRGQLREALFGSMGEHQRFMLKSHLHLVEEMDAEIEAVNAQLGERMRPFESQIALLDQIPGIGPTSAQQILAEIGVDMSRFPTTDHLASWARVCPGMNESGGKRHPASTGAGNPWLRSTLIEVALAAVKAGRRQPNFFSARYHRLSTRRGPKRAAMAVAHSLLIAIYNMLRNGSYFVDLGPTHYDQRRRDLIAKRSVRRLEDLGYKVSIEEAVA

SEQ ID NO: 262540 - protein, 341 aa, unidentified
MFIIGCDYHPSVQQIAWVDTETGECGERRLTHRDEAEQFYRELKKKPIPVRVGMEATGHSRWFERFLAELNYELWVGDPAQIKAKRVRKQKNDRKDAQHLLTLMLEKTFPRIWVPSPENRDVRQLVLHRHRLVGMRTRVMNQLQAIAMNEGIRRKRRLWSAHGREQLESLPLLPWTGRRRQELLELLDRFDPSIAQLSQAIEKEAEQLPEVQRLRTHPGVGPITALAFVLVIGTPWRFQCGKQVASYLGLIPCEDSSAESWRLGHISKQGNALLRFLLGQAAQGVARSDEQWRHQYAHLALRRNPAIAKVAMARKLAVRLFWMWRRGWDYQQLKKFGSNVG

SEQ ID NO: 262541 - protein, 345 aa, unidentified
MSEFYVGRQFVGMDLHRRRSVLVRMSETGEHLETVRILNDRDVLAEVMSRAGESPEVVLEATYGWYWAADALAELGATVHLAHPLGVKAFSYRRVKNDQRDASDLADLLRMGRLPHAWIAPPETRELRELVRHRAKLVAMRSQCKAHVHAVLAKGGIWVPMTDLFGVEGNLLLDKVTMPAPYKARIASLRRFIEAFDAEIDLFTGMAQRRLSHDAGYTAIQQIPGIGPVLAAVFVAEIGDVHRFPGPAQLTCWAGLTPSHHESDTTVHRGRITKQGSRLVRWAAIESVKILPDTSRIGAIREQVAHRRGNRNIGAVAAARRQLELVFYGLRDHHVRALHRSPRAA

SEQ ID NO: 262542 - protein, 431 aa, unidentified
MTQSPNPSLRSRPTPVAFVGIDWADQQHAVCLSPADSLTPEQFNLPHTPEAIAEFVARLRTRFGGQPVAIALEQARGALLYALMGYDFILLYPINPATSKRYRDAFAPSGAKDDPVDAHLIWQLLVKHRDQLRPWQPEDATSRQLAFLCEHRRDLVSQRTRLVQQLQAALKTYFPQALDWTGEDLASVMATDFLLRWPSLEQLQKAHPNTLRAFYYAHHCRRPDLVQQRLRQIKTAQPLTTDAAVIAAHSLRVQCLARQLRLLLGSIATYDRQIEALFASHPDAALFASFPGAGDCLAPRLAAAFGTHRDRFPEADSMERWSGVAPVTRRSGKLQTVHRRHACAKFVLQTFHEFARCSIKFCDWACRYYELQRAKGKGHHASVRALAFKWIRILWRCWRDHRCYDDAIYTAALRRSGSPLAKLLSPSCEQS

SEQ ID NO: 262543 - protein, 430 aa, unidentified
MNFTQNERIKQVTSDTLIVGVDVGSQTHFCRAFDWRGVEVSRRVFKFSNTGVGFLTFLRWTEELMKKTEMKKVIVGCEPTGCYWLTFQKYLQDHGVQLVTVNPFTVNRSMELDDNSPEKSDLKDPKTIALLVKDGRYSKSYLPSGVYAEIREASVCRDQIMKQHVRLSNQIQGWLQKFFPEYFECYSDWDSTSGLMLLKTAPLPKDILKLGAGGVNQIWRDEKVRAAGIKRAKTLVEAAQNSVGLEAGEAARLEIWILVNDYVAKTDQLKRLDEYLEKKVKEVPNVEKLLAIKGVGLSTVIGFVAEVGDVGRFTDPKQIQKLAGLEIVKKSSGKKKGQPRISKRGRRRLRRTMYESARALMNWNPAFQDVFLYYRNREKNPLGGMQARIAVACKAIRVFYAVLRTGCDFDEERFRRDIIFRRDIIRPEAA

SEQ ID NO: 262544 - protein, 413 aa, unidentified
MPAWNIIYLDHMSARRRGDPSHSMQVARVAPDWPVAILMRRRRVVGDRITYVGLDVHKDGIVVALAEDGLRGEVRDYGRIANTAAALQRLARKIGQEGVELRLCDEAGPCGYGIQRQLSASGHGCIVVAPSLIPKRAGDRVKTDRRDAASLARLHRAGELTAVWVADAGHEAMRDLVRARLDAVHALRRARQQLSGFLLRQGCHYRRPAWTKLHRRWLAGLRFEQAVHHIVLEDYIAAVEAAQARRDRLTAQIEAMLPNWTLAPVVKALQTMRGMALVNAATLIAELGDLSRFANPRQLMVYLGLVPSEHSSGTSIKRGGLTKAGNSVARRLLIEAAWCYRFPARVSRELRLRQEQQPKPIREIAWKAQLRLCARYRRLARTGKPANVVTAAIARELAGFVWAIARQVPPALG

SEQ ID NO: 262545 - protein, 404 aa, unidentified
MSETRDKVSFSGFLGIDISKGTFDGCCIDREGKELFQVSLPMNRAGFEKLVTHVCAITLPKGSILIGMESTACYHISLFSFLMALGYSVSVINPLLISNFMKLQLRKTKTDKKDAAVIARFLSAHGASLPQTVADSHIADLRELSRQRESLLHQMTAFKCDIKRVLSISFPELERTMGIFTRTTLRLLCRFPSARALAQADRDELARLLQNESRGRNTPVSAETLLKVAQSSVGTANPSRELILRQKASILIHHEEHLQEITSTLIELCQSALEKDVQILTSIRGIGNKTAASFLIEMGGEIQNFETHNNLIAMAGLDPSVYQSGKCEGHCRITKRGNRHLRRVIWLMTIRVIQFNDLCKRYYRKRIEDGLPFKKAVLATAHKLIRIIFVLLTRKTLFCHLVTS

SEQ ID NO: 262546 - protein, 332 aa, unidentified
MDSNTVHMGLDVSKLTIDVCVLLADGRKLAIKIANSIAGFDQLLIWLDAFDLASIRAYLEPTGTYSRAIAFFLLDAGITVCLVNSYAVLNHGRSKKFRSKNDRIDAYLLADYGLKHNPPAWTPPTQTRRYLREMQHRLACIDEAIRQEENRLEAGTECDFVRQDIEESLGRLLVRKKQFERELKKLAQTDDRLFANYKILKSIIGLGDSSVIRLLAMVHFEQFESGRQVACFSGLSPREHESGASVHRKASISKVGSAELRGSLYFPAMVAMQHNPQMREFAERLRAKNKASKVIICAVMRKLLVLAHTLIRKQQMYDPEHRSSLAAAAAAV

SEQ ID NO: 262547 - protein, 391 aa, unidentified
MEARVVNNLSPAAAHDGAVRCLLAIELSKKSWVVAVNRPLLDKINLYKLKPCDWKGLLQLIERIRKRVSEELKKPVEVISCYEAGYDGFWLHRLLEAHGVHNHVIDPASLQVDRRARRAKTDGIDVGKLLRSLMAYLRGEPKVWSVVRVPTVIEEDNRRLHRERSRLINERIQHVNRIKGLLAIHGIYDYEPMHPERIQRLERLRTADRHTLPLHLKAEILRELQRLELVLGMIQTIETERDAIASAKSKSQQTTSAKKIKHLVKLKSIGPEFATVLVGEVFYRTFNNRKQIGSYVGLTPSPFQSGSTSRDQGISKAGNTKARTTMIELAWLWLRNQPDSLLSVWFRERVASRKGRIKRIAIVAMARKLLIALWRYLETGVVPEGAVLKSK

SEQ ID NO: 262548 - protein, 385 aa, unidentified
MSEITRGQAVRVGVDLAKRVIQVHAVDAAGQVLTTRALPRDKFIAWCAQLPAGCIVAMETSSSSHHWARKLKALGLDARIIAAQLVSPYRRQGASGKNDANDAAAVCEAASRPQMLFVPVKSIEQQSMLCVHRLREGFKAERVACINRIRGLLAEFGLVFAKSPDALQVVLSDVLEDASNEMNTLARLVLQRAQSQWRELDEHMAWCDERIAAHAKDNADVKKAATLMGIGPVTASAALATVGDFKQFRRGAQFGAWIGLVPRQDSSGGKNRLGSITKRGDVYLRSLLIQGAKSAVMTAHKRSDPISQWTAALRDRSGWQKAAVALANKNARILWAVMTKGEAFDARHVSIKPKAVAAATAPTTTTTTTTTTTLTASAQPVPISA

SEQ ID NO: 262549 - protein, 448 aa, unidentified
MRKERRKPIVRYYEGLPQIRANAAGMDIGAEEIWVDVGNKDKEAVRRFGTFTADLNQMAEWLKQCGIETVAMESTGVYWVAPFQILEAKGIEVFLVNARFVKNVQGRKSDMLDCQWIRLLHSYGLLPKSFRPAAQIAVLRSYLRHRQMLIEYAASHIQHMQKALTQMNVQIHHVISDITGSTGMRIIRAIVDGKRDPKQLAAMRDARTKATEETIAKALEGDYRSEHVFALKQSLELFDSYQKQIQACDEQIGAHLGTLETRANPVELKPARKEKKKRRNQSALNIRQEAFRISGADLTQIDGISESAALALIAEIGVDMSPWKSEKHFASWLALSPNHKISGSKILNRSTRKKANRARDLLRLCAQGLMNSKSALGAYCRRMCGRLGQPKGIVATAHKLALLIYRLMALGREFIDIGQEAYEKQYKERALKRLARKAKEFGMQLVPA

SEQ ID NO: 262550 - protein, 425 aa, unidentified
MNYKQNEKINQVKESTLVVGIDIGSTTQYARAFDWRGIELGKVFTFSNSREGFEAFKAWMQHLQDKYRKSDVIVGIEPTGHYWFDLGAYLEDEGILLVMVNPYAVKQTKELDDNSQSKNDRKDPKVIAKLVTEGRYSAPYTPDGVYADLRIMVANRKRLIREMTQIKNRFARWFAIYFPEYTDVFGDYEAQSSMLLLKKVCTPEAIVELGAEKINQIWRDAKLRAVGMKRATTLCETAKRSIGLKKGSSAARYEMKLLLEDYEYKKAQLDAVMEEIEKLCRKIPESEQMLAIKGIGVITVAGFLAEVGDVRRFESPRQIQKLAGLSLRENSSGKHKGQTTISKRGRSNLRAVLFNAAIPLIATNPEFKSLHEYYTTRANNPLKKKQSVIAISCKLIRVFYAVLANGVTYDAQKMLSDIHRQPQAA

SEQ ID NO: 262551 - protein, 311 aa, unidentified
MQEQCVGVDVSKQHLDWVLGGEGAVSRVNNTPAGVRSLTAKLRRRDIGLIVVESRGGYERALVEALAQAILPVVLVNPWRVRRFSEGMGVLAKTDPVDARILALFGERARPPRRPLPGPTQRQLADLIRRRRQLIAMVTAEKNRLDTATAVIKRDINALVKILERRVAKIDERIDTAIASDPEKAENWERLQTTPSVGPGVARALIIDLPELGSLGRKQIASLVGLAPFAKDSGRKTGQRRIRAGRSAPRTALYLAAMNAARFNPTLKPVYDRMIAAGKPPKVAFIALARKLLTILNAMVRDGTTWQQATR

SEQ ID NO: 262552 - protein, 325 aa, unidentified
MDPDDKHGIAEKMSDNLPQTIGIDISKASLDCHVHPAGAERQFANTAKGHKALIAWLRQWPVERIAYEATATYHRALEAALADWPCVKLNPERARRFAQATGTLAKTDRIDAMLLARMAATLQPPVRPARSAQQAQMAELINARDGLVRDRTALKNREKNLTIAFLKRQCRQRLEQIDRHIEALDTEIANLIAADAALARRHEILTSIAGVGTLTANQLIATMPELGSLENKQAASLAGLAPVARQSGQWKGKSFIRGGRANVRQALYMPALVAARYNPDLKAKYQQLVTAGKPAKIAITAVMRKLVVTANALLKADRCWTQSPA

SEQ ID NO: 262553 - protein, 307 aa, unidentified
MITLGLDPHPGSHTVVALDQNGSLVASTTVPNTTAGLRQPHRFAAPFASRRWAIEGAGNHFIASFVNELLAQGETIYSISPSLTSQYRSRRGRKKNDVVDATNVARALLANPQLPALQNLETQRKLQELSRVQRRLSEQLKANRGALSELTDQSPVREILEQVIQTLVVQLKELKRQLRSAVSRQMPSLLALPGVGAIVAGTVLAEAGDPQRFPNADHFASYCGAAPVEKGSGQNSRLQINPGGNRRLNWALHIIAIVRLRVDGGRSQQFIERSIQHGKTRRAALRLLKTYIAREIFRTMRRAEAAI

SEQ ID NO: 262554 - protein, 391 aa, unidentified
MINIGIDVGKFKHCASVMDDKTGEILIKPFFFNNDQKGFHLFYSKTKQYIHRKHAVGMEDTGHYMINLTEFLLDKKFTVKFINPRSTCLRRKELGMSAKNDRKDSILIAEMLSEKKFWRSVTRTTQETDKLREITRLYHQLQEQQNEDMNRLQRALDIVFPEVNKLSWTRYSKAYMQFLASYPTATSIASEDIRNLRNALKTDGRGRQCKLTAEDIKEAAKCSVGEDNIAVALEVQSIIAIINTRKQQIENLENKIEEFSLKLNSPIISIPGISHITGMTIIAEIGDIHDFSDAAHLISYAGMEPLVHQSGKYDAAHMPISKHGSRYLRKALYQAVFTVCKYCPTFNAYYTKKRNQGKTHRCAQGHCVRKLLRVIYKLLENNTAFNENLVK

SEQ ID NO: 262555 - protein, 312 aa, unidentified
MTNDTIGVDISKDHLDAHRMSDGASRRFANDEHGHRALLKWLGGKTGTRIVYEPTGAYHRAFERRLAEADLALVKVNPRQARRFAEATGRLAKTDPMDAAMLARMGALLDLQARPPRSPILNDLKDLHMAREALVKNRTAAKNRAKNLTLAILKRHNGAQLRQIERQIAAIETAIMALIKADSDLARRFAILVSIPGVSAITAFTLLIDMPELGSLENGQAASLAGLAPVARQSGKWTGRAFIRGGRANVRRALYMPALVPMRCNGQIKAKYDRLKAARKAPKVAIVAIMRNLLVLANALLRDCRKWTPKMP

SEQ ID NO: 262556 - protein, 366 aa, unidentified
MREPSTFVGMDVHKRDIVVSMLVEGQPGPVEWRVANEPTAVKRLARKLQHEGGGTVRCVYEAGPCGYALQRQLEGQRLACDVVAPSMIPIRPGEKIKTDRRDARKLAELARAGLLTVVRPPSEDEEAVRDLCRGRDDARLDLMRARHRLGKFLLRRGRVFGTASRAWSQAHRWWLGTQTFERTAERVMFEDYLLAVEQTEARKRSLELHLEDLAREPLYAERVGWLRCFRGIDTVTAITLIAELHDFRRFRSPSQLMAYLGLVPSEYSSGPHQQRGGITRTGNRHVRRLLIEAAWHYRHKPRVGEKLAQRRHGQPAAMIALADKAQLRLCRRYRRMERRGKHATKIVVAVARELVGYLWAALTPTA

SEQ ID NO: 262557 - protein, 394 aa, unidentified
MIYVGIDVASTKHDIVISSESGELFKKAFSIKNDLDGYKKLLSEIGFAKEFFNDLNVRIGLESTGHYSRNILHFLILAGFEVMFINPLLTNMDRKAASVRKTKTDAIDAKAICMFLIRNQNDFKPYTLSSYHIDELKTLVRQRKSLKTQINKEMNLLHAYVIQAFPEYYKIFKKINSKASMEVLNRYASLSEFKRVRLETLKELIRKSSQGRHGIREAQMLKELNSSSIGIDSSALSFSIKQTIKRILMIKEQICDIEREITHHVDESHTTLLSVPGVGYTTGAIILAEIGDIHRFKTDDQLLAYAGLDPSVYQSGNFEGSYKISKRGSSILRFAIYHVAQAAVKFDPVFKAYYLKKKAEGKRHRVIIGHVTKKILRVIRSILKNNSTYSINTH

SEQ ID NO: 262558 - protein, 417 aa, unidentified
MDDPRFWVGVDWADQSHTICCLDDDGQICWTDHVAHEQEQIKRLAQRLRQMKGTVSIAIETAHGLLFEELMKTGCPIYAINPKQAKSWRKDLSVNAPKSDQADAYALAEGIRLFHQRQRPLAAEDPIIRELRLLCRDEVTLIQERTELLNRWQATLKEFYPLVLEWFSDPNCRSAWDFVLEFPTPTMAHQASRNKLAGFLKRHYIGLSALWLKRIDDLKRLEPWTADAATERAKSLLAVSLAKQLRTIEAVLENYREKIEAIYAQTSDSDIFSSLPGAGPKIGPRLAAEIGEDRNRFPEPNALLCHAGAVPLTESSGKYRVVKIRWGCNKHLRNVVHQWAFLTLEQSPWARAFYDAARQSGQNHSTALRNLGRKWLKILWRMWQDCSPYDESKYLASLERHGSSLIKLIQPCEAVSI

SEQ ID NO: 262559 - protein, 391 aa, unidentified
MINIGIDVGKFKHCATVLDDSTGEVLIKPFFLTNNRKGFDLLYSKTKQFIHRKHSVGMEDTGHYMINLTNYLLDKKFTVKYINPRATCLRRKGLGISAKNDRKDALLIAEMLSEKRFWRSISVRSIENSKFRDITRLYHQLQEQQNQDMNRLQRALDIVFPEVNSLSWTRYSKAYMKFLSTYPSASSIALEDIRILRKSLKTEGRGRQCKVTAEEIRELAKNSVGEDNISIDLEVTSIIAIINTREEQIRILGKKIEEFSHKLNSPIISIPGISHISGMTILAEIGDINQFQNTGNLISFAGMDPLVYQSGKYDAAHMPISKHGSRYMRKALYQAVFTVCKYSPTFHDYYTKKRNQGKSHRCAQGHCARKLLRVIYKLLSTNSPYDQNHIQ

SEQ ID NO: 262560 - protein, 411 aa, unidentified
MTKEDFIYVGIDLHKEIHTAVMIDCYNNKLGEITFPNRPADFPKLVTKVKKCNTDAKEVVYGLENAYGYGRPLAVWLIDKGYFVKDVNTAISHRQAKHRGAMYRKSDSDDAEAIALATLNMLDKLPDACPNDAYWSLGQLVHRRDNIMKQRTRLVNQLHEQLCIAYPSYKSFFNDISRPTALYFWEHYPSRKYLRGKSVEDLRKELVPVSHNRCSTKNCEKILDAVASDKVKNNAYQDARDMVTLSIVSDLQHYDSQLAEVDKMLEQMYKMLGCTLTTIPGVNVITAVKILAEIGDIKRFSNANKLAQFAGIAPLHLSSSGKGKDVATKQGNRRLQPTIYFLAIQMVQVSSKGTPRNSVVRAYYEKRKAEGKTSQQALICISRRLISVIYGMLKNGTEYRMPVVENAGENR

SEQ ID NO: 262561 - protein, 439 aa, unidentified
MPQPIVAVGIDPAKRLHRAVAVLFPDQVILDVALPNACDAIANLDDRLTELANRHGAELVYGLEDHRHYGHLFCQVLSERGRDVRVVNPLWTSRQRAFYGQDKDDSIDGRSIAAVVLRRHHELPLAAEFGEVVRAIREAERSLQDLDKARTRSVNRLHLQLNDTYTAVYDKFFGKLRSPFALRFFRRFPLPQDLVGHDVEMLASLLLELAGGKVGPHKGANRLIAMQRKAQTILETSAAMCTRPRSFALELKAELIRQLCDELLAIHDRVTRLNRLLRKKLLPATGQTITTITGISTTLGATMIGETGSVTRFRSPAAFAVYNGTAPARKSSGGRDRHTARRNCNHRLKRAFYLTARAAVLHDPIARAYHQRCINRGLDNTEALKRVARRMSDLVYALLKSGKAYDRSIVENAIAKRREQAARAEPCRAKQSLVHPRRV

SEQ ID NO: 262562 - protein, 349 aa, unidentified
MEAYDGPQIVGMDLHRRRSVLVRMTEDGQKLATGRIASSPARLTAEIKRAGLHPKVVLEACYGWYWAADALAAAGAEVHLAHPLGVKAFSHRRVKNDELDARDLADLLRMGRLAEAWIAPPEIRELREITRYRCKLVQIRTSCKDQVHGVLAKLGIEVTCSDIFGAWGTAWLDELPLPQPYSWKVASLRQLISWLTSEITVLEQVTAELLAGHDGYRAVQQLPGIGPVLGAVIVAEIGDITRFRHPARLCSWAGLTPRHYESDTKVVRGRITKQGSRPLRWALIEAVQRTPAGTPVREARDAIIARRGPQARNIAKVAAARKLLTFVFYAMRDGHVRALAARGAEHEAR

SEQ ID NO: 262563 - protein, 420 aa, unidentified
MDVLIERCAGIDIGKNEVVACVRTPGPGGRGRHKQTRTFSSFTGALEEMADWFGDEGVTDIAMEATGPYWKPVWYVLEERAFQLRLVNAHHVKILPGRKSDVLDAEWLAELLEHGLLRASFVPPPAIRELRDLTRYRKRLIQSHTAEQQRIQKTLEDAGIKLDSVASDVLGASGRAMLEALIAGERDPVVLAELARGTLRRKIPALRQALRGRFRDHHGLLIGLCLEHTDHLEAAIARLDASIDALIAEHTSEAGIPFAHARDRLTTITGVGKRAAECILAEIGADMSRFPSAGHLASWAGMAPGINKTGGKPGSGKTTDGDKWLTDILTQCAWAAARTRDNYLAAQFWRLARRIGKKKAAVAVGHSILVICWHLLTNDCDYDDLGGDYFTRRANPDRQRDRLITQLHALGYRVTLDPVA

SEQ ID NO: 262564 - protein, 351 aa, unidentified
MEDIKYAGIDLHQSTCTICVEDSRGKTLSEATVKTEAEGLRDFFRGIRGTVHVSFEVGTQSAWLYEVLKPIVTSVTVCDVRKQKRRGNKSDRIDARKLARWLRLGELRAVYQGDRNVRKLRDLAHGYLATVSDSIRVMNRIKAFYRSWSIRCAGRDVYYKRNREDWLSKFPIPESGIRARIYYAQLDLLKEQRKEIKKVFLKEARRYPVEKILRGIPGFGPVRSAFAIAVIGTPHRFRTERQLWSYSGLSVVIHSSADHSIISDQIVRKQHKHNTRGLTRDFNRILKMVFKGAATEAIRKDPMKTIYKTKVATGMRPEMAILSIARKLAAISLILWKRGEKFSVEKVIQFN

SEQ ID NO: 262565 - protein, 421 aa, unidentified
MDGSAKEWCERAAFAGFDWAYDHHDVVVEDQQGTVVDEFRFDETADGWKLLNERLSRYPAVAVAIETSSGVVVERLLDVGYAVYPVNPKAAKRYRERKVPSGTKTDRVDAWSLADALRMDGHSWRPLKPDHPLTLELRLLCRDEITLIEQRTALICQLRAALHEYYPTALQAFDDWTSPASWAFIERFPTPQVLASAGRRKWEKFLHTFKLYHSEKLYAKRLELFGAATQFCGSSAITNAKSLLAVTMSIQLRVLQKQLDQYRAMITKLFAQHPDHDLFGSLPGVGEKLGPRLLAKLGDDRDRFESAESLQCYAGTAPVSYQSGQIHRTRFRRACQKTLRFSVHLWANLSRATCPWAEAYYRKKRKEGKSHACALRCLGQRWLKILWKMWQTRTRYDAELHQRNQVGHGSWVIALLPTVSE

SEQ ID NO: 262566 - protein, 337 aa, unidentified
MTIIRVGLDTAKHVFQLHGVDDSEQPVLRRRLGRHEVAKFFAKLPPTRIGLEACGAAHHWARVLRGLGHAAVLLPPQYIKPYVKRGKNDALDAEAICEAMSRPNMRFVAIKSAEQQAALMVLRSRDLLLKQRTMLVNAIRGHAAEFGIIAAKGPVKIRELMQHAHAEAAGVPALALAMLDLLAGQLDGLDAKLKTLEGELIALHRENPVSQCLASQPGIGPIGAVTFALKVPDPAGFRSARHFAAWLGLTPKEKASGGRRRPGRISRQGDAGLRRLLVLGATAVIRFAKPGRASPWLLNLLARRPKKLVAVALANKMARTLWAMMVSGEVFRHPHQA

SEQ ID NO: 262567 - protein, 350 aa, unidentified
MMIIGCDYHPSFQQIAFVDTETGDCGERRLKHKEEAEQFYRDLHARGVKVRIGLEASGYTRWFERLIEELGLELWIGDAALISRQRVRKHKTDREDAELILRLLMENRFPRIWVASGEERDLRQLLWHRHRLVQMQTRLRNQLHAVALNEGVQLKKRMWRAKGRAQLEALRLMPWANQRRQDLLRLLDQVDFKIAELTAAIEQEAEKRPEVMRLMTHPGVGALTALAFVLIIGSPKRFPRSRQLSSYLGLVPIEDSSGERRRLGHITKQGNTLLRFLLAAAAQATVRSDPEWRRRYLHLTMRRERAVAKIAMARRLAVRLYWMWRNECDYAQLPKLGSHVGQPGNPHGRQ

SEQ ID NO: 262568 - protein, 413 aa, unidentified
MEQLIQRCAGIDVGQAESVVCVRVPDTVTGAPAELIATYGTTTPDLLELVDWLRGLGVTHVAMESTGVFWKPIYYLLEDDFTVLLVNAAHIKHVPGRKTDTIDSAWIAQLLAHGLLTASFVPPPPVRELRDLTRYRKALVNEKTAQVNRIHKVLQDSGIKLTTYATDVMGVSGRAMMRALIAGQSDSAALADLAKGRMRTKIPDLRKALTGRFREHHGFLLKQMLDHVEAQESEIAALDERIEAAMAPFVPQVELLTTIPGVDHRSAQVILAEIGPDMSVFPTAGHLASWAGMCPGQRDSAGKHGSGKTRKGSKWLRGALVQSARSASRSKGTYLSERYRQIMRRRGDAKAIVALGHEILLAAYRVLATGQPYTDPGPTAFSRLTAQRLTRQAVRRLQDLGYQVTIEPRTDAA

SEQ ID NO: 262569 - protein, 338 aa, unidentified
MLYVGVDLHKQSISLCVVELADRARKIVERRRFCCDQEEQMAEYFASLGEYQLVVEATASYEWFVQLVEPTADRVVLAHPAHLRVIAQSKRKTDKLDAQTLAEFLALDQIPEAWRPTPRVRQHRTLVRHRNYVVRRRTSVKNKLRRVLSHYNADLKNLFTEAGRRYLATIDLSEADRFVTNQLCEEFDQHSARLKAVDKQLKAFAKAAPVAEQEARAVLESMPCVGPVTVDVVLAEAGDVRRFGSQRKATAYAGLAPGIRESAGKAKQLGITKEGSRLLRAILVETAWRLVNRTRRWARVYEKLKARCGAKKAIVAVARRVWCVMVSILHSGQKYQLT

SEQ ID NO: 262570 - protein, 414 aa, unidentified
MLKIVYPICCGMDVHKSFVVACIASTNEQGVTSYKSKRFSTFTGDLRRCAAWLAENNCKEVCMESTGKYWIPIYNILERTCNIVLAHPKYVKAIRGKKTDKRDAKWIADIFKHDLVTGSFIPPADIRQLRDLVRYRWKLTSFTTGEKNRAQNCLTVSNFKLDDVFSDVFGKAASAITDRILENPAEKITDVSAFRTKGMKATNEQVLAAVDGEMCEEQAEKLRIIHSHMDSLEMCKANLESLILSTAEKYLPQLNLVMTVPGIQSFAAIAIISEIGVDMSVFPTSKHLCSWAGLTPQNNESAGKKKTTRISRAGAYIKPLLVQCALCAIRAKQFPEVRNRYLALKKRRGHKKAIIAIARMLLTAIYNILKKNEPYDPELYRKGDRPPAHRVVSVEEAVYILQRQGYLVTAPPTA

SEQ ID NO: 262571 - protein, 370 aa, unidentified
MQQSSTLYVGMDVHKESIAVAYVAQDHGAEVIYLGTIGTRQADIDHLTRKLQSKAKHLVFVYEAGPCGYWLYRYLRKKGYDCWVVAPSLIPKKSGDRVKTDRRDAVQLARLMRSGDLTPVYVPKVEDEAIRDLSRAREDTIGDLKAAKFRLKAFLLRHDIRYTGRATWSPAHLRWLSEVVCPTPAQQIVFQDYVRAVNEHTERLQRLAQELQDQVKTWRLHSVVEALQAMRGVQFTVAVTMVAELGDLTRFANPRELMKFLGLIPSEYSTGERRRQGSITKAGNTHARRALVEGAWAYRYPAKVSRHLQLRLETQPKAIQDISWKAQVRLCKRYRRLIARGKHANQVVVAIARELVGFMWAIAKEVPVTP

SEQ ID NO: 262572 - protein, 323 aa, unidentified
MSQPNLQCMGIDVAKLSLDIATTDTIEPFTVGNDEDGFAVITDKLKHTKINLILMEATGGLEAAIACKLQSEGYDVVVINPRQARDFARSMGYLAKTDKLDAAMLAQLALVIDRHPDRSRYIRHLPDEARAVLAAMVVRRRQLNHMLVAERNRLYPSHPQSRKSIDNIIDALQNELDRINEQMKQHMTAFFQEQARLIGSVKGVGDITVASLIAELPEQGKLNRREISALTGVAPLNRDSGKMRGKRTTFGGRAGVRATLNMAALVATQFNPAIKLFYQRLVAAGKPKKLALVACMRKLITILNTMLRKGEEWNASFQSQVIS

SEQ ID NO: 262573 - protein, 347 aa, unidentified
MEYFVGLDVSLETVNVCIVNAAGDILLEKKIAAEPAAIVHLLKSFGSPFKRIGLEAGPTSSWLYGELRAAGYGAICLECRHVKAGLSAMRNKTDRNDARGIAQLVRLGWFRQVHVKSEEAQRTRMLLVNRQQLLTKALDIENSVRGSLKVFGLRVGVVARRGFEARVLELVADDPILLVVTEPMLRVRQALLEEFERLDRLCQQLARRDPVCRRLMTVPGVGVVVALTYRTGVDAPERFSKSRDVGAHFGLTPKRYSSGQTDYDGRISRCGDEMVRTALYQAANVLLHHGRWSSLRSWAMRIAKRGSVKGAKVALARRLAVVMHRMWTDGTDFRWSDTSRMTAPTAA

SEQ ID NO: 262574 - protein, 346 aa, unidentified
MTEFKRIAVDTSKHVFTLHGVDPADRVILRRDLKRAQFIEFFAALAPCEVVLEACGGSHHWGRALQALGHRVRLIPPHYVKPYVKRGKNDRIDAAAIAEAASRPGMAEVPVKSAATQAALMQLKTRELLVGQRTQAINALRGHAAEFGIIAPQGTSHVAPLLAKLAATEAIPPEGQTALAWLGAQIEQLDQQITTIDAALLAQHKANPLSRLLAGIPGVGPLTALTLALTVDPRLFASGRHLAAWLGLTPQQNSTGGKTRLGRISKAGHVRLRTLLVIGASAVIRHARPGSRTASPWLLGLLARKPRKVAAVALANKMARIAWAMMTRGEAYRQPGLASPGDPVAA

SEQ ID NO: 262575 - protein, 519 aa, unidentified
MHQTKYRGIITEAGSLTTPPWEPAFRLAKPLRKSVSPFGGDLCFGWLGSPRLYLYKPLGCVSAFWKWMPAGKDKTMQYQKVLKMLENIPYLSVGLDVGADFTWMSIMLPNGTLAGKPFKIIHSDPQSRELAVAKIKEAQEAYSLKSRCFLESTGIYHIPLLCFLRDKGFDCSVINPIITKNSTNMNVRKLHNDKFDSKKAAKVGLDASLKTSIIPDDEVIDLRNLVRDYYYFKDLQSAVVLKLTAELKVSFPAYRKVFSKVTTQTSLKLLDAYPLAEDLLAAPKETVVEMIRSTARFGRKYALAKYDALRTAAEDAAIFGRALKSNSVRIRLYIDSYREYQKRLDTIMEAIHASVDGLKDSPTHGRILLLQSLRGVGFMSAVVLVAEMGSFDLFPSPKKLYAYFGLDPAVKQSGKFNGDKVHMSKRGSSLARRILHMVALNNLKVDKGSGMPVNPVIHSYYADKCKAKKKNVAVGAVMHKICNIIFAMLRDNKPFEVITPQEHCKQYLAAHPSKAQNAA

SEQ ID NO: 262576 - protein, 353 aa, unidentified
MKCDKYMGMDVHQATTVVDVLDADGKPVLETIVATEAAAIIRLLQSLSGSLHVTFEETTQAAWLYEVIRHFVAEVVVCDPRRNKLLGEGSKADKPDARKLAELLRAGMLRSVYHGHEATRKLKELVRAYETLSVDTERTMVRIKAIYRGRGIRTPGRGVYQLKQREQWLEQLSEPGVRQRVSFLYEELEQLRPLRRRAKQAMLAESRNHRAVTLLRSIPQLGPIRSAMIVATVDTPHRFRTKRQFWSYSGLAVVTHMSSEYEIKAGRVVRRRKPVATRGLNRNCNRRLKELFIGASAGGGQTEPYRTYLEGLKQNGMRAEMARLTLARKIATLALTVWKKGEAFDPKKLNWTT

SEQ ID NO: 262577 - protein, 345 aa, unidentified
MNYFCGIDLGAKRSQVCIIDENQKVLVNRKVANDIEVIYSLIRPYGQVPTVIESTFNGYWIVDGLQARQVPVTLAHSLKLTAISRAKVKTDKRDAFVLACLLRVHMIPESYIYPAEQRPLRDLLRQRWDAVALRADEYRKMRGRLYREGIITVGANDVKLMGEEEVRELIDHPLIQRQMMANIERTELLTKQIKSFEKDLLARVKTRSDFRNLMTIPGIGPVLALTLLLESGDIGRFPKARQFAAYCRVAPGCADSGDSHQRGRGNMQGNPYLKWALTQAAEYAKRYDEQFRAHFDAVLNKHPGSSGTIITHCIVAHRIAFAVYHVLKDGTPYNPEKLFRSIPES

SEQ ID NO: 262578 - protein, 321 aa, unidentified
MAMSATPIEAGVDTAKDELVIQAAPNTKPFAIPNTPKAIKAWLKTLPKGSSLAIEATSTYHMEMAEQAHAAGFAVYVIDGLRLSKYRESVAVRAKTDAHDAALLARFLSNERGSLKAWTPPPAGHREIQVMLRRRAKLVAVRGMLRMSLSGDKLFASELKRVEKVLKCVELSLEKQLREVIKKVGLSDQLRRVQKLPGVGFLTAAGLVMSFMRGEFKNSDAFVAYLGMDVTVAQSGKWAGRGKLSKRGDSEVRRLLYNASMSGSRTATWKQYYAHHQARGKKTTQALVILARRLARLAFGLMRHQVDWKPEIYTGGAKLAS

SEQ ID NO: 262579 - protein, 447 aa, unidentified
MLRRTVGIDLAISGAQVAQIFDDGQPVGRPLRFRLNSTDLQHFVQTVTKGVPAGTPIEAVMEPTGMAWFPIATWLQRRGVKVIRVKGQRVKALRQYLSEHAKTDLADAQVLGSIPGFGGRALDPVHVPSPEHHALQRLTKQRHRYQDAICSSRRRVLDLVRWACPALEAVLPDTMTKLSLAILDELFDPQQVLAMRRDALRRFVANHASGNHPHSGRFVEEMIDGLKGAARETVALHGSQVDFEALQFEVRQEVALMRLLDRNVHELERRTETIYERVHPSNALRSVPGIGTTLAPLLVGVIAASSRFRNERHLRGFCGLFPTKNASAGIDRPGQRITKSGSDRIKRALYIAADVARKIDPDLASVYFHLMVRKGHHHKQALCAVATRLVNRIHRVLKTGEPYELRDPDGKPISMAAAKELVRERFSVPEEIRSSRRRHVETVLAPS

SEQ ID NO: 262580 - protein, 339 aa, unidentified
MQLYSGIDLHATNHVVGIVDEKGKRVMKQKLINDPELTLNLLEPYRAELVGIVVESTYNWYWLVDTLMDHEYQVHLANPSAIQQYNGLKYLDDDHDAFWLANLLRLGTLKEGYIYPKQERPLRDLLRKRWHLVKLRTSLVISLKNIVARNFGIRWSASRIKGQSLDSIVSPLPQEDNVALVIRTSKASIDFLTVQIEQVESSVLKQAKGKPSYDKLLSLPGVGKILGLTIELETGSVSRFQKVGHYASYCRKVESRWLSNEKIKGRGNSKNGNKYLAWAFSEAAEHARRSDPASRTFYNRKLSQSNAAVAHSALAHKLARAAYYIMRDNVAFEEARMFA

SEQ ID NO: 262581 - protein, 350 aa, unidentified
MIIIGCDYHPGVQQIAFVDTETGEFGETRLQHREQAEKFYREPAMGAVQGRVVMEASGQARFFERRLAELKMELWIGDAAEIRARRVRKKKTDREDARHILRLLMEDRFPRIWVPSWENRDVRQLLWHRHRMVQMRTRVMNQLQAVALNEGMRCKKRLGGERGRQQLESFPLAMWGSRRRHDLLELLDRLNPTIAELTQAIEAEVATYPAAQRLMTHPGVGALTALAFVLIIGETERFQCGKQIAAYLGLVPEENSSGESRRLGHISKQGSGFMRFLLVEAAQVTVRSDGQWRSRYFHLAMRRGRKIANVAMARRLAVRLYWMWRRQWDYEQWKEFGPHAGQPGMSDGVK

SEQ ID NO: 262582 - protein, 387 aa, unidentified
MAQVNDLSRSLTAFDPISTLVVVVEMSKASWLVSGVVPGVERQPLKKLEPDATALLRLIERWRNEAVRAGRPISRIALAYEAGRDGFWLARLLIARGIEAHVIHSASVAVSRERKRAKTDRLDAAMLMRVFLGWLRGERGHCGMVAIPTMEEEDARRPSRERESLVDERSRITNRMKSALARLGIRGFKPHLRKAPERLAGLRTAEGTGLPANIIEEFRRDMARLALVREQISSIEKTRAERLERAPDTGPHAMVRLLARVIGIGIETADMLVREILSRKLRDRRAVARYAGLTGSPDESGLKRREKGLAKAGNARVRRGLIQLAWRFLMFQKDSALAQWYRTRTEGPSGARKTTMIVALARKLLIALWRLVTTGEVPDGVELRLAA

SEQ ID NO: 262583 - protein, 343 aa, unidentified
MRKEEIECIGVDVSKNTLDVALFRGKIDWNEGHVKVSNNESGYKELRKWLRLKNAEKKRLRICMESTGLYTHDFRSWLEKENIIYYVVDPKLMHHFAPPQSIKGIRQTKNDKADAFRIAIYCSLFHDSMEPSKLPSAAYFKLKRLLAERRQYVKQSVLYRQQLSDISIYDSVGSRIRKKNEVENLRDNIKQTDAEMKAIIDTDPEIRRNYELLISIVGVGLVVAVTTIVLTENFTTFTNPRKYASYIAIAPFPHESGTSIRGATRVSKQGFRQAKADLSISVLSAITFDPDIKEYWQRKKAEGKHTGCVLNAIKFKIVLRMFAVVKRGKPYVNTKGYKSNKKR

SEQ ID NO: 262584 - protein, 347 aa, unidentified
MRFYKHSHAFYAGVDLHARSMFTHILDNDGKTVFEADLPASPDAFRNAVAPYRAGLVVGCECMFSWYWLADLCEDDEIPFTLGHALYMKAIHGGKAKNDRIDAAKIAGLLRGGMFPMAYVYPRAKRDTRDLLRRRCFFVNQRSQLTAHIVNTNSQYNHPPLTKKLCYASNRSDDLAERFTQPSTQASIRADLALIDAYDAQIDEVERTVLKNAKINDPVTLNLLRTIPGIGKILSLVLLYEIDQIARFPEVGNFLSYSRLVRCEHESAGKKKGSGGKKIGNAHLKWAFSEAACLMLRAEADAKKWLDRQARKRGKKKALSVLEAKLGRAVYHVWRKQQAFDLQRFFA

SEQ ID NO: 262585 - protein, 381 aa, unidentified
MMTTTRSELGRVCEPVVYVGFELGKKEWKLGMTSGFGVAPWVRTVTAGDLRAVARAIGQARQRFGLPATAVGMSCYEAGRDGFWIHRALTTLGLRNRVVDSSSIEVNRRARRTKTDRIDATKLVMMLVRVCSGERRVWQEVRVPTEALEAARHVSRERTALTKEQTRLGNQIASWLATWGCGVPPRRHRRGQWWTTVRDWRGTPLPAPVQARIARAEARGAVLAEQIATLEAAQQAATAAADPESALGRLVQVKGVATTSASILLDEGLVWRAFRNRREIGGLLGFAPAHYNSGDLERDQGISRAGNARLQAVSIQLAWNWVRWQPLSALTLWYRQHFGPRRRARRVGIVAVARKLLIALWRYATTGVVPAGALLKPAPRA

SEQ ID NO: 262586 - protein, 321 aa, unidentified
MSKIALGIDISKKKIDILLTLSPKPVKKIFENTSTGHKLLDGWLRGMRVGKDVHICLEATGPYSEPLAEFLFEKGYRVSMVNPLKVKKFGEAELRRNKTDAADARLIADFCLAMEPDDWHPLPPEIKHLQALTRRIESLDQILQAERNRLKESAPKEVKPSLKRMIRNLEKEIEKVTKLIKEHIDNNPDLKEQSDLLRSIPGLGEKTVPLLLGELEFAAFDSARSVAAFVGLTPRKDQSGSSLNKTRISKLGSGRLRKALYFPAIVALRCNAVIKSFASRLSQNGKRPKEVVCAAMRKLLHIAFGVLKHHRPFDPNLAFNV

SEQ ID NO: 262587 - protein, 427 aa, unidentified
MNGLTLSRLDEFRKLKKVIRGSDEHLIVGIDVAKEKHNAFFGTATGSSLLRRLIFDNSREGFEILTGRARALQIQAGLGQVVFGMEPTADYHKPLAEYLITNGFNVVLVSAQAAKENRKTLDGRWDKNDTKDSANVTDLISQGKFQYYDLPSPPIGELRNLLSLKRKLKKYEHSIRLRIKNHLVSQFFPELDRYLGSQEVENTAIVKWCLDPRKIAALEFEKFLRIVTTRNRGIGQRQRLQAIQEAARCSIGCAAGESVMFEARLLVDNLQTTRDSLVATNARIGEVCHRLPGYAAVISIPGVGPAIAATLLATIGDPHRFNNAREVIKLAGLDLSANRSGKYSDEATPRLSKKGNASLRYALYQAAVIATSKNGYFVEYLTKIVQGRSRERGIKSKMRVKVAAKILVIAWTLLKKGGKFQGEHLLG

SEQ ID NO: 262588 - protein, 338 aa, unidentified
MEKITTIGLDIAKQVFHVVCCDRNGKVIKKRMLKRRQVLEYFVKLPRCLVGMEACSSANYWARELKALGHEVKLLPPQYVKAFVRGNKNDYNDALGIAEAVRCAEMRFVAIKTPAQQDIQALHRLRERRVAERTALCNQVRGLLAEYGLVLPKGVNTLRRRIPELLEDAENGLSALFRRLLAECYEQLQELDRHIDKYTKEMTRHSREDEACQRLQTIPGYGPIVSSVFHAVVGNGETYRRGRDVSASLGLVPRQHSTGGKTVLLGISKRGDRYLRCLLVHGARSVVRQAAGKEDRLSRWINKTVAERGVNRATVALANKMARIGWAILAHKTTYQPA

SEQ ID NO: 262589 - protein, 351 aa, unidentified
MEETYVGIDIHRDYGVACVRDLKGEIVDEFQFGNNIEGIQKVREKLGENNVHVAIESTGNMWVVLWDTLEENKLDLHLVHPLKTKAIASNKLKNDKLDAKMLSRLLRGDLLVCSYVPPRDVRDEREIVRLRASLVRLRTQVINKLRSILHKYCIRYKGSLRQNAGIEFLSSLEIRPVDKSAVQSYLETLKTLNSEIASVNAQIAKNEKEEIRLLMSIPGIDYYSAVLINSEIGDISRFPSHNKLASWAGLVPSMHQSGTTFYNGNITKEGSKRLRWILVQCAHASIKTNSKINEFYSKIAKRRGDNKAIVAVARKLVKIIYAVLSSGNPSLYGDPKKTETKIKRMRTIAEK

SEQ ID NO: 262590 - protein, 316 aa, unidentified
MESPQTFVGIDVSAKRLDVAVLPAGTHFTVAHTDEGIASLVRCLLELRPHIVVLEATGGYEILVAYAMSEASLPVVIMNPKVLRHFAKSTGKLAKTDKLDARVLAHYAQAIQPPVRPLKDPEQAELATLMSRRRQLWDMIVMEGNRRRTSTPKVRGNIDQHLAYLRQLLKDLDREIHDAIRRTPLWHEKSEILQSFNGVGPKVSASLIADLAELGTAPRTQISALAGLAPMNRDSGQWRGKRTIQGGRPAVRQALYMAALVASRHNPVIREFYQRLRQAGKPAKVALTACMRKILVILNAMLKNRTYWNPQLPLAA

SEQ ID NO: 262591 - protein, 334 aa, unidentified
MTIQLLAVDLGKRSFHMHGITADGVVVSRKVSRSKFEAAVTKLDPVVIAMEACASAHHWGRRFKASGREIRLVNPRFVKAFVRGSKNDAVDAEAIYDAASRPTMRFVPVKTTEQQDLQSLHRVRERLITQRTSLINHTRGLLAEYGVALSKGAWRFRDHAPAAVAETELSELAYFLFSELLDQLRDVDARLSKLDTRIVAICREHDACRRLVALPGVGPVIATALVAAVGDGHHFRSGRELAAWIGLVPRQYTTGGKPRLGGIGKRANHYLRRQLIHGARAVTSRLADQDDRRSVWLKSVIARAGFNKALVALANKTARMAWVILARNEEYVPA

SEQ ID NO: 262592 - protein, 346 aa, unidentified
MKQITIVGLDLAKQVFQVHGVGPDGIAVVKRQLRRSEVLAYFGKLPPCLIGMEACGGAHYWAREISALGHEVRLMPPCYVKAYLKRGKTDAADAEAICEAVTRPTMRFVPIKSAAQQAAAMMLKTRDLLVRQRSQAINALRSHLSELGIVTGLGVGKVSLLIEIVRDTSDERLPKAARLALCQLSDQIEALTGRIVSLESEIVAEVRQDEEMRRLTTIPGVGPISAASIKALVPDPKGFVSGRHFAAWLGLTPKPCSSGGKERLGGISRMGNTTLRTLLILGATTVLRHVRRGATTSAWVTALLARRPFKVAAVALANKMARIVWALLTRGGAYRKNEVVSGMAGA

SEQ ID NO: 262593 - protein, 340 aa, unidentified
MRQLYVASDLHGNNNLLGIIDGEGKRIFKKKLPNDPLLINDILEPFREEIVGIVVESTYNWYWLVDALMEKGYKVHLANPAAIQQYSGLKHADDKHDAFWLAEMLRLGILPEGYIYPKEERPVRDLLRKRGHLVRLRTSLIISLENIISRNFGRKLSVNEVKRLRKDYVTPLFKEKEDLALAGKVSKETIDFLTHQIRQIEGVVEKRMTLKEPYRNLLTIHGVGKILGLTIMLETGPISRFETVGDYTSYCRKVPSQWISNGKRKGSGNRKNGNKYLSWAYAEASDYARRLHPESRAYYNRKMQQSNPAVAHSALSHKLARAAYYIMRDQVAFRPEKLFG

SEQ ID NO: 262594 - protein, 348 aa, unidentified
MSSKLDSEIAVIGIDIGKNSFHIVGLDRRGAIVLRQKWSRGQVETRLANLPPCLIGMEACVGAHHLSRKLISLGHDARLMPAKYVRPYSRGQKNDFRDAEAIAEAVQRPTMKFVATKTAEQLDLQALHRVRERLVSQRTGIINQIRAFLLERGIAVRQGLRFLRAELPRILATPRDVLSPRMVHVIEGLAGDWRRLDERIEGLSSEIEALARRDVSCERLMSVPGIGPIISSAMVAAIGAGDAFSKGRDFAAWLGLVPKQISTGDRTILGKISKRGNRYLRVLFVQAAWVVLIKPKSWDRHGLKPWLEAAKKRLHHNVAIALANKLARIAWSVLAHGRAFEASRIQAS

SEQ ID NO: 262595 - protein, 424 aa, unidentified
MKVTYQTCCGVDVHKSFLVATIVKTTGGIEPSYQKKRFSTFNNSILEFKQWLLDNDCHDVCMESTGKYWVPVFNLLEDEINVVIANPKWVKAVKGNKDDAKDSKWIGDLFRLGLVKGSYIPCKKVRILREYTRYRYKLVSCRSSEKNRYQNALTVCNVALDSVVSDIFGKSSTSIIDYLLEQSGSSINHEEIASKLLRSLKSKEDAVIESIEGYQMTDAQKYRMRLVRAHMDYITAEINDVDKMIENVISSDPDFENAVQFLCTIPGVKRDSAITIISEIGTDMTQFSSSKRLCCWAGLTPGSNESAGKKKSVRITRAGVYLKPALVQCAHAAVKSDKSPYYKKKYDSLVKRRGKKRAIIAIARMILTAIYQMLSTGELWNPSDLYKIDMPVALVEKQKAKAIKQAKKLLQQEGLLPPDEPLAS

SEQ ID NO: 262596 - protein, 368 aa, unidentified
MNEPITSFVGLDVHKDSTAIAEAEAGRETPGFVGTVGPDLGQLLKALKSLGKPETMLVVYEAGPCGYGLARQLRSRGYACEVVAASKIARRPGERIKTDRRDALTLARLARSGDLVKVMVPDERDEAMRDLSRAREDAVRARLKARQQLKALLLRHGHRYGGKSSWTIAHERYLATMSFAHPAQDIAFAEYRQAVREGHERVERLTEALRSQTQQWRLKGLVAALASLRGIDFVAAVTLAAEIGDFSRFAHPTELMGFLGLVPSEYSTGETRRQGDITKTGNTHARRVLVEAAWNYRFPARISRILQLRQEGQPKAVREIAWRAQLRLTHRYRRLGSRKLHPNKICVAIARELTGFIWDIARQVKVAN

SEQ ID NO: 262597 - protein, 353 aa, unidentified
MQCIAFDSHKHYTWALAQDETGRVLGERRIDHTPGALCGFLSEFEPGSPVAVETIGNWYWITDEIEAAGMTPRLVNARRAKLMSGSINKTDRLDAQGINRLQRSGTLPTVWIPPKPVRDARELPRTRMVLVRQRTKLKNRIHANLAKYGLEVEDATDIFGVRGRRALAERLEEMPTQTQYATQALLEQVDQLSVRINDLEGRMEDVFGATKELELVRTLPGVGFILGVVILSEVGDVQRFPSASHLASYAGMTPRVHASGGHTRLGRTRPDVNHYLKWAYAEAANVDMVHRRRHPGRHVSCLYERVKRQRGHPKAIGAVGRHLAEATYWVLRNLEPYRDPATDRAPGESTRVA

SEQ ID NO: 262598 - protein, 418 aa, unidentified
MKLFVGLDVSSEKLDVCFLSDDDKLTILLEESLGNDIEGASQIKQKILTFQKVYSFSQIVIGMESTSMYSFHPATFFNEDRELQRINTVVTIENPFRIKQFSRIFDEDKTDKNDAMRIADFLRIQRYTTSPIKEEKYMALQRLTRTRYQLIGQLVETKQHFLENLTYKCNALTRELKNSKTTSSVFGATLLSLMTEDYGLDELAHMPLTDFASLLQEKGNGRFKNPEGLAKTIQRAITMSYRLGEVAQQSVNIILSVLAREIRALEASIKDLDKAIEQLVIVLPEYQCLTSIPGIGKVYAAGLLAEIGQIQRFEDQTKLAKYAGLSWKIKQSGNYQSENTPLTKQGNRYLRYYLVEAANSVRRYLPEYQVFYQKKYNETPKHQHKRAIVLTARKFVRLVDTLLRNHQLYTPPRSVIEK

SEQ ID NO: 262599 - protein, 405 aa, unidentified
MFGTEDVGVFLGLDVGKTAHHGHGLTPAGKKVLDKQLPNSEPRLRAVFDKLAAKFGTVLVIVDQPASIGALPLTVARDAGCKVAYLPGLAMRRIADLYPGEAKTDAKDAAVIADAARTMAHTLRSLELTDEITAELSVLVGFDQDLAAEATRTSNRIRGLLTQFHPSLERVLGPRLDHQAVTWLLERYGSPAALRKAGRRRLVELVRPKAPRMAQRLIDDIFDALDEQTVVVPGTGTLDIVVPSLASSLAAVHEQRRALEAQINALLEAHPLSPVLTSMPGVGVRTAAVLLVTVGDGTSFPTAAHLASYAGLAPTTKSSGTSIHGEHAPRGGNRQLKRAMFLSAFACMNADPASRTYYDRQRARGKTHTQALLRLARQRISVLFAMLRDGTFYESRMPAGVELAA

SEQ ID NO: 262600 - protein, 317 aa, unidentified
MSQLDLFVGIDVAKDELVIHLHPTGTLWRVANNKTGLAMLGRKLTRLAGTTCLRIGFEASGGYERKLAILLHRLALVAYLLDPARVRSFARAERQLAKTDPLDAALIARCLAALHAELTPHVHDPQAIRLAEHVRLRDLAVAQAVQLGNQLESIADTAMRRLIVTQVARLKALALRIEKAIATVIAASPDLAAREVLLRTAPGVGPIVAACLLARMPELGRLSSRQVAALAGLAPFDRQSGKPSRPGRCSGGRPSVRRSLYLAALTIARSGKGDLAATTSRLRAAGKPFKLAIVATMRKLLITLNAMVKNNTKYRNA

SEQ ID NO: 262601 - protein, 388 aa, unidentified
MKIPQSTIRLLTGVTFKEWILDLKEKHEKDKVVPGMEPTGHYWFNLGKFLQDNEMKPVLVNPHHVKKSKELDDNNPTKNDRKDPKVIAGLVREGRYMIPYLPDGVYADLRTASNIRFQLQAELTRIQNRISRWFNIYFPEYKTVYGKPDAKSGMLILKQAPLPEDILTLGIEGVNQIWRDAKMRAVGKARAKTLIEAAEHSVGSKEGAVSARMEIRMLLEDYESRNIRLQEVMTLIAELVNQIPMAEKLLEIKGVGIKTVSGFLAEVGDISRFNNPKELQKLAGLALVENSSGKHKGRTTISRRGRKRLRYLLFEVAMSLVAKNPEFRELHTYYTTRRLNPLKKMQSLMAVAAKLIRVFYVMLTKGVDYDPKKMVGDIKRPAVYLQAA

SEQ ID NO: 262602 - protein, 451 aa, unidentified
MVPDGRQVEVEEHEQIVERVAAIDVAKASGMVCTRVPHQTTPGKRITRVWEVAATTSAIIALADQLAGQGIERVVVESTSDYWRGVVYLLEARGLCVWLVNARDVKQVPGRPKTDKLDAVWLAKLNERGMLRPSFIPPTEIRQLRDYPRLRSDLTQERARHVQRLEKLLEDALIKLSTVATDIMGASGRDMVEALIVGQRDPKVLAELARGRMRGKRAALVQALTGRFDDHHAELARVLVDQIDALGVQIDRLTSRTEELVGAIPAAQPPHDKAGHTGQGTHQHAAPVGLAAVDRLDEVPGIGVKAAQVIIAEVGLDMGQFPTPAHLVSWAKLSPRTIQSGATQRAGATGKGNPYLNGVLGEAAAAAAKTDTFLGERYRRLVKRRGKLKALVAVARSILVIVWHLLADPTARYHDLGSDFYTSRIDTDRKTRTHIRQLQALGFTVTLTPAA

SEQ ID NO: 262603 - protein, 345 aa, unidentified
MKVSTIGVDIAKSVFQVHGEDAEGKAIVQKRLGRQGMVGFFSKLPPCLVALEACGTSHYWGRALRTMGHEVRLIPAAYVKPFVKRNKTDARDAAAICVAARRPDMRPVAIKSEEQQASRALERSRELLIKQRTQLANSLRAMLAEFGIVAAQGGRGFAELTARLRGENPGLPETLVAALRLVAAQLDNLTPAIEAMEDRIKTIAKADPTMRRLSAIPGVGFITAHAVVAAIGEGRQFGCARDFAAWAGMTPREDSSAGKRRMKGVSRQGESRLRKLFALGAATLMRNARSRDDRATQWQRGILARRPMKVAVMAQAAKTARIAWAVLTSGRSYAPPSAAAFSAQP

SEQ ID NO: 262604 - protein, 311 aa, unidentified
MEHSHFVGIDVSKAHLDVHVRPTAEAFRVSHDEAGISALIERLGPTAPAVIVLEATGGYEVTVAATLASAGLPVAVVNPRQVRDFARATGQLAKTDTLDARVIALFAEAVRPAPRPVPDEQAQALRELIARRRQLVDMLGAEQNRRRLLHDRRLQRHVDAHIAWLEEALRRLDHDLTTLIRSTPVWRETEDLLRSVPGIGPVTACTLIADLPELGRLDRRRIAALAGLAPFARDSGAFRGRRMIGGGRAHIRRVLYMATLTAIKHNPAIRAFYLRLVAAGRPGKLALTAAMRKLLTVLNAMLRDRRPWQPA

SEQ ID NO: 262605 - protein, 320 aa, unidentified
MTYIGIDVSKDSFVAAYPSKCGYTTKTFLNTTSGVRKFIDSLPADCHCVMEATGNYSMLLLYLLQEANILVSMENPQKIKHFSRAMMSVTKTDEVDAKLIAMYGEKMNPAPYKIPSESIILLKQKRTVLRQLKKQLTAMINLQHSLSVLPKQDPTAKVATEQTIKFLRKQISKMEEEITNISNKEFKRQMDLLTSIKGIGENIASALIMATGGFTYFSSAKQISRFLGLCPTYQQSGTSVNVKGHINRNGDAHLRSQLYVIAFSSIRFNSACRETYERLRARGKSGKVAIVAVANKLIRQMFAVVTNNRPYIDGYVSTLA

SEQ ID NO: 262606 - protein, 408 aa, unidentified
MNTLYVGIDVSSKSNVVYLMLPNGDKHSNFSVANSHEGSTLLVKKIYSALTSHSLDTVLIGLEATSVYGDNLVYFLREDATLAPFNRKIHVLNPKQVKKFHDTYNDLPKNDYVDSFVIADCLRFGRINKEVYMGEYRYKALQNLTRARFFAVQNLVKEKQRFMNVLFKKYSTMTQEKVFSDAFSTTALAVYDEFESAEALANMDLHELTDFIIEKGKNRFPDPDAVAKAIQKAARSSYRLPKTVNDSVNQVLSISITSMKALESQIKEFDKAIIALMELLPNVLISIPSIGPVYSAGIMAEIGDINRFDNQASLAKYAGLAWKQHQSGGFEAEVTRLIPSGNRFLKYYLCEAAFSLVRCDKEYSDFYHLKYKEVNRCQHKRALALTARKFVRLVFRLLKDNRLYCPAK

SEQ ID NO: 262607 - protein, 307 aa, unidentified
MCCVLMVVIAPKKFANTTKGHDELVSWLKGHKIDHAHICIEATGTYMEPVAECLYDAGYIVSVINPALGKAFAQSEGLRNKTDTVDARMLAEFCRQKRPAAWEAPHPLERALRALVVRHQALTDMHTQELNRTETAREVQRPSIDAHLLWLEAELKRLEKQIKDLTDDDPDMKHRRKLLESIPGIGEKTSAVLLAYIGLKDRFAHARQFAAFAGLTPRRYESGSSVRGASRMSKAGHVSLRRALYMPAMVATSKTEWGRAFRDRLAANGKKGKVILGAMMRKLAQVAYGVLKSGVPFNASRHNPVAA

SEQ ID NO: 262608 - protein, 354 aa, unidentified
MSQTPNTAIAVIGIDIGKNSFHVVGHDARGAIVLRQKWSRGQVEARLANIPPCLIGMEACVGAHHLSRKLASLGHDARLMPAKYVRPYCKGQKNDFNDAEAIAEAVQRPTMKFVATKTAEQLDLQALHRVRERLVSQRTGIINQIRAFMLERGIAVRQGIGFLRTELPTILATRTDALSPRMLRVIEELAGDWRRLDQRIDGLSGEIEALARQDQACSRLMTVPGIGPIISSAMVAAIGTGDVFSKGRDFGAWLGLVPKQISTGDRTILGKISRRGNRYLRVLFVQAAWVVLVRIKNWERYGLKSWIEAAKRRLHHNVLAIALANKLARIAWAVLAKGRAFELTRTDDAGVRPA

SEQ ID NO: 262609 - protein, 347 aa, unidentified
MRFATPTAAYYCGIDLHARTMYLVVLDQAGNVRLDRNYPARPDAFLAAVAPFRPDLVVASECVHSWYWLADLCRTEKIPFVLGHALAMKAVHGNKTKSDAHDADAIARLLRGGNLPMAYPYPKERRSLRDLLRTRLRFVRLRARTYGHVHTALRQLNLPPVSSDVKYKSKRGAIAEAIPDVHVRRGVAADLELLDPLDATIRRLERDVEVAAQLHYAQEMAALQSIPGVGLVISLTVLLEIDQVERFDSRQQFCSYARLIAPPQESAGKKVGVGCRKQGNAWLKWAFSEAAVLSAQKDERIGAYLERLTSRYGTGKALGILAHKLGRAMYHMLLKKRVFNIDKFLRH

SEQ ID NO: 262610 - protein, 329 aa, unidentified
MQVLYPRCCALDVHKATVVACLRLIIDGKVIKEVRTFETTTASLMALSDWLADNKCTHIAMEATGVYWKPVWHILAAGDFELVLANAAHVKNVPGRKTDVSDAEWLADLLAHGLIRASFVPDTPTQELRALLRTRKQLVREQSSHVLRVQKTLEDANIKLDSVISDVMGKSGRAMIKALITGVTDPAKLALLADGRLKASPAQLCEALRGRVTKNHRFLLRLHLRQIDALDDAIAAIDRQVEADIEPFRAAVKRLITAPGVKTLGAQVILSEIGLDMSRFPSAAHLISWACICPRSDESAGKRRSTRIRKGSPWLKTTLVQAAWAAVNS

SEQ ID NO: 262611 - protein, 341 aa, unidentified
MLEVNTIGLDLAKNVFQAHGADASGAVVFRKKLRRNQILTFLATQPTCTVAMEACASSHYWAREITRLGHAVRLIAPAYVKPFVKRQKNDVADAEAICEAAQRPAMRFVGVKSEEKQAAGIVFRTRDLLARQRTQAINAIRGHLAEFGIVAAKGPFHVTKLTTAIEDDPSALPESARQILRVLVEQMRSLDQKVALLDREIARRAKEDTEAKRLMTIPGVGPITATALAALAPPAQIFKRGRDFAAWLGLTPLQRAAGGKQKLGETSRMGERTLRRLLIIGASAAVRWAMRKGTTADPWLSRLLSRKPTMLAIVALANKTARIVWALMAKGGTYRTSAVAG

SEQ ID NO: 262612 - protein, 455 aa, unidentified
MTRTTTRDRPELKPVNVGAAAIDIGSTMHMAAVDPACADTPVRAFGTFTQDLHELADWFKVCGVTSVAMESTGVYWIPAYEILEQHGFEVILVNARYAKNVPGRKTDVSDAAWLCQLHSYGLLRGSFRPDAEIATLRAYLRQRERLVEYAAAHIQHMQKALMEMNLQLHHVVSDITGATGMRIIRAIVAGERNPDVLATYRDVRCHSSIETIRAALVGNDRDEHVFALTQSLELYDTYQAKMLDCDRKLESLITALTNKGAKPAGKLLGPRVKTKQVNTPSFDVRAALYGVLGVDLTEIHGLGPSLALKLIGECGTDLRAWPSAKHFTSWLCLAPGNKISGGKVLSSRTRRSSSRAAALLRLAATSIGRSDTALGAFYRRLSSRVGKAKAVTATARKIAVHFYNTLRHGMTYRDPGADHYEEQYRSRVLANLKRRAKSLGFVLQAVPCDAEVAVS

SEQ ID NO: 262613 - protein, 425 aa, unidentified
MNDSNQECTKPWTSLTHFAGHDWAKDHHDLVVVDATGQIVLDLRIADTAEGWNELRTRLQAFGHLGVAIETRAGAAVERLLEAGLTVFPVCPKATRHYRERKAPSGTKTDRLEAWALADALRTDGRDWRPLRPEDPLIQELRLLCRDEMGLIEQRTALVNQLQQALYEYYPAALEAFDDWTQPFTWTFVERFPTPQGLVRAGKRAWEKFLHTHKLYRPETCAKRLDLFARAEAFCGSPAVTNAKSRLAVALARQLRVLQTQLDEYRRRIEELFNQHPDAGLFGSLPGLGEKLAPRLLSELGQDRQRFPDPQALQCYAGTAPVSFQSGQIRKALFRRACNKSLRATVHLWANLSRARCTWAEVYYRQKRAQGKSHACALRCLGQRWLKILWKMWQTRTGYDEQRHTQNQIQHGSWVLALNPTPASH

SEQ ID NO: 262614 - protein, 341 aa, unidentified
MSESALIGIDLGKHTFHLHGQDKSGREVFRKKCSRAQMMQFFGNVPSCVVVMEACAGSHFVARQLMAMGHTAKLISPQFVRPFVKGNKNDFVDAEAICEAASRPSMRFVTPKTESQQTLSVLHRMRESLVHDRTKTANQMHGFLLEFGISLPKGLAIMQRLASVLAEHELPVRLTVLLQRLHDHFVYLDEQIKALDKELAGQLADDDLGSRLLSMPCVGPITASLLAVEMGDGKQYRCSRDFAASVGLVPRQYSTGGKANLLGISKRGDKHLRQLLVQCSRVYMQRLDHQKGALADWVRSLLSRRHSNVVACALANKLARIAWAIAAHHTQYEAGPDALNA

SEQ ID NO: 262615 - protein, 342 aa, unidentified
MVGLDIAKNVFQLHSVDMSTGEIINMQLKRAKVLEHFANRAACVIAIEACGGAHHWARELTRLGHTVRLLHAKIVRPFVSGNKTDATDARAIWLAVQQPGIKLVGVKSQAQQATLTLHRQRELLMKMRTMQTNALRGLLYEFGATFAKGRKAVFSDIEATLESLAEQLPQMVRDSLREQVARIKALTQDMQAIEKRLSLHLKADPAMQRVAQIPGVGLLTATAAIATMGQASAFKSGREFCAWLGLVPTQSGTGGKVRLGNISKRGDTYLGTLLIHGARSVLAHAKQPGPWLEALKSRRPNNVVIVAQAAKMARTIWAVTAKQADYQRGYQSVRAGAAMQAA

SEQ ID NO: 262616 - protein, 346 aa, unidentified
MNETAMYWVGVDVAQGTFDAAVASPGQHANTVTFKRLPVATFDRTPEGVRQFVQWLRGYVPAQDPLLVRAVMEATGLYSIELTALLCKECPELRPAIANPERTSAFRKSLGLRNKTDRMDARALAFFGLERHPDPYEPLSPAQAELRALSRCRDGLIETQKALENQLGQDAPSPLVRKTLKRIIAATQKSVDTIEKDMKRVIRSEEGFQRDYDLLTSIPGVGFVTAAVVLAEFGDLRRFGCARQIGAHAGVTACRDESGQRKRPGHISKKGNAHVRKILYMAAMSASTFNPHMRTVYRRLTARGKEPMVALVVIMRKLLVLMRAIIVTGRPFDTCAKPRETIAQHA

SEQ ID NO: 262617 - protein, 407 aa, unidentified
MELVALYKRVIGLDIHQAQITACALIEEPDGSARIEQRQFGAFKRDRRELADWVSSLRPDEVVMESTGIYWKSPYAALEAIGIRAKVVNARHVKNVPGRKTDVGDAHWLATLARAGLLRGSFVPSAKLRELRLIARQRQKLVGQLASEKNRLHKVLTDSGVRLGVVVSDLHGQSARAMVKAIIAGQSPQEVLKLASRRLKASREEIFDVLQGDLTASHRFVLDELMRHIEEIEARIARFDTRLLAELESERDALALLQTIPGVDLIGAAMLLVEIGTDMESFGSADRLASWVGICPGNNESAGKRKSGHLRKGNLYVRRLLCEFAHAASRTTSVFKSKFLSLVVRRGHKRAIIAIGHKILRTIFFMLKRREHYRDSATDYEALSVQRNAPRWIKSLTKFGFINPANA

SEQ ID NO: 262618 - protein, 442 aa, unidentified
MKEQKAKSLPVIYPNAAGIDISSKEYYVSVNPGVANQSIRSFGSFTEDLELIASWLKECGTDTVAMEATGIYWVSLFLVLEDAGFEVVLVNAKHVKNVRGKKTDVSDAEWIRQLHSCGLLSASFQPDGFTRKLRAYMRHRKNLIEMAATHIRMIHKALEQMNIKIQHVIADVMGKSGQDIIRAIISGERNATKLASCCDSRIKAEKKESIIKSLQGVWKEEHIFELKQSFLLFQAYHEQIKDCDLEIQKHLTDKSGPVQNEEASNIIKPQSNKNNLNFNADAILNQITGTDLTAVFGITTTNAVEIISEVGLDMSKWPTVKHFTSWLNLAPNNKISGGKTLSSRIPKKKNNTGRIFKMAAFAIQRSNNWLAIFYHRIKAKKGAAKAIVATARKIAVIFYTMVKDKIKFNPIPVEQYADGFKIQQVKRLKRQAQRLGYQMVSV

SEQ ID NO: 262619 - protein, 411 aa, unidentified
MDTLYPRCAGIDVHKANVVVCVRCCGRRGKVSEEVRTFSTMTRDLLALADWLAEQGVTHVAMESTGVYWKPVFNILEGGVQVLLVNAEHIKQVPGRKTDVKDCQWIAQLLQHGLLKASFVPPQPIRELRDLTRQRTQLIQERSAAANRIQKVLEDANVKLASVASDVLGASGRDMLEALIAGETDPEELADLARKRLREKIPALQLALQGRVTEHHRFLLRMHLDHVTHLEELIGRLGARIEEAMAPFAEAEQRLQTIPGISQRVAETVLAEVGPNMEQFPSAGQLASWAGMCSGNNESAGKRRSGRCTHGNRWLKRILVQAAWAASHTKGTYLAAQYRRLARRRGRKRALVAVGHTLLVIIYHVLKRGTTYAELGPDFLDRLAPERLTRQLIKRLEALGHKVTLEPRPAA

SEQ ID NO: 262620 - protein, 347 aa, unidentified
MIIIGCDLHTRSEQIALLNTETGEFEERRLEHDDGEARRFYAGLKEPALVGIESTGYTRWFAEMLAELGHELVVGEAGKIRAKETRKQKHDRRDAEHILNLLLRGDFPKIWLPSAEERDVRVLLEHRHQLVEMRTRAQNGLQAIALSYGLRRRRGLWSEAGQKELQKLPLREGRERRRADLLRLVRQLNTWIQELDRGIQLEVAQREEARRLMTHPGVGPQTALAAVLVLGPVERFPDDRHVTSYLGLIPQEDSSAGRQRFGHLTKQGNRLLRWLLVEAAQTASRYDPRLRRAYRRLAFRKGRPVAKVAMARKLAIRLYIMLRDKIDYREFCRRGSHAGMPEEVALA

SEQ ID NO: 262621 - protein, 401 aa, unidentified
MEGPIVSIDVSNGNSHYMCFIKNNKRFGKVKKIDHDIEGFKRLLEDIQKLEAETNEKVCAVFEATGVYTKPLERFLSKNSIKTYIINPLESARKRKEEIHNKKTDKLDPISISKVYYDKEEMMELKKKDETYNWLRKKNRLYEDQLNHLRKYKVTFQNQLSICFPGYLDLFKDGYSDIPMTILKKYPHPDLLKNKKAETVARYLEKNTCHTHKVSLEYALKIIEFAKKTYPGCEKDDVEVEIFKILLDKVIETQRECEKTLNEMITVASTLEEYRYILSIDGIGTNLAARIIAEIGDIEEFKSREALVAYAGLDPHIYQSGDQDGKHLKISKKGNKYLRCLLFLAVGCSIRGAKDNPVNRFYQKKKQQSNPLNSKAAKTACTAKLLKIIYGICKNKTTYER

SEQ ID NO: 262622 - protein, 401 aa, unidentified
MSHDVKYIGRDVHKEAMVIAVQNESGKLVMESVIETKASSILQFLHGLRGELHVTWEEGTWAAWLYDLLQPHVQHIVVCNPRRNALLKEGNKSDKVDAGKLADLLRTGMLRPVYHGENGLRTLRELGRSYQTISKDLTRVMNRLKALYRGWGIPCAGTQVYVARAREKWLSKIPHTGVRRRAELLYQQLDGLQALRRNVRPELLAESRKHKAAKLLRQIPCIGPIRAARLIGLMQTPHRFRSKRQLWTYSGLGIETHDSAQYCFVRGQVHRSKKPQQVRGLNRNHNHEMKEIFKSAATRGSCGRGPFHDFYTGLLAKGMKPEMARLTLARKIAAITLTLWKKEATGGKQKLLGISKRGNSYLRRLLVQGARAVLQQSAKQSSGLSGGWPNSQPASTVTWPQ

SEQ ID NO: 262623 - protein, 467 aa, unidentified
MIAPQGQKPTANGQGRKAPLAVAVVFDPRGGSVPHQENNLQLRFASHSDNMAPAVLAEAVSKGIQGVCLLTYRGLRTEVCRATYRTPVSVICISHRRQTMSEITTAFVGLDVHKESIAIAVAEPGRAAPRFIGTTRSVLAEVEKALSHLGSPADLLIVYEAGPCGYVLARQLAARGYRCEVVAPTMIPRKPGDRIKTDRRDALALAHFARAGDLTPVLIPQEPDEAIRDLSRAREDAVRARLKARQQLKAMLLRHGQRYTGKSSWTAAHERFLATVRFAHPAQNIAFVEYRMAVNEAHARVERLTTALREQVAEWRLQPVVAALMTLRGVDLVAGVTLIAELGDLRRFAHPKQLMAFLGLVPSECSTGESRSLGSITKAGNSHARRILIESAWTYRYPARIGRELQVRQEGQPRTVREIAWRAQLRLCQRYRRLSLRGVHQNKICIAIARELAGFMWDLARQVAPHA

SEQ ID NO: 262624 - protein, 429 aa, unidentified
MSNLFISAGIDIGADFSFMSLALPNQTFIGKPFKIVHNNLNSLEKAVLTIKEAEELHSMKARIIMESTGIYHYPLFCYLRDKGFNVVVINPIISKNSTNLNIRKVENDKFSSKNLALIGLKPDVKTSVMPPDAVLDLRNLVREYYNLMDCRSAYVNKLKGVLRVAFPGYIGVFSKVTVQTSLALLETFPSPADFLSAEESSIISIIRSTARFGGNYAKAKCHAIIEAAKSAQVFGHFVSSNAAQIRLCVSFIKKYDDEITAVLVMMHKLVDERADETFVKQIRLIETIPGAGFLSAVTVICEIGDFSVFKSPKQLFAYFGLDPSVKQSGNFKGTNVKMSKRGSRFARRAIFTIALVGIGVTRNGSANNPVLRDYYLKKCQSKLKMVAIGAVMHKVCNVIFAVLRDNKAFALTTPQQHINNYAFLKSLAA

SEQ ID NO: 262625 - protein, 333 aa, unidentified
MNTPTSDPPAYLSYPALGLDISKLTFDARLLMPAGASFSKQFANTPAGFKALDHWLAQHQAAPAYAAMEATGTYGKALLWHLRLGGHTVCLLNPRHVKNFARSKGRRVKTDATDASLIAEFILSHQPRPWNAPTQGSAQLQALVRRRQQLVAMLGAESNRLEQSPACTASSIRTLMAALRQHLASINTLIEKLLLEDSRLQKAERLLRSIPGVGRQVAVTFLGEVPTLETFARARDLATFAGLTPALQQSGTSVYRRGAMSKEGSALLRKMLYMAALNIVRRPTLALHSTYAAMVARGKAKACALGALMHKILRIAFGVLKHETPYADSLARL

SEQ ID NO: 262626 - protein, 331 aa, unidentified
MFPVGIDVSKNTLDLCILYDGIKGRIKTRNIQNNRHSVENILRWLRLQHCGPEDVHVVMEATGVYHERLATELHDAGFRVSLANPHRSREFARGMGIMTKTDKVDAYMLACYAFLKKPHYWEPPAPEIRYLGALLRRRDVLLGDAQREEKRLEKYLSTDTPADIISSCRRMAQLLREEVSNIERQIKAHIKASPALRRDYTLLNSIKSVGPQLGMHMLVVLRSHNFASAEQAAAFLGVVPIEKRSGTSVRSRPRMSKIGPPQLRAKLYMSALCGKIYNKRMRNIYDEMCLRGKPKMVAIGALMRKLVHWCYGVLKTGTVFNDEGLKQVLST

SEQ ID NO: 262627 - protein, 407 aa, unidentified
MNITCGIDWAEAHHDVAVMDQDGLILGRLKIDTGMGGFGQQRHQLAEHSDDPVSVPVAIETDKNLIVVALQAAGLTVHAINPRAVARYRERHGQAGKKSDPGDAAMLADVLRTDRHQHRALPEISHSGQAVKVLARQHQEAVWTLHQTTSRLRSVLLEFYPQALQAFPNLKHKAALTVLAAASTPELGTKMTSRRLVGLLHRCGRRNDTSLVTQILSDLKTPALRQPAQVELALGHTVIALLGIITAMHTAVEQLETALDAEFDPHPMATILRSAPGLGAVLGARVLAEVGDDRARFATASGLRAFAGTAPVTRASGRTRYVKARKVRNKRLADACHWWAFAALTKSPGAREHYDRRRAAGDHHNAALRNLANKLLGRLWWCLQNNEPWDEQAAWPRISTPTEAAAA

SEQ ID NO: 262628 - protein, 396 aa, unidentified
MPRIWAGVDIGKEHHHCVVVDADGERLLSRRVLNDETSLLDLIADVLSLDEDVLWAVDLNHGGAALLIGLLLGHDQPMVYITGLSVHRASASYRGEGKTDAKDAFVIADQARMRRDLGPLRPGDEIAVDLRTLTTRRADLVADRTRQINRLRAQLLEIFPALERALDLTNKGPVMLLTGYQTPAAIHRSGVRRIETWLRNRKVRSSAALAKAAQEAAEAQHTALPGEKLAAAMVARLAKGVMALDAEIAELEALIEARFREHPHAEVILSFPGMGKQLGAAFIAATGGDMDAFGSADRLAGYAGLATAPRDSGRVSGNLRRPRRFHRGLLNAMYLSALSSLKSCPASKTYYARKRAEGKGHKQALLALARRRLNVLWAMIRDGACYQATPPVTTAA

SEQ ID NO: 262629 - protein, 316 aa, unidentified
MVAEWYVGIDVSKAELVVAVRPGGERMTLANDRAGIKRLVGRLGELKPLLVVVEATGGLQRQVVAGLWTAGIAVAAVNPSWVRNFAKGRGVRAKTDRKDAELLALFAERERPEARPPADAETQALQELVMRREQLLEMLVAEKQRFKRASGSMHKELRHHISYLEGRIKEIEEQIDKTVRRSDAWRRKSEIIRSVPGFGKAFCAMVLAKVPEAGALNRKQIGALVGVAPMPDDSGSRHGRRMIAGGRFEVRNKLYMCAMVAVRANPVFKQFYERLVARGKPKKLALAAVMRKLIVTLNAMLKTNRMWRPPCPELSV

SEQ ID NO: 262630 - protein, 427 aa, unidentified
MEVIHPRCAGIDVSKKDAKVCVRVQGRGRKATSSTVTTWTSMTGSILALREHLIAERVTCVVIESTAAYWKPFYFLLDDALNVVLVNARHVRNVPGRKTDVSDAAWLAELGAHGLVRASFVPPEPIRVLRDLTRARTTIAQARTKEIRRLETLLEDTGIKLSSVACEITGVSGRAMLEALIAGQRDPAVLADLAKRQLRKKIPALTEALQGRFNDHHAFMVQLYLDRIDAHEADIDRLDARIEEAIAPFQAIRKLLTSIPGWSQIIANVFIAETGADMSVFPTAEHLASWAGVVPGCNESAGRVKSAKTLPGNRHLKAALGVAALSASRSTDTYFGARFRRIAGRRPTRSGTKKSRRQSAAGQTAVVALEHKMLICAWHMLVNGTFYQDPGPDYYTRHHPAKTKASAIKQLQALGYNVTLEPRTDAA

SEQ ID NO: 262631 - protein, 344 aa, unidentified
MIYYAGLDVSLRTVNICVIDGEGELVAETKLASDVQDIIAYLDGLELDLAGVGLEAGTLTQYLTYGLQAAGFEVVCMEARQVKGALSAMRNKTDKHDARGIAQILRSGWYSRVHVKSMESHHIRMLLSSRKAVLSKCVDLENEVRGLFKIFGIKLPPKLGHGAYDIAVRDIIETDETLSQALLPLLDARLFLYQTFRVLDNRTRKMAHADPVCVRLMSVPGVGFITALTFKAGVDDPHRFKRSRTVGAYFGLTARRFQSGEMDIDGHISKCGDADVRGTLYTAANALLTRSSRWSPLKAWGMKLAKTRGHRRAVIAVARKLAVILHRVWIDDTQFRWGNEGARS

SEQ ID NO: 262632 - protein, 349 aa, unidentified
MYFAGLDVHLKYVSIAVLDRMGQVALETSVSTREPEQLLAALAPYRPLEVVVETCPFWPWVYDLLVPAGIGFHLAHAKQLRAIAAAPQKNDAVDARLLARMLLSGLIPEAYPRSPDQRDLLRLLRHRTTLVRYRTRLAGRIHSQLHQQRLSLPREQLLRRATRGWLQETAWPRLTVEQRAIVTTHLELIDRLAPLIDALERRIATAAAGHTTAPLLATIPGIGPYRGLLLAAELEPITRFRRAEYLVSYAGLAPVTRSSGGHTHHAGIPKGANRWVRGALVSAIPTHARCAPTSAVSVAYAQLTARLGWRVARVAAARKLARVVYIMLTRRTPWHGAPAAGDVRDEVLR

SEQ ID NO: 262633 - protein, 373 aa, unidentified
MKDYSEVFVGMDVSKLRIAVGLAEGGGAGEARFLGEIEASEPAVTKLIRRLSGQHDKLTFCYEAGPTGYGLYRLIGGLGHECRVVAPSLIPRRPGDRVKTNRRDALGLARLLRAGELSAVWAPDERHEAMRDLVRARSAAAFDLRVKRQQTGAFLLRLGRVYPGKKTWGGAHRKWLASQAFAHLEQRIAFEELLAAMDEAKARVARLEKAIEEAVPDWSLAQTVTALMAMRGVDLVAATAILAEVGDLGRFRTPRELMAWLGLVPSEASTGDRVRRFGITKAGNGRARKALIESAWCYRFPARIGQAKRARVEAAPPAARRIAWKAQTRLTARYRALRRKGKVKAVAVPAVARELAGFIWAIHRALATEPAVA

SEQ ID NO: 262634 - protein, 348 aa, unidentified
MRFYTQQHRYTCGIDLHARSLYVCILDDTGQTCVHKNIKATPEALLKLIADYRDDLIIGVECMFSWYWIADFCADQGIEFVLGHALYMKAIHGGKAKNDRIDSEKIARLLKGGMFPCAYVYPREMRSTRDLMRRRIKLSRDRGELMAHIHNTLSQYNLPAHPKNLRYGLHREPMRHAFSDPSAQRSVDLDLDRITFYDEQLSKLEWYLKRSAKSFDANTIIRLKSVHGIGDILSLVLLYEIHDINRFPRVQDFVSYCRLVKCQRESAGKIHGTGGARIGNPYLRWAFGEAAALFLRGNPEAQRWLEKKTRKHNKAKALTILAHKLGRAVYYMLKREALFDQDRFLASS

SEQ ID NO: 262635 - protein, 340 aa, unidentified
MKNIATIGLDLAKSVFQLHGMDHEGQTVLRKKVRRAQVLKFFATLPPCLVGMEACGSAHHWAREISAQGHQVRLIPPQYVRPFLKTNKHDAADAEAIAEALVRPTMRFAPIKSAEQQAVLMLHRSRELLVKQRTMLINAVRGHCSELGMTASQGASRVNDLLVSIEDPADPRLPTFAREALGVLMAQLHAVKEAIRTLESKLQTWHRSQQASQRLTTIPGVGVITATALVATIGDGSQFKSGRHLSAWLGLVPRQHSSGGKSRLGRISKRGDGYIRRLLVHGSRAVLRWQRAAPKRPLPWVGELLARRPTNVVLVAMANKTARTVWAMMRDQQDFNAVFR

SEQ ID NO: 262636 - protein, 350 aa, unidentified
MKIVGCDFHPRWQQIAVFDTETGEITGHKLMNGDGEAERFYAGLGSPALVGVEACGNSQWFLDLLARLGHEVWVGDAAKIRASYVRKQKTDRRDAEHILRLLIEDRFPRLWRPTAEQRDLRQLLIHRAKLVEIRARVKNGLQHLAMNRGVQRGSRLWSVRGRAELEKLSLEGWSARRREDLLHLLAELDAQVAELDRAVEQAAFADAGARLLMTQPGVGSVTALAFVVTIGDVRRFAHSGQVASYVGLIPREHSSGGKQRLGSITKQGNRFLRQLLVEAAQTACRVDEGFRREYVARCHHKPKGVAKVAAARKLSVRLYWMLRQGVGYPAIARIESSSGVPLARRTKPKY

SEQ ID NO: 262637 - protein, 392 aa, unidentified
MSSTTVKILNNEEQFVHVAVDLAKNYFQVAYKDPVSGRFVNRQYKRSEFTEFVTNQDTFKKHFYVESCGACQYWCRLAVSHGHKGTVIPASATKTFISNNKSDCNDAKAIWQLSFVPDIKEIHVRSEANQVMGMVLKCREKLIAEKTKISNWLRGQLYELGEITSLGGSEKVLTLSNEVLSKALDSKKEWADMYKLINSSIESVINSIDTQLEEIEQFIKSYVTTDTLCQKLMTMPYIGPVNAYALAYVMEDPKFYKNGREFAARAGTSPSFTGTGGEVRILGVGKKGCTVLKRTIYQPALMMYQRNKVNCEGSDELKEKRTTNSLWISKMADRKPLKKVVCAICNKMARIAWAIAADENCCGYDESKTSLIYQIKRGDIDAIDKSAEEQLN

SEQ ID NO: 262638 - protein, 343 aa, unidentified
MRTITTIGLDIAKSVFQVHGVGADGDVVLRRQLKRRYVLSFFQKLPPCLIGIEACASSHYWSRELQALGHTVRLMPPAYVKPYVKRQKNDAADAEAICEAVTRPNMRFVPTKTPEQQSCLMLHRTRHLFIRQQTALINSIRAHLAEFGIVAPVGRTGVEQLLEVVADANDARLPEIARACVAALGSQLQALKAQILAFDRCIMAWHRSNETSKRLDAIPGVGPALATALVASVADPKAFRSGRDFSAWIGLVPKQNSSGGKDKLGSISKQGDRYLRSLFTAGALAVIRYAKLHGTKHRPWLTALLAQRPTKVAAIALANKMARMAWAMMTRGERYKEPVALAA

SEQ ID NO: 262639 - protein, 446 aa, unidentified
MSKYLNSLVVGIDVASEFSFAAFLTPNGDKYQKPFKILHTAEGFKYFLEQIKKAEEEFSTKPVFFMESTGVYHLTLFHFLKDNNFETFVINPLVTNCNKNKDIRKVKNDRNDALSIASLGKFEDIKVSSDSDIEILTLKLLVRDYYKLIDTRSIFKKKLSTSLCITFSGYQNVFANTCGLVSINILKKYPNPQAIISAPKQDIIELMLNSRKGIKWAEKKYTKLIASAENAQFVSLTSPWLSVSITTSISIYEAIDDEVAALLKKIEEFINSDQMTSAFRKNILLLMTIPGIGYNTAITILAEIGGIDKFITPKQLVAFFGVDPAVNESGKFKGDRVKMSKRGTRFGRRALYAAALASIRTKRNGEATNQVLLNYYKENLKGKKAKVALVAIMHKLIKYLFAVLRNQQEYQVRDPKIHQKMFLENKTIIAAWFILSSPFFYHRSSF

SEQ ID NO: 262640 - protein, 369 aa, unidentified
MGEDTAVFVGLDVAKARHAVALAEDGRQGEVRFLGEIDADPASVRRMVSRLQKRHARLHFCYEAGPTGYGLHRQLLAMGHHCVVVAPSMIPRKPGDRIKTNRRDAMQLARLLRAGELTEVWVPDEPHEAIRELIRAREAAVDDLRRKRQAISSFMLRYGRIYPGKKTWGARHRQWLQTQSFDHAAQQLVLQEMTLATQHAAERLQRIEANIEEFVPSWSLAPVVDALQALRGIQLINATIIMVELGDLRRFDSPRQLMGYLGLVPGESSTGDTVRRLGITKAGNGRVRRALVESAWAYRYLPRTSTLKHYVHERVSPAVRDIAMKAQARLCARYRSLTARGKKLTVAVTAIARELAGFIWAIGRMVPIS

SEQ ID NO: 262641 - protein, 310 aa, unidentified
MEPVYVGIDVAKAHLDVHVLPTGEAFAVPRDGDNLVNLAEKLRALSPALIVLEATGGLEVIVAATLGQAGLPVTAVNPRQIRDFARAIGRLAKTDTLDAEVIARFAESVRPEVRPLPDEQTRTLSELVARRRQLVEMMTAERNRRSRLSKRSLVKALDRHLVALQKDLSAIEEEIKTTVRGTPIWREREDLLRSVPGVGPTVARTILADVPEIGTLDRKQIAALIGVAPLNWDSGTLRGRRITWGGRAKVRTALYMAALVASHRNPVLRSFYQRLVRAGKAKKLALVAVMRKLLTILNAIIRDQTPWQNA

SEQ ID NO: 262642 - protein, 326 aa, unidentified
MKKISFVGIDVSKDTLDVCVKVAGVKTDSKIQNETAAIRKLLKPFIGKEVIVAMENTGRYNWPLYDVLAQMPFRVYVISPLHLNKSLGLARGKNDRVDASRIVDFIEKNHTELRVWERPSDTIVKLKILLTERALRVKIKRQLLCAKKDYARMKGFGLDKQLNKLNIEEVERLEKQIRIIEQSIVSLLKSDNALYKQVKLIQSIPGIGKILCWAIIAKTQGFTIIDSPRKFACYCGVVPFEHQSGTSVFRRPKVSLYADKAMKSLLHMGAMTAIRCRSDMQDYYNRRVCQGHNKMSVLNAVRNKLIHRVYAVIKNQKPYEYNLVVS

SEQ ID NO: 262643 - protein, 420 aa, unidentified
MIRYVGVDLHKHFAEACVIDRTGKVLERHRVECLRDELTEFARKTLKKTDQVALEATTNTWSVVDLLRPHVKQVVVGNPVKAKAIAEAKIKTDKVDAETLAQLLRCDYLPAVWQPDADTQMRRDLMTHRTALTSRRGRHANRVQAMLSRLMLRPPMKRLWTNAGVAWLESLELHPHDRMLLDSHLRQWRHAGEELERVDRLLVEIARADPRVRLLMTLPGVSHVVAVGLPAALGPIERFKDGSHAASYLGLAPSTRQSGNKRYHGRITKVGNPQARGLLTEACQHVARHPGPLGAFYQRLAKRKPRQAAIMALARKLVTVAHLMLKNDEPYRYAQPMLMARKFTKLERAYRPEESGKPRPARARAAHGLAAVYDEIDLPPTTGPDALAGGERKMLLNKGLMRYVEELYAPRTKKVADSVP

SEQ ID NO: 262644 - protein, 389 aa, unidentified
MDEAGKVLVKRRLPEGAAGMTQLHALIGRFLPEDADDAEVVIGIETDRGPWVAALVAAGYVVFPVNPLQASRYRERHGVSGAKSDGGDAHMLADMVRTDSHQLRPAAGDSPEGQGIKVVARAHKTMIWDRTRATQRLRSQLREYVPAALAAFEDLDAPDVLELLGKAPDPDRARRLTRAQVAAALKRARRRDIAGKTDAILAALRGEHLGQPAALTAAYAATARSLIAVITTLNAQVKILEDQVRDHFGRHPDAEIYLSQPGIGAILGARVPGEFGDDPCRYVSAKARKNYGGTSPITRASGKKKVVAARFIHNDRLIDALMSWAFASLNASPGARAFYDEQRAKGLDHNDALRRLANRLVGILHGCLKTRTPYDEATAWSHRESSLAA

SEQ ID NO: 262645 - protein, 461 aa, unidentified
MSKVSEIKKKKEFSSREGLKMERFGLLFPRSAGIDVGSMLMVVSYTDRNDMINVREFNSFTQSLVELSELLQGEGVEQVVMEATGEYWKTLYCILESHGIQVLMANPSHYRNVSAQKTDINDAQWLHQLLAHGLIRSSHIATELYRQLRRYVHERKTCQDLKSDTLNRIQKTLTLMNIKFQHLISDIEGISGMKILRAIISGVSEPETLLNLVSLNRLKASPEDLVSSLEGDYQEHHIHILTSMMKAYDFHKSQMLEYETYIEATLEKLVPVSGSGEALAVIGKKKVKARKNEYHFNLRDYLESIFGVDLTAVDGLDEIGLLAILSVTGTDMRKWPTASHFASWLNLSPRPKISGGKKIGNEKRSTNNPATQAFRLAANSLWQNKGPIGQQYRKLAATKGSAKAIKAIARKLAIVFYNMVLKKEAFDPKKIQQNVEIREAKRIARLLKDAANMGYTIQKVA

SEQ ID NO: 262646 - protein, 394 aa, unidentified
MGKLYVGIDISKDRSSAKGINEHGESRFEISFAMDGTGFAELLKAIRANSDGYGDVTAAMESTACYHINLYSFLSAKGIDTVVINPLLISNFAKLSLRKTKTDKKDAGTIAQFILAHKDSVKQLAVSQDLQDIRDMARERESLSHHISATKVEIQRILQTTFPELATLTNPLTKVMLHFIQRFPSARLVSVAKPKVIEEILKEKPCSCRLRFTPKDLIELARKSIATVSPAKEFILSGKIETLLHLEKRCDELSKALTKYCESTIVEDLRIVTSIAGINNKMATTLLAEIGQISNYHSHKNLIAFAGIDPSVYQSGKYEGASRISKRGNRHLRRVIWLMAISVIQHNPIFRKYFMKRRNEGYPFKKAVFATAHKLMRVIFAMLSHRTFFEEQCV

SEQ ID NO: 262647 - protein, 356 aa, unidentified
MKTNAKLNFTGQTIYTGLDVHKKNWSVSIYTADFEHKTFSQPPEPKKLADYLRRTFPGANYKCVYEAGYCGFWIYHALKKENIECIVINPADVPTTNKEKKQKRDKVDCRKLARSLKNGDLTPIYIPSRSNLEDRMLIRSRFKLVGNRTRCKNRIKAILSYYGITIPEEMDTGKWSKRFINWLRSIDFQEETGKLTMEIFIMEFENINSLLRSLNMKIIALSKTKKYNAHVKNLKTIPGIGLIVAMTILTEFENINRFRNIDKICSYVGLIPNVYASSETEYIGEMTRRGNNWLKTMIIESAWMAVKKDPALLFYYQELTKRMKGNKAIIRVARKLLNRMKYVLKNQQPYEIAVLK

SEQ ID NO: 262648 - protein, 367 aa, unidentified
MMGWMAPLRHLSAKLLSDRISSEWEPSMGEVTTIGLDLAKHVFQVHGVDAEGATVLRKQLRRAQVLAFFSRLPPCLVGLEACATAHYWARELRALGHEVRLMPAQYVKAYVKRNKHDAADAEAICEAVVRPTMRFVPVKTADQQAAVLLHRGRERLVRQRTGLVNALRGHLAEFGVIAPQGLRNVGKLIAIVRDERDARLPDLARQVLQVLAAQIEQLEAAVAAIEKQLMAWHKSNPVSQRLASVPGIGPIIATAIAATVVEPSGFRSGREFAAWLGLVPRQNSTGGKHRLGGISKRGNQYLRRLLINGASANLLRSKATNADPWVIRLRQRRPSLVVAVALANKTARIAWAVMHRHENYQRVAAAA

SEQ ID NO: 262649 - protein, 333 aa, unidentified
MDLHRRRSVLVRMTEDGRKLETVRIGNSPAALRAVLARAGRNPRVVLEATYGWYWAADVLEAAGAEVHLAHPLGVKAFSYRRVKNDERDCADLADLLRLGRLPEAWIAPPPVRAVREVTRYRHKLVQQRTSCKDQVHAVLAKAGVAVTWTDVFGRGGGRWLDALVLPQPYAGKVASLRALIGVLDGEIARLEEEAAAMLAGDSRYAAVRQLPGIGPVLGAVICAEIGDITRFGKPGQLCSWAGLTPRHRESDLKVTRGHVSKQGSRMLRWALTEAIQHQPAGTRPRDVKEAITARRGTQARNIAKTAATRVLLTQVFYSMRDGRVRSAARPAA

SEQ ID NO: 262650 - protein, 313 aa, unidentified
MSQFSVFVGIDVSKDHLDVHVLPEGQAWRVANDATGCAELSERLSGLTGSVLVVMEATNVFWRLAATKLASAGLSAAVVNPRQVRDFAKATGQLAKTDAIDAQMLARFAEAIKPPVRALPSEQCQVAGELLARRAQLMGMLVAEKNRLSTARAAKVRKDISATIAFLEKRLAALDEEIDQWLKSTPIDQSRVNLLKSFVGIGERTAKSLLISLPELGSLTSKQIGALAGLAPFARDSGHKRGQRHIGGGRSIVRAALYMPAIRCNAVIRALYERLIDAGKHHYVAITACMRKMLIILNAMLKSNQPWKSQQEV

SEQ ID NO: 262651 - protein, 337 aa, unidentified
MHLQGKVEGATPSESFQISTQGIHMYKYIGIDVSKATLDLYDGKKSYKVSNDTIGFKEVEKLSTKAEELCFIFEPTGIYSHAIILYCQKHKIKAIIVGSKEARDYARSIKQRSKTDKIDAKVLYRYHTQIAQEHITVPFLDTHMRKVTQRRNVYEKYQKVILQLNNLIEATDKADRVLLTSLKKQIVSLEKSSEKLLVEIEKLLLNKEEHKEAFMHLQTIPGIAKKSALVILMEFLRYPEAKSNEMVALMGLDPVLKDSGVFRGKSRISKQGGKYFREKLYMSTVVAIQYNDRLKCFYERLVQNGKPKKLALIAAMRKLLRIAYAVIKNNEPYKALV

SEQ ID NO: 262652 - protein, 307 aa, unidentified
MRPCIGIDVSKATLDWAEGSQGEIDQALNQPRDIRHLVAHLVRLDPERVVVESTGGYERALVARLAALGLPVVVVNPRRVRSFGEGMGFLAKTDAIDARLLALFGEKACPEIRPILQGRDRLLADLVARRRQLVGLLVAEKNRQETAPAAVRSTIAPLLRVVAQQIAKLEQRIDTALREDVEQAELLDLLQTVPGIGPAVARTLLVDLPELGTLGRRQIASLVGVAPFARDSGTFRGHRRIRGGRASVRTALYLAAMTAARFNPTLKVVYQRLRDAGKPPKLAFIAIARKLLVALNAIARDRAAWQP

SEQ ID NO: 262653 - protein, 354 aa, unidentified
MNKIKQLNFEGKVIYCGLDVHKTNWKINARMEGIEMAAFSQNPDPLLLKNYVDKNYPGAELKVVYEAGFCGFEIQRSLKSLGIECIVVNPADVPCSDKDRKRKDDKRDARKLSIELAKGNLKGIYVPDKQMQDARSLVRQRHRLIQDQTRCTNRIKHLLLSNGIKTSEKSERWSLRFIRKLQQLDCGSISLKTSLQFAIEQYLQIRRILKEITLAIRDLSKREPFIKVQAVLQSIDGIGLINGMVIQTEIGDIYRFKRLDSLCDYAGFVPDIYSTNDKMVVRGISKRGNEFLRETIIESSWTLIRKDPAMLMKYNEYRSRMSANKAIVRIAKHLLSRIRFLWKNEQTYERGITG

SEQ ID NO: 262654 - protein, 369 aa, unidentified
MKKQIAYIGLDVHKNSITMALFAGNSEKEEFTKRSSNTIQELLKTMKKLSEEYYLRVCYEASGCGYKIYRKLRNEGIDCIVAAPSLIPKENKKIKTDKIDAIKLAKYLRAGLLTAINVPSEEQERDRDLVRFRDFQVRELIRSKQFITAFLLRKGIDYSEFTTLFSKKFMEWISKLELSADDRTLLNRLIAHYDYQNKLIDELTRDIEELSNSEKYKDMNKILRAFRGIDTLTSMTILTHIADFRSFPHPRKLMSFIGLTTGEDSSGDTICRKGITKTGSVFLRKAFITASQHYNSNRTGRSIREKRQDIPSAIAGIVARADSRCRKRYYRLLAKNKPFNVAKTAVARELVGFIWEAMMCYHQGELSKV

SEQ ID NO: 262655 - protein, 455 aa, unidentified
MSVLNVGIDLAVTGKHQADIRDEKGNRVRSGFSFYAVKEEFDALCEHALRNAPEGTKLRFICEPTAMAWFPLAIYALTNGHEIVRVKAQKAHALRKYYSKYKKGDKIDAKVLALMPVVDRDALDEIYLPGRLVYVLDRRCRQREKISKNITATKARLQSLYHWVMPGLSVCFSDPYSTRAIAFYGKYSNPFKVKKLGLSRLRTFLQKSCRQQMAPELPEKIYQAALAACELYKSSSEQIDFDEIQQEVNCELQLFEANVKVLTQIDNAIKKLYEQAHPSKNIETLPGISDILGPVYVGIIGNPRRFSSQSKVRGYSGMVPKQKESGENAKKGLNISKDGHSRYRRALYLSADSARQWDPQLAKIYFDQMVHKGNCHAKAVCAVVTHLTSRIHRILKEDRPYELRDTEGNPISKKEARAIVLKNFIVPEKVRVRTRNRKQRKKRRDAIAIKCEALI

SEQ ID NO: 262656 - protein, 433 aa, unidentified
MRRTSKTEKEVKDIAAYVGIDWADAEHEIRMMEVDTGQVEAFKLKQKAESLAEWVQGLQERFGGRKVAIAVEQRRGALIYALMTYDFLILYPVNPATLAGYRKAFKLSGAKSDPKDTELLLDLIRVHGDKLRAWVPEDADTRLLQMLVEERRRLVDDVTKLTNRLNSTLKQYFPQALEWAGKLNKEMALDFLTRWPTLRSIRRAGSTAVEKFYREHGMRKQAKIEQRLKSIKEARELTSDHAVLIGSKTKALVIVRQLRVLERSIGEINQQIDELFEQHPDHEIFSSFPCAKKVMGPRLLAAFGGDRTRYESALEIQCFSGIAPVTKSSGKSKTINKRLACPKFLRQSFHEYAGHSIKKAGWARVYYKGMRQRGMKHHAAVRSLAYKWIRIMYRCWQEQEPYDETRYIQSLKRRSSPLASALAAAPSGAGLDD

SEQ ID NO: 262657 - protein, 346 aa, unidentified
MKKIFIGIDFSKEKFDASLIQAEGLKECAPSVHEVFDNKTSGYRRLVKWVKAHAEGFAADAWLFCGENTGGYSIGLSNYLYASGYDMWLECAYKIKHSAGIQRVKNDKADSRAIAEYAMRNYDKMILHKPQSASLTCLREIFLYRHSLVRQKVALTVRRDEKRLTQEKSDARAFMSFTSKHLITEVNKAIAKCDQKIKEIIASDDELREIFDIITSMPGIGVQNATCLVVYTDNFQKFDLDSRKIACYYGIAPFGRQSGTSVNSRPQVSPFANRMIKSLLSQAALAAIKFDMNVHIYYQRLIERGKHPLLVHNNIKNKMLHILVAMVRDRVKYNPDYVYRTNKEIV

SEQ ID NO: 262658 - protein, 357 aa, unidentified
METAYDGRQVVGMDLHRRRSVLVRMTEDGRRLGTARITNSPAELRAQIARAGKNPKVVLEATYGWYWAADTLEAAGADVHLAHPLGVRAFTYRRVKNDERDAADLADLLRMGRLAEAWIAPREVRELREVTRYRHKLVQLRTSCKDQVHAVLAKLGIPVTCTDIFGAAGSAWLDGLGLPQPYAGKITSLRQLTGELTTEITMLSEVITDLLAADRGYQVIQQLPGIGPVLAAVITAEIGDVTRFSNPGQLCSWAGLTPRHRESDTKVTRGRVTKQGSRMLRWALVEAVQRNPADSAAGAVKNAIIARRGKEARNIAKVAAARRMLTLVYYGMRDGQIRALPRSPASLPKARPPQRAA

SEQ ID NO: 262659 - protein, 395 aa, unidentified
MWFAGIDWADDHHDAVVLTDQGQLLGALRVPHTAEGLDHLTRFLRGGASTSGAAEPVICLVETQHGLLITALLEAGFTVCPVNPLAVGRLRPPSGVKTDALDARLLARLGRNDWPALRVLQPDGPLLQELKTLTRDLEGLLREQTRLVNQLTACLKAYSPAALRCFDGLTRQVTLAFLQAFPTPEAAAAASLDQLTQVLAQGHYPHPRQKAEQLAALLQAPQLHALPGVARAKARLRAALRAQLAVLTTQVAAFDQAIQPLFAQHADSAVFASLPGAGRRLAPRLLAEWGEDRTRYASAASVRALAGTAPVLFQSGAFRGVRRRRACVNAWSVLCEPWAKAYYQRKRAQGKTYAMALRAVANQWVRIIYAMWQARQPYQRAIFLAAQHAHGGMVA

SEQ ID NO: 262660 - protein, 400 aa, unidentified
MSHYVGVDISKDNFHFCILTEDSKILSSGEFPMSLQGFSDFFNLLKSLTDTIVVMESSGRFHIPLYCFLVEKSIQTFILNPKIIHRFFEFISANNPSKQDKKDARILALFALNNPQMLKSYPEDPELRSLARLIQKLKTELAEAKTQIKYCLTVLFPEAERFFNIYSHSFLHILHKYPSAKAIKKAKPEWLSEIIKNAISRGKPASFTPQEVIQTAKNSIGVDNPYLSETLIFYIDKLFFLEPRINKLEEILMDKIDKDQQEQMKLISSIKGISQRLAGLFLAEIKDIRNFPNAKKLIKYAGTDPVVKQSGKYKLRMSISKQGSSFLRNILFQMAVGVVKWNSYFRDYFIRKKRDFGSYKKAMIAVVNKLIRVIHALCIKRTFFVHSFSKSILPLEVSHV

SEQ ID NO: 262661 - protein, 392 aa, unidentified
MVVSVGIDVSKDKHDCFIVSSDGEVLADVFTISNTLDGFRGLLQRIQECSAPQDKIRVGLEATGHYSYNLLGFLLDNGLATYVLNPLRTNLYRKSLSLRKTKTDRVDARTIASMLLSDAGLKPYTDTAYHNEELKSLTRYRFDKVKERAKLKSSIARLVCILFPELEKLVPSLHIASVYALLEEFPGAKQVAAAHLARLKALLETASNGHYKRDMALEIRDTAKNSIGSQMPAKSLELQHTIRLIRELNREIDEIEEQIQSIMDELHSPITTIPGLGFRMAAMILAEVGDFTRFDSPDKLLAYAGMSPSTYQSGQLKNCYPHMEKRGSRYLRYALYNATKYVCHWDSAFADYLAKKRAEGKHYNIAISHAAKKLIRLIFAMEKSRQPYCSAA

SEQ ID NO: 262662 - protein, 430 aa, unidentified
MKSNTQNAKIEAITEKTLVLGIDVGSETHYARAFDHRGIEYSKKPFKFSNTEAGFVIFKEWILDLKEKHEKDKVVPGMEPTGHYWFNLGKFLQDNEMKPVLVNPHHVKKSKELDDNNPTKNDRKDPKVIAGLVREGRYMIPYLPDGVYADLRTASNIRFQLQAELTRIQNRISRWFNIYFPEYKTVYGKPDAKSGMLILKQAPLPEDILTLGIDGVNQIWRDAKMRAVGKARAKTLIEAAEHSVGSKEGAVSARMEIRMLLEDYESRNIRLQEVMTLIEELVNQIPMAEKLLGIKGVGIKTVSGFLAEVGDISRFNNPKELQKLAGLALVENSSGKHKGKTTISRRGRKRLRYLLFEVAMSLVSKNPEFRELHNYYTTRRVNPLKKMQSLMAVAAKLIRVFYAILTKGVDYDPKKMMGDIKRPAVYLQAA

SEQ ID NO: 262663 - protein, 455 aa, unidentified
MMTLPNPVQSRRQPPLSAVHSHAAGIDVGAECHVVAVPPACDPEPVRSFHAFTGDLHRLADWLVACGIETVAMESTGVYWIPLYEILEARGLQVLLANARTVKHVPGRKTDVNDAQWLQQLHTYGLLRGSFHPPAEIAARRAYLRQRERLLDYAAQHVQHMQKALTQMNLKLQHVVSDITGQTGMQIIRAILAGTHDPQVLANFRDRRCKRSAADIAQALEGHYRPEHLFALQQAVALYDTYQTQITACDQQIEAALAPLTAPEPPAEPLPPPRSKTRQKNTLAFDVRAALYGIVGVDLTQIHGLGSALALKLVAECGTDLSAWPTAKHFVSWLCLSPGNKVSGGKLLSARTRRTSNRATSLLRLAAVTVGKTDSALGAFYRRLAMRVGKAKAITATARKLATLFYNTLRHGRDYRDPGASAYENRHRERVLHHLERRARQLGYVLEPAPLPGVS

SEQ ID NO: 262664 - protein, 341 aa, unidentified
MEEVSIIGLDLAKNVFQVHGAQPDGSVAFRRKLTRAKLLPFLASTPKCIVAMEACASAHHFGREIAALGHEVRLIPPIYVKPFVKRQKNDMADAEAIAEAAFRPTMRFVAVKSAEQQAAAMIFKTRDLLVRQRTQTINAVRGHLTEHGIIAPQGTAYLGRLTQALEDAEGRLPVPVAALCKLLIANVASLTEQITVLDQQIRAHARHSATACRLMTIPGVGAVCAMAMAALAPPPETFAKGRDFAAWLGLTPKQNSSGGKDRMGRTSKMGQRDVRRLLILGATSVVRWAARKGAPAGSWLARMLARKPHLLIAVALANRMARVAWAMMAKTEVYRAEAAAA

SEQ ID NO: 262665 - protein, 359 aa, unidentified
MQTQNKKPTIDFSGQNIYVGIDTHYKTWMVSIYSDEFELKTFGQEPDVDRLENYLHKHYPNANLKLAYESGFCGFWIQRSFAKKGIHCDVAHAADVPGNNKELIRKTDKVDSRKIAKGLRNNELNCIFLPDEQLESDRQLLRSRTKIVRDTTSVKNRIKAFLKFKGINIPGDYKSNKWTKKFIAWLQSIEPGSISSKAAFGSYIDELNFLLEKQKQLNKIIQTLAQSDAYSANIQLLKTVPAIGLLSGMTLLTELGNINRFKKQDHLYSYCGLTPDCHSSGDTERIGKVSRRGNIFIKTVLIECAWVAVRKDPALLLYYKQQLPKMDGNKAIIKVARKLLNRIRYVLKNKMEYQIGIVE

SEQ ID NO: 262666 - protein, 390 aa, unidentified
MQNVANRPGASTAICTSLGAIFVSLELSRSTWLVTSLSPGGGERMSRHSVTGGDVTVLLARLADLQGKAQVRTGRCFPVIVIQEAGLDGFWIHRALRKEGIESHVVDPASIAVQRRRRRAKTDRIDGEALVRALLAYKRGEPRVCAMVKVPTPEEEDGRRLCRELKSLIGERIRHANRLKGLFFAQGITGYEPRRHDRRERLEELCTGDGRSLPPHLKALALREIEVLELLTRQIDTVKAERNALLAAERTADTTPGRVEMLLRLKSIGPGIAGALWSEGLFRHFDNRRQVAAYAGLAPTPWQSGSIDHEQGVSKAGNPRLRAMMVELAWLWLRHQPDSALSRWFHERVRHNGGRLKKRTIVALARKLLVALWKYVTAGIVMEGAVMKPV

SEQ ID NO: 262667 - protein, 449 aa, unidentified
MMEHSSKPVHVESNDDDLVARVAAIDVAKDSGMACTRVPDESRPGKRTTTVWSVRARTSSIIELADQLAEQRIERVVLEATSDYWRPFYYLLEARGLTVWLVNARDVKNVPGRPKTDKLDAIWLAKLNERGMLRPSFVPPVEIRQLRDYTRLRADLTGERSRHIQRVEKLLEDALIKLSSVATNIMGVSSRAMLSALIAGERDPAVLAELAKGRLRIKRTALIEALTGRFDEHHGELADILLGQIDSLTAQIEWLDTRAEQIIADIPAAQARPAPAATTTRDTPPAYLAAVDRLDEITGIGRHGAQTIIAEVGLSMDVFPTSAHLVSWSKISPRAVQSGAKTRPGKTGKGNPYLKSVLGEAAASAGRTNTFLGARYRRLARRIGKQKAQVAVARSILVIVWNLLADPTRRYDDLGPEFYDNRIGPERRKRNHIRQLESLGYTVTLTEVA

SEQ ID NO: 262668 - protein, 367 aa, unidentified
MTNNLRYLGLDVHAETIAAAIAEPDGEVRVLGVIPNRADAVAKLLRKLGPRERLRACYEAGPCGYVLYWQLVRLGIPCDVVAPTLVPTKPGDRVKTDRRDAAKLARCHRAGDLTAVWVPDAAHEALRDLVRAREAAKQDQLRARHRLGKFLLRHGTRPPAGTKPWTQRHRRWLDTVTFAPPAQQATLVDYIHEVDHAGARLERLETALDLAIAAAPPAMQAIMRALQCLRGVRQLTAATIVSEIGPLSRFAHPRQLMGYSGTVPSEHSSGSSVHRGAITKTGNAHLRRVLVEAAWAYRFPPKCGDALRTRQRGQPPGITDIAWKAQQRLHTRYRRLLGRGKPVPHVITAVARELVGFIWAIGIAAER

SEQ ID NO: 262669 - protein, 401 aa, unidentified
MKVCGLDVHKDTIFCGIYDGNKLSEVKEVLTFTEDIRNMGKMLQSEGVRRIAMESTSIYWIPVWNVLEEMDFKLILVNPYLIKQMPGRKSDVKDAQWIATLLHKDLVRASLVPDKRIRGLRSYSRRYVKLREMIVRSFQQMEHILEMCNIRITSLASRNNSVSVQKVIRSIIEGNDSAEELACFIHGRIINSKGEKVRKALDGFIPEHQRFNLELIWQQYQLYQKQLTSIEEEMKKVCEQYYAKEMELLQTIPGVQAQSAMQIIAESGGDMGAFENSGKLCGWAGLRPKNDESAGKYKSTSITKGNKYLRRILVQVAWAAISTKGSYYKMKFEQLSIRKPRKKALIAIARKLLTVIWKILKEEQSFNPGLLPVYNPEKIKAKLKYHTKELEKLQALGYSLL

SEQ ID NO: 262670 - protein, 416 aa, unidentified
MMNHPKMKYTYVGVDSHKDTHTAVFLDCFFEKIAETVVDNMPSEFGAFLSKAEKFKMEGTTLLFGLEDISAYGRMLAVFLKNNGQAVKHVNALLVARERRNRNITEKTDSIDAECAARVLLSKFNELPDAQPDDKYWVLRTLVVRRGFVVKNNISLKNHLHSLLTHHYPNYRSFFKEIDGPTSLAFFMWYPSPSTLDGVTAEELAELLGGPSNGKVGMKKAQEILDSLQDTAVPFQELRDDAVQSTIRQIQFNLRELGRLEETLETALSWFDTTLTTMAGIDTVSASQLLSCIGDIKRFPTPAKLAQYAGIAPVHYSSGKKDRLFANKRGNRELNSLLFLLAGRLVMTFGSANKVINPFFYEYYHRKMSEGKTKRQALKCVQRRIVNILWSMLTHGKEYINPIPYNLPDEVKNQIK

SEQ ID NO: 262671 - protein, 453 aa, unidentified
MLSTVSPPKASETLLCVNPDAAGLDIGHDEIWVCVPTDRATPAVRVFGTYTPDLKALADWLVQCGIQTAALESTGVYWIPIYEILEARGIKVYVVNARHLKHVPGRKSDIQDCQWIQRLHTYGLLTASFRPAADLCAIRSYVRQRAMLIEYRAAHIQHMQKALQQMNVQLTQVLSDITGKTGLAIIRAILAGEQDPQRLAQLRDERCAKSEAEIVKALTGNYRAEHLFTLKQAVTLYDLYTTQIQDCDTELERLWQAQRPVRDQDLPALDASDKRNTHSKNAPTYDARTLLYEVVGVDLVAISGLNVSTVQTILSDTGLDLSAFPSEKHFCSWVNVAPRNDISGGKVLRSRTLKSGNRAGQAFRLAAQSVSRKQDEFGAYYRRQRARLGPEQAIVATAHKIARAFYHVLKHRTPFRSLSADDYNQQVRDREVARLKKKATQLGFTLAPVPASA

SEQ ID NO: 262672 - protein, 418 aa, unidentified
MNEDRNTRGTRRYIGLDIHKKYCVIGGVDREGRVVLHAVRVEHADLEGWLKQKLQPSDHVVFESTTNAWHVYDLLEPLVERVVVANPAKVKQIANARVKTDVRDTFILARLLAANLVPDVWVPPVQVREMRQLLSQRRQLVETHTQIVNRMHSVAHRHHLNHERGKRFNEKTTLWQKDKRLSKIEQFQLELEMENHAYIEKQISRIGKEVAKMSHQKPWADSMIYVMQLPGFGVITAMTVLAAIGDVQRFNSARHLASYSGLTGGLDQSGTHLVQKGITKEGRKELRWAMVEAAQRAVKSDPHWTRKFQEMEKRMHRNQAIVAIARQLLELVWYLLIRRQPYRHFSQERIAYKYLTWAWQMDEAARDGLTRQQFTRYYMMRLGIGQDLTRIVLDSKHPRRLASEAELLALRPELLQIE

SEQ ID NO: 262673 - protein, 394 aa, unidentified
MILVGIDIGKNKHTFSIIDKNSGEILLSPSDFSNNLKGFLFLIQKLSSYTKSELLIGMEDTGHYHFALLKYLLDRRYTVALINPTTTDLARKLQGGITKNDPLDSLTICDVISSNHRNKPYRVTTLNRFDLYEQKQLTRHHHNLKEELNTYKNRLQKCIDIVFPEFNSLFHSKYGIVYMNILKAFSSAKAIANADIRSIRKCFEFKGQGKRISLFAEQLKLTAKSSIGIPSVAEEIQIRHLVSQIELLEKQLSEIDKRIEEFSLKNNSPILTIPGISHFSGTSIISELGDICNYTKASQIIRFAGVAPYHYESSQFTAQHTAITKKGSKYLRKTLYQIILPVISNNEVFYAYYTKKLNEGKGHRCAQGHCIRKLLRVIYHLLCTRQPFNPKLLL

SEQ ID NO: 262674 - protein, 425 aa, unidentified
MNQDNQSFAAFIGLDKSDQKINVTLQRCSTARSERSIIQGSAQALHAWVAALCARFPHQRVAICVEQPAAGLIHALMGYDFVVLFPINPVTLARYREAFTPSRAKDDPTDADLLCELVAQHREQLKVWQPDDICTRKLGHLTQARRSSVNMRTRLSNQLKALLKGYFPQALELCGEDLTTPLACAFLQKWSSLQQLKKARPETIRRFYYAQNARRGDVIEKRLTLIAQAIALTNDPALIESSIVTLQALTLGLRAVHTAIARFDREIARTFTQHPDASLFAALPGSGTVYSARLLAAFGSRRERFESAEALLNFSGIAPVLKRSGQTTIVHRRYARPIFLHQSFIEYANESIRHSLWARAFYQMHKAAQQSHWVIIRALAYKWIRILFRCWQQRTPYDELRYLKSLQKSRSPLLQYLAQPNAQTV

SEQ ID NO: 262675 - protein, 360 aa, unidentified
MASATLTQSVHQRAPDVVIGVDTHKDIHVAVALAPNGGRLGDFRIPTTRKGYDELMTWTEQFGYTPVFAVEGTGSFGAGLCRELVDAGYEVVEVNRPDRSTRRRLGKNDAIDAEAAARAWIAGTATVTPKAGGERVEMIRMLKCAKDSATGSRTRAINQIKAILVTAPAALRERLEPLHRSALIRACSALRPGPLDAPLAAAKRALRTLARRVLALEVEIAGLRDDLDQLTQAVCPALRQTFGVGVDNAATLLTATGDNPERLRSDASFAALCGVNPLPASSGKTHRHRLNRGGNRQANAALHRIAVVRLRWDEQTQAYAERRTEEGLSKAEILRCLKRFIAREVFRILMGGPAVRLKKA

SEQ ID NO: 262676 - protein, 347 aa, unidentified
MNATTYGLDVAKRVFQMYWVDAQTGEIANRRFGRDELIEFLARRPVGRVALEACGSGHWWARKIKALGHEVVLLHAKFIRPFVQTNKTDAADARAIWTAVQQPGMRTVAAKTEDQQAMLGLHRMRALLVKFRTMQVNQLRGLLYEFGATFRAGRVAGLAEIRARMAELEGALPETMIFSLQDQLKRIEGLQSDIDTLEKQIGTWQKQEAACRAIAEVPGIGRLTATALVATIGDAKTFKSGRELASFLGLVPRQSGTGGKIRLGSISKRGDPYLRTLLIHGARSVLWCHAKVPTPWQKGIKERRPANVATVAMANKMARTAWAILAHGVAYRKNHASVRLLNRLTVK

SEQ ID NO: 262677 - protein, 315 aa, unidentified
MDEPRRVTTCVGIDVSKDRLDVHVLPTGEAFAVARDGKGLESLVERLGTLEVSLIVLEATGGFETTVAAALASAGLPLAVVNPRQIRSFAKALGKLAKTDAIDAEVIALFADKIRPQVRPVASSDARALGELVARRRQVVEMIGMEANRRRHAAGKRLAKTIDRHLAFLEKELAAVDADIDTDIRASPAWREAEDLLSSVPGVGPVTARTLIAELPELGGLDRRKLAALVGVAPFNRDSGAWRGHRMIAGGRTSVRNVLYMAALSAIRHNPVVRATYQRLVNRGRPKKVAIIACLRQLLTILNAIARTKSRWKIA

SEQ ID NO: 262678 - protein, 300 aa, unidentified
MSKASLDLALDGHAGVTRFANDRTGIVKLIKKLRAAATTRIVVEATGGYEEPLLEACCDAGLWVARVNPRQARAFASATGELAKTDDIEARMLALMARLFADRLRPYVAPPSWQRELRDWLRRRGQVVIALQAHKQQAAMAPPAVRKLVARTVAALARELVAIEKTMKALINEHATPALRSSKGLGPVFQATVLALLPELGHLDRRQIAKLTGVAPMNRDSGQGQGKRRIRGGRAPVRVALYMATLSAVRWDPTMKAHYQQLRARGKLGKVALVACMRKLLGIINARRRDELRSEALALA

SEQ ID NO: 262679 - protein, 349 aa, unidentified
MKKIFIGIDFSKEKFDATVIKAEDLSEMLSVGHQEFINKVSGYRKMLRWVDSLCGADTCEDWLFCGENTGGYSQMMSDYLYSKGYDLWIENALSIKRAFAMKRGKSDRSDSLMIAEYAMRYQDKACLYEPLSPALSQLREVFLYRHMLVRHKCSFEVRRIEKRLTQQKSSAKTMISQSSRHILTELKHEIQKCDQRIQELVRSDEELSRIFGIITSMPGVGTLNAVCLMVFTNNFTKFDYNARKVACYYGVAPFARDSGTSVHSAPKVGYLANKMIKSLLSQAALGGGDFCPAMSMYYHRLVDKGKKPMVALNNVKNKMLAIITAMVKNECKYQPEYVSINAGSEMLNK

SEQ ID NO: 262680 - protein, 401 aa, unidentified
MESPIVSIDVSNGNSHYMCFIKNNKRFGKVKKIDHDIEGFKRLLEDIQKLEAETNEKVCAVFEATGVYTKPLERFLSKNSIKTYIINPLESARKRKEEIHNKKTDKLDPISISKVYYDKEEMMELKKKDETHNWLRKKNRLYEDQLNHLRKYKVTFQNQLSICFPGYLDLFKDGYSDIPMTILKKYPHPDLLKNKKAETVARYLEKNTCHNHKVSLEYALKIIEFAKKTYPGCEKDDVEVEIFKILLDKVIETQRECEKTLNEMITVASTLEEYRYILSIDGIGTNLAARIIAEIGDIEEFKSREALVAYAGLDPHIYQSGDQDGKHLKISKKGNKYLRCLLFLAVGCSIRGAKDNPVNRFYQKKKQQSNPLNSKAAKTACTAKLLKIIYGICKNKTTYER

SEQ ID NO: 262681 - protein, 324 aa, unidentified
MTTQSVGIDVGKEELVVCIRDTDGNLTTPVSFPNTSTGIKKFAGYLKKHGITPEDPILLESTGPYHWMTARMLADDGFFVKVANPLHTKQIARLSIRKRKTDKVDATHLAFLASQSYGYRFIETAEMAKKKALVRHFWKLRTTATNLLVHERYLKEYRQVSRASVSALLVKRCEKLKKEIVAEWSVGNDVKYLDSIPGITPFLASTILAELLPLERFQRIDQIIAFAGLDPSVKQTGGKRGTHGPISKRGSPTLREALFLAAFGSFSKEPMKSLYKQYKDRGIHHNAVLCILSRKILRIAVSLLKKRRVFDIKKLSTPKELTRT

SEQ ID NO: 262682 - protein, 453 aa, unidentified
MPIIRPNAIRIKRFRDLKADLRTRRDRLLVGIDIAKAQHVAQVRLAHTQVLDGKVDIPNTQAGFATFWAHLQRRQRETGVPEIVCAVEPTGTYHEALAQFLEAQGADVVLVSNHVAHHNRRTLDGTWGKSDPKDAHNLCELLERGLVLFYSRPDGPIAALRRLVRLLRSARVELAAGKARFRNTLLPLLGPAGEPLPAALAASLPAPLLVLLPRAARGGGPAVGGPRPPALTFELTDLAARLVSVRARIAQIEAECVRVAHPLPAYARLRTIPGVGPTVAAILLAEIGDITWYTQFSQLRKLAGLDIQRVQTGQWAGTARISKAGRPLLRWALYQAALGACRTPGWRARRAALLAKRAGDRHAFFKATVELAAKLLRLVWGVWRSGRPYAPARVDGAPAAELAIAPGMARAGRRRAPPAAQGQAEITPPRGSQAGRSSATRPLSRGKGTSRRV

SEQ ID NO: 262683 - protein, 344 aa, unidentified
MLKSRLVITCEVTGMRYGGLDAHKDFVQACWVDERNKVVREERFDTTPNGMALLRKAAQDTRCVIESSTSCYQTYDALKDAGVRIRVAHPLRVKAIAFAKIKTDKTDARTLAELERADLIPEAHIPSKETRNARLLVRQRVFLTKEATRLKNRARCIFLKQGIKTPPNLFTRHAWAETVAQATGNAKLAIDQLKAQLDFLHEQREELNDQIQRTTESSEDAKLLQTIPGIGPFSALLLATEIDGVHRFNDEEHLQSYAGLVPSTRQSGNTSHSGHISKQGNKLIRWVLVQDAWITIRKSEKFRKTFIKISRKKGSKIAIVAVARKMLRAAYVMLCRRQAFSEDA

SEQ ID NO: 262684 - protein, 440 aa, unidentified
MAKVTVFETVHENAAGIDIGASKIFVSPDGIEVRSFDTFTSGYYECVEYLHQKGKTEVAMEATGVYWMALYAMLESCGLKVYLINPRETKQVKGRKTDVKDCQWIQKLFSAGVLRSSFIPEGKYMEARHLIRERLDIIDMGSTYVNKMQKCLELMNIKLKEVISQIHGSSGIKMIKAIIDGTRDKNYLLSLCDQKIKKNKPELILKALEANYNDTYLFMLEENMKSWEEHQKKIRVIDERIEKILQDLCEGKENVQVKSTPKPIRHRAPKITDLHEMMVKMYGVNISSISGLNDYTLLRLVGETGVDMSRFPTVKNFTSWCGLTPKNHQTGKVKKRVKGAACNKAGQIFKECAQGLLNSKYIAIGSFMRKLKNRKDASIAIKAGARKLAEAYYNAITKGIDYVEQGIRKYEQQLKLKEVSILNRLAKKHKMQLVGIEQIE

SEQ ID NO: 262685 - protein, 413 aa, unidentified
METGQKGRIQTRKENIIYVGIDLHKETHTAVMLDCWNQKLGEITFENKPSEFHKLTKKVSRFVTEEKTAVYGLENAYGYGRTLAVWLLEKGHAVKDVNTALSYAQRKSVPMYQKSDSYDAEAVALVLINMLDKLPDAVPDDAYWTLSQLVNRRDNICSHQQRLKNQLHEQLCVAYPSYKQFFGDISRRTALYFWLKYPSPEHLKGKSAEELAAELRPVSHNNCSVKRAEKILELVRMDGQTTREHQASRDVITRSIAGDLEHYREQLEIVETAIVNMLPSFNCTLMTMPGVDVTTAANMLAEIGDINRFPNANKLAKFAGICPIYFSSAGKGKDMCPKQGNRRLQAIFYFLAIQMIQVSTNGTPRNKVFREYYLKRVAEGKNKQQALICISRRLVNIVYGMLKNHTEYREPGQ

SEQ ID NO: 262686 - protein, 342 aa, unidentified
MHATTIGLDIAKSVFQVHGEDANHKVVLQKRMGRAQMIKFFTSLPPTIIGMEACGSAHYWGRTLQDLGHEVRLIPAAYVKPFVKRNKNDARDAAAICAAMGRPDMRFVQVKSVDQQASRGLERSRELLDKQKVQLVNSIRGQLAEFGIIAPQGNKGFAALKALIADKDPRVPALMISTFQLMITQLEQIQAALAEFDKTIKTIVKADPVMRRLCTIPGVGDLTAHAVVAAIGDGKQFDTARDFVAWIGLTPKENSSANTRRQGGISRRGDSRLRKLFTLGASTIMKLARAKKERATVWQSGIMARRPKKVAVVAQAAKNARIAWAVLTSGQNYRKPVAAVAQ

SEQ ID NO: 262687 - protein, 341 aa, unidentified
MLFSGIDLHKRSLVIHTLDADGTTTREAELKSDRAAVTAYFGTLPGPHRAVVECVQSWYWLRDLLAPSGVDLRLAHAKYVKAISYAKVKTDRVDARMLAQLLRVGLIPEAHMIGAEHRETRDLLRSRLQLVTRAVRCQHAVGSLLEKYNAAAPAELPELARMQATLQDEQRTLIRAHIKRVEATLKARLLPTPDVQRLVWVPGIGKLGAYTLVLEIDDVQRFPTVRHFHSYCRLVPGADNSAGKTRHKRSRDGNRYLKQVFHTAAIRAAQYHPEIRQEYRRVARRKGRIVARALIAKEIASIVYFVLRKQEAFNGKFRGHVLTPKPAVWPRLASPNGLTDA

SEQ ID NO: 262688 - protein, 419 aa, unidentified
MQSQAPAAFAAFVGLDWADAKHEVCLQAAGTAQREFLSLEYSPEEINAWVQTLRTRFNGQPVAVCLELTKGPIVSALRTYDFLVLFPVNPLTVAKYREALTPSRAKDDPTDAELQVEILLKHRDKLTPLRPQSPTMRALAQLVEHRRRLVGDKVRLTNRLTSALKNYFPQVLHWFPEKDTAIFCDFLSRWPTLKAAQLARRTTLEGFFRAHHVRSTDLIATRIEAIKSARALTTDDGVIAPNVLLVHALVAQLRVTLQAIADFDQAIAQRAQDHPDFPLFDALPGAGAVFAPRLLVAFGEQRERFTSADELQKYAGIAPVTERSGKKSWVHWRLQCPKFLRQTFVEWAAESTRHSFWAQVYYQQQREKGKAHQAAVRALAFKWIRILYRCWQNRTPYDESIYLQALNRRSAPLLHNLAK

SEQ ID NO: 262689 - protein, 351 aa, unidentified
MQYYVGVDYHKKFSYLSVMDRKGSVVKEGKVANTKEAVNKFLGKEYSRDTSAVLEAGRNWTVMYDWLEEELDEVKLAHPLKVKAIAEAKIKTDKIDAKTLAHLLRCDLVPEAYVPNRDTRIVKNILRQRMFLVKLATMVKNRIHLIIDRHPELKNQIDLQDLFGKQGLEWLKIVALPKEDRRILDEELELLEYLNERIASSNHWVALIGKDDERLKLLMTIPGIGKFFALLIASEIDDISRFKDKNKLASYAGLIPSVFASADKIFHGRIVRHGNKYLRWAFIEAVWPAIRKDLSLREYYESLKARKGSNQAKVAVARRLCIIAYRILSQNRPYRINYSGCPHLTLAEAVR

SEQ ID NO: 262690 - protein, 359 aa, unidentified
MCRVGKPVDSLLSLTLQINIMSIQSKQIIQEPKPLFAGIDVGAEELILVIRKNGTPYKAQKFTNTPADRARLVKKLAKLPGIIVCLEATGVYHFDLSIALHDAGVALMVVNPKASHNFARALMKNSKTDAVDAETLAQYAERMDFVAWARPSGEKIALRGFARRINALTRQKAAAKNHLHALSASQETHKAVLRDVNLSISQLEKRIDRLTKEALVLVGKHPDLERVFLLFTGIKGVAQTSAIALMGELLLLPPGLSNREWVKFAGLDPRAFDSGKSVHKQARLAKAGNRHIRSALYMPALSAKQHDPHVKAYFQHLVDNGKKPLQAVCAVMRKLLHAIHGMLKYDKPFDNARFYAIQA

SEQ ID NO: 262691 - protein, 399 aa, unidentified
MDDDTFWVGLDLGLTRTSVCIMNGQGFPLNEFECDSEVAALTEALAAVAIDRIGGIAVEAGTGTYIVRKLRGAGFPVVVFEARKAHKFLAVRRNKSDASDARGLADLVRIGQNSVSQVHLKTDECQRLRSFLVVRQRFVLMKLAVEGVLRCNFALHGRRLESSHTRKALLRRTETIFASLRSEEGIDLEPDLAPLVMVCDSVRAYLEKSDRDLQAIASSHPVCRLLMEVPGVGPICALSFYSAIGDPNRFRVASHVGAYLGLVPRRYQSGAVSRTLGITKNGNRLTRSHLVMAAAVFARRAPDCPLKDWYLALRGRAGPKRARIALARKLAVILLAMWKQGTHFELDRTGPSGVLSERGPTETGPVAPVGGDWRSQSGTETVTSRSHLRQGSGDNTPGA

SEQ ID NO: 262692 - protein, 480 aa, unidentified
MPRARRLEFGFPDRGPRAPVECWLVLGMGMAVGELQEICDVEDEQILERVAAVDVAKASGMVCLRVPQAGRPDRRRSLVWEVPATTNAVLELAEHLTRERVQKVTLEATSDYWRIWFYLLEAAGLDVQLVKAHDVKQAPGRPKTDKLDAVWLAKLTERGMLRPSFVPPTEIRNLRDYTRLRTDLTRERTRHYSRLEKLLEDALIKVSAVASKLDTVSVRDMIEALIAGERDPQALAGLARGRMKVKHNALVEALTGRFDDHHAELARMLLDQIDSLTRQIGRLTARIEQLIATIPAAQGVDSDGTTGPGAGLAEGAPVLPAIDRLDEITGIGRDSAQQIIAEIGLDMGRFPTPGHLVSWAKLSPRTIQSGAKSRSGPTGKGNPYLKGALGEAAAAAARTDTFLGERYRRIVKRRGKLKALVAVARSILVIVWHLLSDPAARFRDLGAGYYASRTDKDRRARNHIRQLEALGFTVTLAPAA

SEQ ID NO: 262693 - protein, 337 aa, unidentified
MSVYVGIDVHRKRSQLAVIGTKGEVLVNRNVPNGVEPILKVIGGLPPGTPAAFEAAFGTGWLVELLEGYGFEPHLVHPLQCKAIASARLKNDKVDAEILAQLLRADLLPEAWIAPPAVRQLRALLRHRVQLVRLRTLLRNRIHAVLADHGHDRPAGYWSGPGREWLASLSLPAVSREVVEDGLALIDATEVRIDRLDWEIVQRARSDPRVKVLTQLPGVGPFTALVILAEIGDITRFPTARKLASWAGLTPTVRGSDRVAHYGHISMQGSALLRWALCEAAQTAKRSPQFVASFQTIARRQKKIATTAVARKLATRFTSFLFSSCFAVSRVGACRCP

SEQ ID NO: 262694 - protein, 339 aa, unidentified
MNIKRIGLDIAKQVFQIHGVDRFEKVLVRKQLRRAQVLDYFKGIAPCLIGIEACGSSHYWARELSQLGHHVKLIPAQFVKPFVKGGKNDANDAEAICEAVGRPSMRFVTIKSVEQQVIQAEHRIRTRLIRARTALSNEIRGLLSEFGIAIGLGITQIRKALPMLLEDKETRLSARFKLLLSELVEELRQIDTHINEHEERLKAAAKEDDRIKRLLAIEGIGPISASALVAAVGDATQFANGRDTAGWLGLVASQHSSGGKERLGHISKRGDTYLRTLLIHGARSVINHCEGKEDRRSQWVNQLSKRRNRNIATVALANKNARIAWAVLSRRETYLQSVV

SEQ ID NO: 262695 - protein, 343 aa, unidentified
MMVIGVDTHKRSHALCAVDEGTGRVRGSREIKADEAGHQAAVRWARGLDSERVWAIEDCRHVSRRLEQALLAAGERVIRVAPNMMGASRRSQRERGKSDEIDAQSVARAVVKDGVESFPAAYLDERAMEIRLLFDHREDLVRERTRMQNRLRWHLLELCPEVEAKLKRGALSQLRALERLDRRLRQLSPCVRLRIAREELGHIRALTRQADQLERELLELIRAYRPALLDEQGCGALTAALLIGRTAGAERFRSDACFGRQSGTAPIPCSSGQQTQHRLDRGGDRQLNRALHTIAITRAQRDPATKEYLARKEADGKTRKGALRCLKRYLARRFHRLLSDLDR

SEQ ID NO: 262696 - protein, 441 aa, unidentified
MSLNDVIMIDWRGQMTRFATDEFAAFIGLDWADTKHDICLQVAGSDKREFQVLEHRPEVIDTWATDLLQRFQDRPIAIALELNKGPIVEALRKYDGLVLFHINPMMLARYREAFTPSRAKDDPTDAELQLDLLLRHRDKLKPLAPQSPEMRALSQLVEHRRRLVADRVRITNRLTSALKTYFPQVLQWFPNKETQLFCDFLSQWPTLKSAQLARRSTLARFFRQHHVHGEQRINERLEAMKSATALTRDEGIIRPQALLVQALVSQLRVTLEAIGSFDQAIAERAQQHPDFALFEALPGAGAALAPRLLVAFGEQRERYGSAAEVQTYAGIAPVMERSGKRSWVHWRCQCPKFLRQTFVEWAAESMQFSFWARAYYQQQRDKGASHQAAVRSLAFKWIRIVFRCWQTGTPYNESTYLAALQRQGSSLIPNLAKSSKKGENT

SEQ ID NO: 262697 - protein, 398 aa, unidentified
MDVFYPRCAGLDVHKDTVVAGVRLAGDGPVRTEVRTFSTTTPGLLALSAWLAEHGCTHVAMEATGVYWKPVWHVLSDGEFTLILANAAHVKNVPGRKTDVADALWLADLLAHGLIRPSFVPEAPTQDPRALLRTRKQLVREQASHVQRLQKTLEDANLKLGSVLTQIMGKSGRAIMQALIDGERDPDKLLTLVQRGVKAPPETLRAALQGRVTVRHRFLLRLHLRQFDALDAAIAEIDAEVDRDLDPFRQAVRLLRTIPGVSDLTAQVIVSEIGIDMSRFPTAGHLISWAGLCLRNDESAGKRRSTRLRKGAPWLKTTLVQCAWAGTRKKASYLQAQFQRLRHRRGPKKAICAVAASILTAAYHMLRDGTFYQDLGADHFRRTSPEVQASRLAPIPFS

SEQ ID NO: 262698 - protein, 349 aa, unidentified
MKIIGCDFHPGYQQIAMVDTETGEFTQMRLSHSNNGEEARKFYAGLAGPVRVGLEASGQSQWFERLLAELGQELWIGDAGKIRASSDRKQKTDRRDAELILQLLLEERFPRIWVPTPAERDVRQLLLHRAKLVRVRTQVKNQLQALALNQGVQRKRKLWSAVGRQQLENLPLLPWASRRRTELLKLLDELDGSIVALDGAVCEEAHRRPAVRRLMTHPGVGPVTALAFVLTLGPAERFRRGKQVGSYFGLIPSEHSSGGKQRLGHISKQGSSFVRGLLVEAAQSAVRFEPQLRREYQRLAQRRCRALAKVAIARKLAVRLYWMLRADLDYARLIQGSHAEQPESFCGRG

SEQ ID NO: 262699 - protein, 360 aa, unidentified
MQTKVNEKLFDGQSIYVGIDCHKKNWTVTILGEQYEHKTMSQNPDPDILASYLRRNFPGAVYNAVYEAGFNGFYSCRRLRELGINCNVIHAADVPTRQKEKIQKMDPVDSRKLARSLRSKEFETIHVPEPSLEADRALVRQRFRIMKDVTRTKARVRSLLFQFNISVPDRFTLGQARSWSKVYINWLKGLQIEHESLKQTLDNYIRIGELQRKELLSVNKQVRSLSQTGAYRSNYNILISIPGIGFLTAMTFLVQIGDIKRFERLDDLCDYIGLVPMMHGSGDKMHIGKLINRGRKELKIMIIEAAWEAVRLDPTLMARFNELTRRMNKNKAIIRIARKLVSRMRYVLMAQEPYKLGITE

SEQ ID NO: 262700 - protein, 342 aa, unidentified
MNISYVGVDLGSSKFQQVALNAAGASRLNREFVTSEANLIKAFSDMRGEIHVHLEAGELAPWAASVIAPLVKRVVCSHPQSNAWIAKDADKCDRIDAYKLAELLRLNRFKEVHYAPDQPRRNFKQLVQHYDELTAQQARLKTKLKARLRMQGVIVSGARLFSATGRKEVLARIESHELRTAITQLYAVLDQSVVTQNQARLLMLRAAQTFPEIKLFRTAPGVGPIGACRYSAYIHTPNRFSTTRKLWKYCRLSVSHRSSNGKPLRRPRLDRCGCGRLKDVSRKAFDAAVRSRQDNGFKRAYQRALETTHDATHARLTVQRKIVSTLRAIWINQTPYCDELMP

SEQ ID NO: 262701 - protein, 386 aa, unidentified
MQADANQTESSVAVRTDLAAIFVSLELSRSKWLITSLSPGAGEKMSKFVVPGGDVSALLERFEHLQRKASARSGRSFRIISIQEAGLDGFWIHRVLEDSGIESYVVDPASIAISRRRRRAKTDRIDGETLVRALLAHKRGEPRVCAMLHVPTPDEEDSRRLVRERKALINERIRHVNRIKGLLFSQGVSGYEPLNRDRRERLEALMTGDGRPLPKALKAQISRELARLELLIEQIGDVEEARDAVLAEAEHSTRGPALLLNLRGIGPEFAAVLWSEGLSRRFDNRRQVAAYAGLAPTPWQSGQISQDQGVSKSGNPRLRATIIQVAWLWVRHQPTSALAAWFKARVSQNGGHRKKSTIVALARKLLVALWKYVNAGVVIEGAVVRT

SEQ ID NO: 262702 - protein, 360 aa, unidentified
MRLKGGAVDKIYIGVDFHARQQTICYLTTDSGELLLHQLKHQDKAAVRAFYAQFSGDVIVGLEASGYSPWFERLLEELGCEVWLGHATEIRRRARWRHKNDRRDAELILELMLHDEFPRLYLPPLQSREVLRMLRYRQKLIKIRTIGKNSLQALALQAGLAKGPHLFSKAGLQQLRQASMSAAMQWQREQWLQLLEPLEARLLETRLWLKQQSHADQRISRVRTHPGIGLLTALCLVHSLEPVSRFANTRKVTAYAGLDPLERSSAERQRFLGISKGGSRVLRFLLVEAAHTAIRKDAELRRFYQRLAERHGRPKAKVAVSRKLLIRAYIMLRDEIDYAEFQRRAVAARLARQSSRPPCL

SEQ ID NO: 262703 - protein, 369 aa, unidentified
MQENTNVATLVDLRKRKPVGRMTIGIDLGDRRSHFCVLNEQAQVIARGFLPTTISAFRREFEGLPPSLVAIEAGAHSLWANQVLKVCGHDVLVGNPRKIRLITESDRKSDRVDAESLARLARADRLLLAPIQHRTQEKQVQLSVIRARHVLVRSRTALINCARGLVKPMGLRLPASSAEAFAKRAAATSLPELLRVALGPLLKQVEAVNQAIRDYDRQIEQIAATQYPETCLLKQIKGVGTLISLTYVLTLEDPHRFAKSRDVGAFLGFLPREKQSGERAPRLGISRAGNEYLRTLLVQGAHYILGPLGPDTDLRRWGLQLAARGGGGAKKRAVTAVARKLSVLLHHFWKTGEVYEPLRKTQIAESTAA

SEQ ID NO: 262704 - protein, 359 aa, unidentified
MAKVNLARLSEVLETQSDLFHVGIDVHKNSYHVAFHGISGFLQTFVSPADPALVVKQLQKFSPQIVQVAYEAGPTGFELARLLEEGDIKVLVVAPNRVPRPVTQGAKTDRLDCIRLARYSANGILKGIAVPSRAQEAQRSLVRRRHDLVDSIRTVKQRIRSHLLYLGVKEPAGLAHWSDKGVKALWKLPLQTSAKDTLRSLVRELAFLLKERQHIEKQLRAVCRQGDHEKAFECLQTAPGVGPITAATFLLELFDPLRFKSANQVASYLGLAPMVRQSGESKGRAKLRPVGQKRLRSLLVEAAWCWRRKDELAGGKYQRIVAKTAVPQKVIVALARDLAIILWRLSTQQRSYQVRGMAA

SEQ ID NO: 262705 - protein, 386 aa, unidentified
MQKLNDLSRSLTALELDSTLIAVIEMSLSNWLVAGIVPGIERQPLKKLAVDESALLKLLHRWREEAEKAGRRIERTAVAFEAGRDGFWLARWLKAHSIEAHVIHAASVAVSREHRRAKTDRLDSELLKRAFLGWLRGERDHCKMVAIPSIKDEDAKRPNRERESLVGEQSRIVNRMKAALIRLGIRGFNPKLKRAAGRLDGLHTPEGEPIPPNTLAELRRDMERRRLVSNQIRQIEEARLGRLEQAPSDGPHAMVRLLARVIGVGIETADMLVQEVLSRNMRDRRAVARYAGLTGSPDESGRKCREKGLARSGNARVRRGMIQLAWRLLMFQKNSALAQWFRARTENARGTRKTMIVALARKLLIALWRLVREGVVPDGVVLRPTQ

SEQ ID NO: 262706 - protein, 343 aa, unidentified
MKLSRVGVDLAKNVYQLHGVDRSGKTMLKRRVKRHQWFKVLLDKTEPDCVIGMEACASAHHWGRELQARGYTVKLIPPQFVKPYVKSNKSDAKDAEAICEAMSRPNMRFVTVKRVEQQDIQATHRIRAELMTQRTAKANQIRGLVAEYGLVAPKHLSSLRAAIPCWLEDAENGLTGDFRALLQGVWRDLLLLDDRVGEMDKLIKRLADNNEVCVRLQQLRGIGPMTSTAMIATVGDARQYRSARQMAASIGITPKQHSSGDRERLLGISKRGDVYLRTLMIHGARAVVARAKHKDDRLSRWVTNIANKKHPNVAAVALANKTARMAWAMLRNKTDYDPDFAIS

SEQ ID NO: 262707 - protein, 349 aa, unidentified
MRFYTKTHQHYCGIDLHARTMYVCILNATGEILVHRNIRTDQTRFLALIEPYREDLVVSVECIFTWYWIADVCAREHIAFVLGHALYMKAIHGGKAKNDKLDSHKIALLLKGGMLPQAYAYPAAMRATRDLLRRRLHLARQRAHLIAHIQNTVHQYNLPALGVRLGKPTERDGVAACFPDPVVRRMMQLDLDLIAYYDQQLAQLEWQLVKQARGHDAQMYHLLCSVRGIGKILTLVLIYEIQDIQRFPTCGQFLSYARLVRCPKESAGKIVGKSNKKIGNSYLRWAFGEAAVLFLKGNPEAQRWIEKQASRHGKGKALAILAKKLGQTVYAMLTKKRCFDEAKFMAQLQ

SEQ ID NO: 262708 - protein, 339 aa, unidentified
MAILYVGIDLAKNVFAIHGVDEHGKAALVRPSVLRARLHQLVAALPPCTIGMEACSGAHHWARLFMQHGHTVRLMAPKFVAPYRMSGKRGKNDAADAQAICEAVQRPNMRFVPVKSVDEQARLCVHRVRQGLVEQRTATINRIRGLLSEFGIVLAQKAATVRREAAAQLEDLPGWANTAVGDSLSELHRLDERIGEYDRHVVVMAREDERSRALMQLSGIGSTTASALVSTIGNARDFKNGRQLAAWLGLVPGQYSSGGKARLGGITKAGDAYLRTLLVLGAKAVLAAAKNKNDRLSRWAVALEVRRGYWKAVVAIAAKNARMAWAVLAKGENFKLLEA

SEQ ID NO: 262709 - protein, 357 aa, unidentified
MLAEPNEKIEDPTVLDVVVGCDTHRDTHQLEMLTGAGVMISTISIDNDADGYAAAIAWIVEHAPGPRVLVGLEGTRSYGVGLCRAVQAAGLQVVEVEQPKKGQRRGRGKSDPIDAHLAALTVLRMPADRKALPRSDGDREAMRILLVARNEISTTRTAQINRLRALLLLGDDEDRALSRGAMSKAHLDRIGRRRGRRDETREQAVRRGEARRLAIAIRAADLELTANHKQLKTLVQAFAPGLLDRKGVGPFSGAQAIVSFSHVGRCRDDAAFAALAGASPLPASSGRTDRHRLNRGGDRQLNRALHTIMLTRWRDCTRTKAYIQKRRTEGLSDRDIRRCLKRYIARELFRALTAVGA

SEQ ID NO: 262710 - protein, 438 aa, unidentified
MSCSPSTPSDWAAFAAIDWGSRQHAWSLLPAPGGPVQSGVLSATPEAVELWAMELHQRFSARPIAVAVEQKRGPLIYMLGKYDHLVVHPVPPTMSASYRRAFIPSGAKSDPSDARLLLDLLLHHREHLRPLSAETSQTRLLQFLVESRRNFVQQKVDGVLRLTDCVAQYFPQLRTWFGKLDTPLIADLLQRWPELGQLQHCHPGTVRRFLVDHNCRKEELIEQRIQLIRSAVPAVTDEVVIEACSCKAQALSRLIGVLRADIAKLDKRITEVAADHPDAPLFASFPGAGRTTVPRLIAAFGTRRDAYASAADLQCFSGIAPAKITSGNSTAIRIRRACPKFLRQTFHEFAGQSIPHAAWAKLFYQAHLRGDKKHHHAAVRALAFKWMRILFHCWKNNEPYDERKFLDAQARSPHAAGRALSVVLDPKTGFFRPKANSN

SEQ ID NO: 262711 - protein, 312 aa, unidentified
MEKLSYGGIDVSKDRLDVVVLPEGWFFSVSNDTAGWTELVARLRPLAVCAIGLEPSGGYERGIIRALLAARLSVRRINPNKLRQFARARGVLAKNDRLDARLMAEYVAIMPTRAVQRDDAVDRLAEVVTMRRQLCDEHVTVENQTAHLEDAMLRRLSKRRLVRLEADIRLLDKRLAEMVATNAAFARLYELLTSMPGVGPVLAFTLIALLPELGKMGRKQIAALVGLAPYDFDSGKLRGHRSIYGGRMPIRNVLYMAALSASRYNPALKTFSNRLAHANKKSKVIIVAVMRKMITTLNAMLRDNAAWQLKPT

SEQ ID NO: 262712 - protein, 423 aa, unidentified
MDCTTLCIGADVHLDEIVFCAVDKADGHEVTDRFQVTNNLPGAQAAATVIAGLAASLGYTRTEIGWEATGMLWIPFHRYLSGCPQLQPFELELVCFNPQLVTRFKDGLVLRHPKNDPLDAAAVAARLRFGELPLSYVPNDFWQGVRRLTRYRYHLSRNLSREKTRFQAYAFLKCSDWKRVKAFSDVFGATSIALLTEFTVAELSQMTHDQLVDLISHRGRGRFDDPTGTARKVREVLRTSYPIDPQMDEQVTAALVIIWEHIRAIKRLIKRLDQHIAQVIDPVPNPLITIKGLGAVITAGLLAEIADIHRFAEHKHLAQYAGITWEKRSTGRFVSQNTRLTKAGDKYLRYYLILGANSLRRFNLEYKAYYWRKHAEVTRYQHKRALVLTARKLVRLAHALLTKNVSYVRPRTLTGVQEDDLLQ

SEQ ID NO: 262713 - protein, 370 aa, unidentified
MKQYSEAFVGFDTAKKKHAVAIADVGREGEIRYLGEIDSSSAAVERMIRKLAGRYEELHFCYEAGPTGYGLCRQVRGLGHPCTVVAPSLIPKKSGERIKTNRRDAVTLARLFRAGELTSVWVPDTVHEAVRDLVRAREAASQDLRRKRQQLLSFVLRHGRIFSGRQHWSRAHLRWLAQQKFDHSAQQIVFQDAVDAIDDAATRLRRLDEQVVAIVPSWSMAPVVAAYQAMRGVSFVVAVTFVAEIGDLRRFDNPRQLMAFLGLVPSERSTGERVRRAGLTLAGNKRARRVLIEGAWSYRYPARVSQTLQARLEGLPKAVRAIAWKAQIRLCARYRRLTAAGKKVPVVIAAIAREMAAFLWAIARHVAPAP

SEQ ID NO: 262714 - protein, 374 aa, unidentified
MSQSNTLYVGMDVHKESIAVAYVAQDHGAEVISLGTSGTRQCDIDKLLRQLQSKSKPLVFVYEAGPCGYWLYRYLTKNGAVCWVVAPALIPKKPGDRVKTDRRDAMQLARLMRSGDLTPVYVPAVDDEAMRDLSRAREDTLRDLKAAKWRLKAFLLRHDSRSTGRANWSPAHLRWLSEVVCPTPAQQLVFQEYVQTVTEQTERRQRREQALREQVQTWRFQPVVEALQALRGVQFTVAVTTVVELGDLTRFDNPRQLMNYLGLTPSAYSSGARRQQGSITKTGNTHARRALVEGAWAYRYPAKVSRHLQLRLEKLPTAIQAISWKAQVRLCKRYRQLMAKGKHANQVVVAIARELSAFMWAIAQQMAVPSKAER

SEQ ID NO: 262715 - protein, 360 aa, unidentified
MRTVSCAQSEAVARIATRMQLTLIYPIEMSVSQHKDFFMIFVGIDMSKLTFDVAVLLDGRYQSRQFENKTSGFSQLSKWVTSFKKPAYLCLEATGIYGLALAKQLYKTDQKVIVANPLQTHAFAKMEMVRNKTDKADAMSIARYCQYLFNKGEIDKDLFIPRSAVFERVQFLVTRLDQLSKMKSQENNRLSVSLDKTAAQSVKSMLMSIDKQITSMKKEITRIVKQDEALAAQLKLLVSINGIGDKTAWALLAYIGDITLFENAKQISSYAGLNPSITQSGTSINHSSLSKTGSARLRKSLYMPAMVAIRFNPLMVAFYNKLLSKGKPKKVALAAVMRKLLVLAYGVLKSGKPFDVNYQH

SEQ ID NO: 262716 - protein, 346 aa, unidentified
MKINRVGVDLAKNVFQLHGADHKGKAVWKRKLSRGKWLSVLFETVKPGTEIGMEACAGAHHWARLLTHRGYAVKIIPPQFVKPFVKGNKNDANDAQAICEAMGRPNMYPVRVKTVEQQDIQAIHRVREEIKGHRVAKANQIRGLVTEYGLVAPQQLSSLRRAIPEWLEDADNGLTLLFRQLLQGLWGDLYALDQRMAELDQQISVIAKENPTAKRLQQLRGVGPLIATALVATMGDGKQYRKGRDMAAAIGLTPRQHSSGGKDRLLGISKRGDAYLRCLLVHGARAAVRTAKDKEDRLSRWIINLQSRRHSNVVAVALANKIARMAWAMMTREVDYDPDLAAESVN

SEQ ID NO: 262717 - protein, 327 aa, unidentified
MQISTIGLDIAKNVFQVHGIDAAEKVVVRKRLRRRQVLEFFKALPPCLIGMEACATAHYWARELTKLGHEVRLMPAKDVKAYVKRNKNDAADAEAICEAVRRPTMRFVRIKSAEQQGQLMQHRTRDVLIQLGLVVAQGNAGVNELRAIVTDEQDTRLPIDARASVIVLAAQLEALESVIGAIEKRIKMQHRSSEASQRVEAIPGIGVIGATAIVATVADPTIFRSGRDFAAWIGLVPRQDSTGGKRKLGPISKQGDRYLRRILVVGAIAVLRRAQENPGKYPWLTQLLARRPFKVVAVALANKMARMAWALLAHGGTYRAPELAETA

SEQ ID NO: 262718 - protein, 345 aa, unidentified
MTIVEARPVTGGVDTHADTHVAAALDSIGGLPGVQEFPVTPAGYARLLGWLGGSGTVALAGIEGTGSYGAGLARHITAAGVRVVEVDRSDRQDRRRQGKSDPLDAVSAARAAQPGRARGAPKGRDGAVEAIRALMVARRSARSERTQTISQARSLIVTGPDDLRARFTGHTVTALVSELAALRPRPGAVVGYATRIALRELGRRAEFLDGQLERLDEIIIPLVSARAPDLLALYGVGPGTAALLLIAAGDQPGRLRSEAAWAHLCAVAPIPASSGKVTRHRLNPGGDRQANHALWRIVITRMSSHAPTRAYVERRTAEGLSKTEIIRCLKRYVAREVYRYLRPAA

SEQ ID NO: 262719 - protein, 342 aa, unidentified
MNEERKIWCGIDISKNDMTAALDMDGALPVRKLPVRSFKRTLDGLQDMLEWCASQNAALSNLAVFMESTGVYSMEVLQWLRNRFPAIHVSVGNPRHVKHFIEGEHLGNKTDAMDARAIARMGTVQRPCATPPPPPEYLQLQALVRARNDLLTKMRSLEVSMDAMLDKTSVAYSAFVKTTKVMDREIAKIETAIDDLVDRMPEIGRAVELMCTMPGIGRVAAVTIISELGPFSSEFSRSSFSAYTGLQPVQRQSGTSVNSSRLGKNGSPLLRKVLYMCSVHAVKKIPSLASFHSRLVAKGKSPISARCACMRKMLLILRSMVLNQREFQENYVSSFKKKMKAI

SEQ ID NO: 262720 - protein, 337 aa, unidentified
MKTTEKKFNFFVGIDVSKITLDITILNPQSGKLHHKVTDNNDDGYKRLRKWLTAEHSVEFQQTLICMEHTGLYTRSLERFLHENNAYVWKESSLHIKKSLGLTRGKNDRIDSMRIAEYAYRFCDKADIKGYCTSGIQILRDLLTTRERLNKSLKSIIVSINELKRVDPSQAIDLETYQLAAIRGLKASISEVEEAMLEAVEKDGQLSKYCEMATSIPGVGKILSIKLMVYTQVFTRFESVRQLACYCGVAPFEHRSGTSINGKTGVSKFANMDLKSTLHLASLSAIQHNPDLKAYYQRKVAEGKSKMCVINAVRNKLLSRIIAVINRQTPYVVLTQA

SEQ ID NO: 262721 - protein, 339 aa, unidentified
MNVTTLGIDIAKNIFQLHGVDKNGKTVMKKRVSRKKLPEIMVQLPSCLVGMEACGGSNYWSRRFKDMGHEVKLISPQFVKPYVKSNKNDAHDAEAICEAVTRPNMRFVSVKTINQEDIQAIHRIRSRLIKERTALVNQIRGLLAEYGIVIAQGVNNVRGLLPDILEDGDNELSELGRRLFASLLEELRTIDLKIATYDKEVEQICKNSDISKKLIKVRGVGPLIATAIESVIGDAKLFKNGREMAAFLGLVPKQHSSGNKQRLLHISKRGNKYLRTLLIHGARAVLFRGKNMPKKQREWLDALVERRGINRTVVALANKNARILWAIMIKGEQFDMSTL

SEQ ID NO: 262722 - protein, 310 aa, unidentified
MKVVGIDIAKYSFDLHLLPEGKTAHYRNDTQGIQQCRQFLLQVRPERIVLEATGGYELALTLELQTAALPVIVVNPRRVREYARSQGRLAKTDQIDARILAEFAQSPRVQVRELPDAHGRHRRELLARKRQLVETHVAERNRLEHAAERTVLHSIRRILLVVEKEIAKLDKQIAARIAADPQLQRKAEICDSTPGIATATAAVLVTELPELGRVNRREIATLVGLAPMNRDSGQFRGKRTTGGGRVRVRNALYMPMLTVIRCNPVIRPFYLRLLDHGKPKMTALVAAMRKLLTILNTMIKNNQLWNPKIA

SEQ ID NO: 262723 - protein, 406 aa, unidentified
MGYHTEAFIGVDTAKLRNAVAVAESGLNGQVYFYGEIDNTEAAMRKLIRKLESKYKKLTFCYEAGPTGYGLFRLIKELGHNCSVVAPSLVPRKPGDRVKTNRRDALNLAKLLRAGQLIAVWVPDERHEAMRDLVRAREAAHIDYTRNRQQVSAFLLRLGRYYPGKKTWGKAHLKWLAVQKLDNYEQRIAFEELLLAVRQSRERIERLEQAIRDSVPEWSLAPVVEALQALRGIDLISAVVFMSEIGDLSRFASPRQLMAFLGLVPSEWSTGESVIRGPITKAGNRRARRILVEAGWSYRHPPRVGKEKQKKVEAVPRTVREIAWKAQTRLCGRFRKLTRKGKRSTTVTTAVARELSAFIWAINRELARKPCSEQKSQPRPHQACRRAQLSQAQALRVAAERAASLE

SEQ ID NO: 262724 - protein, 301 aa, unidentified
MYDGVKSYKFENTEIGFQQVVSLAEEIKNTILVFEPTGIYSYALTAFCSKNRIHIVMVGPKESRDFARSLKVRSKTDKIDAKVLYKYQSHVEPEMVKIPSVNHEAMKVQEMLNVYESIQSNKQRFKNQIESIAKSNKDLLRTLNRLIDNLDTEAQKLFNKIELLLLKDTEIKESYDAISKIPSIGQKSALYLCAFFLKYPSANAKEMTALLGLDPMMKDSGTFRGKQRISKHGGQQIRNLLYLPTLCAIQHNPRIKKFYEGLTARAKTKKLAVIAAMRKLILMAFSIFKSKEDYQPLLATI

SEQ ID NO: 262725 - protein, 344 aa, unidentified
MYIKCSSTHDLSIQTFHLVALGDNGKVLLKKKFTQKQLIAFTANMQTCLIGMEACSGSHFLGRALREQGHDVKLIPAQFVKPFVKSNKNDFIDAEAIAEAVDRENMRFVPIKTDDQLDLQALHRVRDRLMARRTALINQIRAFLLERGIVFAKSPIRLREALPEVLENVNENLTPRMRNLVAMLWSEWKDLELQIMQMNDEVERIASSDEACRRLRQIPGIGPLVATAIVASIGNGAAFRKGREFAAWLGLLPNQHSTGGKVRLYGISKRGNSYLRKILIHGARAVVLRSKRDRIAMGPWMTSLETRAPRNVLIVATAHKLARIAWAVLSSGQDYRAVPEALTV

SEQ ID NO: 262726 - protein, 342 aa, unidentified
MMDEKRNVIFHTSVASHPFDINASIKKIPARLQDVKVVIEPVCGWRWVTKQLKEAGLEVHIAHPMKVRLIAESKQKTDFNDARTLADLLRAGMLPESYRVADEIYELRVVLRERYFLVQERTAVKNRLHGIVTTQGLHLVDGCNPLQKRGKKWIEKGSNETMKELLEVISELDAHIDLLTKKISGLTKEIPEAKLLMTMPGVGPITALTVVAEVGDFSRFSSPKKLASFAGIVPKQRSSGEKVRLGSITHFGSKYLRTAMVETAMRIREDCAPELYRFVESLAPNCGAKKARVALARKMLSIMWTMVRNNTPYDSNTIEQARLSRLSSAIRKESYLDATPGA

SEQ ID NO: 262727 - protein, 346 aa, unidentified
MMLIGCDFHPSWQQVSWLDVETGETGEQKLVHARGEAKQFYEQLAAPVLIGMEATGNSQWFIELVEDLGHEIWIGDAAQIRASYVRKQKTDKRDAAHILKLLVEGRFPRLWTPDREQRDLRQLVLHRHKLVLIRSRVKNELQHLSLNKGMQRKRRLWSQAGQQLLRELPLKKWAACRREDLLGLLTMLDEQIGKLDGAVEHAAEENPQSKLLMTQPGVGPNTALAFVLTLGDVGRFPRGKQVASYLGLIPREESSGGRQKLGAITKQGNRMLRSLLVEAAQVAVVHDPGLRKQYRHRCHQKPKAVAKVAVARKLAVRLYWMLRTNVAYPEIVRIESSSGLPLVGAS

SEQ ID NO: 262728 - protein, 418 aa, unidentified
MSSEIRIVYPVCCGMDVHKSFIVACIAVTDQSGQTKHHIRRFSTFTGDLRRLAEWLASYNCKDVCMESTGKYWIPIFNILEKTCNVCLTHPKYVKAIKGKKTDKRDAKRISELFKCDLVRSSFIPPLDIRQLRDLCRYHAKLTYMNSSEKNRALNCLTTSNFKLDDVFSDVFGKSATRVLDKLFEQGNSDFDVAPLLDRRCKATVEEVTAALDGEFNVSQSEKLKLIRKHQECISELQTSLETVILRLAEQFQPQISLLMSVPGISTKLSAIRILAEIGVDMSVFETSKHLISWAGLCPQNNESGGKKKTTRIARAGAYLKPLLVQIALAVVKSGKHPELKSKYQMLKKRRGGKKAVIASARRLLTAIWHILNKGEFYNADLYHKADKAPVNRVLTPEQAFALLRSKGYVITEPTTAA

SEQ ID NO: 262729 - protein, 400 aa, unidentified
MLSIGIDVSKGKSTVCGMKPGGEIVYTPFEIQHTREGMSDLVSLLRGSGEEVRAVLESTGSYHCPVVAALLENGIFVSVVNSLRMKRFCSQSIRKVKTDRIDAMQIALYGLAYWQELQPTKLPEDTYRELQLLARQYYQMTSMLIKAKVDFNAICDQVLPGMQELMNDHAGRHKLSDFVLRYRHTTHILEMGETRFRKDYCKWAEKKGYRNCERMAVLIFATAQNGIPVLPNAPSTQIVITEAIRVLHTVEASRDAILTQMQALAKTLPEYSLVREMPCIGDTLAPRLIAEIGDVRRFHSKRALIAYAGIDAPPYQSGKFCANNRHISKRGNRYLRKTGYEVMQSYVMHKPANDPIFTFIEKKRSEGKCGKLAMVAGLNKFLRVYYGKVTELYRSSSAIE

SEQ ID NO: 262730 - protein, 341 aa, unidentified
MSKVPSCPAAWCGIDVSALQLVVALQRGELPVQQRTFSNRSSGHRELLRWLQRSNVTVRVCLEATGVYSLDLALSLHACSSIELAVLNPKAVCRFAETLRRSKTDPADALVLLDYSRRMPWQPWQPPSAAAMTLRSITRRCAALTRQHTMEANRLHAAQASGTVPRCVQQDLKQSLQQIERRLKRLQHAAREMVAQTAESEQRYTLLRSIPGIGESSALQLLGELGTLPPDLDVRQWVAHSGLDPLHHESGSSVHRPAHISRAGNRHLRRALYMPALVGVRFDPYLHAFYERLLARHKTKLQAIIAAARKILHAIFGMFRSRSPYEGSRLFPQLKPVITAA

SEQ ID NO: 262731 - protein, 315 aa, unidentified
MTITSEEYVGIDVAKDKLDVAVLGQKATSEALNTKKGITALVKKMCQLNPKLIVVEATGGYEEGLVLSLFEAGMPVALVSPQRVRQYAKARGLLAKTDKLDAQNLAEYGKNIQPRLFVAKSEAGRRLSAIIGRRRQLGDMQKAEKNRFRTAYAEMRGSIQTVIDCLEAQIEILDEEMRKFMKEHADFGEREKLLRSAKSIGPVTAATLLADLPELGKLDRKQIAALVGVAPMNHDSGKKRGYRKTKGGRPEVRSVLYMSTLSAIRYNPVIKAQYDQLVKRGKQKKVAITACMRKMLTILNAMMRDQVPFMEISVT

SEQ ID NO: 262732 - protein, 330 aa, unidentified
MQTPCDIFVGLDVSKDELVIAYLVGAKWKKRKISNTLDSISEWLSNLDVCGKHFVLEATGAYSERLIYTLAAAGVPFSVVNPGQSRAMSKVLQKTNKTDDQDAQTLSLLGQKMELIAYKMPDRTQKKRKEAFSALASLQKQAQQLKNQLHAFEYRVDPNPIAVKALQDVLASTQEAIQALEKELNPEQDEDEANRLIEQIATIKGVGKSTAKIFVTLFGNFHHFTNAKAFARFIGLSPTEFTSGASVRGRSSICKNGSGKARSQLFNCARCAIQHNQNCKELYQRLVQKGKNGKVALTAVMHKLARLIYGVARSNTDYKPDFALLKTKNC

SEQ ID NO: 262733 - protein, 457 aa, unidentified
MATRHKKIPSKRQPRSLSTVQPNAAGIDLGSREHWVAGPPLPDGSSNVKRFGTTTPELVRLSEWLEQQQIATVAMESTGVYWIPLFEILDSRGFDVHLVNARQISHVPGRKTDMIDCQWLQLLHACGLLRGSFRPGDDICRLRALIRERNTVVDQRSDWIRRIQKSLDQMNVCVHHAVSDISGVTGMAIIRAIVGGERDPRTLARLRDRRCQKSEDQITEELTGNWRPEHLFNLGQALKVYDQLCAVIADYDTEILNSIDSVQPPESKGSSAPPPASKAKACKFVKRGQEPMRQALYRMSGFDLTTIDGIGVDTAAAVISELGPDLSAFADEGHFVSYLRLAPNISISAGKKVQGKFKAVTSTRVCNALRMAATTLRNSKTALGAYYRRISWRKGASVAVFATARKLAQIVYRLMRRGQAYVDTGSDVYEAHYTQRRLVSYARALKEMGYKIEPLAA

SEQ ID NO: 262734 - protein, 375 aa, unidentified
MKNKVRFLGLDVHAETIAIAIAEPDGEVRSLGTIANRADSIRKLVKKLGPVAQLKACYEAGPTGYVLYWQLAELGVACEVIAPTLVPMKAGDRVKTDRRDAERLARSYRSGDLTAVWVPDEGSESLRDLVRAREAAKQDQLRARHRLAKFLLRMGRRPAAGMKAWTAPYMAWVRQVHFAQVAREATIVDYLHEVDHMNERVRRLEQAITEAVKLAAPAVQEVVKGLQALRGIAEISAVTIVAELGNITRFDTARQLMGYSGAVPSEDSSGQRTRRGSITKTGNAHLRRIVVEAAWSYRLRPGIGPALRKRQEGVSEPLKEIAWKAQVRLTKRYARLAAAGKDQRKIVTAVGRELLGFIWSIGIKAEAASKLQMAA

SEQ ID NO: 262735 - protein, 372 aa, unidentified
MNYNTVYVGMDVHKESFSLCAYTIEAEKASHYQRTEADYKKVLNYLEFLRTIYGDDANFICGYEAGCFGYTLYHQLTANNVKCIILAPTTMLEQRSKKRIKTDRRDAEIIAKCLAQHNYSPVHIPTAKDEETKEFLRMRDDHKLALKKVKQQILAFCLRHNYRYDGNSHWTAAHLKWLKALTPEALYKEILDEYLLTYHTLSDKLERLDKRIEELSTQDEYKEAVKKLCCFIGVKTHTALSVLVEVGDFNRFASAQHFASYLGLVPGEDSSGNDQNRLGITKAGNRHVRLLLTEASQCYARGQVGFKSKELKARQSGNTPAVIAYADKANERLRRRYYKMVLNKCKKHNVAKTAIARELACFMWGMMTDNIA

SEQ ID NO: 262736 - protein, 351 aa, unidentified
MYLIGVDYHPSFQTIAFLIEETGECGEQELKHSDGQAEKFYRDLKKREVSVRVGMEATGYSRWFERLLAELGFELWIGDPAQIKAKRVKKQKYDREDARLLLRLMRENNFPQIWVPSPENRDLRQLLWHRHRLVQMRTRIMNQLQALAMNEGKRMKKKLWNEQGRAVLEKLALGPWASRRRQELLELLDRMNPKIEQLTTAAEQEAKKRPDVLRLMTHPGVGPLTALAYVLIIGTPERFPRGKQIGTYVGMIPCEDSSAGRQRLGHVSKQGNSLLRFLLVEAAQAAARSDPDWRRRYVHLAMRRHKSIAKVAMGRRMAIQLYWMWRNGCEHSQSVKCGSYAGQLGHVHGGK

SEQ ID NO: 262737 - protein, 386 aa, unidentified
MRHIEQTEAARDGAVVFAAMELSKTTWLLAAQASPSGKTSSHRLDGGDIAGLLALLRRLQARERRAGGDKVEVFVGYEAGYDGFWLQRLLAAEGITCWVMDPGSLQVDRRARRAKTDRLDAAMLLRALVAWCRGDRAACHMVQVPSAEREDARRTHRERQRLIAERVQHVNRIKGLLATQGIYVFQPLRRDRWERLEELRTGDGRALPPRLRREIEREFRRLELVLEHIEASEAERDAAAAAPAAEDADAGKVALLSRLGGIGTELATVLVREALYRPFANRKEVAAYAGLTPSPFASGDRHRDQGISKAGNPLLRKSMVELAWLWLRYQPDSGLARWFTERVGAARGRMRKITAVALARKLLVALWRYVTTGLVPEGARLKTATA

SEQ ID NO: 262738 - protein, 391 aa, unidentified
MLKDAPWPAQAAIRTDLGAIFVSLELSRRTWVITSLSPGAGEKMSKHSVPASDVSGLLHRFAELRRKAAARTGRDFPIIVIQEAGLDGFWIHRVLQSEGIESHVVDPASILTSRRRRRAKTDRIDGETLVRTLMAFKRGEPRVCSMARAPTPQEEDRRRVCRERRILVGERVRHVNRIKGLLFAQGIFGYEPLRKCRRERLEDLRTGDGRPLPVHLKAQIIRELDRLELVLAQLKTVAAERDALLKSASDEISSPPAMLVQLKGIGPETAAVLWSEGLFRRFDNRRQVAAYAGLAPTPWQSGSIDHEQGVSKAGNPRLRTTMVELAWLWLRNQPTSALSLWFHERVQRLGGRMRKTIIVALARKLLVALWRYMTAGVVIEGAVMKPASATI

SEQ ID NO: 262739 - protein, 400 aa, unidentified
MKYYTSTTEFNCGIDLHARQMYVCVMDRQGKKLVHTNVRDNDFVFFLKLVEPYKHSLTVCCECMFGWYWLADACQDVGLTFVLAHALYVKAIHGGKNKNDRVDSEKLTHLLRSNLIPPAYVYPADKRPLRALLRQRIFYVWRRSELLARIHSHQLAHNRIPAKQTRRTRDLWEEALLNAEDHPLRQIALKNDLAMIKHFDRQIFQLEEELQRQTKKVACREYSLLQTVPGIGESLGLTILYEIGDISRFPTVKDFLSYCRLVKGTVASAGKIKGLRGAKLGNPYLRWAFGEAAVIAKRDHYLVGPLSQRLEAQMNGNKFKANTVLAIKLARAVYFMLKNKTVFDPERLVASMQKCFSPGRRQPGSLTGRAKKAMPPPVPEDASCAPSTALCVGQASSPAH

SEQ ID NO: 262740 - protein, 387 aa, unidentified
MKTITKVSDHRDPTQCLYVGMDIHKDTHTAVATTMFGQPLLTEQIGNTEANFASLVAKVKLLSSQKQLTPIFGLEDSQGYGRRLARYLANQQLIVKAVSPVLVDQLRLSETHPEKSDELDAKGVATVLIQRIDRLPSITVTKTDSWAKDMKELAGDRAFLVAEATRLKNQLHWLLHQAYNTEYRQKFKHTFSVKALKYWHRCPVPGSLKHETLLASRIRRKVKRLQQIRQEVREMEAELAQLIEKSGQKLTTMSGCAVVLAATILGEVRDITRFHSSHALAKYAGLAPREYSSGKRWRHRKTRAGNRTLNRAIHRIALSQISRSGNEHAKRYYHRKISEGKTKMQALCCLKRRLVDVIYMMLKHHQPYDYSRLKPLNSESNQSGVEK

SEQ ID NO: 262741 - protein, 420 aa, unidentified
MGRLKIVYPVCCGMDVHRDFLIACIAATNAQGVTEYQSRRFSTYTGSLRELRDWLLANDCKDVCMESTGKYWFPVHNILEESCHVVVSHPKFVKAIKGKKTDKKDAQWIADLFKHDLVRGSFIPPKDIRQLRDLCRYWVKLSSYMTGEKNRAQNCLTISNFKLDDVFSNVFGKSASAITTQLLEHPGEQFDVAPFVDGRCKTPIAQIQEAVDGIFTYEQAEKLKIIRGHMDSLERHKAELESLILEIAQNYLPQIELLLTVPGIHDAFTAIRILAEIGADMTVFDTSKHLCSWAGLTPQNAESAGKKKTTRIGKSGAYLKPLLIQVALAASRGEKHPEIYGKKQALQKRRGKKKAIVAIARRLLTAIYHILSKNEPYNPAAYIQEDKNPMARQISQEKAFEMLARMGFIVSNPSPLSSSG

SEQ ID NO: 262742 - protein, 339 aa, unidentified
MNSNPSIVSGLCVGIDVAKDKLDLARSDIQAVQVFSNDAAGIAQIVKLLLAAKPAMIVIESTGGLERLLLETLLEAELPVALVHPGRVRHFAIGLGILAKSDPIDARVLVRFGQLAAPRLAQKMEKNQRQLRDLVACRRQLIVSRTQQLNRRGTTISPAALRSINAVIATMDKQITSLEKQIQALIDADDDFKHLDGLLQSVPGVGPTLSATLACDLHELGTDDRQRICALVGVAPFNSDSGTVTGKRSIRGGRSDVRTILYMATLSALRANPLIKSMYQRLISAGKVHKVAIIACMRKLLSLLNAMVREGLTWDQLEVVKQLAHKTRASTALPEASMR

SEQ ID NO: 262743 - protein, 345 aa, unidentified
MKITTVGVDLAKNVFQVHGVDKRGEAVLRKQLRRKQVTAFFARLEPCLIGIEATAGAHYWARVLQAFGHEVKLMAPQFVKPYVKANKTDAADAEAICEAVRRPNMRFVPIKSADQQAVLSLHRARSGFVKARTALVNQIRGLLGEYGVVLAPGIRHIREGLPDVIEDGERDLPPMFRHLLSQLHGYLRELDEQVETLEKPLKGWHRDNEDSQRIVQIPGIGWLTATALVASIGDARSFKNGRQLAAWLGLVPRQHSSGGKPRLLGISKRGDAYLRTLLIHGARSALRFVDRDRSPTGQWLRDVGTRRPKNVVVVARANKHARVVWALLAHQRDYDASYQPDRQAA

SEQ ID NO: 262744 - protein, 365 aa, unidentified
MLHRLNSAVTLIQRTTTEAPRRNMYYIGLDVHKKTISYCVKDASGRIQQEGKVGSTRRELDCWMKTLPQPWSVAMEATIFSGWIYDHLLPHAAQIKVAHPLLLRAIAAAKKKNDQIDASKIADCLRCDFLPECHMMPAEIRDRRRTLRYRHLLVRQMVQMKNRVSGLLMETGVEYNKQRLHKVSYFRELLSENEEVHPSIRPLLKLSRETIERCQKTEYALVSSLQRDPVLADRIKRLRTVPGVGPITALTWALEIGDASRFHSIKQAISYCGLCGDERSSADKAMRMPLSKQRNKHIQRALVEAAKLAPRQSHELAMIYDREKQKGNGNRATLAVARKMVAYLLAVDRQQRDFVPAEERRTAAA

SEQ ID NO: 262745 - protein, 348 aa, unidentified
MITIGIDPHSRTHAAAALDDRGRVLAELAVGSGPRELDRLARWIAGMGPERLVAIEGARGFGLALCRRLQRAGEVVVDVAAALTVAERRSARRSGKDDRGDALAVARVALREQGLPLISAETNGSDLKLLVDARDQLVAEATRTRNRLHALLLSIAPGYHEHVRDLTSSTALMVARRLAVRARPTDRVRSTLACAAITRLRSLAGEIAALEREITAGLDRAAPANLLSICGVGPLVAAKILGEVRDVSRFSSSAAFASYSGTAPIPASSGTVIRHRLHRGGNRQLNRALHTVALTQARRDDRARAFLARKRAEGKTPREARRALKRHLAVAVYRALVMDAQEDLTSTT

SEQ ID NO: 262746 - protein, 323 aa, unidentified
MRTTERGDPLETVRISNDVDSLTKVMARAGVSPEVVLEATYGWYWAADALADVGAVVHLAHPLGVKAFSYRRVKNDVRDATDLADLLRMGRLPEAWIAPPATRELRELVRHRAQLVALRSGCKCEVHAVLAKCGVQVLMSDLFAPTGIGLLERLDAPAPYLARVGSLRRLIDDLDVEIDLFARLIRGRLVTDPGYRAVQTIPGIGPVLAAVFVAEIGDVHRFPGPAQLASWAGLTPKHHESDTHVHRGRITKQGSRLVRWAAIESVQALGPGTGAGRLKRRVGDRRGRNIGKTAAARQQVGYVYYALRDGHVRALTQRPRVAA

SEQ ID NO: 262747 - protein, 318 aa, unidentified
MEATVVVGIDVSKDRLDVAIYPSDEPGFAVARDAAGLDALAERLKPLCPAAVAVEATGGFESVVVASLAAAGLPMLVVNPAQIRAFANSLGKRAKTDPIDAMVIARFVAATKPEPRPLPDEATQRLADLVARRRQIIAMMVAERQRQKRLLAPRLQHSITRLLEALQRELSEVDREIDTDVRGSDIWRAKEKLLASVPGVGPVIARTLLAEMPELGRLDRREIAALAGLAPWTRQSGQWRGKSFIGGGRASVRAVLFMGAITAAQHNATLKAFHQRLIDAGKPKLVALVAVARKLLTILNAIIRSGQAWKSEVQAASI

SEQ ID NO: 262748 - protein, 352 aa, unidentified
MHYVGIDLHKRYLSVCALGKSGEVVSEHRRLSNTAEAVLTWLGELEGPVAVALEATLHWAWLHDLLSGAGYEVKVAHPQQVKLICHARCKTDPIDARKLGELLRADLLPAIWVPDHETRANRRLLRGRAFLVRTRTRLKNRIHAYLAEQNLRVGVSDLYGKAGRQWLRLVELPEETRLLVDLLLELVDQLDERVKRLDGRIRERVEVTPEAQLLMTVPGIGPFNGLLIAAEIGTIERFPSSHALASYAGLVPSVRSSGGKTAYGSVGSAGSGWLKWALVEATQVLKRAPGPVGSYYQRLLRAKGKQKATVAAARKLCGYLYWMLKEGWSYEEWLRQHERREVRPVQTLASVV

SEQ ID NO: 262749 - protein, 328 aa, unidentified
MCTLGIDVSKNKIDLCLLTAGPGGKKKHKVLTNEPAVARKVVDWLNAQKCVPESVTVVLEATGIYHENLAYGLHEAGVSVCMANPCRVREFAHGMDILNKNDAVDAFVLACYGELKSPAVWVPPSPEVRKLRALLRQRDALREDVQRTVNRLEKANSTSTPQEVIRSLERTKSWLNEELARIEKLITDHTDNAPGLKADLDLLKSIKGIKEQVGREMLALLKDGTFKSASQVAAYLGLTPVEKTSGSSVRGRPHMSKTGPSGVRAKLYVAALSASRWNKQAKAVYERLVAKGKAKKAALGAVMRKLVHLCFGVLKTRLPWDENYVATA

SEQ ID NO: 262750 - protein, 430 aa, unidentified
MGLIMPSAVHPQQDDQPMPYEWFVGIDWGSQQHQVCVLDRDRHRVGERAVDHDGTSLARLAAWLWTVSAGQPQCVAVAIEVPRGAIVEGLLERGFHVFALNPKQLDRFRDRHSVAGAKDDRRDAFVLADSVRTDQPSFRRLHLEEPQLLVLRELSRAEETLLEEFRRNANRLRDQLHRFYPQMLQLCSAADEPWLWDLIDLAPSPAHAALLSEEQVQRVLKAHRIRRVTAHEVLTYLQTPALPVAPGAAEAAQAHCGFLLPCLRVLAEQRQACGQQVSALLRTLAEELGEDEGPSDVAIVLSLPGVGRKITAWFFAEAAQPLAERDYQMLRTHGGVAPVTKQSGKRRLVVMRRGCNPRLRHALYHMARVAMQRDAHFSSVYAALRAKGQRHGQALRNIGDRLLRILMAMLRHRTCYDASRIRREPVVQRG

SEQ ID NO: 262751 - protein, 334 aa, unidentified
MDKVTTVGIDLAKSVYSLHGVDGAGRVVLRRTVRRDQLMQTVAAQSPCLIGMEACSGAHEWGRRFQGLGHTVKLMAPKFVAPYRKSGKNDGNDAEAICEAVTRPSMRFVPVKSVEQQALLAMHRVRQGFVVERTATINRLRGLLSESGVVLPLRSVTVRRQAAAAAEKLPELARRAIGDLLEQLRVLDERIGGYDRELEAQARLCEPAQRLMKIRGIRPTTALAIVATVGNAREFKNGRQFAAWIGLTPSQYSTGGKPRLGHISKRGDAYLRNLLVQGARSVLNSASAHQDRMSRWILELRPRRGYYRTLVAIANKNARIAWALLAKNETLRSA

SEQ ID NO: 262752 - protein, 324 aa, unidentified
MTPAPYTLGIDIAKASYQVSLKRPDGKRRNKSVRNTVAGHTALVEWLTRQATAPVHACLESTGTYGEAVATALVDAGHRVSLVNPAAVKAFAQSQLRRTKTDGVDAEVLADFCAAMAPPLWAPWPVEVRTLQGLVRRREAVQDMLTQERNRQQAGALSAPVAASLARVVEALEAELADLDQQIRDHLDQHPTLRAQRELLCTIPGIGVATAARLLAEGRAITAFDSARAYAAFAGLVPRESQSGQTRGRARLSKLGSARLRYALYFPALAAARVPGPVHAFAARLRAAGKAKMVVVAAVMRKLLHIAYGVLKHQRPFDPQALGA

SEQ ID NO: 262753 - protein, 353 aa, unidentified
MKYVGLDWAYRTAQWCALAPGGEIAGEGRIAADRGGLARLVLELGDEVKACLEMMSGALWVRDQLVACGWQVEVADARKVKTVAPLAAKTDKVDARLLAELSRRELVPALWLPALDERALRERLRRRMHLVRLRTSAKGRIFGLQTQWGVRVSLARLRRGDGLALLEQAGMPAVWRRSVSECLALVDFLDARIAPLDAELRPFAKADPRAVLLDTIPGVAELLALTIAVEIGEISRFAGPEKLVSYGRLAPRVHQSGQARPRSGPLSKSGSRLLGWAAVEAAQQAWRETNPWHDLDADVSGRSGNNNSAKAAVARKILIATWHMLSRNQPFNPAPRTTRGTSVPANSRLALAA

SEQ ID NO: 262754 - protein, 404 aa, unidentified
MELTPIYHRVIGLDIHQAQITACAIIADGDGGCTIERQQFGTFKKDRHALAKWAAALRPDQVVMESTGIYWKSPFAALEAAGLRPFVVNSKHVKNVEGRKTDICDAQWLAMLARAGLLRNSFVPPAKLRELRLIARQRQKLTGMLASEKNRLHKILTDGGIRLGVVVSDVHGKAGRAMTKALIADRPTHEVLDCASRRLKASREELFDAVQGELSTSHRFVLAELMEHIEQIEERIARFDQRLIAELDAERQALILLQTIPGIDLIGAAMLIVEIGTDMDAFGTAEQLASWTGLCPGNNESAGKRKQSKIRRGNPYVRRLFCEFAQAASRSASVFKLKFQAIVVRRGHKRSIVAIAHKMLRIIFVMLKRGEHYRDSSVDFEAMSVKRNMPRWIKSMIKHGFMPS

SEQ ID NO: 262755 - protein, 475 aa, unidentified
MIQIPAVIERCAGIDVGKRELAVAVIVGPADQDGEVETRTFGTTVPALEELRAWLIRQGCTSVAMESTGSYWIPVKNILEASLRIVLVCAKKHKPARGDITDFRDAKNLAHLHRHGLLKGSFLPHQTVVELRDLTRRRKKLLANLAAEKNRIQKVLEVANIKIGSIVSDVFGVSGQAMLSVLVGGKQISAEEIANLSKRRLRQRIPELTEALQGHHMNDHHRWLIAQCVEHAVLLDRQMEELEARIEEKLQPYREQYELLQTIPGVKEMTAASILAEIGPDMSQFETAKHLCSWAGISPGNNQSAGKRKHSRINKGSKFLLATLVEAAWAAARKRDSIFQRKFHRWMRTLGEAKANVALARSLLEVAYVLLKERRPYQEPDPKQMHELEKAKLVRHHAKRLRQLGADNELVEEVVARLSRHDVSSSAEKETAAQLPLQRIRRISPAKVCRGALGFRARQTRKHEYSIIKKDPLKR

SEQ ID NO: 262756 - protein, 349 aa, unidentified
MVIIGADLHKRSHTVIVVDEHGRKLAERTVPATPAGHLTLLRWARGMGERRWALEDCRHLSRRLERDLLTAGESVVRVSPRLMAGSRRSSREPGKSDPIDALAVARAALREPDLPVARLDGPERDLRLLVDHREDLVKQRTADQSRLRWHLHELLPGEEPPARSLARRHVLEDLATRLAGFDGTVARIAVDLVARIGELTMTIDRLETEIADLVADLTPTLLALRGCGPLSAAKLVGESAGAGRFRSPAAFARHNGTAPIPVWSGNDIRHRLSRGGNRQLNAALHRIAVTQLQRPGRSRDYVAKRMAAGDTKTEAIRALRRRISDEVFRRMLHDEDLLAASQAPMPRAA

SEQ ID NO: 262757 - protein, 341 aa, unidentified
MEKATIIGIDLAKRVFQIHAASKAGRPVLRKKVSRAQLLGFLAKQPPTIVAMEACATAHQWGRAISSLGHDVRLVPPIYVKPFVRRQKNDAADAEAIAEAASRPTMRFVALKTEEQQARSMIFRTRDLLVRQRTQLVNALRGHLAEHGIVAAQGLAKVKVLATALRDTGSLHPLVGELGQRYLDHIARLDVEIAEFDKRLRRHSKDDETAKRLQSMPGMGPITAAAIEAFAPPMATFKQGRHFAAWLGLVPRQHTTGGKPRLGRTSKMGQRDIRRLLIIGAMTVVRWAVRKGAATGSWLARMLAKKPRLVVAIALANKMARSVWAMLSKGEEYRGSALAPA

SEQ ID NO: 262758 - protein, 412 aa, unidentified
METVVERPAALDVHKEQVTACVRVPARDGSREQHVAEFPTTVAGLLTLFDWLEAFGVTQVVMEATGVFWRPVWAILEDGFECVLVNARHVKQVPGRKTDVSDAAWLCQLAEAGLLRASFVPPKPIRALRNLTRYRKTQIQERAREANRLHKALEDTGIKLDCVASDILGKSGRAMLDALVNGTRDPEVLAELARGRMRAKIPALKEALEGRFDHLHAVWIGAILEHIDFLDGQIASLTEAIGEQIAPFEQAVELLCTIPGVQRRTAEVIIAEIGVDMAVFPTDKQLASWAGMCPGNDQSAGKRRSGKTRNGSKWLDWALEESAMAAIRTKDVYLAAQYARLRPRRGHKKALGAVKHSILIACWHMLSTGELYVDLGGDYFRQRDPEKITKRLVAQLESLGHKVILEEVPQAA

SEQ ID NO: 262759 - protein, 311 aa, unidentified
MTITPDCVGIDVSKSTLDVFDAASGRRERLANTAAAIAGLIAHWQPKSTFVLFEATGRYDRLLARLLQAAAIPFARVNPQRARDFARAAGFLAKTDAVDARMLALMAERLKPRPETARDGERERLRALHRRRDQLVHMRAQERTRLSEVDDVEERKEITKHITWLSAQIKAMDTRIKSMIAVVQSLAALYNRMRQAPGVGPVAATTFLALLPELGSRSPKAIAALAGLAPFNRDSGKLRGKRTISGGRKRVRDALYIAALSAVRFNPHFKAIYTALVKAGKAKKLALIAVARRLLIALNAMIRDNADFKPA

SEQ ID NO: 262760 - protein, 419 aa, unidentified
MKRSKRAKTVLAKGRAVVGIDVGKRKHAATALTPNGEIIAQIASFPNTREGINILENKVLRKASGPTKSLLAMEATGHYWMCLYHELARRGYKCVVLNPIQTNAYARSQIRKNRNDRIDSEGIARLVLAGKARPTRVPDEKTAELRLWVRHRQRLLRAANSMERFAHTLVDRVFPEYADILSKPFLPSAQKLIREVGLAPDDLLKRKRDVRRVLHAASRGRIAPQTIDDLLQAANQSIGTRQAEDVANRQLVLVFDCLATLRQQIATIEDELEQRVQKIDSPLLSLGITAKLAAVIHAESDPIDDFHTADQYVAYAGLDPSSYRSGDTIDRRGKISKRGSPSLRRALFLSAFVVTRKHAYFRRTYQKHRRRGKNHRNALVIVACQLARVVWRMLTDGRGFTKRPPQNTIPTRKQRQKAK

SEQ ID NO: 262761 - protein, 395 aa, unidentified
MFIVGIDVAKRSHEVCMITSDGQTVQRPFSIRNNCTGYNLMLEKIRKHTNIKSQIVFAMESTAHYWLALFTRLRKDGYHVILLNPIQTSAMRDMFIRKIKTDAKDSFIIAELIRFGRYAESNVAQDRLLALKELCRNRFYLVDMAGDLKRKLIALIDRVFPEYEAQFDTIFCKSSVALLKKYPTPQRLSNAHLDKLTELLWNSSNGHFGEWKARELKELARNSFGVEDCDGAYSTLILLMLDQIQSLSGKADALEKEISRLFQSFDTMVTTIPGVGPIIGAVILSEVGDISRFSSADKLAAYIGVDPSVNQSGEFQAVHAHMSKRGSPYLRRCIWMASQVAVQRDPMFRAYYEKKAAEGLKYMTIIGHVTRKMTAVVFAILRDHKVYEPILPTAA

SEQ ID NO: 262762 - protein, 347 aa, unidentified
MTYFVGLDVSLEETAICVVDNAGEILREGKAETEPEAISSWLKAVDVAIERLGLEAGPLSPWLSQSLQVAGLPAVCIETWRMKGATAAMAVKTDRNDARAIAQAIRVGWFTAVHVKSAESQELRLLLTNRKTLLTGRVMLENEIRGTLKAFGLKVGRVPVATFEARVIELTADQPRLQAMVRPMLAARLALRLQFEALHVMVLKAVKSHAVCRRLLTVPGVGAVTALTFATAIDDPARFARSRDVGPYLGLTPRKYASGEIDRNGAISKSGDRLAREALFLAAHSLLTRVTRWSALKAWGTAIAKRRGLRRATVAVARKLAVIMHRMWAGDSEFHWSRDEIVASAAM

SEQ ID NO: 262763 - protein, 344 aa, unidentified
MGEVSTIGLDIAKSVFQVHGVDVAGSVVIRKRVSRAKVLEFFGELPRCLVGIEACPSAHHWGRELQALGHTVRLIPPNYVKAYLKRSKNDANDAAAICEAVTRPSMRFVPIKTKEQQTALMLHRTRQLLVRQRTMLSNALRGHLAELGIVSAKGRNGTAELLGIIADGADSRVSPAVRGILEVLVRQYGAIGTEIASIDRSIMALHRGCEASRRLAEIPGVGPVGATALVAEIGDWKTFSSGRSLAAWIGLVPKQHTTGGKHKLGSITKQGNRYLRWLLVVGAMAVIRYARKHGTQKRPWLGRLMERRPTKVAAVALANKIARVAWAIMVRGERYKEPKLSLAA

SEQ ID NO: 262764 - protein, 336 aa, unidentified
MKYKLFIGIDISKKTIDVSLKSKGVKELLHNQFKNNKKGFVSMIKWIKSITNVQENEMFFCMEHTGIYALNISCFLSERNIDYRLENPYHLKHSMGIQRGKNDKADSKMIARYAYMHHEELELTKFSGTEIINLQNLLAHRDRLIKTKILYKVAPKELTEFSDKKHNTCITDSSCDIVQVISEKIKLVEQEIKNLISNNEGLKKNFELACSVKGIGLVIAAYMLVYTQNFTSITKGRCFASYSGVAPFGESSGTSINKSPHVSHLANKKMKSLLNNGAWVAVKYDKELKTYYNRKIKEGKHELVVINAVRNKLISRVFATVKRGTPYVELLQYYNN

SEQ ID NO: 262765 - protein, 326 aa, unidentified
MYIGVDTHKKTHTLVGIDNHGQSCGTRSVANTPQGWTIALRWARDHDDSCCWGIENSGSLGKGFAQFLLAQGETNVREVSPQRTAQYRRRGRTHDKTDAADALAIARLLRAEGEQLPLVQADDASTELRLLSDHRDNLVAERTRLVNQLHAQMLQIDPCYAEQSGALTGRTGVRYCRDLDLPHADGGLQTRLLIVRQLTGQLLRLWEEIETVETALRQRVAALDTPLLQLCGVGTIIAARLIGELGCTPRIRSAAALAALAGIAPVAVSSGGRHGYRLNRGGNRQLNRVFHMIALSQLRREPLARAYYAKKRAEGKTARSALRCLK

SEQ ID NO: 262766 - protein, 342 aa, unidentified
MGIDVHQDFYVVVEQVGGTNPKPPQRFHKQAFLHWAAKLKQTGAEVHAVYEACGFGFTLQRQLAALGIHCHVVCPQKLDERNKRVKTDGLDAKALCLKLDRFVQGNRDAMALVRVPTEEEERSRAIHRQREQLVGARKRLEAQGRSLMVNHGLEPVQNWWKPRTFAALPVPQWVRELLANSQPILLALQEKIAALTVQLQRAADPRQPRGLGLMTSVVIDREIGDWHRFNNRRQIASYTGLCPGEYSSGNTRLQSCVTKHGNPRLRAALVELAWRLVRFQPNYKPVRKWRQILAKGGANRTGPIATGAARKKAIVAVARQLAVDLWRIKTGRLRAEQLGLTI

SEQ ID NO: 262767 - protein, 351 aa, unidentified
MELEHTACPNLYIGIDIHKRSWKIHCATDLSVGKTFSMDPDPDKLRDYVSRHYSGYKVTTAYEAGCCGYYAHRSFESYGWKSLVVNPADIYRTGKARHTKTDRIDAQLIARELKDGRLYSIHIPDIRREQLRSLFRRRNDLVKDYRRIKSLIKSQLLYMGVSLPKEYDNSHWSHSFRDWLDNLEFAYSPARATLDSRMRMFRFIDQEVRDVSTGLRRFCKVYYKTDYMLLRSIPGIGGIVACGILCELGNLRRFRDLKHLSGYVGLAPGIYQSGDNLRTTGITPRAHRLIRSYFIEASWQAIRTDPVMQEYYRKHQGKNVKSIIVKVARKLLSRTLAVIKTETPYVIGVVA

SEQ ID NO: 262768 - protein, 329 aa, unidentified
MNVCGIDVSKDTLDIVVRKKGKSLKCKTFSNDFKGHQALITYLKSHQVVRCALEATGYYHFDIAMLLSEEKKMEMMVLNPRAAHNFAKAMMQQNKTDAIDAELLAQFVDRMDFISWTAPPHEVFALRACGRLLISLTKSKTRAKNRLHAFSTTKCTPAFIIDDLKLEIEQLEGRIENLISHALELIKNNALLQSQYELLIGIKGIADRTVIKLLGEIGVLDSTMSAKQWVAHAGLYPKVFQSGSSVMKKARIGKAGNRYIREALYMGALSAARHEPHLKGFYQHLILDNGLTKLQALCAVMRKILIAIHAMLKTEKCFDGSRLYQLASH

SEQ ID NO: 262769 - protein, 370 aa, unidentified
MKKRITFVGLDTHKNSIEAALADEGRNTESRLYGTIGGDLASLDKMIRKLQTTGVELRFVYEAGPCGYEIYRHLRAHGFHCDVVAPSMVPKRSGDRIKTDRRDARNLARLYRAGELTAIYVPREDDEAMRDLVRGRQDAIHAQRKARQQLGGFLLRHGFRYPGKCVWTLAHRRWMAEIKMPHPSQQVILEDYVHSVEEGTQRVHRLTEQILQLMPDWRMHPLVTALQALRGVAPVVAATAVAEIGPMGRFEKPRQLMAYLGLVPSENSSGGSVRRGAITKTGNGHARRALIEAAQAYSHPARISRVILKRQEAVPEPIRQIAWKAQLRLCARFRKLTARGKSRNRVVTAIARELSGFMWAIAKHVPEPQD

SEQ ID NO: 262770 - protein, 344 aa, unidentified
MEIRSVGIDLGKTSFHLVALGDKGKVLLKKKFTQKQLITFTANLQTCLIGMESCSGSHFLGRALREQGHDVKLIPAQFVKPFVKSHKNDFVDAEAIAEALERENMRFVPIKTDDQLDLQSLHRVRERLMTHRTALINQIRGFLLERGIVFAKSPIRLREAMPEVLENANEDLSPRMRNLIAILWSEWKDLELQIAEMNDEVERIASSDAACQRLRQIPGIGPLVATAIVASIGNGAAFRKGREFAAWLGLLPNQHSTGGKARLGAISKRGNCYLRKILIHGARAVVLRSKRDRIAMGAWMTSLETRAPRNVLIVATAHKLARIAWAVLSTGQDYRAAVPAAVAA

SEQ ID NO: 262771 - protein, 342 aa, unidentified
MEKVSLIGLDLAKRAFQAHGARADGGVAFRKKLSREKVLSFMAEQAPCVVAMEACGSAHHWARAIGDLGHEVRLIPPAYVKPFVKRQKNDAADAEAICEAASRPTMRFVAVKTEEQQARAMLFRTRDLLVRQRTQLINALRGHLSEHGMVVPQGPSHVKVIAKAVEEATASLPLLVVELSRVFLEQIEKLSEKITELEKATSNEAARGSMSRRLQTVPGVGPITAMAIETFAPPMCIFKRGRDFAAWLGLVPRQHSTGGKQILGKTSKIGQRDIRRLLIIGAMAVVRWASRKGAPEGSWLRRMLARKPRVLTAIALANKMARSIWAMLTKSEDYRAPAAVAL

SEQ ID NO: 262772 - protein, 314 aa, unidentified
MDKITVGIDVSKDRLDVAVRPSGEDFAVPRTGAGLDDLVARLKVLKPSLIVLEATGGLETVVAAALAGAGLPVAIANPGQIRAFAKAIGQRAKTDPIDAAVIAHFGEATGVLPRPLPDQATQQLADLVARRRQIIEMIVAERQRENRANPRIKKSIGRLVKALERELSSVDKDIDDAVRGSPAWREKEDLLSSVPSVGPAISRTLIAELPELGTLDRKQIAALVGLAPFARQSGQWRGKSFIGGGRASVRRALFMGAMVAARYNPVLKGFYERLLAAGKPKKVALIAVARKLLTILNAIVRDGSPWKGTVGAVS

SEQ ID NO: 262773 - protein, 343 aa, unidentified
MQTVTTIGLDIAKSVFQVHGIDAEDRVVIRRQLKRRYVLKFFQKLAPCLVGIEACASSHHWSRELKVLGHTVRLMPPAYVKPYVKRQKNDATDAEAICEAVTRVNMRFVETKTPEQQSCLMLHRTRHLFIRQQTSVINAIRAHLAELGIVAPIGRNGVEELLNVVADPADKRVPDIARACLAALGAQLRRLKEQILEFDRMIRTWHRSNETSKRLDEIPGIGPVLATALVASVADPRAFRSGRNFSAWIGLVPKQHSSGGKDRLGSISKQGDRYLRSLFMAGALAVIRYAKIHGTKHRPWLTALLARRPTKVAAIALANKMARMVWAMMARGERYKEPVALAA

SEQ ID NO: 262774 - protein, 411 aa, unidentified
MNPVVGLDVAKGESQVQAFLDKKKPYKRSFKVAHTIEGLESLHQYLREIENVTGIRPPVVLESTGHYHTPVVQYFEERGYLLIIVNPLISYRAKSSSLRKVKTDLIDARHLCELYYKEDLEPYKKRGMQLLNLRNLSRQHANITGIYVQTKLQFQAVLDQVFPEYRGVFGDLYSVVSLLTLLEFPTSEDISAVDEETVANRINELCPSRSRKWAITQAEKLMAASARNPFQRTLYQSHILSLEMYIKMLLEYQKHLSKFEEEINALAKEIEEYKIIQSIPGIGEKIATTIISEIGEIDRFNHPKKLVAFAGIDPSIFESGKFKGSVNRITKRGSGRLRHALYMAVRCAIRDCRKKKTTDEIIPRNKRLREFYDKKSEEGKPFKVAVIACANKLLQWIFALLQNNSTFQDIA

SEQ ID NO: 262775 - protein, 430 aa, unidentified
MTETTQKQESPEPQFAAFIGIDWADQEHQVCLRAAGSSEKELSKLPQEPEAILEWVGKLRERFQSRPVAVAIEQSKGGLVYALMAHEFITLYPINPAMLAQYRKAFVSSRAKDDPLDAGLLTDLVQNHREHLRAWKADTPETRRLQLLVEHRRQAVDERTRLTCMLTAALKAYYPQAIELTGANLFAPMALDFLTKWPTLEALKKTRVETIRKFYYAHNIRRGDVIEERLEYSRKSPPLTEDAVIVETFAMKVNMCVGQLRALHRVIVEYERQIARLFAQHQDAFIFDSFPGSGEIFGPRLLAAFGSQRDRFTAPEDMQRFSGIAPVTVQSGQTRWVHRRWACPRFLKQTFHEYANISIQKSVWARTYYEHLREAGKGHHAAVRAVAFKWIRIMFRCWKDRVPYDEITYLKALQKSGSYLLKYLPQPANS

SEQ ID NO: 262776 - protein, 342 aa, unidentified
MLSNTTNLMETLYFLGIDISKKKFDAALTIDGKQFHEAQIENTPAAIQLFFRDLKKQLSSLNRLTVCLEHTGIYCLPLLNFLVKHKIRVSVEPALQIKQSQGMTRGKNDQADAKRIALYALKNCENLRFWQPQRHCIQRLKALLVLRERMVKMKVQLEVPLHESREFVATSIFKQTLANCQKTIRALQSDIKGIEKEIDTLVSNDEQISQQCRIATSVPGVGKITALNMIISTQEFSRIQDAKKFACYAGVAPFEHSSGSSIRGKTRVSKMANMTLKKLLHLAAMSAIQCNDELRIFYKRKVDSGKNKMSVMNAVRNKLISRIFACIKDKRIYQKVYQHALV

SEQ ID NO: 262777 - protein, 399 aa, unidentified
MCKVIMIGCDLHDATTVLKVADGPDATVRKGFATSNRSAMIEWVKDFASQRGAARIVFAYEASGQGFGLYDDLTDAGIECHVLAPTHLPHTTHSRKNKTDDKDALMILDEVRAHVLAGRTLPDVWVPNHQTRDDREIVRLRLEVATQRTRLKNQIRNLAKRSRLAFPDDFTSSGDWSKRSVAWLREVATGKTGALREGVRTALASLVELYQAMSVQIQALDQAIKRLSRTERYAQSSRKLKLLSGVGTLTAMVFLTELGDLARFANRRQLAAYLGLAPSAFESGERDDRKGHITKQGPARVRHVLCQAAWAALRVSPEWKAKYDRIRRGSKSRGRIAIVAIMRQLGVEMWQTARSPELDAMLDERDALASQKTKKTTSARAPQKGGRPFHATIASAQTG

SEQ ID NO: 262778 - protein, 343 aa, unidentified
MKLSRVGIDLAKNVYQLHDVDRSGKTVWKRRLKRHQWFKVLLDTVGPECEIGMEACAGAHHWGRELQSRGYTVKLIPPQFVKPYVKSNKSDAKDAEAICEAMSRPNMRFVTVKRVEQQDIQATHRIRAELMTQRTAKANQIRGLVAEYGLVAPKHLSSLRAAIPCWLEDAENGLTGDFRALLQGVWEDLHVLDDRVGEMDKTIKRLADNNEDCVRLQQLRGVGPMISTAMIATVGDARQYHKSRQMAAAIGITPKQHSSGDRDRLLGISKRGDVYLRTLMIHGARAVVARATHKDDRLSRWVTNIANKKHPNVAAVALANKTARMAWAMLRNETDYDPDFALR

SEQ ID NO: 262779 - protein, 397 aa, unidentified
MYIVGIDIAKRKHEAAVIDGEGTVIIKPFSFTNNCSGYNRLLAMLAKAKLPLDEVSFAMEATGHYWLALFTRLQKEGFRVQVINPVQTNSIRSFYIRQAKTDPRDALLIAEVIRFGHFSESTLHPENIYELRELCRGRHAIVSMQADVKRKVVALLDQVFPEYETAFTNMFGDTSMAILQTCPTPKELSEMPLEELCHLIEVSSRKRFRMAKAQELQELARNSFGFAMAGDVFSTMIRLYAKHLVFLKQQVQEMDRKIAEIMDTLDTPITTITGIGPTLGAYILSEIGDISRFSSAAKLAAYAGIDPTMRQSGEYNGVRNRMSKRGSPYLRHAIWLAASSAVLHDPALKLYFQKKRDEGKPYMASVGHACRKMVSIIYAVMRDNKAYTPYIPNEISA

SEQ ID NO: 262780 - protein, 340 aa, unidentified
MVHVGVDLHKRMSQIAVLTEDGEIAQRRLANEPARLEAFFAQLPPRTPVAIEASGTWWWLVDLLERSGHRPVLSNPKQTKAIAAARLKNDRVDAERLALLLRGDLLPTVWIPPAALREARELIRHRVSLVWLRGEARNRLLAMLARRNLQPTRGKSWLTGRGQRELQALPLTPIATTIREDCRALLPLLDEQIRRLDDDLRQRWGDDPRVRRLLTLPGVGAFIAIVLVMELGDIDRFPSAKHVASYIGLTPRVRASADRIRSGHISKEGNRLLRWVLVLAATQAARQPGPLRAWFRVMKQRKGTKIARVALARRLVEIVYHVWKHDCDYFSVLRRGAVRG

SEQ ID NO: 262781 - protein, 345 aa, unidentified
METMYYIGLDVHKKTISYCVKDGSGRIHAEGAIPATRLDLDIWMKRLPQPWTAAMEATIFTAWIYDHLLPHAVAVKVAHPLMLRAIAAAKKKNDRIDANKIADCLRCDFLPECYMASTEIRERRRTLRYRNLLVRQAVQMKNKIAVLLMEAGVSYNKQKLHKVGYFRELLATNQDIDDGLRSLLRLCRETVVRLGKTESALVRSLQRDALLVERVERLMTIPAVGPIMALTWALEVGNVQRFSSIKKAISYCGLCGAENSSANIIKRTPLSKQRNKHLQTMLIEAAKMAPRNSPDLAMLYDREKQKGNANRATLAVARKLVAYLVAVDRRQKDFLIVERENRTAA

SEQ ID NO: 262782 - protein, 501 aa, unidentified
MKTKRSKAKIQAERKSRAVPYSEPAQELQVLRPDAGGIDCGACEHYVAVPPDRVKAGQATVRSFSAFTEGLDAAVEWLKACRVSTVAMESTGVYWIPLYQKLEAAGIEVYLVNAGHVRHVPGRKSDVQDPQWLRQLHRCGLLNASFRPEGIICQLRSLNRHRDNLVKSSASEIQHMQKALQQMNLHLHHVVSDITGLTGLRIIDAILAGQRDPEQLVKLRDKRVHKSTPQQMQAALVGDYRAEHLFVLNQSLQAYRFYQARIQECDRETEPLLEKLAQQVEAASARLKLDALKAADAQHGVTLPESPNESKASASSLKAKRHRKPRANEPKMELAGLLERICGVDLTRVVGLNVLSVLLIVSEIGVDMSKWRSAKAFCSWLGLCPGNKISGGKVLDSRTRQVVNRVADALRLAAQSAGRTESCLGIFYRRKQAHLGAPKATTATARKLACLIYHLLKYQQPYQEPDPALYQLRLHKAALTKLQRQATALGYTLLPTAPAAA

SEQ ID NO: 262783 - protein, 316 aa, unidentified
MAEVINQTNVGIDVSKDWLDIVALPSGETWRIENKEAAIRELIKKLEQLKPERIVLEATGGYEQMLAVQLYLAGLPLCRVNPKRSRYFARSVGQLAKTDKLDGQVLALFGERVKPLLTRLPSEKEQLLSALITRREQISNFLVAERNRLHTAPKKLHASLNEHITWLKHELKQLERAIDDFVNDDPDFKEKSDLLVEVQGVGKKTAAKLIADVPELGDCNRKQIAALVGVAPYNRDSGRKTGQRYISGGRSDVRSILYMATLTATRCNPVIREMYQRLLKVGKKKKVAIVACMRKLLTILNAIIRDRSHWNLASSA

SEQ ID NO: 262784 - protein, 344 aa, unidentified
MERKFKLIFGIDISKLTLDVTYFLGSSSRYFQITNDAKGISQLVKTIAELGVEEREVLICCENTGSYMEKLALVMRGVEVTFWVVHPIIMKGYRLDLQRTKNDKVDSMKIAEFALAHQHKASGFHHPNQKIKELKELYLLRKQLVGIRQQTLNFIASESDKAIPGILNTVIHDQLKHFITDLIKEVEKSIQLLIKSDKDVSGYYNILLSIPGVGPVIAQHILAVTDGFKKIVDYKSFACYVGIAPFARSSGTSVRYRPRTSKKANQELKAEMHQGALSVIKQGQIFHLYYKMMLEKGKHHLWIINSIMNMIAKCIFNLTSKMTPFNKEIFANNKKSWQNNLVVS

SEQ ID NO: 262785 - protein, 374 aa, unidentified
MDEISKLHVGLDVHKDSISIACASPGREPGRLVSRIAHDVPKLLKQLIKLGTPEQLHIVYEAGPTGFGLARKLLAQGYSCEVIAPSKTPRRPGDRVKTDARDSIMLAEYSRSGALHPVWIPDVADEAIRDLSRAREDAINARHQARLQLKSFLLRRDVRYGGKTSWGPAHYRWLAEQAFGANAAQTAFTEYCLAVQAADQRVDRLNTALEGATTDWRFADVVAALQALRGVALVSAIGLVAEIGDFGRFDHPRKLMGYLGLVPSEHSSGERTSRGSITKTGNKHARRLLTEAAWQYRFPARIGRAAQIRQQGLSEPVRAIAWKAQLRLSRRFAALNKRGLQVNKACIAVARELAGFVWAIGQRAMAEAAAKPLH

SEQ ID NO: 262786 - protein, 453 aa, unidentified
MRKPQLIEDEGHQQVHERVAGIDVAKASAAVCLRTPDKPHCSQVWLDVAAVMGSVTELGRMLLAERVEVVTMEATSDYWKIWYYVLESLGLVVQLVDPAQVRQLRGRPKTDKLDAQWLARLTGWGMLRPCFVPPSPVRVLREFTRARTDLVRDRTRCWQRLEKLLEGALIKVSSVASKLNTESVKDMIRAMIGGERDPQVLAALARPQMKASREELAEALTGMWQDYHGILAGQLMTQIGWLDSAVEELEGQITATLEAIPAAWGADADGVTGPGAGTGPGAARLPAAERLAEIPGLSVMLAMQIIGETGLDMTRFPTPGHLVSWAGLCPAANQSGPRHRKGKKKHGNSYLRGHLATAAVTAGRTATFLGDRYRRIRRRRGAGIAQSAVARSILVIIWHLLADPAARYTDLGENYHASRLNKEKKIRNLLHQLRALDVNLIPAPAHPEETKTA

SEQ ID NO: 262787 - protein, 341 aa, unidentified
MQIKSIGIDLGKTTFHLVALGSSSQVVVRKKFSRQQLLLYTANLPSSLMGMEAGVGSHFLGRALREQGHEVRLIPAQFVRPFVKSNKNDYCDAEAIAEAVERENMRFVPIQTEDQLDLQALHRVRERLVSRRTSVINQIRAFLLERGISFRKGPASLRRQMPEILENADERLTARMRRLLDFLWQEWKHLQLQIESLSEDLEKVASSDAACRRLQQIPGVGPLVATAVVSAIGNGAAFHKGREFAAWLGLVPGQWSTGGKAKLLGISKRGNPYLLQDVHPRGPGCGVARQTRRIVSGAVDEWLGKQGRPQCSDRCHCEQVGQDQLGRALERERLSPDAHSR

SEQ ID NO: 262788 - protein, 360 aa, unidentified
MPQPIQDDQDDNAGGEVILGVDTHQDLHAAAVISPLGVLLSSEMFPATAAGYETLLAWAGSFGLLRRAGVECTGSYGAALARHLRAAGIQVIEVNQPDKATRRRRGKTDTLDAEAAARAVLSGRATGSAKAGDGPVEMLRMFKLAKASAVKARTQTINQLKAVLVAADPHLRETLSGLSNLLLIRRCTQLKVATPQDTASAAAYTLRLLAQRILTLTSEIRDLEHQITAAVTSHTPTLLTRRGIGPDNAAALLIAAGDNPDRLRSEASFAALCGVSPLEASSGRTSRRRLNRGGDRQANSALYRIALSRLRWDTRTRDYLTRCITEGKTRREAIRCLKRYIAREIYQIITAPPETKPSTA

SEQ ID NO: 262789 - protein, 320 aa, unidentified
MGPATPKTFVGIDVSKAKLDVAVGDEPVFTVPNSPEGHAELAERLVRLNPSKVLMEATGGMESPAAAAMYRAGLPVLIVNPRQAREFARSMGYLAKTDAIDARALAHFAEAIKTDPRPLPDDAARELDALLDRRRQLVGMRVMEQNRSRTAAGMPLEDVRSHLRWLDEHIEKLDEELGRRIRATPAWREKEDLLRGIPGIGPVTSWTLLAVLPELGQVSNRRVSALVGLAPLPDDSGRHKGPRRIAGGRREVRCVLYMAAIAGRRYNPVLKTLGDRLEAAGKRPKVVLVAVAHKLLIIANAILRSKNPWDEGFATATNPA

SEQ ID NO: 262790 - protein, 344 aa, unidentified
MGEVSTIGLDIAKSVFQVHGVDVDGAVVIRKRVSRAKVLEFFESLPPCLIGIEACPSAHHWSRELQALGHTVKLMPPSYVKAYLKRSKNDANDAAAICEAVTRPSMRFVPTKSEQQQSGLMLHRSRQLLVRQRTMLSNAIRGHMAELGIISAKGRNGTAELLKVIAGNEDGRIPVVARFSLDVLARQYAAITTEIGAIEKRIHAWHRSCEESRRLEGIPGVGPIVATALIAEVGDWKAFSSGRNLAAWIGLVPKQHSTGGKDRLGGISKQGNRYLRWLLVTGAMAVIRYARLRGTKRLWLTRIMERRPVKVAAVALANKIARMAWAMMVRGEQFKEPRLLPAAA

SEQ ID NO: 262791 - protein, 316 aa, unidentified
MKGKSEQPVFVGIDVSKATLDVALRPAEETWSVSNDTKGIAKLVKTLSKRQPALIVLEATGGYEMSAVVALVEAGLAVAVVNPRQTRDFAKAIGRLAKTDRVDAKMLAHFAEAVRPAPRALPDEETRALQALVIRRRQLLEMQVSERNRLHLAHESQKASLESHIKWLEQELNQINEQIRDILQNNAVWREKDDLLRSVPGVGSVLSCTLLSELPELGLLNRKQIAALVGVAPFNNDSGQKKGSRSVWGGRASVRCALYMGALSASQHNPIISDFYQRLIKAGKPSKVALTACMRKLLTILNSMVCHGTHWQPNLA

SEQ ID NO: 262792 - protein, 379 aa, unidentified
MNDDITWVGLDADKATIQVAMRLPGSDGPVEWQVANEIAAVKRLARKVQRAAPGEVRSCYEAGICGYTLQRQLVAAGMPCTVIAPALIPRKAGERVKTDRRDARKLADLLRAGLLTAVRPPTPREEAARDLCRGREDVREDLLRARHRLGKFLLRRGLGWHATKAWTQAHRRWLRSLSFAEAADQAVLTDYRLAVEQLEARLETVDAALVALAQTEPFRQPVGWLRCFRGIDTLTAITLVAELHDVRRFTSARALMAYVGMVPSEHSSGETRRRGGITKVGNAHARRVVIEAAWHYRHVPTVGKVLRTRRQGQPAAVIALADKALQRLHRRFARLTARGKPPPQGRRRGGARAGGLCVGGAYRDRGDRMKPPIGPTRRA

SEQ ID NO: 262793 - protein, 350 aa, unidentified
MIITAKQFPTYGIDIGKTVFHVVATDHRGKPSFRIKLRRAALLEFFVKAAPARVGMEACPGAQWLARKLGVFGHDVHIIPAQFVKPYVKSNKNDTNDAEAIAEAVTRPTMRFVPVKRTDQVDTQALHRVRDRLSYNRTRLISQTRSFCLEYGIPIRTGAGVFKLDLPRILGDDTNDLTPAMRTLLSELWGELAELEQRLKDVSRKIKALADDDETARRLMTIPGFGPLGATALLAAIGDPRQFRKARDLSAWLGLVPRQYSTGGKTTLLGISKRGNSYVRRLLIHGARSLFRHMDRSRDRLGVWLDQLQARTHFNKAIVALANKLARIAWVIINTPGATYHRVDPVAMPA

SEQ ID NO: 262794 - protein, 434 aa, unidentified
MTASDSTARSRNLVAIDIAKAKHDILVELPNGKRRKMIVRNQLSDFRQLAGYLKRLEGALEIALEPTADYHRNLAYFLKVQGFAVKLVSSIAVARTREALHNSWDKNDPKDAQVILHLLRNGNTQYFYDPVIEQTNDLQELSKTHFQVSLRKTRVQHSLLNHYLPLYFPEAERFLSNSRSSWFARLLLEFPTPQAITQLTEKEFLERASRLLKRKQSKAAILRALYAKAQESVALPVSLESQAIATFRLTLAQHLELCRIRTELEETAHELLQDQLDYQILRSVPGVGPIIALTVLAEAGDLRRFGHERQFLKFCGLDLATSQSGAYRGRTQLSKRGNSRLRSALWMAARRATHMQENTFRQKFSRYLRADPTNTDLRRKAYTACTAKMARTIYGLIKHEQFYRAYREDAIPEPGGRTRSHGPWRQAARGGLTS

SEQ ID NO: 262795 - protein, 402 aa, unidentified
MLYLAVDQHRKQLTVNLRDEAGDVILKRQISTEWKRVREFLDEVRNRSVSGGGVVTIVEICGFNDWFLKMLAEYGCREIVLVQPEKRSKNKTDRRDADGLGELLWTNRQRLLEGKKVQNVRRIVPPSPRDAEDRQLTAVRQRLGRLRTRTINRVQHLLLKHNLQQECPTKGLQTKAARKWLTKLELGMMDRLELDHLLSQWELYDKQIVELETRIGARQAENQAAVTIATIPGAGPYGSLALASSIGSVDRFRSARSLAHYWGLTPGCRNSGDATRRLGSITKEGSAMARFILGQIVVHILRRDGRMKEWFQRIKKRRGSKIARVAVMRRVATIIWHMLKHQQAYRLIGDNAPNDPRSACLLPDRNAFFEARQGRSNEDCGQDKKKLPRLRERGNRTSLTRP

SEQ ID NO: 262796 - protein, 343 aa, unidentified
MEKDIRFVGLDVHAETIAAAVVDPGSPVESLGTIVHRPESVRKLMRRLGHPDQLRVCYEAGPTGYGLYWLLTGMGIHCDVVAPTLIPTKSGDRVKTDRRDAEKLAKYYQNGDLTPVWVPDAEHEALRDLVRAREAAKSDQTRARHRLSKFLLRRNRRAPKGVRRWTKKHLTWVRREVKFDLFAQQATLEDYVAEVLHAGERIQRLEQRIDDAIEEVPQSTRAVIAGLQALRGIAKISAVTIVSEVGRLSRFARPRQLMGYSGTVSSEHSTGQRVRRGAITKTGNAHFRRILGEAAWSYRHRPYVGPVLRKRQKGVPAEVVEIAWKAQQRLHRMGIEVMPRGTK

SEQ ID NO: 262797 - protein, 345 aa, unidentified
MVTTIGIDPHKATHTAVAIDEDETVLGEITLPADRDQTKKLMDWASGLNGDGRLWAVESAGGLGYLLSQQLIAGGEQVVDVPAVLASRVRVLSSGKSDKNDPNDARSIAIAALRQPALAVVQREDHAQVLRMLAKRHLELTSLRTQAVCRLHAVLMVLKPGGMRRRLSAKAASRMLQGMRTLDAVGEQRRLVARAHLGDIRRLDRDIKANKTLIRHAVTVSETTVTDIYGVGPIVAAFLIGYTGDPARFTTSDRYAAYNGTAPIEVSSGGKKRHRLSLRGNRRLNHAIHMAAVTQIRFDTPGRVYYNKKQAEGKTKKEALRALKRHISDAVYRRLITDQQQTTTS

SEQ ID NO: 262798 - protein, 352 aa, unidentified
MHQGIILSVDYHDRACVIRWFDPRTGKEMVFSEVPTNPQALLEVVAAARKASGRRRVAWIQESTTGWARVKDLLGDRVDFQLANVLQMPLPPKARSRKTDKTDTARIQREHLGGRLPLSHQVPTRWRQVRRLVALRENLVARRTALRNWINRYLAHETWLDRTGLWTVAGQQLLQALVQQLPAIDAFIITQKLEELRRIKGQLKAAVEELLLVYQQCPEAQRLDAIPGINIVAAVSIVARIGPVGRFRSVDPLIAYAGLAPGIHESDQARRDGHIGGGGTDRHLRHYLIEATTYARRAPRYAGAYGRMRKRRGPRVARLVVARMMLRSIYKMLKEGVEFEATPAAATAAAGS

SEQ ID NO: 262799 - protein, 344 aa, unidentified
MEAQVSVVGLDIAKSVFQVHGADSAGKAVIRRRLKREEVEVFFRALPKSLVALEACPGSHFWARLLRDIGHDVRLIPAQYVRPYVKTNKNDAADAEAICEAVTRPTMRFVPIKEEMQQEVLVIHRVREMLIRQRTQLINSIRGHLAEFGIIAPNRAHNVGVLTKLIEDEDFEELPAVARHALRYLVEQLREVKSKLFRIDQDLIRIVKGSDACRRLMTIPGVGVVTATALVSSMREPSDFKSGRHFAAWLGLVPKQHSTGGKDSLGGISKRGDGYLRRLLIHGSRSIMRWRGRSWTWLAKLRDRRPANVAAVAVANKTARIVWALLRFGGTYGHPGEGATMRTA

SEQ ID NO: 262800 - protein, 332 aa, unidentified
MKMNQQGGVASGGDRPNAGVDVSKHHLDACVGEDARRVANDAEGWGELTAMLRAAQVDLVVVEATGGYERGLVCALQGAAVSVARVNPRQARDFAKSMGVLAKTDQVDARTLRDFANVLARHEARHKYITPMLESAREVLSELMTRRRQLVDMRVAEHNRLEHAGKRAAGSIASVIKMLDKQIATVDRHIDDHMDHHFRSQRELLDSVKGVGPVTILTLTAALPELGRLGRRQIAKLVGVAPLADDSGSRQGKRRTWGGRADVRAVVYMAAIVAMRHNPVIRAFYERLVAAGKPKKVAIVACMRKLLTILNAMLRDQALWDATRHIQLAPKA

SEQ ID NO: 262801 - protein, 319 aa, unidentified
MHCIGVDVNKQELVTFDGTAERVFPNNRALREFQRFVNSTSNVLIVFEPTSTYSRRLEAFCRTKRISCCQLNPRVVPHLRQVGRGRSKTDSSDAELLYRYGIERGHSEAIELGHDPLAESVQARLACYRLAQKARVAYQGLLEALSQDPATPRTLIDVLQTEIAELTAKEKQHLVAAQRIVAEDEQAAQRLGALLSITGVGLITALTLLVLFRKYPVANRSQIVALAGLDPIQFQSGISVHGKTRISKRGNRELRKRLYQATLSAARYNPNVRAIYRRLKEQGKPDKVARIAAARKLLLIAHAIYKSGEMYHLPNEKEG

SEQ ID NO: 262802 - protein, 414 aa, unidentified
MNYNKKMEEMKGVKVFAGVDVGKEKHFMSLIGEDGLVKNTGICISNSLEGFEKMVGMLKSTGTEKEVVVGMKPTGHYWKALGYYLKEKGYMIYLVNPYHVKLSKEMRDNSQRKTDKKDSELIAHLVREGKFLNSRLLDGNYEELRRLTTARERMVQEIVRCRIRLISILDEYLPEYERCFCKITAKTSLKLLNKYGIKGLREKSVALEVVKDIVLFSRHKIPKERALEILGKLENTIGLKEGLTGAEIELKIWLEELEGYLNKLSNIEKEIKKVLDSTEEAKYLLSIKGVGYITAAIVLGQTGSFRSFNNAKQLEKFAGLDLVERSSGKRVGGKRISKRGRKLLRHGLYRVAIVAIARCKEFKALYEYKVNILKKNKMIAVTDITVKMLRIMFAVVKNKTMYDGNLVLKAIAYS

SEQ ID NO: 262803 - protein, 384 aa, unidentified
MNNNSIIFIGLDTHKTFTQLAVLKDERGAKPKSLGKINTNKSAFIKLARQLQSQYPKATLHFIYEAGPCGYWIYRLLTSLGHCCYIVAPSLIPKKSGDRVKTDKRDAAKLALLFKAETLTAIYVPEAEDEAIRDLSRARETAMKDLKDAKYQLKGLFLRNNITCTVKDNWSNQHLRWLTELVLPHPSQQIVLQEMIQTITERMKRVTRLVNELEHQVKQWRYYPVVKAIQAMRGVRLLVAVGTIAELGDLRRFDHPRKLMAYLGLVPSESSSGETRRLGKITKCGNGRARRLLIEGAQTYKHKANISTELQKRQEGLSKEIVDIAWQAQLRLCRRYQRLMQKGKHRNVVVTAIAREMIAYIWAISREVVITQVDPRTRISRLPA

SEQ ID NO: 262804 - protein, 317 aa, unidentified
MQSVLNVGVDVAKDAVVVACAEQSFPGHSVSNQRVPLRAWLKSLPAGSRIGLESTGDYHELLADLAQAQGHTVFLLNPLDTRHYAKAMGTRAKTDRVDAELIARLIAQEHPRLRAYTPPTANQRKLDRLIRRRAKIVRLKGTLKLTMRNLGGFAAELKAVVGKLDALIAKIDATMSALAACSPQHQEAQHRVETIVGVGPLVGISLTNTLERVPFRKADAFVAFTGLDPRANDSGHKAGRRRLSKRGPAELRRLLFNAAMSAIKTTVWKPIYESYRTQGWSTTASLVIIARKIARAAWSIHHYRTTFNPERITKCLT

SEQ ID NO: 262805 - protein, 327 aa, unidentified
MEPENMDYAAWIGLDWGSQKHAICLKPADSEAVEHYTLEQKPEALHGWFMNLIARFGSRMLAIAIEQTRGTVIHFLVGLASVHIFTIHPKSLKNYRDAIHPSGAKDDPTDAELLLQFLTLHQDRLKPWIPDKPEVRLLLRLVEFRRKMVGKRVRLTNELTQVLKEYFPAALDCAGGLDKVMACDFLAKWPTLEKLQESQPETIRKFYQEHGSRRPNVIEDRLKQIRSALPLTTDEPVIEPSVFLVQSIAPQLRSVIDAIAQFDQRIKEVFEKHPDAQIFSSFPGAGSTLAPRLLAAMGSDRSRFSSASDVAKYSGIAPVTERSGKSK

SEQ ID NO: 262806 - protein, 375 aa, unidentified
MLYLGIDQHSKQITIALLDEEGNVEQRRQVSTRPEKTREFLQGLQKRGPYMALLEVCGFNDWLIKMLKECGCREIVLIHPERPSKKKTDRRDAYKLAEMLWLNRGRLKDGKKPKGLRRVHIPTKEQQQDRQLTSLRQRLGRQHTRVINRIKRILHRHNRMWECPTKTFQTKAVRKWLADIDLPPIDRLELDSLIAQWDLLDQQLQEVNENITARVTSADVDAPSQILRHVPGLSDFGALAVASRIGDIERFPHARSLPNYFGLTPGCRNSGNATDRLGSITKEGSQIVRFLLGQAVLHVLKRDPDMRRWYRRIRVRRGSKIARVAVMRRLCTIIWHMLKYKEPYYPGGPPRLRNKTQVLGSGSAKGTLKEELAGV

SEQ ID NO: 262807 - protein, 315 aa, unidentified
MERHLATPSFVGIDVSKDRLDVHVRPSGQSFAALRDSKGLEQLVGQLRQLPPALIVLEATGGFEVTVAAALASAGLPLAVVNPRQIRDFARAMGRLAKTDALDAQVIALFAERIRPEPRPLADADSQSLAELVARRRQVVEMIGMEVNRLHQARSSRVQRMLRTTLKTLTAQLAQLDHDIDEIIKRSSLWRAADNLLTSVPGVGDVTAHTLIADLPELGQLDRRRVAALVGVAPVNRDSGQLRGKRAIAGGRIGVRNALYMATLSAVRWNPVISKHYKGLVDRGRPKKVALVACMRRLLGILNAIMRTNTPWQCA

SEQ ID NO: 262808 - protein, 376 aa, unidentified
MEHDSTLYVGLDVHKDSITVAYAVGMADVELFGKVGTMQIDVDRLCKRLQTKAGHICFVYEAGPCGYGLYRRLVDKGFDCMVCAPSLIPRKPGDRVKTDRRDAVKLVRSLRAGDLSAVHVPTIEDEAFRDLARAWSAVREDLKAARCRLKSFLLAHGVHYLGRPNWGPTHRRWLSTFSFDSAWQQLAFNEHRRTIEDRLAQCERLEQALREAVTNWRFYPVVLALQAMRGINFTSAIGLVSELGDLSRIEHPRQLMAWIGVTPSEHSSGGKRRQGSITKTGNSYARKLLVESAWSYRHPARVSIDIQRRHEGLPKPIIDRAWDAQLRLCRRYRKLVAKGKPAHVAIIAVARELAAFIWDVGRLGMTQALPRNVQVA

SEQ ID NO: 262809 - protein, 412 aa, unidentified
MQDILTCAMGLDIHRDVIVACLAKGELGTDPEIEIRSFSTLIPEMRKLRDWVLEAECRYVAMENTGIYWQPIYEMLEPCFDGQISILVVNARHMKNVPGRKTDMRDAQWIATLLRAGLLKGSFIPDKTFRELRHLTRYRKSIVRDITAQKNRIDKFLQSSGFRFTAFLSDAFGASGRNIIRHLMEYGNISREALDRCLKTQTRKRIDEILIALNGSLSEHQRGFLRMIFGHLEALEQHRHTVEDAITKEITKHEEALSLLCSIPGIDVTAAAAIIAEIGTDMSAFPDSQHICSWAGLSPGNNESAGKRKSAHINKGNPYLKSMLCEVGWVISGKRSLYLSGWYWRIKQRKGAKRATISLARKLLALIYTMLKTGSPYNEDCFEIRRKQSERKRASRMVNELQKLGYFVVAPG

SEQ ID NO: 262810 - protein, 360 aa, unidentified
MQQHTTNSARMTVGLDVSDRYSYLCVLDAAGEVVEEGRIPTTPAAIQRRFPSAERMRIVLETGTHSPWISRGLEELGHEVLVANARRLRLIAEHDAKSDRVDAETLARLGRADPRLLAPIRHRAEGTQANLAVVRARDALVRVRTLLVNHVRGAVKSVGGRLPKCSTHSFPRQVGAAIPDELRPALGAILATIEQVSREIRTYDRRLAELCTDAYPETASLQQVPGVGPVTALCYVLTLEDPARFPRSRAVGSYLGLRPKQDDSGRSAPQLRITKAGDQMLRRLLVGSAHYILGPFGPDCDLRRWGLRLAARGGKNAKKRAVVAVARKLAVLLHRLWGTGEVYEPLRRAATIGDAVTATA

SEQ ID NO: 262811 - protein, 390 aa, unidentified
MSTPNPCSANLEGRRLFDPSALYVSLELSSAKWLVTALAPGNEKMSKHVVSGGNGDMLLGLLNKLRIKCEQHIGSPVRIVTIMEAGLDGFCIHRLLEANRIVSHVVEAASMAVSRRHRRAKTDAIDGETLLRTLLAWNRGEPRVCSMVRPPTAEEEDQRRISRERETLVEERIRHTNRIKGLLAAQGIRDFEPLRKGCRERLEQLRTGDGRPLPSHLKAEISRELQRIELVVCQLAAVEAERNALVQPTTTAETPLTPAGLLLQLRGIGHQAAAVLYLEALFRQFDNRRQVAAYAGLAPSPWKSGRCDRDQGVSKAGNPRVRKMMIELAWLWLRYQPGSALSRWFQERVGAERGRVRRISVVALARKLLVALWRYVTLGEIPEGAMLKPG

SEQ ID NO: 262812 - protein, 356 aa, unidentified
MNSTIKYVGMDVHQSAISVAVIDDEGKLIMQSVIATHAAAILDLLHGLRGTLHVTLEEGTQSAWLYDLLVPHVARVVVCNPRKNALLKSGNKSDKIDARKLAELLRAGLLSPVYHGESSARTLQELVRSYTSLTEDTTRVMARLKALYRSHAIACAGKKPYGKRHRQEWLQQLQQVGLKLRAQRLYDELDAVQGLRRAAKREMLGEAHKYHASQILCSIPCVGPVRAAILIARVQVPNRFRTKRQFWAYCGLALETRTSAEYRFVQGQLQRSKKPVFIRGLNLNHNHDLKNVFKATALAASLRPGPLREFYEQRLGKGIKPEMARLTLARKLAAIALILWKKGESFDPKYLTAQAA

SEQ ID NO: 262813 - protein, 342 aa, unidentified
MQITTIGLDIAKNVFQVHGIDANEKVVVRKQLRRSQVLTFFKALPSCLIGMEACATAHYWARELTELGHRVRLMPAKDVKAYVKRNKNDAADAEAICEAVRRPTMRFVGFKSVEQQGRLMQHRTRDLLMRQRTQVINALRAHLAELGITAAQGNAGLKELLKIIASDEDERLPTDAHASLIVLAMELQAMQTLIGSIEKRIMAQHRANEASKRLESIPGIGVIGATAIAATVADPTVFRSGRDFAAWIGLVPRQDSTGGKQKLGPISKQGDRYVRRILVVGAHSVLRRAKQNPEKYPWLTQLLARKPFKVVAVALANKMARIAWALLAKGGTYQAPLLAAAA

SEQ ID NO: 262814 - protein, 315 aa, unidentified
MTTKSETYVGIDVSKDRLDLAVLEEKRIEQYINTERGIKELVDEMKALKPALIVVEVTGGYERAVVKALFEAGLRVARVSGYRARQYARAKGLLAKTDPLDAMNLADYGKHVQPRVYEAKSEEGQYLAGKLARRRQLGEMVQAEKNRLRLAYGDIGPSIERVIKFLQGELKQLEEEIRAYLDANPVWLEQEQLLRSMKAVGPVTAATLLAELPELGKLDGKQIASLVGLAPINQDSGKRSRYRKTGKGRPSVRNVLYMAALTGLRYNPVIKKQYDGLVFRGKVKKVALTACMRKLLTILNAMVRDQKPFGYAAMS

SEQ ID NO: 262815 - protein, 423 aa, unidentified
MLEETQDQQEVIARIAALDIGKAELVCCARLPSPTGSGNRIPEVTTYPTMTRSLQLMADRLLELGVTRVVMEATSDYWKSPFYLLEAHGFDVWLVNAKDVKHLPGRPKTDRLDAVWLCKVAERQMIRPSFVPPKPIRRLRDLTRYRVALVADASAEKNRVEKLLEDAQIKLSVVASDIFGVSGRDMMNALISGQRDPKVLAQMARARMRVKIPQLEEAFHGYFTDHHAFLLSSMLTRIDQISANINALDTKIEAEIAPFAEAVERLDQIPGVGVIAARVIIAEVGVDMSRFPTPAHLASWARFAPSVKESAGRKKGNGATGHGNRYLASVLGEAAISASRTDTFLGERYRRIGRRRGKKRALVAVGRSILVIVWHLLSDPDAKFQDLGANFYDTRLGTERAKRNHVQHLEALGYKVTLEPTAA

SEQ ID NO: 262816 - protein, 455 aa, unidentified
MYTIGIDLAITAAHKAIVAGADGKFVTPLLSFHTRWRDIQQLVARIRKDAPPDVPMWAVMEPTGMAWFPVSIALHSLGVTPYLVSGQRTYDLRRYFKRHASSDRVSARVLAKMPFLDEESLYPLEIPSSIQFACQRACKELDRVQTDIAAIKNRLRDTDRFSWPGLEAVFSSIFSPVARLFRETWYDPFRVVSAGVETVRETFLPLSRRENDLSWVENLVDLASEVTKLYGPDALDYARLQEEVCREQEHLDYLEKRKAALWRDTIRPLYRQLHPSRNLESLYGVGELGAAVHASYIGNADRFPTSRRFRGWHGMIPDSRQSGEFESKGLHISQAGPDLIKKFSYIGADVARRYDPQIASIYHDQIVNKGKHHKQAVCACATHFLDRVYLILKEDRPYELRDVDGTAVTPAQARAIIAQRYTVPEEVRTRNNQRARKERKERRVERRYKRGKRSS

SEQ ID NO: 262817 - protein, 427 aa, unidentified
MIYVGIDIAKDKHDCYITNEDGEVLFSVFTIPNNRRGFDDLYEKIMSVARDESEVKVGLEATGHYSYNLLGYLVGKELKTFVINPLHTSFYRKSLSLRRTKTDRIDAHTIASMLMSDVDLKSYSDTLIRTDELKSLTRYRFDLVRERAKLKTSVSRLVTILFPELEKLVPTIHMASMYALLIKYPTAQDIAGTHLTKLTKLLNEASRGHYGRDMALAIRDAARNSIGTNMPAKSLELKHTLQLIREMDAGIAEIEKVIRQIMDEINSPILTIPGINYGMGAMIIAEIGDFHRFASADKILAYAGLSPSTYQSGKIDSPYSHMEKRGSRYLRYALFNATKYVCNWDPTFAAYLDKKLSQGKHYNVAISHAAKKLVRVMYHLVMCNEEYKGIPVKSGSGRNMVIEEEFLLEEDLQYEETGPKSASGNIL

SEQ ID NO: 262818 - protein, 428 aa, unidentified
MTNRLKVGLDICQERNDVCIQHPDGEILVAHRPFPNNWPGYQELRQFLLATLEIHSCQGIDLAGEATGPFWFHTFRLLAQDPLLADRDLHLYLFNPKLVHGFRQALPPEDKDDIKDPQLIANYLRFSHPQHPWHYQSKYLALQRLTRHHCHLAHTLAREKTYFLSLLYLKASEYGHLKPFSDLLGKTSTTILQNYATIGELAAIPLDELTELLDRLGKRRFPDPADNARKLLQVARDSYPMPAELLVPINFALHQLLEEIVCLEKLLAASRQNLAAALQDFPTAQALQAWNGLGPVCTGGIIAEIQDPQRFVEGLKYDRKSKTMRPKTVWDGQAALAKFAGLWWPQKQSGNLAAEERHLCTQGNVYLRYYLIEAANSLRRHTAEYAAYYERKYAESRKHHHWRALVLTARKLIRPIFMLLMKPVADWY

SEQ ID NO: 262819 - protein, 425 aa, unidentified
MKTTTTYAAFVGLDWADRSHQVCLRPAEGDRDEQSKLAHEPLALRTWASTLRARFPVGKIAVALEQTKGPLVYALSMHAHLELFPINPAMLAKYREAAKAASGTKNDPLDASLLCELLRVHRDWLRSLPAVPTATRELQILLETRRGLVDQRTGLCCQLGAALKGYYPQALALVGHDVGTPLACAFLRRWPTLSAVQRARPETLRNFYHAHQVRSEERIEERLAVVRSAVALTDDAAVLATLPVLVASIVAQLEVLAPAIADYDRRIAASFASQADAALFESLPGAGQQLAPRLYVAYGPDRSRYTSALQLQQYSGIAPVKEQSGKTEVTHWRWHCPKFLRQSFHEFAGCSIPQSRWAKAYYDEQIARGKPHHRVVRALAYKWQRIMFRCWQNHEPYDEERYLAALRRHHSPLISRIDSTRVEAA

SEQ ID NO: 262820 - protein, 367 aa, unidentified
MRDDITYVGMDVHKRQTKVAILRADGKDVVEWSCATDMKRLARRLKKEGDGELLCCYEAGPCGYWVQRELAKSGIRCIVVAPSLIPRKPGERIKTDRRDALKLARLLRVGELTEVHPPSRQEEAARDLCRAREDAKGDLKRSRHRLQKYLDRRGVLWGKGSWTLAHRAWLRTVKFPDPIEQAVFDDYLATVEWNEERVKGLQERLEALSEQAPYAEPVSLLRCFRGIDTVSAMTLVTELHGFMRFESPRALMNYLGMVPSEDSTGERRRQGSITKTGNGHVRRILVEAAWHYRHRPYVSRALRARRAGQPGHVVALADRAQQRLHRRYWRLVSRGKATNKAVVAVGRELIGFLWAVLYPQSLETQQA

SEQ ID NO: 262821 - protein, 445 aa, unidentified
MAHANRLSRGDVRRNARLDRLRGVVSRDRAVLAVDLADDKQVVVICDHDSRVLARRTWRCRPWQLDKALGWGLAVACRHGFAGVVVACEPTGHRWRVVVEHAHRLGLEAVCVQPLLVRRAREAEDFTRDKSDDKDALLIARLTTQLHCYLPEQPTAAWARLRHLGNRRVEQLTHTTAAQQRLRDLLECGWPAALEVARHPLDSLTWRAAMTVGRCDPVYIRRLGLARFARAVARELPRWGGQRRHLGVLRALYAATGDDRGVTAQRAGALERAALVLADFKQALAALAEVEARMAKVLAELGLAELVTSIPGLSVVGAAAILAETGDPTRFDDAKAVVKHAGLCPRDNASGSFAGKTTISGRGRPLLRLAAWRAVWGALPHNPVFAARYTHLTSRQRNRLSDGQARTAVAAALLRQLWVVCVNRIPWEPTVASGTTGKEVTDPAA

SEQ ID NO: 262822 - protein, 344 aa, unidentified
MDNHTQYSGFAGVDLAKKVMQIHFVSGDGEITDKQVKRAEFLDFFRNRSKCLIGMEACGASQDWARKLEAMGHEVHLMSPKAVKPFVSGQKNDYNDAIGIYKAIFNGVRRVPVKSTEIRDLQTLRRIRSQVTKDKVKEINHVRGLLAEYGIVMGKSITAFNKGISSALESLKERGDVSPLVAEELQTTVESIKTKIERQKRLDREIEQLARGCKNYENFLKTPGVGPFTAAMLCVLLCDPAIFANGRQFAAYIGLAPRSRGSGGKNFIIGIPSKFNCDSESRAVFVECAQALARYKNKSPWVDGILRRKPKKVAVIAIANKLARQVWAMANKGESFKQMTILTA

SEQ ID NO: 262823 - protein, 386 aa, unidentified
MQKAITYVGLDVHKDSIVVSLAEAGLRGRLREVREYGKVLNTPAALKAMATKLAAGGNELRFCYEAGPCGYGVQRQLSAMGHHCAVVAPSLVPRKPGERIKTDRRDAAKLAKLHRASELTPVWVPDPAHEAMRDLVRARLAAVRNIREARQQLSGFLLRNGYHYHRHPWTLMHRRWMADLKFDQPLHYIVLQDCIAAVEASEQRRDRLEAGIIAALPEWSLAPLVETLQALRGIALVSATTLVAELGDIARFSNPRQLMAYLGLVPSEHSSGRSRRQGGITKAGNAAARRMLIEAAWSYRFPARISRYQLSQQKRLPKLIRDIAWKAQERLCRRHRKLMRAGKPKTVVCAAIARELTGFVWAIATETSPAIGKKGTGKPATMVAVS

SEQ ID NO: 262824 - protein, 363 aa, unidentified
MIRISRNTQTIAVALADEGKRGDVREHGTIANTAAALTKLVNKLAKDGRELKFCYEAGPCGYGIQRQLSVAGHECIVVAPSLIPIKAGDRIKTDRRDAINLAKLHRAGELTPVWIPDQAHEAVRDLVRARLAAVRSLRQARQQLSGFLLRHSLHYSRPAWTLMHRRWLAELRFKQPVHYLVLEDCLAVIEAATARRDRLEAHIRAALADWSLGPVVRALQALRGVALVAAATLVAELGDMTRFTNPRQLMAYLGLVPSEHSSGGKRRQGGITKAGNGAARRMLIEAAWTYRFPARISRDLLLRQEGVSGPIRETAWKAQTRLCGRYRKLSHTGKSAKIVTTAIARELSGFVWAIAKHVEAAAA

SEQ ID NO: 262825 - protein, 351 aa, unidentified
MTMVGGLDVHRQQITFDYVDDDGLVHWGQIRPATRKTLRGWLAEHCPDGDGEFALEGCTGWRYVSEELAAAGVGVHLGDPAEIAVLRGPKKRAKTDRADARLLRTLLLEGRFPESWIPPAHVAEIRSLGRLYYTLMDERRAWQQRIHAQLFHQGCPPIKALLSAAGREALARAQLSAAGRQYVDTALRRIDELSAEIEPLRAQLVNFARRQQGCQALQRHYGIGWLCAAIIWTEIGDARRFRSSDQLVRFAGLDITVYSSDSKRSPGHLSRQGSPELRWAAFEAARCAARRGSPDYAYYRKLAAKRDGHNGKNPTLAVERKILRRCYHTLRDLGDAALALPDTRPQQEVAA

SEQ ID NO: 262826 - protein, 346 aa, unidentified
MKHYVGLDVSVKETAICIVDETGKIVREAKVTTEPEAVVALLNDAGLGYARVGLEAGPMSQWMVTGLLAAGLPVVCVETRHMKVVLKAQQVNKSDRNDARGRAPMMRVGLYKPVHVKTLASQQERMLLTSRKLLRDKLQDTENELRGTLRNFGLRVGVVSSGRFEARIRELLKGHPPLGAIVAPLLAVRRVLREQFAVLHKMVLDRVRSDRLCRRLITVPGVGPVVALTFRATVDQPQRFAHSKMVGAHFGLVPRRFQSGETDYDGRISKCGDAMMRTALYEAAQVLLTRTQKWSWLKAWGMQLARRRGGKKAIVALARRLAVILHRMWIDGTQFRWRKEADAVAA

SEQ ID NO: 262827 - protein, 333 aa, unidentified
MFESSKIKVEVKVEVEVEAATPSTFVGIDVSKEKLDVCVMPGGRLHAFANDAAGHAKLVALSQSLGNVLLVIESTGGYERPALFALQDAGLAVALVNPRQVRDFAKGIGQLAKTDALDAAVLAEFARLVAPRPTDKTSEKQRELEALVTRRRQLLEVRVAEKNRAGQTVDKFIQKTLDRMIQTLDCEIKAIEDRIAALLESDDQWKAKLELLVSTPGIGKIAAATLVAELPELGKLNRQQIASLVGVAPFAKESGTMRGRRSTWGGRRKVRSVLYMAALTARRCNPVIQAFAQRLAIAGKSFKAIQVACIRKLLVILNTMVKNNTPWENVLKN

SEQ ID NO: 262828 - protein, 428 aa, unidentified
MKMTPTALEFKREDVLDVAADVHKKILNLVARLPGMECEDACVNSTRQIEKQLQAFHQMAMEHGKKTLRIVCEPSGEYERKLLRTARRLGFLTAYVNTESVKKFRVIESNDTGKTDHKDPRVINSLAAQGKTIRHRILPPLYQALRKLGAMVEDEEITIVSLRGRIHRVLVELFCDYDFSKDFLYTASGAALVAKYGCNPYKIIRSGSGRFSGAMRRSVKRIRVLTLQRLWNTAECSVLNDMAPEYIEVLEEHLRQLYRDWQEHKARKERLEQQMIVILRQLRAEDPRIPAPTRGIISEPLLARLLAETGPLGDFDGERALLRYGGMNLRERQSGQYKGLTRISKKGRGRLRGVLGNIVLPLVKRAGLYGEFYQGKRVKDKMCGNKAMTAVMRSFLAKFYGWYRSGRAFDRERFFLSLSEYRKQHKAA

SEQ ID NO: 262829 - protein, 345 aa, unidentified
MKHFAGLDVSLDETTVCVVDELGGIVREARVPSEPEALVAFFRGLGLAMERIGLEACSLSAWLHEGLTAAGLPAVCLETRRAKAAMGAMPNKTDRNDARGIAQIVRTGWYRAVHVKSPACRSWRALLAARRLVLNKMRDVENGLRALLREAGLKLGRPGRKEFAARVRELVGTDAVLSASAEPLLAIIAAMAHELAQLTRRVLAIVRDEPVCRRLMGVPGVGPLTALAFRATVDRPDRFRRSRDVGAHLGLTPKRYQSGETDVQGGISRCGDELARTALYEAAHSLLVRSRKWSALRAWGMQVARRRGMARARVAVARKLAGVLHRMWADDSEFRWGEEGAMPAA

SEQ ID NO: 262830 - protein, 345 aa, unidentified
MYRTRVGVDLAKEVIQVCTYRNKKVQSNIEMTPNEFLCWLIKTKPATIIFEACSTSNYWKQKAIEAGHDARLISAKLVATVRQNQKTDKNDALAIVQAASLPDVTFIGGKTVEQQQLQSIKRLRELAVKQQGASQKQLVSLLLELNIRISNRKGGIICAIEGVLEDAENGLSVECRAAIYTAKEQLSILIKAVHCYDDCLDKSVASHPDCKKLLKLEGVGTVNAINLYLALGCAEIGTFSKGRDASACIGVTPIQYSSGGTVKLGSIGKYTKNSLLRSQLICGAMATIRHVVKREARTQKDVWLKALVERRGKKCAAVALANKTVRTAFAMLTKGTEYKAELLAV

SEQ ID NO: 262831 - protein, 389 aa, unidentified
MFYLGIDIGKNTHVASLIDSKKKVLFKAFSFSNSIDGAESLICKLEPFKNQLEIGMEATGHYWLSLYSYLSEKNFTVRVINPIQTDGWRQGIEIRKRKTDIIDSLLIADLLRYGDFVETSLSNEDYLSLRNLSRFRSYLISSIGDLKRKTIALLDQVFPEYASSFSNIFGKTSKEILANFSSPSDFEDINSEDLQSFLDNVTMKKFAARKLEELSKKASKSFGVNFCMDSFSLQIKMLIGQISFIQNQVLDVEKEIKSLLEKLNSPITTIPGIGAVNAATILGEIGDIKRFSNPSKLVAYAGLDSTVSQSGKFESTSNHLTKRGSPYLRRALFQSALRAEFCDPVFSDYYQKKITEGKHHLVATNAVARKLVHTIFAVLTKDKPYQVQS

SEQ ID NO: 262832 - protein, 297 aa, unidentified
MVDTQRALTGGVDTHADVHVAAVIDPDGGLLGVKSFATNLAGYKLLSGWMGTFGEIGLVGVEGTGSYGAGLARHLHREGLVVVEVDRPNLQERARQGKSDSLDAIEAARAALPGRAFGVAKTRDGNVEAIRALMVVRRSARESRTKAMNQIRQLVDTAPDELRERFVGVPSWRIAEGVAILRVHADPVRMATKCALGMLGRRAVALGEEGKRLDVLIARLVDKVAPELVELVGLGPDTAALLLIAAGDNPSRLRSEATWAKLCGVAPLEASSGKVTRHRLNRGGDRQANSALWRIVF

SEQ ID NO: 262833 - protein, 425 aa, unidentified
MSASDSLSSPVEVSDFASVVGVDIGSQQAVYCVCQPDKSQVVKPTEVATSRAGFEALDQRLRQLAVPPQRILIGLEATGRYSENMYQFLQEQGYRLCLLHPRQTHQFAQQRGLRAKTDRLDATTIARLLLSGEARPGYVPDELISTYRELERLHSQLTNDSARYQNEIQALLVVLFPEFVQVFADPCRPTAVGVLKRYPGAQAILDAGVEALTSTLRELAPRHYGRPTAQELVRLASQSVATPVASSGRALSLKVLCDQLEHTLTNLAQIAHELDQLLDRDHGASGLKSTPEFGRKTVAVLRAELGDVTRFQRVDQVVAYVGLDLQVRQSGKWKGQVKLSKRGSGRVRQVLYMAALRSLALPASAFGAYYRRLVARGLKARDALTAVMRKMLIVAYHLLRSNETYDPTKVCAVACTLPRTPSSDS

SEQ ID NO: 262834 - protein, 452 aa, unidentified
MLNQINPQAGAVDVGSESLHVAVYNGPTRVFKTFTSELYQVVKFFQEHGVQSVAMEATGVYWISLYEVLEEAGLKLYVVNGAHVKNLPGRKSDMSDCQWLAELHAHGLLRSGFVPPEPIRRLRDYQRLRQDHIQMGSAHILHMQKALDRMNLKIHEVLSQVVGQSGLRMIRAILRGEREPEKLVELCDCQILSAKRERMVEALKGFWHPEQLFALGQALEGWEFYQKQMAACDQQIAELMEQISDGQAPQPGRPLPPCPPRVSTGGKSSGKPIRHNAPLIADLHQKMIRFCRGHDLEQLPSMTDYSALQIVAEVGTDMSPWPTDKHFVAWLGLAPASRVSGKSRRREKRFRGRAGRLFCLAARSLARSKYLALGGFYRRIRATRGAQVANIAAARKLAQLFYWTLKHGFTYVEEGLQAYEAKYRAQSIKKLKAVARHFGLSVISAESTPPAP

SEQ ID NO: 262835 - protein, 450 aa, unidentified
MDKSSKKKSGVKKITQFEIIRHQVAGVDVSDNAGMIVAYPLNGHEIAIEEFECYTCDLRRLSSRLKEYRIESVAMEATGVYWIPLFLLLQEDGFEVYLVNSKHVKNVTGRKDDEGDAEWIQKLHRCGLLSASFQPDNLTRSLRSAVRHRSGLVSTRSCYLNRMQKALEQMNIKFHTVISDMDGKTGLRIIHAVFEGERNAEKLASLCDPRIKATRAEMVKSLEGFWSETHLFELRQCYKAFHFHNDLIEECDRELEKILLEMTAMKNEGLIPEMEDVKRKKNYKRPVQINVTAYLKELNGIDITGITGISEISALTILSEAGTDMSKWKTEKHFTSWLGLAPNTKKSGGKVISSRVPKKKHYAGQAFRMGAMSLRNNKGPLGDYYRRIRTYAGAPKAIVAVARKLAVIYYHMMTSKQSFNPVELEKSQEKYKERKIKQLERKLDKLKKAS

SEQ ID NO: 262836 - protein, 354 aa, unidentified
MTIVADTYTYVVGVDTHAATHHYAIIEARTGAVVDHAQFPTHTKGLLRAAAWIARRTGEPTGDLDQVLVSIEGTRSYGAQLATLLAHTGYRVVDAPSPKRERGSGKNDHIDAIAAARGRLNKDTTKLADARAGQVSAALQVLLTARNSMTSERTRAVNALNALLRVHDLGVDARRKINRPTIRTIAAWRTRKNDTLVLTTARGEAIRLATRILALDVEVGANERDLLAIVASTAPTLLDLTGVGPVNAAIVLTAWSHPGRVRHDAAFAKLGGACPLEVSSGNHDEHRLNRTGDRQLNRALHSIAKTRMRHDPRTRDYVARRPTQGLSTPRIRRCLKRYIARELYRHLATGVDTL

SEQ ID NO: 262837 - protein, 354 aa, unidentified
MKREYFIGLDTHGSFCEMAVVSGAGDVVQRGRCQTTIAAVRALIEKVASPRHLVFEEGPLANWLYRNLTDQVDSLSVAQPRRNRLICCDGDKDDPVDAEKLAQLLRGKYVKTVHQTASLEETVFKQLVAQYVRRVRRRVAAGQQITGLLKQHGVMARAKHFDKAEDRAGLLEQLPAQALLRELVTVSLKEYDAVLVCEEAWRKRLVQRAKQDEVVVRFEALPGISWIRAAVLRVYLDTPWRFRSPKALWKYLGIGLDRRRSGDGPEILSVPWQVNRLLKSTILGAARSAVAQGDNPFADQYRRWIDHGLSPKMAKRNVARSLSATLWGLWKSGTVYHPEWVGVNLAATKGIETS

SEQ ID NO: 262838 - protein, 445 aa, unidentified
MDVVFTRCAGLDVHKKSITACRMVPDPTGCEAEGIMELRTFGTLTRDLLSLADWLTEASITHVAMESTGEYWKPVYNLLEDTFTVFLVNAAHVKNVPGRKTDKADARWLAKLMRFGLLQASFIPPKGQRDLRDLTRYRTKLVQERVREVNRVQGVLERANIKLASVIADILGVSGRAMLEALIAGRADPAAMAELAKRRMRSKIPLIEQALTGIVQDHHRQLLAMQLAHIDFLDEQIEALNRAIEASLSALSVDAPASEEKALLSSPSPVSPPVASPTLTFTRAVELLDTIPGIDQRGAEVIVAEIGVDMSRFETAPRLAAWAGVAPGNDESAGKQRSGKTRKGNRPLRAILTQLAHAAVRTKGTYLSALYQRLAARRGKNRAIIAVAHAIMRSAFYMLSRQEPYRELGANYFDERRRHYTVDRLARRIEHRGYRVHLEPVASVA

SEQ ID NO: 262839 - protein, 369 aa, unidentified
MTVYIGVDLHKTQFTVHVRVGDRIESLSEIKQYPTTAAGYTKFLERIAGYKTADFAVKIGVESTGNTRFFKNQVEKAGAEVTVINTLKFKVINESTKKTDKHDASTISWFLSKDMLPESHICSKETENLRRLLKSRERLVRSIVGQKNEVHALLVSMGLDDELRSLQSKKGRQKVLDTLLSHSDLVLEAQSVKLIFQIIEQMIESVKIIEKHLSELTEDDAMVNRLMTIRGCGKITAWIIRAYTEDIGRFANAKKYAAFCGLVPWVQDSNESVRHGKITKRGPQELRTAYVQLVLGIRRCKDTWGWRIIQRLDYMKKNKGSGKSIVAAARKMAEIVWALLTEGQDFDSKKMMGTYKPLTLTEQALAAMN

SEQ ID NO: 262840 - protein, 319 aa, unidentified
MTKQAIEFEQVIERGCGLDVHRDTVVATVMGKGIQTETRTFGTTTSSLKELGEWLESIQVTDGAMESTGIYWKPVLHVLREYPLNLLVVNARHIKNVPGRKTDKADSQWICKLLISGLLKGSFIPPENIQALRDLHRYKKKLVGTVASEKNRIIRVLEDANIKLSSVVSDTSGVTATYLINGLIEGRKDLEKLVSECYHKKLRSTPDQIVEAINGRLIPHLRFLLKSMQKHIQSVEEQIAEIDTEIETHIKYFEQEIELLQTIPGVGKEGAIGIVAEIGVDMDVFPSEHHLASHSGMCPGNNESAGKKKVQEHDKGTSI

SEQ ID NO: 262841 - protein, 317 aa, unidentified
MALQRIFVGIDVSKDWLDLWLEPPKRFERVSNDATGWAAILGLLHSLGAAAGLVVAFEATGGYERGLRQVLLEAGFEVRRLNPLRVRLYAKSLGRNAKNDRIDARVIARYAEAADTMPETLDPARERLAELVAHRRRLIAERVALGNQTGMLGCLLLQTQNRKRLALIARHVDQTDALIREAVGQLPSLLAKLELLKTLKGVKDVTAIALLALLPELGRITRRAIAALVGLAPFDHDSGKLKGARAIAGGRTPVRTALYMAARAAARSKSPLGDFYRRLIAAGKTPKVATVALMRKMLVTLNAMVRDNQTWKHAKPC

SEQ ID NO: 262842 - protein, 339 aa, unidentified
MDTIGLDLHKRESQLCVLTEAGEIVERRIVTSRERFTAVLGSQPSARILVEASTESEWVARHLESLGHEVIVADPNFAPMYATRRRGVKTDRRDARTLAEACRLGAYRPVHRASAPQRHVRAQLAVRDALIRTRTRYVSVVKALVRRDGLRLPPGNPVHTDAKLAALPLPVPLARELAPLRALFEPLNNEITAADERLAAVAAADPVVERLRTAPGIGPVTAVAFVATLDDVTRFASAHHVAAYLGLTPREYSSGEQQHRGRISKTGNARMRYLLVEAAWRVLRTTDPAAAALRAWADGIAQRRGRSVAAVALARRLAGVLYAMWRDGTDYQAPPAAAP

SEQ ID NO: 262843 - protein, 404 aa, unidentified
MQERTAGLDLASEQHRLVIVDGDGGELEQRRIGHTEPGIAALVRRLLELRLARVAIEQPNGIVVDRLLDAGIAVVPVHPNQLAAARERYRSGGGKSDGFDAYVLAELARTDMHRFRLLEPDSDETKALRALTRSREDLVEQKVALANQLRAQLDAFWPGAKSIFADVDSPIALAFLERYPSPADARALGERRLAGFLARNGYCGRRTAAELLTRLRSAPEGRAGEAEQEARRVVVLALVAALKPLVEQIKLLTSQIGGALRTHHDGDIFLSLFRDPKSVVTAAELLAEIGDNRQRHPTSASLEAIAGQAPVAVQSGKKKVACFRWACNKNLRSAISVLADSSRHHNPWAADIYQRARNRGHDHPHALRILGRAWLRIIWRLWQNHTTYDPHRHGSLNRLLTAQG

SEQ ID NO: 262844 - protein, 478 aa, unidentified
MATAKTSRTQRLTRKQRKELGRRIWSDHPGLEVVHRDAAGIDIGSEEHYVAVGPDRDAEPVRTFGCFTEDLQRLGRWLTECGVRTVVMQSTGVFWIPVYDVLEQHGLDVWLVNAQDTRNLPGRKSDVQESQWLLKLHTYGLLRKSFRPEANIRALRTCWRERAEYVQQAGTCIQRIQKALTEMNVQLTNVLSDLSGVTGMRILRAIVAGERDGRRLAEFRDGRVQASQETIAKSLEGTWRPEQLAILQRQLADWDHVRQQIAACDVDLAAMMKQLPDAEVDPAPPAATPPSKPPGGRQKNGRSSRNQPDFDLSAELKRVTGVDLTRIDGVKEMTIQTILTEAGLDMSKWATENHFVSWIGLSPRNDISGGKVLKRKTRKVVSRLATAFRLAATTLRASDSYLGEQFRRLRTRLGAPKAITAMGAKLARLVYRMLKYGQEYVDQGAAHYAAKHREQQLRHLQRKAAQHGLTLVSILHST

SEQ ID NO: 262845 - protein, 303 aa, unidentified
MDSYTGIDISKYSFNVHVTSPETDRHFEYTPSGIQECVQWLVSLKPPLIVLEATGGYERRLVSELVAADLPVRVVNPKRIRDFARAKGKLAKTDKLDARVIAQYAAMFQPPAQAPVDEISLKIKELVARRRQLLSMRTQEANRREHASDQDIAHSISTVMKAFDKELENIEAKITDYIDQSPNLKQKSDLLQTMPGIGQTTAFALVSLLPELGRLNRRQIAALVGLAPINRDSGIFRGKRMTSGGRREVRTRLYMPTLVATQHNPVIRDYYQRLLKKGKPRLVAVVACMRKIFVILNAMIAKN

SEQ ID NO: 262846 - protein, 330 aa, unidentified
MTNAKVRESTSSPLEFVGVDMAQQVFEWALHGVRGTRSAGNNERGFEALREALKGRNLGLIVLEATGGLERALAGYLLRHGLPVAVVNPRAAREFARSMGHLAKTDAIDAVALAHLAQTLAAKADQAGVRLMPPSAEVELLQAMVARRVQLLSMRTAEKNRLGGAVRVLHKSIEAVIKTLDKQIAKLDRDIDAHLEQHFTEQAQRFDAIKGLGMTTCAAVLAFMPELGTISGARAAKLAGLAPLNNDSGKEHGKRHIWGGRSIVRSALHMATLSAVRFNPVIKAFYDRLLAAGKPKKVALTACSHKLLRILNAMARTGQPWDESLHAITP

SEQ ID NO: 262847 - protein, 424 aa, unidentified
MGKKNSSPAGLGALYERVCGLDVHKKVIVASLRILDPRVGTVQITRRQYGTMTADLLELRGWLAEAKVTHVAMESTGVYWQPVFNLLEGHLETWVVNAQHIKKVPGRKTDMKDADWIAQLLQCGLLKPSFVPDRQQRELRDLTRQQTKLVQQRNAVDNRIQKVLESANIKLGSVASDVLGVSGRKMIEALIAGEKDVRVLAELAQKKLRDKIPQLQRALTGELTEHHRFLLQQLLGQYDFLEKEIARTSERLGAVAPPSFRAAVEQLDAVAGVGERGAKALLAETGTDMSRFPTHKHLASWAGQCPGNHESAGKRRSGKTPAANRHLDAVLTEMAHAAVRTKNSYFKAQYHRLAGRRGKKRAIGAVKHSLLVTVYFMLRDDKPYKDLGVDYFDKLNPQQSIRYHVRKLQELGQEVELSPMADAA

SEQ ID NO: 262848 - protein, 349 aa, unidentified
MKYVGIDVGKQKCAVAVMDAEGRISDEFTFLNSNEGIQGLISRLSVYDEVVMESTGSVWTNLYDRLEQVHMKVVLANPLKTKAIASARIKTDTIDARILAHLLRADLIPSCYVPPYEIREMRYLLRHRASIVKIRTMVKNKIHSMLDRNGIAAAGFSDLFGKRGMEWLKSVKLPSLDRLMLDNHMEHLESLRRQVEAVDREITVRASKDEYVKLLLSMTGVDVYSALLIRSEIGDISRFSSYKKLISWAGLAPSLHQSGSVEYHGSITKQGSRMLRWIMVEAARTAVNSDSRLSEFYERLKQRRGGQKAIVAVACKMLKIIWTMLTRNEPYESRNQRRYDKKLNFVAKQ

SEQ ID NO: 262849 - protein, 401 aa, unidentified
MKYGVGIDVSKGKSTISILSIEGEVIEMPFDINHDVEDLEKLDKKLQMFSKEDLKIVLEQTGTYHLPILIYLLDKGYCVIAENALKIKKYLDRSLRKAKTDKKDSLKLAEYACDNWYKLKANFVEEEKYKELRFLSRQYFSLNSMKVQQKVDFSDLSDMLFPGYYQLLEECNFIVGLKIFEKFSDPKIIRKKKLETFLNDIEKIAQKIGQKRAGRNLAIKVYELAKKSVPSCPSNSSTQLILNKRVVALINLIETTNEIIAKMNEIAKTMDEYKEVRNMKGVGDRLAPLLIAEIGDIRRFKNAGSLIAYAGIDSPPYQSGKYEATNRHISKRGNKYLRKTGFEVMQSIKSFCRIDCEIYDYIVKKESEGKCKKSAKIAGLNKFLRQYYGILKRKYIELGTW

SEQ ID NO: 262850 - protein, 411 aa, unidentified
MQVVYENCAGLDVHKKTVVACLITPKEKGGWEKEIRTFSTMTKDLLNLSDWLTSKGCTQVAMESTGEYWRPVYNILEGNLEVILVNARHIKAVPGRKTDIKDAQWIGELLQHGLLRPSFIPPVPQRDLRDLTRHRSNFVRERVNLVNRVQKVLESANIKLGCVASDVLGVSGRAMLEAIVAGNSSPEVMAALAQGTLRQKQDLLVEALSGRVRPHQQFILAQLLSLIDSIDETIAQFDREIEEYCRPFEQAVELVDTIPGVARRTAEVIVSEIGTDMSRFPSAEHLAAWAGLAPGNYESGGKTLSASTRKGNRVLRTILVQSAHALARTKTYLAAQYRRLSARRGKKRAAVAVAHSILVIAYHLISRQEPYRDLGADYFDQQRPESVKKRLVKRLEKLGYQVTLEPVPVVA

SEQ ID NO: 262851 - protein, 412 aa, unidentified
MKDLLEISCGLDVHKEKIVACILTGPLGKPTRSEIREFSTLIPDMIALRHWIVSKNCHHVAMESTGIYWMPIYEILEDAFYGDITLLVVNARHMKNVPGKKTDMRDSEWISTLLRAGLLNGSFIPEKRIREFRDLNRYRKSVIRDITSQKNRIEKFLQSSGFRLSSFISDIFGASGRNIILHLIEHWQIDKTALDSCLKTKTRNRIDEILMSVNGTLSEHQKAFLRILMTHYDSLKKHLAEIETSLEEDMAPFALQVEQLNSIYGISTTASCAIIAEIGIDMKPFKTAEHICSWAGLCPGNNESAGKRKSTSVTKGNPYIKSMLCEIAWVIAGKRNTYLSAWYWRIKQKKGAKKAIVALARKLLVIIYTMLKQGTLFDESCFETRRKHCEQKQLSRYIRELEKHGYHVEAQS

SEQ ID NO: 262852 - protein, 379 aa, unidentified
MRSYNGKGHGRPIMRIGPCRPSQSVVAVSSAKKNPNSCEGMKPESKLERVPLIIRLARDKMNQASLSEYVGVDVSKAQLDVAVGPVGAFWSAANDAIGIGRTVERLQELQPALIVIESTGGLEVPLMVELAAAELPFALVHPGRVRDFARSMGLLAKTDKLDARLLAQFGEAIRPPLTQLPSPEVQELNGLMVRRRQVLDLIVDEQNHLASTRLSLRPRIQVHLDWLQTELDDLDRAIEALIECIPAFKEKEAILRSAKGVGPVLSAKLLSGLPELGQLNRKKIAALVGVAPFNDDSGYRRGKRRIKGGRADIRQVLYMATVAAVRFNPAIRHFYQHLLSQGKLKMVAIVACMRKFLTILNAMIRDMRPFAYASAPVKS

SEQ ID NO: 262853 - protein, 366 aa, unidentified
MNKISTDAMNRIENLKGDQLTIGLDLGDRFSHYCILNASGEVIAEHHLATTAKGIDEVFGRIPRNRIALETGTHSPWVSRQLTRLGHEVIVAHARNVRLIGDSSRKDDQFDARTLARLARIDPGLLGPVQHRSAQAQLHLTVIRARAGLVGARTALVNTVRGLTKSYGERLPKCGTQRMNREVAQGLSQELRDALDPLFREIESLNERIAEYDRRIERIAKEVYPQVALLKQVKGVGTLIALAYVLTVDDPYRFRRSRDAGCFVGLRPGRRNSGMSQPQLHISKEGDVYLRTMLVQGAHYILGPFGEDSDLRRWGLKLAERGGKNAKKRAVVAVARKLAVLLHKLWVSGEVYEPLRNNHKVVAAVA

SEQ ID NO: 262854 - protein, 342 aa, unidentified
MTVYIGVDIHARQQTLSYLDTSDGTTGQVVLDHEQNDVREFYRQFQGEVIVGIEASGYTNWYEELVEQLGHQLLVGDAGEIRLLARRRQKNDRRDADLLLELLVRREFPILYRSSKASREILRQLRYRHKLVKLRTMVANSLHALALNAGISLRAKLLTKGGRRQLSGLQLSAISQQQRDQLLSLAEELTQRIQKVEQWLEAQAKNDERVQRLQTHPGVGLLTSLCLVHTLGEASRFSSLRKVAAYVGFDPMEDSSAERKAYGGISKAGSRLLRYLLIEAGQTAARDDEQLKQFYRRLVPRRGKARAKVAVGRKLLIRCFIMWRAEIDYAEFLRRGKQEETE

SEQ ID NO: 262855 - protein, 333 aa, unidentified
MTIVAYSHPFVVGVDTHARKHVFAIIAVPSGEQIDTREFPVTGAGISRAIAWVARRTEADLATLWVIEGAASYGAVLAGAVAAAGYQVAEATRMDAMPRRGAGKSDPLDAHRIASAVLALEEHKLRRPRLNEGVRAALRVLVCARQSMTTDRTRTVNALTALLRTNDLGLDARSSLTGSQILEVSRWRAREEPLAVSVARSEAVRLAKRIGDLDAEIKANGSRITELVEVSEAAPLLQESGFGPVTAAICLTAWSHQGRVRSEAAFASLAAVNPIPASSGNTVRHRLNRGGDRTLNKALHMIALTRMAFDPETIAYAAKRKAEGLTKRRSAGA

SEQ ID NO: 262856 - protein, 340 aa, unidentified
MKKVYAGIDLHGNNNYLGIMDKQGKKVFKRKLPNIAEVILEALRPFQKGIQGIVVESTFNWYWLVDRLMNEGYKVHLANPAAIQQYAGKKHSDDKDDAFWLAEMLRLGILPEGYIYPKEERPIRDLLRKRGHLVRLRTSLMLSLQNIISRNCGIKLSASQMKKVRKDEVLPVLVGQEDLALSGRVSKETIDFLTRQIRQVENFVEDKVELKAPYQYLQTICGVGKILSLTIMLETGPIERFAQVGNYTSYCRKVPSKWTSNEKTKGKGNKKNGNKYLAWAFSEAAELARRYEGQARAYYNKKSAKTNFLVAHTALAHKLARAAYFVMRDQVPFDPARVFA

SEQ ID NO: 262857 - protein, 405 aa, unidentified
MNKQWFIGIDVAGAGIHFQVQNPHGELFGEDKVSKDLDGFERFLRLCEQWGVLWDRALVIVEATGRHHLPWCERLVAQGTDVYALNPLLTKRLYSSRNAIRDNKDDRLDAHSLAEIGRIHRGELERFAYRRQSDKIGLQSLIGARKEVRKQCTNLLKSAGDLLDLVFPEAKKLGLRLTQDGFRRLLLRNTTPAEIARMRESDLDHALGKKADKLLEAARASFTPTEVSSACKPALRALIETIETLLRQLALLDQTIAETFSQREHARNKQAEKLIRSIPGFGEKTAAVIAAFLPEGFEQWGNKKKITAKLQAFYGCDPRRRESGTFKGKVKLSKRGIEIVRTSLFQASFCSIMHDPLLRAYYDKKKAEGDHHKKAIFDLVRKNLRRIVAVLVDQKEFQIRHEKTA

SEQ ID NO: 262858 - protein, 340 aa, unidentified
MRELYAGCDLHGNSNFFGIIDGQGKRIFKKKLANDLVWIRDVLRPFQEELVGVAVESTYNWYWMVDGLMELGCKVHLANPAAIQQYSGLKHADDKHDAFWLAEMLRLGILPEGYIYPKEQRPVRDLLRKRGHLVRIRSSLVLSLQNILSRNLGRTVSVNDVKSVREDRIEPLLERNEDLALAGRVSKEAIDHLTGQILKIEWAVQKKIRLKQEYRYLLTLPGVGKILALTIMLETGPISRFETVGEYASYCRKVPSQWISNGKRKGSGNRKNGNKYLSWAYAEASEFARRLHPEPRAYYNRKMQKTNAAVAHSALSNKLARAAYYIMRDQVPFNAKKLFG

SEQ ID NO: 262859 - protein, 515 aa, unidentified
MKRHIGVDLGIASSHKAIVVDENGRSHKPIAIEVSIEGYERLAELAFGGADRCRSEVVMEPTGNMWLPLAAFLNFRGVPVVVGTGKKVSDLCKFYRRHVKTDVIDAEAMARLPEVDPKGCHTFEMPTIELLSLRRLVKQRERFVRQTTACKVRIHTLLQLTNPALADSLGEDTFSTVARVMFRHFADPLTVVNLGLKRFKQSLRRHGVRFGEEIVNRIFAACEKSSALYKDLRKCGSLPFDYQLLADEINAELEMIEFAEARIASIELAIETRYQRLDPAQTLRQIPGIGTTIAPAIEALSSPISRFRNAKAYAGYCGLIPRKSKSGKSDHQGLPITKASHRLLKKYYYLAAEISRRHDPELAAYYTARRAAGWHHERIVVAIAHALVRRVYALLRRREDAELSAVADAKPVGYEIRTPAGEILDRKAARVYVAEHYPSKQAQARLITQSVKDKRDASQLGNEGQPKGSTNRVVQDHVPTTTISQDAPQNQLIPRPMKTVDNPVEMMCKNDDKKN

SEQ ID NO: 262860 - protein, 400 aa, unidentified
MLLFFEVITMIFVGIDVAKDTHYAAVSDDSGAVLVKPFAFQNNAEGFCLLLKKLSEFDRSKLLIGLESTGIYSENLICFLYESGFRLAVINPIQTATLRKTAIRKTKTDKVDTMLIIKSLMVNSYRLYSQRDADSLKLRTLCRFRQNLKKSKARLKIQLAGYVNLVFPEFGKFFKSGIHIAASYALLKKYSSPKEIAALRTSTLCTLLSKASHGRFGKDTAEALKSLALSSVGVKNPYISIQIAHTIAQIELLEQQIKDLNSAIEEAMESINSVLMTVPGIGAVNAACILGEIGDIKRFSKPCKLLAYAGLDPTVRQSGQFTAKSTRMSKRGSALLRFALINSAWQLTLNDTTFKAYYDLKRSQGLNHYGALGHVAHKLTRVIFKLLTSDTPFNPAKLVA

SEQ ID NO: 262861 - protein, 394 aa, unidentified
MMRFAGIDIGAERHMVAVLDEQGEVLCRSSPFGEDASGYARLFELLGPSADCLVALEATGHYWRNLFVALIAKDYAVAVLNPLRTARFAEEELRRTKTDAIDALGIARFAQQKRPRVAQLPDSVTEELRELERLRERVAQDFADRLRQLHRAVDLGFPEFTRYVRTLESQLAATILSRYPTATSFRGVSVKKLARIVYDGSHKIGEELARNLIEAAEKSVGAHHSEPYRRRIKYLCEDLDVLRRRLKDLARDVERKLDDHEVGKLLMTIEGLGPLTAACLIAELGDPARFDSPGAIASYVGVIPRIRQSGKKRFTKGPAIPLGNARLRKSLFMVVLQMVRRNAWLRQYYERLRAAGKPGKVAIIAAMRKLLTAVWSVATHRRPFVPIMPARVAT

SEQ ID NO: 262862 - protein, 357 aa, unidentified
MAIAPSFKVIGGIDTHKDTHAVAAISATGEFLGAAQFNTNPSGYRNLLAWLREFGVVLRIGIEGTGSYGAGLTRYLRSEGVDLVEVIRPKREWRRRRGKSDPSDAEAAARAALSGEAKGTPKGQDGQIEAIRLLRLTRRSALLGRTQAFNQLQAVIETAPVELREQLRHLRHSDLLARARRFRVAVIDTPTAAARMALRSLSVRWLALNDEVAALDAHIGQLVRQAAPQLCAVWGIGPDTAASLLVAAGDNPERLISEASFAALCGVSPVDASSGRQHRHRLNRGGNRDANRALWVVAMVRMAKHARTQAYVQRRTQQGLRKKEIIRCLKRYIAREIYKILSGGIVPTGPRNEGTTS

SEQ ID NO: 262863 - protein, 368 aa, unidentified
MKRSHFIGIDVHCQFCEIAVLTGTGKVVQRERCATTIPALRELVMSVPRPRQLVIEEGPLAGWLWRQLHTAVERMVVSEPRRNRLIAKDGDKDDDLDAEKLAQLLRGDFVKEVHQVKSLERALFKQQVALYHHRVRQRVREGQRLSSLFRQHGVMIRERAYDGAEDRPALLERLPAEPALRSMVTSLWVSYDALVEQEETWRKQLVQRARQEELVRRWQELPGVGWVRAATLYAYLDTPWRFRSKAALWKYLGIGLERHRSGNGPEHLGVPRQAHRLLKSMILGAAQSAVVQGKNPFADLHRRWLAAGLAPKLARRNVARALAATLWGLWKNGSAYRPEWVGVAAAAAAAVQECLGEDGCHSVRSGVP

SEQ ID NO: 262864 - protein, 338 aa, unidentified
MIVVGLDVHKQSVTDGAIDEAGRMLDEKTVVVGSDELIGWARAIGAERLWAVEDCRLLTRWLERQLLAAGEDLVRVPPKLMAPERRAGRARGKSDPIDALAVARAALREPELSRPRPDEPIFRDLKLLVDHRDDLVDERRRMQQRLRWHLHQLDPTFAVPLRMLGRASHLERVSRWLARREQELQVRLARELVARIRSVTRTITELDRELEERTAQTAPALLELPGCGAVTAAKLLAEIGPIDRFKSDAQLARHSGVAPLEASSGRVQRHRLDRGGNRQLNSALYRIAITQARYHPDARAYLERKRAEGKSRREAIRCLKRQLARVVFNTLKTSSALT

SEQ ID NO: 262865 - protein, 356 aa, unidentified
MKTIGVDLHACSLTATAFDDQGEVVERRDIPTKCRRQAAACFASSGSSCQVTVESVGFSQWFWNDTRSHVDKFVLTDPAGVKSFVGRKAKTDRNDSRLLAKLLRADRLPMAYVPAESVRQLRDLARLRHRVARTLASERRQLREVMLKNNLPGSSVLTSDRSPKWLLAPPHHLRVPNRLAAEMRLDHITRLERDVTEPGRHIGKAGKADPELDRQARLIASVPGIGKLIAATILTERGDRTRFKNIDPFGASAGLAPTVSQSGESIRHGHIAKRGSPVLRWILQQAAWVAIRSDLYVRSIFARIGKRAGPKKTATAIAIARKLLAYAWSVSRHGAPFLWPGESAPPNLSDHWSYEI

SEQ ID NO: 262866 - protein, 403 aa, unidentified
MTKFNPKTVINGSASALDKIREYQPMRDRYAAYIGMDVHKDTVTYAVALPGRATAQFRGEIAHTKKAVNRLIQRLNDEFAGELLLFCYEAGPTGYHLQRYITGTGHDCQVVAPSKIPNKPGERIKTDRRDALKLAQYLRSGDLTAVWIPDQEQEALRDLARARSDMKAQELRSRQQLNAFVLRHGHSWPSNKTRWTQAHYNWLESLTFPHPWQHVVLQEYIDAVKAAGRRVADLMDHILQALSGWSLAPVVDSLVALRGIDKLSAVTLLAELGDISRFDNPKQLMAYLGVVPSEHSTGRRRRQGSITLTGNGYARRVLVESAWSYRFQARKTMHMKRKAINSSDDAKDIAWRAQKRLCGRYRRMSEAGKNQKVVCVAIARELIGFIWDIVRIEMARLPQRQAT

SEQ ID NO: 262867 - protein, 412 aa, unidentified
MKKHTQDLIAEAPRGCSQVGITIGIDLGDVWSHYCTLNEAGEVVDRGRFRTNPSSVDKWFTDLPRVRIAMEAGTHSIWISEQLQELGHEVIVANMRELRAISHSNRKSDQVDAEKLARFARLDPKILRPIAHRTVAQQEALTLIRARNLRLRTAAVNAVRGLAKPCGYRLPASSTLCFAQRCVAVLPPGLSRALGPVLHQIADMTVKIKEYDRAIKQLTETEYRETQALLKVYGVGQLTALTYVLTLGSKERFQRSHDVGCYLGLRPKRSQSGERDPQLGITKAGNVFLRSLLVECANHVLGRHGKDSTLRQWGLSLASRGGKQSRNRAIVAVARKLAVLLHSHLGHAAAIHSVLCKGRLRKKSCSTVTMTPCSDDRVSGWALTRPAENWQHRLLLLNPKRHRAITAHAKCE

SEQ ID NO: 262868 - protein, 348 aa, unidentified
MGVFIGLDLSLAKTAVCVVDRDGRVLWQGKVPSEPEPLVKRLAEWSGVIDLAGIEACPLSEWLHRGLREAGIPVVCVETRHAQRFLSSRPVKTDKNDARGIAEMMRLGHYRSVHVKSPAAQSMRTTLTARMQLVASQLQIESTIRGLLKVYGLKIGAIHRNRFAARVLELLEMAALPDLSAAIEPLLRVREGMRTERKALDRTLAATARRSDIGRRLMTIPGVGPVTTLAYIATVDDPGRFGTSKALGAHLGLTPRVYQSGEIDRSGQISKCGDRMLRHLLYEAASALMTRTRKWSRLRAWGVAVAKRRGMKRATVAVARKLAVIMHRIWVTGEEFDFGGPAVAAKAA

SEQ ID NO: 262869 - protein, 346 aa, unidentified
MKILALDLGKGNTCGCIFDTSTGEERFRTVRTRPDELGRLLELERPGHVVFEICSQAGWVHDLVTASGAKPHVANPNHEGWRWRNVKRKTDRLDAAKLAGMLAMRQLPEVYMPSRRVREHRALISYRQQLVARQTRIKNTIHSLLLRQGRIHPPGHRGWTLKARANLAELARRWDEVGPEELWRAELGEELGALEQTEQRLMRVERKLNELARGDERIQRLQTIPCVGPRTAELLAAVIDDPGRFRNGKEVGSYVGLVPRQYQSGQMDRSGHISKQGHRQLRSLLVEVSWLALRYNPHLRSVFERVCRGTRSRRKIAIVAVARKLVIIAWAMLRDGTTWHPRRLAA

SEQ ID NO: 262870 - protein, 334 aa, unidentified
MGNIALIGIDLGKNSFHIHCQDHRGKAVYRKKFTRPKLIEFLATCPATTIAMEACGGSHFMARKLEELGHFPKLISPQFVRPFVKSNKNDFVDAEAICEAASRPSMRFVQPRTESQQAMRALHRVRESLVQDKVKTTNQMHAFLLEFGISVPRGAAVISRLSTLLEDSSLPLYLSQLLLKLQQHYHYLVEQIKDLESQLKRKLDEDEVGQRLLSIPCVGTLTASTISTEIGDGKQYASSRDFAAATGLVPRQYSTGGRTTLLGISKRGNKKIRTLLVQCARVFIQKLEHQSGKLADWVRELLCRKSNFVVTCALANKLARIAWALTARQQTYEA

SEQ ID NO: 262871 - protein, 407 aa, unidentified
MKHVIALDVSKGKSTIAIYDRYKQCEFEGELEHTRIDFEQLHQRIEKITALDGQAPEIIFEATGVYSKSVEKFLRDYNHAYCRMNPLEANLQMTSMRRHKTDISDAHELAKTHFKMDRKKTYVQDDYYEQMRATTRYYDEVEEEIILLRSRMHAILHLSFPELEKLITPSSALFLNIVQVYPHPALLLAHSKTIIKNRLKSNTRKNLSLERAEKKASVLLEAAENSYPAIEPTDVRCDQVRDYAGCMANLIEKKEKLVKQMVAMSEGRKEYRVLRSFPGIGDTTACRLIGELGDIRRFKNAKQLNAYVGIDVMRYQSGNTQYRDCINKRGNKRLRKILFFMICAMLMAKGKPNHLVDYYYKLKTQPQRKPHKVAIVACINKFLKVTFQLLTHGILYDYESALPDQKS

SEQ ID NO: 262872 - protein, 355 aa, unidentified
MQKYNFSFKGQNIYVGIDVHLKTWHVTTLTESGCKYSFAQHADAKELFDRLNKKFPEAHFKSAYEAGFCGFSAHYALTDLGIENIVVHAADIPTTGKEKAMKTDAVDSEKIAWALKRGELRGIYVKDKRYMDDTNLMRLRQRFIMDLSRQKNRTKHLLYTQGVTYPERFRNCRTHWSRNFMKWLREEVELLSDQKMSLLLLCEQVENTRKAILKVTREIRRLSTTDRYKENYDLLTSVPGFGLTTSMMTLTEFDNDIMRFPNERRFVSMLGLIPTCHDSGEKKVSGEKINRGNKRLGPLIVEASWVAIQRDLELGAYYSNCCQIMKPHKAIIKVARKLACKAYAVLKTKTRYVLP

SEQ ID NO: 262873 - protein, 350 aa, unidentified
MNYYAGIDVSLGSSSLCVVDASGTIFREAKVASEPAALISWFLGLGVSLERIGLEAGPLSQWLYAALREAGLAVELIETRHVRAAFVTMPVKNDRNDARGIAQLMRLGWFRPVHCKSLGAQEVRATLTSRKLLQKKLHDVAMHLRGILRNFGLKVGRTTQKDFAGRIRELVAGHATLESLAAALLSVHEVLLREFAGLEKQVRSMARADKLVRRFMTTPGVGPIVGLTYAAAIDDPLRFTSSKKVGPHFGMTPKKYQSGETDYDGRISKAGDASVRTALYEAAHIILTHPVKGSALKSWAMRLARRAGMKKAKVALGRKLAVILHRMWVDGTDFDFTRGAASVASDKKAA

SEQ ID NO: 262874 - protein, 403 aa, unidentified
MEGPLISLDVSKGKSNYRFFENGTDRKGKKGVIRHDIQGFDSIRDEAEKMEERLRIKPSVIFESTGVYSDVVEKYFTDKGFDVYVISPLLSASMRKEGVRPAKNDSLDTLSIAKVFYSKDDLRKCSENDKKAERLRDMSYDLDMMNRRIRPMKCQFLRLLDKVWPCLDEVSDYSSRFMLDFIIAFGHPENIKTVKGVLSVIRKSEMGTAGRKDKIAQDLFDYCHTHLSAVSKDSSYVELLKRMAVELKAMAKKKSELIDRMAEEARNKDEFARLLTIPAVAKTTALKIMARVGDISRFRNAEALVAYCGLDPRVYQSGKMTGEHRTITKKGDCILRSTLFLAVKLMVMLYPDTKVARFVAAKAKNGLSYKQAVVAGSAKLARIIYSMLTHHENYVEFNADIVA

SEQ ID NO: 262875 - protein, 315 aa, unidentified
MDERAQTIVGIDVSKDLLDVHVLPAGEHFRLSRDEAGLKALTKRLAKQSLQVVAMEATGGLEGPVAAALHAAGLPVRVVNPRQVRDLARGLGMLAKTDAIDAAVIARFAEVAKLTGAPVPAAAAQHLAALVARRRQLLGMATAENNRLQQTADKRIRRSIQRLLRSIEAELEDVDRDIGEAIKGSPLWCDLAKLLDEQPGIGSVTAHTCVAELPELGRVSGKKITSLVGLAPHARDSGVMRGKRTIWGGRAKVRAVLYMATLSAVRCDPVIREFYERLLARGKLPMIALVACMRKLLVHLNAIAAKYYAQIEHTA

SEQ ID NO: 262876 - protein, 355 aa, unidentified
MNSVRYIGMDVHRDTISVAVLDEHGRLMMQSVLATRAAAILDFIHGVRGTLHVTCEEGTHSAWLYDLLVRRVAKLVVCNPRKNALLKSGSKSDAIDARKLAELLRADMLSAVYHGETSALEVQHVARSYTMLTEDTTRVMGRLKAVFRGQAVSCAGKKLYGKRHREDYLGQLGTGGLRRRAECLYQELDALQQLRREARRGLLVECRKHAAAEWLQSVPFLGPIRAGLLIGRVQTPHRFRTKRQFWTYCGLALETRDSGEYRVVNGQVERKRKAALIRGLNWNHNHEMKNLFKAAATTASMREGVLREFYLGLLAKGMRPEMARLTLARKIAAITLKIWKKGEAFDAEHLKLQAA

SEQ ID NO: 262877 - protein, 340 aa, unidentified
MDTIGLDLHKRESQLCVLTEAGEIVERRIVTSRERFTAVLGSQPSARILVEASTESEWVARHLESLGHEVIVADPNFAPMYATRRRGVKTDRRDARTLAEACRLGAYRPVHRASAPQRHVRAQLAVRDALIRTRTRYVSVVKALVRRDGLRLPPGNPVHTEAKLAVLPLPAPLAGELAPLRALFEPLNREITAADERLAAVAATDPVVERLRTAPGIGPVTAVAFVATLDEVTRFASAHHVAAYLGLTPREYSSGEQQHRGRISKTGNARMRYLLVEAAWRVLRTKDPAAAALQVWAEGIAQRRGRSIAAVALARRLAGILYAMWRDGKDYCAPPSAAVA

SEQ ID NO: 262878 - protein, 309 aa, unidentified
MEEKYYGVDVSKAKLDVACDGRVVQVENTKSGIKSFIRKMAAGSLVVMEATNTYHLEMADMCHTRGMRVFVVNPRLTRHYREANGLRGHNDSMDALTLARYIEREHDGLREYVPLSADQRRLRTLVRRRWKLVGMRTQLVESFSSIKELGRELKALVARIDALIAKIELLIDKQLEGNAGRARVATIKGVGPVVSAVLIADLDAHEFASADAFVAYYGLDAMPNDSGRRRGERKLSKQGNRLGRAMLYNAAMSAVTSKVWKPLYERCQERGLKKVQALIVVARKIARAAWSIHKHQTTFDPNRLYTALT

SEQ ID NO: 262879 - protein, 327 aa, unidentified
MPLVVGLDLHLRQSYGTVMEESGRIVKQGKFETSKEKLAEFLKNVPRGTRVALEAQGFCWPWIDYLEELGYRPLLVNPMKAKQRAEDLKTDKVDSEILAHLTRMSWLPTVYVPPREIRDLKNLLRHRFYLRMVSTALKNRTWSEFRKRDLPFDFDLGTKKGRRFAREMGTWEIQQNVEVLELLEEKMSAVELSLEARYGDLEPVRLLRTIPGIGVLTALGIYAEIGDIRRFPNSDRLAHYAGLVPRVSQSGGQIWHGRETKGNKWLKWLLIEAAWMHLRHNPNGRLAKVYQQAVRRKGKGRKAIKVVARKLVNIIWEVWTKGEPFRE

SEQ ID NO: 262880 - protein, 320 aa, unidentified
MLSFCGIDVSKDRLDVMVLPDEYSSSVPNDPAGWAILVEQLRGFSITAIGIEASGGYERGAVRSLQAAGMPVRQVNPFKLRQFAKASGVLAKNDPLDARMIASFVGIMPTRPAQRTTPAAEQLVEMLAVRRQLSAEKIAAENASRLLEDLMLQRLSRRRIARLAADIELLDKRLVEIVATDATLAHRYRLLTSMPGVGPVLACTLIALLPELGGMSRKQVAALVGVAPYAFESGTLKGRRCIWGGRANVRQVLYMAAMSASNWNPVLKLFHDRLKGAGKLPKVVIVAVMRKMITTLNAMVRDDIAWADRLSGRHSVTTAR

SEQ ID NO: 262881 - protein, 308 aa, unidentified
MSDVPCFVGSDVAKAQLDIAVRPSGERWAVPNDGGGAVTLVERLQVLHPALMVLEATGGLERVATAALATAGLPVVVVTPRQARDFARATGQLAKTEALDARALAHFADVIRPTPRPLPDAQTQELRALLGRRQQLIVMRTAEQNRLAGTSARLQTDIKAHITWLNERLGTLDDDIETLLRASPLWRENDDLLQSAPGIGPVCARTLVLELPELGTRTRQQIAALVGVAPLNGDSGTLRGRRTIWGGHALQPADQSLLRTAPRGGEGQKSGPDSLYAEVCDHTERDAETSDALARPGGPGLKKYTRHP

SEQ ID NO: 262882 - protein, 439 aa, unidentified
MSTPQASTSVQPSIMSQFHRDASSEPVRSFGSYTAALYEMARWLKECGITSVAMESTGSYWIAPYQVLEASGFEVILVNSRHVKNLPGRKTDVLDCQWLQKLHTHGLLSGSFRPVNKVCVLRSYLRHRENLVHAASAHIQHMQKALTEMNLSLHHVLSDLTGLSAMMIIRAILTGERDPWKLAGMKDRRVKKSQEQIARCLEGDYRDEHLFALAQALELYEFYQAKIAQCDLQIEKQLHTFKAQVDPKKNPLPENPKKKSLKAQSHFELKTHLYAICGTDLTRIDGIDVMSAQSLISEIGLDMNRWKSEKHFTSWLNLCPSNRISGGKPLTRQPRKGHNRAADILRLCAQSAIKSSSAIGAFGRRLKARLDAPTAVKAVAHKLARIVYRMLKYGKQYRDAGERYYEEKYRDHLLRRLQKQAAAFGFQLTPQQPILDPVS

SEQ ID NO: 262883 - protein, 329 aa, unidentified
MEPQLPLPVVGIDVSKASLAVCYQVKQQFKHLEVSNSKAGFQQLVKACGAQCLFVMEATGTYNLAVAYYLHEQGGQVAVVNPLVIRRFIQMHLGKGKTDRKDAQWLLRYGQQQAVKVWQPDEQVLVECRQLEQVNEQLIKQKTMVSNSLEALHQQPVISQLARKRLQYTLQLLTDQIQAVEAELLALLEQRFQAEMLLLCSIPGIGRKTAGMLLLFAGGFQRFDNYRQLIALAGLSPREYSSGSSVRGRVRITKMGGGLIRGKLFMCSWAAKKKNAACQALYERLVAKGKNGKVALIAVCNKLLKQAFAIIKSGQPYQANFTSKLALNS

SEQ ID NO: 262884 - protein, 363 aa, unidentified
MNFIGVDLHKKSITICVLNENLKVLARKTVFCDQTDQIVEFFRPFGPFKVVVEATASYLWFVELVEPLAEEVVLANPKKLRVIAESTKKTDRLDAQVLAEFLARDQIPRAYMPTPRQRQHRRLVRHRQYLRQRMTSVRCKIRHILSDYNADRKDLFSTQCGPAYFKEIALSDADRFVIKQLWSEWQDHQSRILALTKKIKAFIVKAPNREKETRAILKTAPGVGFVTAEVIVSEVGDVSRFRNAKAICAYAGLVPTVRQTGGKKSKDLRITKEGSGLLRWALVESAWRLVKTSPKWSAFFSQLRKRSGSKRAIVAVARKLLCVLYAMLKTSTPYKIVATETKAPKPTRRRLVRKSSPKETVTT

SEQ ID NO: 262885 - protein, 423 aa, unidentified
MSYSIAGVDVHKKKLAVVVADLEVGGEYQFERRWYGSHPEQLRALAEWLIEQHVEEVVMESTAQYWKPIWGALERYWKPICQRREDAGPKSGNLHLAQALSNRGRRGRKKDFVDAERLIKRLISQELTLSFVPDSEQRLWRTVTRTRYQLTCNRVRLQNQLEALLEEAHIKLSSLVSDLLGLSGRRMLQALADGETDPAALAALAHQRLRATPEQLCDALGASTELNPVYRRLMKMALEDLQLIEQQIAQLDQEIASLLREHQDAVKRLAEIPGLGVDSAHQIIAEVGAKAESFDSAKKLSSWAGACPGDEESAGVNYSSRSPKGNRHMRRILNQCANAAVKHKGSIFEILYRRLVLRLGHNKTIGAIAHRLCQLIWIILHKAVRYEERGPAVSEKSRRARTARMIRSLQMLGYRIEPVGTSA

SEQ ID NO: 262886 - protein, 361 aa, unidentified
MHDTQEGEAQVKYYTTTTEYNCGIDLHADQMYVCILDPKGQVLVHRNVRGNDFGHFLKLAAPYRHDLTVVCECTFNWYWLADACAAAGIEFVLAHALYLAHIHGGKNKNDRVDSEKLAHLLRTNLIPPAYVYPAERRPMRALLRQRLSYVWRRAEVLAHVSMKQSAEGLVPAAKSGHNRDVWEERILAQYENPLHKFAVGCDMEVVRAYDRQIDRLDLEVARQAKRHLGRDYHLLLTVPGVGQVLGLTILFEMDAVARFPTAKDFLSYCRLVKGSVASAGKVKGLTGGKMGNAYLRWAFGEAAVLAKRSHPLLKPYAERLVAKHGKFRGNAILAAKMARAVYHMLQSGTGFDAERVIATSI

SEQ ID NO: 262887 - protein, 465 aa, unidentified
MSKAKKRASKKPGKKNKKKDVLEGLPPLNLNAAGIDVGNAEHTVAVPPGRDPQPVRTFGSFTADVHRMGRWLKACGVDTVVMQATGVYWVGLYQILEMYGLEVKVVNARYTKTLPGRKTDVQECQWLQKLHTFGLLNNSFLPDEQTRVLRTYLRQRENLVAAAGTCMQHIQKALTEMNVQLANVISDLSGVTGMAILRALVGGERNPQRLAELKNERIQASRKEIARSLEGNWREELLFVVEQSLQMYDTYHQKIVACDGRIEAHLKSMGAKVDVVAQPIPEPRRVKWPRKHQPQYDLRGELYRVTGVDLTQTDGLDVGTVQTVISEVGVDMSPWKTEHHFSSWLGLSPDNRISGGKVLKRGTRKVVNRAATALRLAAWSLLRSQSALGANFRRLRARLGAPKAITAMAHKLARLIYRMLKYGKEYVDKGMAYYEEKYRQQQLKWLTKQAAALNLQLVPATPVVP

SEQ ID NO: 262888 - protein, 402 aa, unidentified
MNCVGIDVSKGKSMIAVMRPFGEVVVSPFEVCHTASELSELARLLKSLDGETRVVMESTGNYHAPVAWLLHDAGLYVSVVNAMLVHDYGNNSLRRGKTDKKDAVKLANYGLDHWLTLPRYVPEEDARLMLKTCYRQYQQYSKVQTMLKNNLISLLDTAFPDANRLFTSPPRADGSEKWVDFVAAFWHCECVCGLSEKAFTAKYQKWCRKHGYNFSEDKALDIYASACGHFGVIPKTDTAKLLVEQAISQLQTTSSALAALKQEMQSLAASLPEYPVVMEMFGVGPTLGPQLIAEIGDVRRFHSKKALVAFAGIDAPPYQSGQIDVRSRSISKRGSASLRRTLFLVMGVLLQCAPMDEPVYQFMNKKRSEGKPYRVYMMASANKFLRIYYASVKAYLDSLEHD

SEQ ID NO: 262889 - protein, 371 aa, unidentified
MEEFKYVGLDVHKETIAVSVAEAHGGEVRYVGEIANTPEAVVKLVRQLKKGGAPLSFCYEAGPCGYELYRQLKGLGQDCQVVAPSLIPRKPGDRVKTDRRDSLNLARLHRAKELTPVWVPDEPQEALRDLTRGREDMKRMQRQAKQRLLAFLLRHRKTYSGKKRWTQAFYRWLENLKFDQPIQQIVFQEYIDLVQAMDKRVAAFEKQIEGASNQSVFAPMIGAYMALRGVDRLTATTIVAEIGDLRRFTNAPQLMAYLGLVPSEHSSGTSKSRGSITKTGNGHVRRVLVEAAWTYRHAARKSATLQRRAEKAPQEVQDIAWAAQKRLCGRYRLLQERGKLKVQVCTAIARELTGFLWAIGQAMPGPAPAFA

SEQ ID NO: 262890 - protein, 369 aa, unidentified
MADRITYVGLDVHKESIVVAVAEGGLRGEVREYGRIANTATALDRLLRKLGGDGMTLRFCYEAGPCGYGIQRRLSAQGQECVVVAPSLIPKRAGDRVKTDRRDAASLAKLHRAGELTAVWVPDARHEAMRDLVRARLDAVHSLRRARQQLSGFLLRQGCHYGRPAWTKLHRRWLAGLKFEQAVHHLVLEDYITTVDLAAARRDRLTAQIEAMLPDWTLAPVVAALQTLRGMALVNAATLIAELGDLTRFANPRQLMAYLGLVPSEHSSGASVKRGGITKAGNGAARRLLIEAAWSYRFPARLSRELLLRQENQPKPIRDIAWKGQVRLCARYRRLARTGKQANVVTTAIARELSGFVWAIARQVMATAG

SEQ ID NO: 262891 - protein, 338 aa, unidentified
MQTYAGIDLHSSNCYLAVIDEQQRRLYSKRLPNSLDHILTALQPFKEGLSGVVVESTYNWYWLVDGLQEQGYRMHLANPSAIRQYEGLKHTDDKWDAFWLAQLLMLGILPQGYIYPKAERPSRDLLRRRLLFVRHRTAHILSLQSMVQRCCGRGISGNAIKKLTSPEAAALFSDPQLGLTARFQVETIGFLTQQIRSIEKAVLPQVKLRPEFEILLTMPGIGKILALTIMLEVGDIRRFAKAGNYASYCRCVKSQKLSNTKKKGEGNRKNGNRYLSWAYVEAANYAVRYSPRAKAFHQRKCAKTKKVVAIKALANKLARASFYILRDQSAFDEKRLYG

SEQ ID NO: 262892 - protein, 423 aa, unidentified
MKNSTARKLKQVPKGYLVMGIDPHKKRHAAVAMTQDFTTHSKFKFNNSREGFEVALERIRTEMMRTGSKGVIFAIETGGHYWRNLAYFLDERGIPFRFINQFTLKRRREGKDLNRRKNDYRDSEVAAQLLCTGEFTDTKLQHGIYAELRAAHNAYRRLVKERTRIINLIKGLLDGIFPEFTQVFNDPCGLTALSVLSICSMPGIIAQMMGEEFVNVIRAKHQGHLMRKKLRALHYAAQVSIGIEAGAWSVSSEISFLVEKLRLIKRQVRSIDETLARLVDETEEGKYLLSIIGLNYTSVAGLLAELGSFRSYQSAKQLIKMAGSNPTESESGGKRSAHTPMSKKGRPVLRYCAWTAVIPMLRFNPDFRTWAKNLRERPVHANPLNGREVVGAALNRLLRLAFALVKNHTFYQVPRLEIAPVVV

SEQ ID NO: 262893 - protein, 376 aa, unidentified
MSVYVGVDVHRKRLQVAVVDEGGAVRVNRNVPNGVEPVLSVIGELPVGTPVAFEAAFGGGWLVELLEDYGYAPHLVHPLRCKAIASARLKNDKVDAAILAQLLRADLLPEAWIAPPAVRQLRALLRHRCQLVRLRTLLRNRIHAVLADHGQDRPAGCWSGPGRQWLADLSLPPASRRVIDDELALIDALLEPIARLDAQIGERAKTDPRVKSLTTLPGVGELTALVILAEVGDFSRFANARKLAAWAGLTPTVRGSDQVVRHGHISKQGSAWLRWILCEPAQTAKRSAEFSATYQAITRRRGKKIATIAVARKLLSRAYHLLTDTDSTTPATNPTARSRTSRPGPRRPDAAEDREGHQAPGELATSHEPATRRSMT

SEQ ID NO: 262894 - protein, 353 aa, unidentified
MKTYYVGMDVHRASIVIVVLNGAGKVVMQSVIETGAERVRGFLKQLRGKVYVTFEEGTQADWLHEVLRPLVTEVVVCDPRHNKLLQSGNKNDRVDAQKLAELLRNGALKAVYHGDNGVRALKELVRSYDCLVSDTTRVMNRLKAIYRGRAIGCADHDIYRQDRREQWLEKLTERGAKQRASFLYQQLAALKPLRHEAKRMMVAEARRQTAYAWLLSVPQFGSVSVAQLLAIVGTPHRFRSKRQFWTYIGLAVVTRTTADHEVVNGVLRRRQRPVATRGLNRNHNHLLKRVFKNAAKGACHGGPFKAAYELRVGQGMMPSLARLTVARQLAATTLAIWKRGEQFNPERIKQQAA

SEQ ID NO: 262895 - protein, 412 aa, unidentified
MKQIRDRVAGLDVHRDTVVACCQVRAPDGSVEVTKQSFATTRVGLEELAGFLSDSAVTTVAMEATGVYWKAPYYALEGLFDELWLCNAQHVKNVPGRKSDLSDAAWLADVAAHGMVRPSFVPPPEIRELRELTRYRKTQVDVRGKEIQRLEKVLQDAGIKLTSVASAVWSMSSREIIEALIAGKRDPKVLAQMAKGKMRSKIDRLEEALFGHFGAHHAIVCRQIIDHIDFLDQAITSLTSAITERLIPFEAAVAVVTSIPGISRTTAEVVVAETGVDMSRFPTSGHLCAWAGLAPASHESAGKRRPAGTRQGSPWLRRTLLEAARAAARTKGTYSSAQYSRIARRRGPNKAAVAVAHSMLDVVWHLLSTGALYEDLGANYFERRNDPAAEAKRLARRIEALGYDVSLMEKAA

SEQ ID NO: 262896 - protein, 321 aa, unidentified
MNKYKEIYGIDISKDVFDVYGSKSGHNQFKNEAKGFVSFMKHLPKDVLVVMEATGYYHYRLAQFLYKSGVSVSVVNPLSVKRFIQMKLAKVKTDKSDAKAISEYGEMNAVPLYTALTDVQSECLQLFRLLDSYIKHRTATKNKLKGEEALGVPSKFVYRSLKRNLNHLNKEVESLELRLLDLVKQDQQHQLTLLKSIPGMGVKTALFLIVVTEGFEKFETASQLCSYVGITPTIRQSGSSVRGRSRISKVGNKKLRNLLFLCSFSASKHNKACRAIYERLVAKGKSKKLALIAVANKLLKQAFAIAKSGRPYDENFVSRLA

SEQ ID NO: 262897 - protein, 475 aa, unidentified
MTQALGTVIDYERTLILAIELSNTSWVLAAQIPGLPGVKAKRSIDPTPEALMAAIENYRARAEKAGRNVDRVIAVYEAGWSGFWLVRWLAKHGVEEAHVIQPSSVPVDRRARRAKSDGIDAELLLRTLLAWLRGEPRVCSMVPIPAEADEDARRRVRERAELISERVGLVNRIGAVLATLGAGEYNPLRRDRRQRLDELQTALGDSLPTNAHAKIARMLDRLELLLIQITELEQSRDAVLEDESPDRASSMIQQLAKLRGIGVQSATVLVREGFVREFANGKALGSYAGLTATPYSSGGIEREQGIGKAGNARLRTVMVELAWLWQRYQPGSAQVRWFRERGGTGRRVRKVMVVALARKLLIALWRFATQGVVPEGAVMKPRLNRAPQSPSRTTARAHGSKGASPLFGLMSSHRLKEWCRPPGALPSRMRDRGEDSVPPDVRFAGKTCVDGSSALVDRFNRAAVQKSEECQNEVT

SEQ ID NO: 262898 - protein, 344 aa, unidentified
MLYVGLDLSRKRLDFDARLGDGELVERGAVPPDADGLAGLVRRLGAAQVLAVIESMNGARFVHDRLEAEGWDVRIADAVKAKGLAPLACKTDKIDAWVLAELARLNLVPEIWLPDPTVRAERERARFRLHLVKHRSALKNRVHSILIAHGVGNPSSDLFGASGRRMLERLRLPEPWRSTSAASLALIDTLDEQIDACECELRLIGADHRYVPLLMTCPGIGWILAFTIASEIGDIARFPTPVKLVGYSGLTPKVEQSGESDRRGPLRKNGPDHLRWALVEAAHSASRHPLYRPILERNQDRHGRKRGTKIAALTIARKLAEASWYMLTRNQPFAPAGATRPLAA

SEQ ID NO: 262899 - protein, 442 aa, unidentified
MKVNKVSAFRDKRGLHRVSGAEPPVVGLTPQTTEIRKTDTMKTYILRAAKTVEPQKSLPPARPKPVVPVASKGPALFIGLDVHNDSIAVSLAPSDGAEVRRYGIIGGEHDDVLKLAKKLATTHPDLSLKFCYEAGPRGFALCRCLRVHGLDCILVCPSKIPRKPGERVKTDRRDADDLARLYRAGELTGIYVPEPEDEAMRDLLRARFQVGRQQHRARQQLKMYLLRHNLRYGGQTSWTPAHLRYLAKLKMPYPVQQIVFQEMLEVISEATARLERYDVEIERAVPGWRWEPAVRALMSLRGMALLHAATLVAELGDFNRFEHPGQLMGYLGLVPSEHTTGKDRQQGGITKMGNAPARRALVEAAWQYRVPARLSPHLKKRQEGLPKAITDIAWEAQRRLHHRYTHLTRVGRKKSQVAVTAVARELTGFVWAIARQVPPVKI

SEQ ID NO: 262900 - protein, 323 aa, unidentified
MLIHYIDIAKRNFVIAVSSLSKTKTETNNPKGIAHTIEYLKKHKVALVVTESTGGLEIPAAKAIRRAGIAVIIANPRQTHQFAQSQPLTKTDAKDAKMPAFFAQMTAQKEDSQTMPYQPPTEAEEVLEALVNRRNQPADMRTAEKNRLHQVHETQVGSVKQLIAHFDRLIDELDKQIDDHTHTHFDGKAQVAEQIKGIGSITTATLMAMLPELGRLSHKRIASLVGIAPHPRESGETKFKSRCFGGRSAVLKALYMATVAATRFEPLIRDFYQRLLSEGKPYKVAVTVCMRKLLTISNARMRDYFAENDTAENDTAENGIRTA

SEQ ID NO: 262901 - protein, 348 aa, unidentified
MNATRKTVVGVDTAKSVFQVYTVVQETGEVINKPIKRAQFLQWFANRAPCLVGMEACGGSQHWARKLQELGHEVKLMSGKMVKAFVCGNKNDAADARAIYMATRQPEVKAVAVKTEGQQAVLAMHRIRQQLVKMRTAQINELRGLLGEYGEVFGTGRKAFETGMKGALERLAEGLPAPLIDTLRDQWSELARLDERIARIEASLLAWLREDRGARAIAEIPGVGLLTATAAVAAIGHAKAFRSGREFAAWIGLVPGQTGSGGKVRLLGMSKRGDTYLRTLLIHGARAVLQHAKTPGPWLQQLSQRRPPNVVIVALANKITRTIWAVLAHERAYDKDHVSMRPLAAAAT

SEQ ID NO: 262902 - protein, 393 aa, unidentified
MNNSNFSYFVGVDISKDSFTAAVKSNSSFTINSFKQSCQDFQKFINFINSHSTDPNSILIAMESTSTYYLPLLNFLKSFNFNISIINPSQIRNFSKIFLNPTKTDKIDAKTIAHFASLFAQNPSNPLQNSLFEFKIISRQYEFITSLIQRVKNDIKRITFITFPEIQSHFNIFSNSFLNILVNFPSAYSVKENITGFESAFSSIVHKKVKFKASDIIQLASNSIGINSNVFNEILKGLIKILIFLKNIKKELKKSIERRVEEIENNDVKIITTIKGIGKMSASQFLAEIGDIRRFANKKKVVSYIGAAPVIKQSGKYKAEIHISKKGNRHARRLLYLMATNVIMYEEKFKKYYERMRSKGKTHKEAVIAVGNKLVHHIYSMIIHNRPFSQNYS

SEQ ID NO: 262903 - protein, 360 aa, unidentified
MRKMYQCRVEGKDVYVGLEDSKRTWKVCVRSEGVVVAEASMPASYGVLREYLVSGYPRCRITVMYEAGFRGFSLHDRLVADGYQCVVTPPHSVVQEKSRRVKCDVLDARRLAFNLEKGDYRVCYVPDGQLREDRQVSRTLVQVQKDITRVKNRIRKFLEVHGLDEGLPPGRWYEREWRAAEGLSLRGPLALCLSLYREELKVLVGMKRQLRKKLRELSRQPRYHRTFKLFCSAPGVGWFTAIRLVLEWGENLARFASAKQMASFTGLTCREFSTGQQVHRGRVTKQSNPAVRAWLIESAWTAYKRDPALLRKFRRVHGSTGSVKKAIVAVARVLAVRLRAIALSGEAYRIGTVAEAGVSA

SEQ ID NO: 262904 - protein, 369 aa, unidentified
MSDCITVYVGLDVHKESIEIATAGASGGEVRHVGRVGGDLPALDAALARLRCPTAGLQVVYEAGPCGYAIYRHLTARGIACAVVAPSLTPRRPGERIKTDRRDALKLARLSRAGELRAIRVPEAEDEAIRDLLRARDDSVRTQRDARHRLKALLLRQDVRYTGKTAWTPAHERWLARVHLPTPAQQMVFQEYVDSVHQATVRIGRLDQTINELLPTWSRYPLVRELQALRGVRQLHAAVLVAEVGPFERFDSPRQLMGFLGLTPSEASSGGKRRLGAITKTGNAFARRALVEAAWQYRFPARVGTTIAQRQDGCSETARAIAWKAQVRLCARFRRLSARRMLRTKAVVAIARELSGFVWAIACQDAAHH

SEQ ID NO: 262905 - protein, 421 aa, unidentified
MFLQARWQSEPREGGSELIFVGVDWAEDHHDVCVMDPEGRVLESHRVPDSVRGLGELHQLIGAHADEPEEVVVGIEIDRGLLVAGLLGAGYEVFAINPMASSRYRDRHAVSGAKSDSGDAKVLADLVRTDRHNHRPVAGDSELAAGIKVLARAHQSAVWGRQRQVNALRSALREYYPAALEAFGTDLSHHDAVAVLTVAPTPALGRQLSRSKIASALRRGGRSRNVESKAEQIQHVLRAEHLEAPPVIAAAYGNVARSALHLIEVFTTEIAALELAVAENFEQHPDAKIVHSLPGIGTVLGARVLGEFGDDRTRFATAKCRKNFAGTSPVTKASGRSRVVLARYTRNRRLAETLERWAFCSLTHSSGARRYYDELRGRGKTHHQATRQLANRWVGILHGCLETQAPYREDIAWPTAAIDAA

SEQ ID NO: 262906 - protein, 341 aa, unidentified
MKLYGGIDLHSNNSVIHIIDDQGDSQLKKKVANDLAAIVALLNSFADDLAGLVVESTYNWYWLVDGLMEAGFKVHLANTAAIQQYSGLKHGDDDSDANWLANMLRLSILPTGYIYPKEQRMKRDLLRKRMQLVQQKTQNLLSIQGMYDRHLNRRLNSNKLKQLTLAQLESDFDDPNVRLAIGGNLTVQHCLAQQIKTIEASLRRQLKLTPEFIQLTSIDGIGFTLALTIMLETGDIRRFNQVGNYASYCRCVGGARYSNGKKKGSTNTKNGNKYLAWAFIEAANFAIRYNDTVKRFYQKKLAKTQVAVARKTVAHKLARACFYVLRDQVEFDVNKAFGYSK

SEQ ID NO: 262907 - protein, 318 aa, unidentified
MPEAVFIGIDVSRDTLEIGSSTASSTWQYANDSDGIEAMTAELAKLAPALVVLEATGGYEFEAACALQAAGLSVAVVNPRQARDFARAMGTLAKTDSLDARMLAAFARVLHQHPQRERFIKQLPDAQLQRLQALVLRRRQLVTMLTAERRRLTLAHASARPSIEQTIKFLKSQIDDVEHDCADHVRTHHAELAQALSSVKGIGPATVATLLAELPELGSLCRRRIAALVGVAPLNRDSGQMRGQRTIWGGRAEVRRALYMATLVAVRHNTVFKSFYARLTALGKPKKVALVAAMRKLLTILNAMAKSGSHWNDSLHLA

SEQ ID NO: 262908 - protein, 336 aa, unidentified
MTKTYLGIDIHKTWCVYSELDTKGNLIRRGRFGNNLGEISDFGSHLTGREEIVVEPVLNYLWLLDQLEDGVMKVHVATPHKVRVIAESKCKTDKYDSRILAELLRTDFLPESYIAPQFIRTLRLLIRRRYWLVQMITRMKNRIRYLLFLEGIDLKVSAIASDKAVREIKKLLLSAHIREAIDDLLAVIYFLTPRVKALEEEIANQSQGVKEIGLLCTIPGIATIRAATIYAEIGDINRFTSRKAFASYTGLVPAVRSSGEKTHLGGITGMGSHPLRWALVEAASVAAKRTPSLRRLYARVNYRSNWQTAKVAVARKMALIIYAMLKKQKPFVSGAA

SEQ ID NO: 262909 - protein, 411 aa, unidentified
MAQAIFAGIDISALKCDLVCLDEQGHQLAPAKSFPNDLEGASTLVEVLDALARKFNIQQLHIGLEATSVYGVHLREFLLDATQLMPYSTRVYEINPVMVAGFKKAFGSKRPKTDALDAYIIAERVRFGHLTPYSREATVTEPLRQLTRLRLHLVEMVTAEKNRALNLLFLKFSNYRKDKPFNHTFSKASLAVLQEFTPDELLEMPLEELAEFIQAHSNNKLVSPEEVAKALKQAANRAYRLNPKMLEACEVALSLTLQNIDHLKKQLKQLDKVICRELNAIPQTLTSVKGFGPVSAAGIIAEISDIKRFKDQAALAQYAGLTWTRYQSGDFEAEERRLTKSGNRYLRYYLVQAANSLRVHNEEYKAYYQRKYHEVTKHQHKRALVLTARKLVRLVFALLSKGQIYKGTVVN

SEQ ID NO: 262910 - protein, 338 aa, unidentified
MAIVSVGINLAKNVFAVHGVDESGKPALVRPSVRRVKLIALIASLPPCLIGMEACSGAHHWAREFQKFGHTVRLMAPKFVTPYRLSGKRGKNDAADAAAICEAVTRPNMRFVPIKSIEQQGQLLVHRARQGFVEQRTATFNRIRGLLSELGIVLPLKAAVVRREAMARLEDLPGWANTVIGDLLSEVSRLDERIAQYDHHIRAMARQSTEAQRLMQLPGIGETTATALLSTIGNGRDFKCGRQLCAWLGLVPGQYSSGGKQRLGRITKAGDSYLRSLLVLGARAVLVAAKNKSDPISRWATALAQRRGYWKAIVAIAAKNVRMCWAVLNRGEDFHLPA

SEQ ID NO: 262911 - protein, 366 aa, unidentified
MIVIGTDTHKQSHTAAALDGATGGVIAEQTARAKRRSFEDLLLWARQLGPERVWAIEDCRHVSGALERYLLAHGEQVVRVPPKLTAGARSSARERGKSDSIDAVSIARAAIREGLDTLPVAQLAGPELDVRLLVDHRERLIAQRTQLSNDLRWSMHDMWPEFDVPARALTASGWQERVASRLARAEQSARVRIARDELRRIRELTRTINALEGELATLIATLAPRLLAEPGCGVLTAAKLIGEIAGISRFATEAQFARITGTAPIAASSGRTERHRLDRGGNRQLNCALHRLAVTRGRMDPDTSGYLARKQAEGKSRREALRSLKRHLARRIWLVLQPPGRDTPPTRHRPAVTIHCNTPYGSFSLT

SEQ ID NO: 262912 - protein, 380 aa, unidentified
MNYIGIDIHKKQCVLSALNEAGERTREARIGTNDRAGFEEYLRAVGGPCRAVIEACWGWGKVHDLLEATGLLEEVVLAHPFKTRIIAEAQIKTDKVDARALAFLLRLGAVPRAHVPGLAVRRRKEVLRQRLFWVRERTKIRNRTHALLDRQNTELALPVCSDLFGGKGMKALETLTGTLAEPDGTLLRQDLEVMKELKAKILECEKMMAADNAADPDAELLGSLPGVGLVIGALLACEIDGIARFNHPRKLVAYAGLAPTTYSSGEKTYHGRLLPQCNGWLRWAFVEAAWVAIGCDGYFGALYRRAREQAGHGANTAIIIIARRMAEIAWQMLNKKRRYENRTPRAPSPQRARTKAARPTKQTCDPKAFPARSRISLAAS

SEQ ID NO: 262913 - protein, 340 aa, unidentified
MIGMDIAKRIFQVEGRDASGAVVLRRQLRRSGVLKFFRKLPRCVVAMEACATAHYWGREIAALGHAVRLLPPTSVKRFVKRGKKNDKVDAGACCQALLSKDIQFVPIKSLEQQAVLMMHAVRQHLVAEQTALSNAIRGHLAEIGIIARKGAAGFKALVELLAKPAGTPELALIRPIIAPLVMQWRTTGEQIKTIERQIARWHKANSDSLRLDTIPQYGPVISSAFVAKVSDPTRFARGRQCAAWLGNVPSQHSTGGRTCLGPITKAGDRYLRTLLVIAGSGLVRRVKADPSLSPWIAGLLRRMPAKKVNVAVANKLARIGWAVLVSGKPYDAAIGTLTAA

SEQ ID NO: 262914 - protein, 391 aa, unidentified
MILAGIDVAKDKHDCFIMNSDGEILVKAFTFSNNLEGFNFLYEKIRSVTKPKDKIKVGLEATGHYSYNLLGFLLNKGLPTFVINPLHTNLFRKSLTLRKTKTDKVDSRTIAMMLMSDVALKPYTDTSYHNEELKSLSRYRFTKVQERSKLKTSVSRLVQILFPELEKIVCTIHMSSIYHLLEEYPGASYIASVHLTKLTNLLMEASHGRYNRNTAIKFREAARNSIGSILQAKSLELKHTIKLIRELTVEIDEIDAEIKKMMDSIASPITTIPGIGYSMGTMIISEIGDFSRFSSPDKILAYAGLSPSTYQSGQLNNCYSHMEKRGSRYLRYALFTVAQKVCIWDNTFAEYLSKKRAEGKHYYVAISHAVKKLVRVIFHLERTGQAYLKAA

SEQ ID NO: 262915 - protein, 363 aa, unidentified
MTILTDRPQHRTERPAPPRAWVIGVDTHTDTHDAVLIDALGAVVAQTRIQSTPTGYAQLQSWAQQLLPAGQRLFFAIEGTRSHGHGLTRYLQTAGHRVIEAVKPATARRRRTGKSDVLDATHAARAALATDRHGEPRADGNREALRILLVTRRHDTDMRTATINLFKSLLLGAGHLRETLRGLSTARQIRTVLALSHDPSDDLEAQLRLQALHRAATTTRDLDQAITANEKHLRALVNQMCPGLQDLPGVGPVTAATLLTTWSHHGRIHNEAAFAALGGISPLPASSGRVTRHRLNRGGDRALNAAIHTIVTTRRRMNHTPTSDYITRRTTQGLTSKEILRCLKRYTSRQLYRFLNTNTATTT

SEQ ID NO: 262916 - protein, 422 aa, unidentified
MRVLYERCAGIDVHKDQVTVAVRTPGDGPGGRQTEVRKFRAFYGVLTEMARWLVSLQVSHVAMEATGIYTMPVYHALIEQGRFAQVLVCNAAHVKNVPGRKTDAVDAVWLAELLECGLLRGSFIPEPKIKAVRDITRYRKKLVGARTSEIQRLGSVLQDAGIKLDSVASSIATVSGRAMIEALIDGERRPAVLAELARGRMRSKISDLRLALEGRFDAHHGLMCQLHLEHIDHLEEMIARLDGQVEQMMVPFARQGQLLVTVPGIGPIAAAAVLSEIGASPAEFFARDSHLASWAGLCPGNHESAGKRKHGTPRKGNQHLKPILVEAAWSAVRTDGRLRARYHRLVLRFGGYRNPAAKKKAIVAIAHTLIVIIWNVLASDSPYTDLGADFYDRRNDPERETRRLIAKLEALGHTVTIEPAAA

SEQ ID NO: 262917 - protein, 390 aa, unidentified
MTYLLGIDASKFKHDCIIADEYGNALTNPFTIENNRNGFDVLLETLNDFKSKGEIKIGFEATGHYTMNLKLFLEASGFSYMELNPLNIKDFIRSKSLRKTKTDKKDSKWIALYLGQVDYKPYTKQFYHLYSLKSLTRLRHSLIENRSLYLVKITNILDHIFPEIKPYFGNKFSSSLLYILTNYLTPYHIKNMTIESYNNMISKLRKPISYQRFMEVKELARKTVGISNSILEFELKSLLSLYHNLDEEISNIEEEIESHMKIINSKTLTIPGIGIQSASVIVSEIGDFSRFDSPEKLLAFIGLDPAKYQSGIQDYSGHMVKRGSSNLRYVIMNCAETFYVHNPVISDYYWKKRSEGKCHRVALSHVARKLVSVIYYLETNNLDFDSSKLR

SEQ ID NO: 262918 - protein, 402 aa, unidentified
MNSVGIDISKGRSTIAVMRPFGEVVISPFEVRHTDSELSELARQLKSLDGETRVVMEATGNYHAPVAKLLHDAGLYVSVVNAKLVHGYGNNDLRRVKTDKKDAVKLANYGLDRWLTLPRYVPEEDTRLLLKNCYRQYRQYSKVQTVLKNNLISLLDTVFPNANRLFSSPIRGDGSEKWVDFVAEFWHCRCVSEKSEKAFTNKYQRWCRKHGYNFNEAKAHTIHAEASGHVVVMPKSETTKLLVEQAVSQLRATSAALTALKQEMQSLASMLPEYPAVMDMFGVGPTLGPQLIAEIGDVRRFYSKKALVAHAGLDAPPNDSGDVTGRHKRMSKVGASSLRRTLFLVMSVYLQTSPLDEPVYQFMDKKRAEGKPYRVYMMASANKFLRIYYATVKAYLELLEQV

SEQ ID NO: 262919 - protein, 429 aa, unidentified
MNSTQNRKIEQVTAKTLVIGIDVGSEEHFARAFNNRGYEFSTKPFKFSNSAQGFSEFKAWADKLKKKHGMEEILPGMEPTGHYWFCLGDYLTRIGMTPVMVNPHHVKKSKELDDNSPSKNDRKDPKVIAGLVNTGRFSYTYIPEGVYAELRTASNLRFSVEAELTSIKNKLARWFSVYFPEYSKVYDNLEAKSGLAVIKVAPMPENIVKLGVEGILQIWRDAKLRGLARSRAEKFVAAAKGSIGMKHGTAAAKLEINVLIEDFENKTRQMVEIVEMIKTLLKQIPGVEKLLEIKGIAEKTVAGFLAEVGDVRRFTDAKQIQKYAGLSIRDNSSGKNKGKTKISKRGRKRLRHTLYLASKPLVLHNPEFAELHRYYTKRSKNPLRKIQSLIAIGCKLVRVFYTLLTRDVKYDAKKMLKDIKRPAEFQPAA

SEQ ID NO: 262920 - protein, 388 aa, unidentified
MYYVGIDIAKRKHVAFTLDGEGEPVGKALGISNDRDGFDKLLAHLGQLETKVAVGLEATGHYWLALYRHLVEADYEVIVLNPLQVQAYRKSGIRKRKDDRYDAFWIADYIRISHHRLSPSVQPDLIQLRELTRFRASLSHQVGDCKRKAIGILDRIFPEYETLFSNVFIQTSRQLLADALAPEEFADFDLSELSQKLQESSRGRHGQAKAREIQALAARSVGVGFLGNVLRVQMTCLLEQLALLEQQLDELDAEIEAVMARLPQYLTSIPGIGPVTGATILAEIGDVHRFTTPEKLVAYAGIDPTVFQTGEFRATNTRMSKRGSPYLRHALWQAAFAASRFDPELRAYYQRKRAEGKAHGTVLGAICRKLLHRIYIILKEERPYVIRD

SEQ ID NO: 262921 - protein, 345 aa, unidentified
MPIVGGLDIHRRQITFDYLDTVTGQVCRGQITPADREHLRVWLARFAGRDDVAFAVEGCAGWRYVAEELAAAGITAHLAEPADTAARRGRKRHAKTDKTDARHLRMLLAEGRLPECWIPPARILECRALLELYNDLRRERTAWAQRIHAVLFHQGAPVLGEGALRTDKGVAELRAAAAAHLSAAGQLQVATALEVIDGLEDRLHLVRHQLLDAARHLAGAKALAARLYGVGPITALAITCWLAGAGRFSSSRQAVRFAGLDITVSSSDRKGPPGKLSRQGPPVLRWAVYEAGKTHARTSAPDHRYYAAVKDRKNSKRACLSEARKILRQAHHILAELGDDALAAA

SEQ ID NO: 262922 - protein, 437 aa, unidentified
MSTAMSGLSAGSAAVVRPSSSSLSSSSSSSSSSSSSSSSSSSSSSSNRMYYVGLDVHARQTTLEMLNDRGQTVKRQTIRGGLDKVVEEVAKLPGPLSIAYEASCGYGYLHDRLAPLAKRVVVGHPAQMRLIFKSKRKNDRIDGGKIAKLLYLDVMPQVHVPGVDVRQWRGLIEFRAATLNRRVALKNQVRALLRGLGLAASVPRGLWSKKGIVWLKDLSGLGETEALRRDMLIDELSEVNRRIKLLEQALAKIAAAHPAVRLLMTIPGVGIRTAEAVVAYVDDVNRFGKMTQLGTYFGLVPCQDSSAAVNRLGHITKEGPATVRKLLCEAAWQARRRSRRVSGWFERITGGDTDRRKIAAVAVARKLVVVMGHMLRSGEAWREGPASTSSSTNTSMRTGCARRLRGSPPEDTVTGNDRRSSVAGAVAGPTVNGERRR

SEQ ID NO: 262923 - protein, 315 aa, unidentified
MSDSVPCFVGIDVAKDTFEVALNPDGPTRQIVNQEASIAAFANELRSLQPALIVLEASGGYHLELALALGAAGLPVVVLNPRQARDYAKAIGQLAKTDRIDARLLSRFGRDVKPEPTTLPDEATRHLDALVTRRQQLVAMRVAEQNRLPLAPHAIRGQLHNHIEWLEQQSADLEADIERFIEENHLFKAKAELLLSIKGVGPVTAYTLITGLPELGQLSRKQIAALVGLAPFARDSGQWSGARFVTGGRAHVRCVLYMAAQSACRFNPHLAALYLRLLEAGKKKKVALIAVARKLLTIANAIVRSGIFWVPDHAH

SEQ ID NO: 262924 - protein, 429 aa, unidentified
MTERKSTPPEAALVAIDIAKHRNEVLIDPGHGRRRRMTVLNTKDDHDRFVTALHVLSRPIIVGIEPTGNYHRVLAHRLISAGFQVRLISSMALARTREALHNSWDKNDPKDAQVILHMLSIGATMAYQDPLASGINDLQELSKTHEFVSKAKTEIWHRLLTHYLPLYFPEIERFAGNSRSDWFLAFLERFPTPASIITLTKENFIATAWDVVGRKVSKTRLLGDIYETACASAALPVPLDAPAIVMFRLVLAEARGLIRQRDAIEAQADELLRTHPDYSRLRQLPGIGPIHALTILAGDLRRFGHHRQFLKFCGFDLATHQSGQFRGLTRLSKYGNARLRRTFWLAAQVAIHQRENSFRDHFGRHIAKDRDNKDLRRKALTAVAAKMARVAHALVKTGTDYRPFFDGPVPSGRTRSVGAVRARSETSTL

SEQ ID NO: 262925 - protein, 339 aa, unidentified
MMDVTTGGIDLAKNLFQLHGVDERGRVVLSRRVKRSQLAEAVASLPPCVIGMEACASAHHWGRAFEKFGHTVKLMSPKYVKPYVKTNKNDGRDAEAICEAVSRPTMRVVSIKTVEQADLQALHRTRSLLVKHRTAVINQIRGLLAEYGLVIAPSPEKVRPAVVRFLDDAASGLTACARDTFAELYEQLRDLESRLARVTERVERVFRAHPMCRKLAAVPGIGPLTATALLAAVGRPQTFRNGRHLAAGLGLVPRQYSSGGKEILGGLSKRGSRYVRTLLIHGARAVVHRAEGRSDPQGRWLWTLKCRKGTNVAAAALANKNARVVWALLAHDDVYRPSA

SEQ ID NO: 262926 - protein, 373 aa, unidentified
MDYNTIYVGMDVHKESFTLCAYTIETDKCAYHQKTEPDYKRVLKYLEFLRTTYGDNVKFVCGYEAGCLGYTLYHQLTGHNIDCKILAPTTMLEQRSRKRIKTDKRDSEIIARCLAQHNYSPVYIPSKQDEETKDFLRMRDDHRLALKKVKQQILAFCLRHDYRFDGKNHWTLAHLKWLRSLKPDGMYQEILDEYLLTYDYLTNKIERLDHRIEEIASTDEYRERVKKLTCFIGVKAHTALSVITEVGDFNRFATANQFASYTGLVPGEDSSGDKSNRLGITKAGNRHIRMLLIEAAQCYSRGHQAGFKSKELKARQAGNTPQVIAYADKANERLRRRFYKMVLGNSKKHNVAKSAVARELACFMWGMMTDNIA

SEQ ID NO: 262927 - protein, 425 aa, unidentified
MNYKQNEKINQVKESTLVVGIDIGSTTQYARAFDWRGIELGKVFPFSNSREGFEAFKAWMQHLQDKYRKSDVIVGIEPTGHYWFDLGAYLEDEGILLVMVNPYAVKQTKELDDNSQSKNDRKDPKVIAKLVTEGRYSAPYTPDGVYADLRIMVANRKRLIREMTQIKNRFARWFAIYFPEYTDVFGDYEAQSSMLLLKKVCTPEAIVELGAEKINQIWRDAKLRAVGMKRATTLCETAKRSIGLKKGSSAARYEMKLLLEDYEYKKAQLDAVMEEIEKLCRKIPESEQMLAIKGIGVITVAGFLAEVGDVRRFESPRQIQKLAGLSLRENSSGKHKGQTTISKRGRSKLRAVLFNAAIPLIAKNPEFKSLHEYYTTRANNPLKKKQSVIAISCKLIRVFYAILAKGVTYDAQKLISDIHRQPQVA

SEQ ID NO: 262928 - protein, 412 aa, unidentified
MEILYGICCGLDVHKDSITACLRRLGRGGRVTQELRPFGTTTGELLVLLDWLVAAGCTHVAMESTGVYWKPVCNILEGHFQQVLVVNAQHIKALPGRKKDTLDAEWIAQLLQHGLLRGSFIPPAPIRDLREATRYRKQLIRTRADEANRIQKLLEAANLKLGSVATDILGVSGRAMLAALVQGETDAAALAGLAKGRLRKKQPQLVAALTGRSTAVQRTLLGHQLAHVEYLDRAIAALDALIATLMAPYQAEAERLRTIPGIDTRGTENLIAELGADMTVFPSDGHCASWAGMCPGHNESAGKRQSGKTRKGSKWLRAALTEAAWAASHTRSYLGAQYHRFARRRGKKKAVVATGHSILVIAYHILKDGITYHELGQDYFDKRDTARIQERLIARLETLGLRVTVEPMAQAA

SEQ ID NO: 262929 - protein, 338 aa, unidentified
MGIDVHKKQWNVSIMSAMKEHKTFSQPPEPNALGNYLRTHFPNASYYSAYEAGFCGFWIHEALKKEGIENTVVNPSDVPTTDKEKKQKRDCVDSRKLCKSLRERALRGIYVPTQEQQEDRGVMRLRKKLVEDIARCKNRIKGMLHYYGIKVPVDYSAFWPKPFITWLVGLELTQPSGTLSLHLLVEELQGIQKLKKQVDNHLLQLARNKYITQVELLRSIPGIGMIGALTFITELGDMNRFKRLDDLCSYVGLVPNVHSSGESEHVGRLTKRRNPYVQPILIQCAWKAASKDPVLMKAYLDWCKTMKANKAIVRVARKLLSRVRFVLVNHKKYELMKA

SEQ ID NO: 262930 - protein, 319 aa, unidentified
MDNLSHGRIIGIDVSRDWLDLHCLPDGLRCRIPNGPEGHTAVADLARDRDAIVCFESTGGLEWRLWARLEAEGVVARQVPPAQVKAFAKSGGIRAKTDRIDAELIARFFAFRPDAGRRLPAENLCSLRALTSKRAQLVEMRKRLLVQIRAHHKLGTAAMFDDIDTELKARLDSLIKALEDRIEAAISSDDVLAETAGILRSIPGIGPVASTMLIAEMPELGAITGEEAAALVGLAPVARESGTLRGKRAIAGGRRALRHVMFQAALVAAHHNPTMKTFADRLRNAGKPHKVIIIAVARKLITLANALTKTRQKWVPSPI

SEQ ID NO: 262931 - protein, 314 aa, unidentified
MTYYIGIDVSKKVLNIFDGEKDLIFDNKENLCSLKKYLKKRYPDLSSLVILFEATGIYSYYLKAFCADNHIKACIINPQASHNFAKSLGTRSKTDTRDARTIWAYHKLISDQDIRIPQVDPVLITLASYLTSYRLALKQRLSLTNHLEGVKDKVLHRLLKKEQERLCQLEQELLIRMDTYINKYPELNEDYRRLLAISGVGRKTAISLLVLFHTYPDTNRKQITALIGLDPVQRQSGTSVHGKSRISKHGNQMMRKCLYMPTLVSIQYNQKIKVFYDRLVSKHKPKKVAVIACMRKLLLIAHAIYKNKTVYVPG

SEQ ID NO: 262932 - protein, 347 aa, unidentified
MKYYCGLDVSLNSTAACVVNQDGTIIREADVPSEPAAIDQWLKTIGLPMERVGLEAGGLSSWLCHELLAVEWPIICIETRHAKAAMKAQQVKTDRNDARGLAHIMRTGWYKEVHIKSQESQELRMLLNNRRFLLDKRLDIDSQIRGSLRTFGLKLGKVTPKTYEPRIRELVGDNEKFQACIFPMLEVRRVLIEQFKKLEKLVLDYVKEDQVCHLFITAPGIGPLTALVFKTFVDRPERFKKSKAVGAAVGMTPRKYASGEVDYDGHITKCGDAFVRMHLFEAAKVLLTRSGKPSDLKSWGLRLAKRSSKKKACVAVARRLAVILHAMWRDGTAFQTTQVQAELAAAA

SEQ ID NO: 262933 - protein, 309 aa, unidentified
MTIHPCFIGCDIAKHHLDLFDETSGTSLRIANTSAAIAAWLSALDDPGGSLVAFEATGPYDGVLRQALDQAGLRFVRINPGRARDFARATGRLAKTDAIDARMLAAMARSLALEPDAGTDPARDALAQLHKRRDQLVETRAAERVRHSEGQDPGGSLARHLAWLDAEIATLERLVTQALRADQTLARTQAILRSAPGVGPVTATTLIALMPELGQTSPKAIAALAGLAPFNNDSGRHRGKRSIRGGRARVRRALYMAALSAMRTSPRFRAFYDAILKRSAAPKVALIAVARKLLTILNAMLKTNTAFQP

SEQ ID NO: 262934 - protein, 375 aa, unidentified
MKNKVRFLGLDVHAETIAVAIAEPDGEVRSLGTIANRADAIRKMIKKLGSLEQLKACYEAGPTGYVLYWQLAELGVACEVIAPTLAPMKAGDRVKTDRRDAERLARSFRSGDLTAVWVPDEGSEALRDLVRAREAAKQDQLRARHRLSKFLLRAGQRPAAGVKAWTQLYMAWVRQLRFPQVAQESTRLDYLHEVEHMGERVARLEQAITEAVKLASPALQEVVKGLQALRGIAQISAVTIAAELGNITRFESARQLMGYSGMVPSENSSGGRTQHGSITKTGNAHLRRIAGEAAWSYRLRPGVGPALRKRQEGVPEEIKEIAWKAQVRLSKRYARLAAAGKDQRKIITAVGRELLGFIWAIGVKAEAASKQQMAA

SEQ ID NO: 262935 - protein, 403 aa, unidentified
MYSSFVGIDIGKWNHQAAFLEVSGKETARSLAFQNTSEGFQSLSESLAPFDKGQTVIGLEATGHYWLALFSFLVDNGWTVKVINPMQSDALRKMNIRKAKTDRKDCVVIADVLRFGRYTETVLPDEDLLQLRELSRCRVAHVELLGDLKRRVLGILDRVFPEFASCFSTVFGAAPTELLQECTDPEELADYDVDKLIKLLEKESRGRHSREKAEELKAKASRSVGTRFGRDALKFELKMLLEQLDFIKGQVKEFDKFLKKLMKNHELIYTIPGISVTLGSAILGEIGDVKRFGTPQQLQAFAGMDPSVTQSGNFQGTQAKMSKRGSPYLRRAVYLAANAARRFDPVFKDFYDRMIARGKHPKQALAAVGTKLLRVIHAVMTSQKPYNPQKLLTPAARISQLNP

SEQ ID NO: 262936 - protein, 417 aa, unidentified
MEVTNPRCCGLDVHKKIVVGCVITPEKKETHTFSTMTKDLLRLKEWLTECGVVHVAMESTGVYWKPIYNILEEEFTVLVVNARHIKAVPGRKTDVKDAEWIAELLRHGLVRGSFIPNREWRELRELVRYRRSLIRQRAQVVNRIQKVMEGANIKLSAVATDVIGVSGRAMLEAMVRGVEDPEVLAAMAKGRMRNKSSELEAALEGLVGPHQRMLFASHLRQLTFLDEEILRLDEEVAGRMRPFEDEMGRLDSIHGMGRRAIEEVLAEIGVDMSRFPTVAHIASWAKLCPGNNESAGKRKSGSTGHGNPWLRSILVQSAWAATRTKGTYLSSLYHRLAARRGAKRAIVAVAHAILGIIYFLLRNRSTYRDLGGRYFDEINRKSVISRAVRRIESLGYTVTLEATPPQCGEVVPSPVFS

SEQ ID NO: 262937 - protein, 346 aa, unidentified
MQVSTIGLDLAKQVFQVHGVNAEGAVVLRRRLRRPEVVKFFSMLPSCLIGIEACATAHHWARELSRFGHEVKLIPPSYVKAYVKRGKTDAADAEAICEAVSRPSMRFVPLKSAEQQSALMLHRGRDLLVRQRTMLVNAVRGHFAEFGIVAPQGVRRVGELAALLIEEDATTLPPLARQALRVLLAQLQALDDQIANLEAAVIASHRDNEASRRLALIPGVGPITASAIVASVANAHQFKSARHFAAWLGLTPRSHSTGGKERLGGISKQGDPYLRRLLVTGATCVIRYARRKAPGEAGWVKALLARRPARLVSVALANKMARIVWALLVRGNTYQAPAATMTAATT

SEQ ID NO: 262938 - protein, 386 aa, unidentified
MQKLNDLSRSLTALEPDGTLIAVIEMSLSSWLVAGIVPGVERQPLKKLAVDESALLKLLHRWREEAEKAGRRIERIAVAFEAGRDGFWLARWLKARGIEAYVIHASSVAVSREHRRAKTDRLDTELLKRSFLGWLRGERDHCKMVAIPTLKDEDAKRPNREHDSLIGERSRIVNRMKAALVRLGIRGFNPKLKRASTRLDGLRTPEGEPIPPNALAELRRDMERRRLVNNQIRQIEEERLKRIDQAPCDGPHVMVRLLARVMGVGIETADMLVHEVLSRNMRDRRAVARYAGLTGSPDESGRKRREKGLARSGNTRVRRGMIQLAWRFLLHQRNSALTKWYRSRTENARGTRKPMIVALARKLLIALWRLVREGIVPDGVVLRVAQ

SEQ ID NO: 262939 - protein, 343 aa, unidentified
MTIMIGIDPHKATHTAVAIDSNETVLDEFKGRASKVQAQQLQSWADRFEPRQWAVESATGLGYLVAQQLVAAGETVFDVPPVLASRVRVLGTGRSQKNDSNDARSIAITALRSDRLQTVRPDDHARVLRLVVKRHRDMAQLRAKHCARLHALLLELEAGGIRSKITVNKANQLLEGVAVVDEVTRHRALIARELVEDIACLDTTLKTSKQRVTAAVAASGTSLCEICGVGPIGAAVIIGYAGDIGRFPTRGHYATYNGTAPVEVSSGGRTRNRLNRRGNRKLNHAIHIAAICQTRCDSEGRAYYNRKIAQGKTPREAIRALKRRISDRVYQHLVADARRTPTY

SEQ ID NO: 262940 - protein, 352 aa, unidentified
MLIIGCDFHPGFQQVAIFDNRTGEVQEKRLQHREEAEQFYRGLVGQSVRVGMEACGHYPWFERLLRELGMELWFGDAAQVRASVVRKQKTDRRDAEHLMHLLIEERFPQIWVPSLEVRDVRQLLVHRHKQVQARTRTKNQLQAMALSHGVQKKWKLWTRAGRLELEQLPLLPYAAERRQGLLQALDVLQADLLELNRRVEEEVRKRPEAVRLMTHPGVGPVTALAMVLTLGPAERFASGKEVGSYLGLIPSEDSSGGKQRLGRISKQGSSFLRFLLVEAGQTAARHDPQLKRFYLRLAARKNRGVAKVAVARKLATRLYLMLRESWTYAQLHQAVMQVSPSHSVAGKQEPSA

SEQ ID NO: 262941 - protein, 346 aa, unidentified
MRYYNKQHEYYCGIDLHTKTMYVCILDQDGQIVVHQNLPVDSNCLLKLIMPFMSDIVISVECIFTWYWIADFCAELNIPFVLGHALYMKAIHGAKTKNDKIDSHKIALLLRAGMLPMAYVYPAHMRSTRDLLRRRMHFMYKRSELLAHIQNTKNQYNLPDFEKSIARKRNRTNVHEHFHDDSVQKSILLDLALIKEYDRLLTEIELYLTRHAKQHHPQDHFRLQTIPGVGKILALVILYEIYDINRFERVQNFCSYARLIRPEKESAGKTTGKGNRKMGNAYLKWAFGEATLLLIRESAQVKELHKKLKNKHGKARALAIISHKLGRAVYYMLKNKQAFDMKKFIS

SEQ ID NO: 262942 - protein, 419 aa, unidentified
MKPPKSASKGQRNPSKIEERDLESLPPLHLNAAGIDVGSAEHYVAVPAARDPQPVQKFGSFTGDLHRLAGWLKACRVDTVVMQATGVYWIGLYQVLEDYGFDVQVVNARHTKTLPGRKTDVQECQWLQQLHTFGLLNHSFRPAEQIRILRSYLRQRENLVAAGSTCIQHLQKALTEMNVQLANVISDLSGTTGMAILHAIVKGERDAYKLADLKHSLIRASREEIAQSLQGNWREELLFVLQQNLELYEVYQKKVRECDQQIEAHLKTMPAMVNVSEHPIPPPRRVSWSRKRQPGFDLRGELYRLTGVDLTQVDGLDVQTIQTVLSEVGLDMSAWKTEKHFGSWLGLSPDNRISGGKVLKRGTRKVVNRAATALRLAAWNLIPARALWEPNSAACALAWGLPKLSPPWPIIWPGWSTAC

SEQ ID NO: 262943 - protein, 396 aa, unidentified
MLSTNLQNPIDFNGQKFYVGLDVYKKSWAVTIRSLGIEIARFTQPPSADALSSYLQRNFPGGQYYSAYEAGFCGTSIHEQLCKLGIKNILVHAADIPSTDKQKKNKTDLHDSRSIAGYLEKGSLHSIHVLTQEQQELRSLFRFRESKVIEVTRSNNRLKSFLMYYDIKIPETVSTKEYLSLKALAWLNFELTTAAGTIALQELVEELKYQRKRLFEITKQLRKQIQVLHAESYKYLLSVPGIGAVTAMGLIAEIADFGRFDDPDEYCSFLGLCPWEDSSGETIKTKGMQPRCNQHLRPILIEASWTAIKKSRTLFAYYSKHAGKDSKKAIVKVARKLALTVRGVVLKQQLYQEDYLQKKKAEQSIQKGTSNKRFSSGITEQHINKQPGNVLASWPG

SEQ ID NO: 262944 - protein, 416 aa, unidentified
MEIEHTHCAGLDVHKKTVVAAIIVPDGQGGLRKEVRTFGTMTADLLGLSDWLLSFGVTHVAMESTGEYWKPIYNILEENFEVLLVNARHIKQVPGRKTDVMDAEWIADLLRHGLLRSSFIPPVGQRELRELTRHRTNFVRERASVVNRIQKTLESANIKLASVASNVMGVSGRAMLEAIVAGTTNATEMAGLAKGRLRGKREQLDKALEGRVKPHHRFVLAELLCQVDSLDESIARFDAEIEKYCHPFEEEVELLDTIPGVAQRIAEVIVSEIGSDMSRFPTADHLAAWAGVAPGNNESAGKRYSGTTRHGDRALTSALVQAAHAAARTRNTYLSAQYHRLAGRRGKKRAILAVAHSILVISYHIIQRKEPYRDLGGDYFDQRRPEATAKRLLIRLQHLGYDISRIEQTATLPTVA

SEQ ID NO: 262945 - protein, 363 aa, unidentified
MRESMTVTVGLDVHARSIRLAAVCADELLEERTLPYDEEQVERLLRRWPLVRCCCEAGPTGFGLYRHLVERGIDCSVVAPGLVPQRPGDRVKTDPRDARKLARLHASGLLEPIYVPSPEFEAARDLVRAREDARLDRMRDRQRLSKFCLRHGRLLPTSAWTVTRRKWLGEQQFEHPAEQLAFDTYLHAVDLVDARIEQLERAIRETAAYGPWRELVGRLRCMRGIDTHTALALVVEIGDFSRFRTAEQFMAFVGLVPSEHSSGEQRRQGSITKVGNSHVRRLLVESAWHARRRPTVGYELSRRQRGQDAAVIERAWRCQQRLHQRWQRMAGRGKPHQKIVVACARELAGFVWAIATDQPLRTL

SEQ ID NO: 262946 - protein, 340 aa, unidentified
MVENTKNNIYRHYIALDWSQKTVAMATMHDCGGKVHTQMVRPDPRAIKEELKKYRGSKILTIEETTTSHWLYVELKESVDRIIICDPYRNSLLKDGPQTDKIDATKLCLLLRTGMLKEVYHTLEKDYEIRKLVSGYIDTMKASVRLRNQRSAIFRSEGRDHKKETELQDGSIKEFVSQSQNELLSYYGEAIKKYEALFKSIAETNKIIRMLKKISGIGTKTSIMIYSTVIDANRFENKYKYWAYCGLIKQYKESGGKVYRSKQVRYSKILKSCYKIAALSAIRGKNDIREYYEYLIQSRLSADKARHQISRYISKISYAVMKNKIEYRAYQWRESKKADS

SEQ ID NO: 262947 - protein, 375 aa, unidentified
MLSKRINQNEQSLRALFSAFSAYDHKVLVVVDQPNNIGRLTVAVAQDIGIDVRYLPGLAMRQLSRIHAGNAKTDIRDAYIIAHAAKNLPESLRSVDRVEEAFLQLKVLNGIDEDLARSYTRLINQIRSALVGCYPQFEQALRGQIIHRKWVLHLLARYGGPTKIKRLGKAKAAAFARRYKARNPEPVLDAIFAAISEQTVTIAGAHYAEMGVAMSAKDALLKLEHRQQIEKEVIELINDIPHTQFLLSMPGIGPKTAAQILMTAGDMSDFPSAGHLASYAGLSPRTNQSGTSIMSNSLNRAGNKKLKNALWQSSSASIRFHERSRQFYERKRREGKRHNAAVVALARRRLNVLYAMMRNHEHYHDPAPSQEDLAA

SEQ ID NO: 262948 - protein, 338 aa, unidentified
MKYFVGMDLHSNNTVLGIIDEKGNRVYKAKVANFLPLILNELELFRRGIVGVVVESTFNWYWLVDGLMEAGYKLHLANPSAIKQYEGLKHTADYHDAFHLANLLRLGILAEGHIYPKQERAIRDLLRKRLMLVRHRTAHILSFQSLYNREKGCRIGGDDVKKLGEEDIDELFDTDYVVLSAKANISTIGFLKRKIEEIEKIVLGTMKLLPEFQKLKTVTGIGDILGLTISLETGDIRRFAKVGNYSSYCRCVGSQRLSNEKKKGEGNRKNGNKYLAWAFIEAANYTKRYCSYARRFYQRKTAKTNKIVAIKALAHKLARASYFVMRDRVDYDPMKAFG

SEQ ID NO: 262949 - protein, 453 aa, unidentified
MPGSTSTRGRSSGQLNTINPNAAGLDVGSTFHVVAVPADRDEQPVRTFRTFSGDLHRLADWLKEAGITTVAMESTSVYWIPVFEILEARGFEVLLVNARDVKHVPGRKTDVQDAQWLQQLHQHGLLRGSFRPRDGVVRLRAYLRHRERLVEYAASHIQHMQKALMQMNVQLHHVVADITGATGMRIIRAIVSGNHAPERLAEFRDVRCAASEATIGAALTGNYRAEHVFALRHALELWDFHQAKIVECDAEIERVLRTLNEVRATPAEPLPAVRHAKAKNEPEFDTRPALYTLLGADLTQIHGFGAYTVLRLVAECGDDMRKWPTAKHFTSWLSLAPRNKISGGRLLSSKTRRSSNRAATLLRIAAVNVGKTQTALGAFYRRLAARTGKAKAVTATARKLAILFYKALRFGMTYVDSGASYYEERYRQRVIQNLHRRARDLGFTLVAGPATNG

SEQ ID NO: 262950 - protein, 332 aa, unidentified
MKKVSTGAGRQAKNFSEQKLTIGLDLGDRSSWYCVLDEAGVILLEQRLSTTPKAMREVFGGMPHSRIALETGMHSPWVSRVLNELGQEVIVAHARNVRLIGESRKKDDRMDAQTLARLARIDPELLCPVKHRSAKAQADLTVIRARAGLVRARTALVNTARGLAKSYGERLRGCSVRNMNPEKAQGLSPELRTALEPLLAGIESLSERIRECNEGIERLAQESYPQVALLKQVKGVGTLIALTFLLTLEDPHRFRKSRDVGCYLGLQPGRRNSGQSEPQMHISKEGDPYLRTLLVQGAHHILGPFGADCDLRRWGLKPRLVAYGYFWLSEGA

SEQ ID NO: 262951 - protein, 340 aa, unidentified
MTITTVGIDLAKNVFAVHCVDQNGKTVLVKPKVSRAALPELIASLPPCVIGMEACSGAHYWARVFRQYGHEPRLMAAKFVSPYRMAGKSGKNDAADAQAICEAVRRPHMRFVPVKDESQQAMLCLHRTRQGFIEEKTATYNRLRGLISEFGVIAPQSTDTLRHIVSEQKNSLPLQVQQCVDDLLEHINRIEDNIAEYDRILSRMAKTDHRSQRLMKLKGIGPTTACALGASIGNAHDFKNGRQLAAWLGLTPSQYSSGGKSKLGRITKAGDSYLRTLLVQGARSVLIGAEKRTDSFSRWVCTLVERRGYWRAVVAIAAKNARLCWASLHYGDDFRLYSAS

SEQ ID NO: 262952 - protein, 343 aa, unidentified
METVTTIGLDIAKSVFQVHGVDAAGQVVIRRQLKRRYLLAFFQKLPPCLVGIEACASSHHWSRELQALGHSVRLMPPAYVKPYVKRQKNDATDAEAICEAVSRANMRFVPTKTPEQQSGLVLHRTRHLFMRQQTSVINAIRAHLAEFGIVAPIGRNGVEELLLVVTDTNDKRVPEVARVCLSALGAQLRRFKEQILEFDRLITAWHRSNEMSMRLDDIPGVGPALATALVASVADPKAFRSGRNFSAWIGLVPKQHSSGGKERLGSISKQGDRYLRSLFVIGAFAVIRYAKIHGTKHRPWLTALLVRRPTKVAAIALANKIARMAWAMMAKGERYKEPVALAA

SEQ ID NO: 262953 - protein, 399 aa, unidentified
MLKGYDEVAVFLGLDVGKEGHHAVAQDRSGRKLLDRALPNDEAKLRELYGRMKAHGPVLLVVDQPATIGALPVAVALDEGVTVAYLPGLAMRRIADLHPGSAKTDARDAAVIANAARTMPHTLRALQLDDETIAELTVMSGFDDDLAGQITATSNRIRGLLTQIHPALERVLGPRLDHPAVLDLLETWPTPAALAAAGKARVRTRLLKKAPRLGGRLAEEIFAALAAQTVVVTGTNAAGVVLPRLAAQLAALRQQRAEVAEKVEELVAAHPLSKVLMTMPGVGVRTCARILTEVVGKDFPTAGHLASYAGLAPVTRRSGISIRGEHPPRGGNKVLKRSLFLSAFAALSDPVSRAYYDRKRAQQKKHNEALIALARRRTDVLYAMLRDNKPYANPTPVAA

SEQ ID NO: 262954 - protein, 421 aa, unidentified
MVQKVFDQLYERVAGLDVHKAQVTAAVRVPDSEGGRLQDVAEFSTTVRGLLGLRDWLAAHGVTHLAMEATGVYWRPVWAILEDRFECILVNARDVKQVPGRKTDVGDAAWLAQLLEAGLLRASLVPPKPIRTLRNLTRYRKTQIEERQREANRLHKILEDTAIKLDCVASNILGVSGRAMLDALVAGTTDPAVLADLAKGRLRSKLPALTEALEGRFDVEHALIVSAILAHLDFLDEQIDRLSDAIGEQLGPFAQAVELLCTIPGVQRRTAEVIIAETGGDMSVFPSARHLASWAGACPGNDQSAGTRRSGRTRKGSRWLGVALTEAALASTRTKDTYLAAQYRRLRPRRGHKRALGAVKHSILVAAWHMLSTGELYREPGGDYFERRRDPDREIKRLIAQLQRLGQHITVGPAASTPAAA

SEQ ID NO: 262955 - protein, 353 aa, unidentified
MEEKYVGLDVHQSMTVGAVHDGGGRSVMETVVKTEANAVGDFLRGLSGRIHVTFEEGTHAAWLYEVIRPLVAEVIVCDPRRNKLIEDGNKGDKIDAHKLAELLRGGHVKSVYHGASAMRTLKELVHNYDALVDDTTRVMNRIKAVYRGRGISSSGRDVYRKLNRESWLKRLPEGGLRQRTEFLYQELDTLSQIRQDAKRVMLIEARRHAPYRLVKTIPGLGPIRVAQILAAIGLPERFRTKRQLWTYCGFAVVTRSSADYELVGGKVQRRKTRTVTRGLNWNFNRRMKEVFKAAAITGMQREPFQSYYAGLITKGMREELARVTLARKIVAITLKVWKKGEVFDAAKLKPATT

SEQ ID NO: 262956 - protein, 340 aa, unidentified
MASQYVGLDVHKKTIYGYVMDKEGNKLFEKEFKTDPYDMDLFLLNVVKDDSIVAIESCSCWQYAYDYLHDDGYTVELAHPVGIAALKKLRKHTDRHDAILLADLLRTNMLPKSYAAPNDIRVKRQITRHRNSLTNILNEVQNKIHAILLRHGYNVPFTDAFCKSALKYLHDITIPACDRLEIDQYIEILKLLMIKKNECTESIEEIASDDPAIRIVMTMPGMGYFNATAFVGEVGDIRRFASGDKLTSFAGIVPRVHQSGEKTTFGSITKQGSNNLRHVMIQAANVAVQHDKLLKKVYLKFAHKGHNKAIVAVARKMVTLLYVMLKNNIGYRALQIHKAS

SEQ ID NO: 262957 - protein, 331 aa, unidentified
MADKEDKFYVGLDIHEKSFYGTILDKQGEIISEGNVKYSKEGIQNFLGYLPSTRFKIAIEACGLSRGVYNLLTDLGYEVVQANPLKTNRIAAKKKTDKVDSKILADLLRTGYLPLIYVPSEDILKLRDIARHRVRLVRMRAMAQVRIKSYLRRDGKKFPGGWNKDTMARLREMDPFVEHYVNIIEVINEQIKEIEKEIKMIARNKYYAVLLQTIPGIGEFSAILILGEIGDIKRFDNSKSLVSYAGLCPGVYQSGDTSYDVVDNANNKYLKWILTECAGRAAIMDNRYMKHFARVKKRKGWKIARRSVARKMMTDIWYILTNEEPFRKSES

SEQ ID NO: 262958 - protein, 391 aa, unidentified
MCTGHTPAISSAEASVNHDSTVFVGLDVHKESITVAYAIDMGEVELLGKIGTLKADIDRLCKRIQSKAHHVRVVYEAGPCGYGLYRELVERGFDCMVCAPSLIPKKPGERVKTDRRDAVKLVRALRAGDLSAVHVPDVEDEAFRDLARTWAAAKADLRQARQRLKSFLLSHGVRYSGNADWGPAHRRWISVFAFPNHWQQLAFDECRRTIEDRFAQCERLEATLQEAVVGWRFYPAILGLQTMRGIQFITAVGMLSELGDLSRFEHPRQLMAWLGVTPSEHSSGERRRQGSITKNGNSYARKLLVEAAWSYRYPARVSPEIQRRHEGIPKRILDRAWDAQVRLCRRYRKLAARGKNVNIAVVAVARELAGFIWDISKLAMSLAVTRNERPA

SEQ ID NO: 262959 - protein, 341 aa, unidentified
MRYIGLDVHKDNITACVLTSTGKPKFEKDFIKDSESWNLDELMEYGDKEGFCVMMESGNYAYPPYRFFTDRGVETIIVHAQALKMITQSDKKTDKKDAYTIARMLRLYKRGEMDLQISYLPTREQCELKDICRYREELSTKIGDETRRIKSHMARNCEHLPKSYDDFQTRRARNYVRFNFSSDLTLMLRMADLERLMAERDSVKKEVESRLPDSREVEILMTIPGIARQTAVQIMSMIVDIDRFEDSEKLCAYFGMVPRVRDSGGKEHHGHMTKAGDKMMRIIMERVTETHVRNCDSSITRYYKRKCPEMGTKKALITASRKMLAVIFAMLKSGSDFRLAA

SEQ ID NO: 262960 - protein, 344 aa, unidentified
MSKHTVLSGDVAGLWARFCQLKDKVQVRTGHVVPIIVIQEAGLDGFWIHRFLQDERVESHVVDPASIATSRRRRRAKTDKIDGEALVRALLAYKRGEPRVCAMVRAPTPQEEDRRRICRERKTLTAERVEHVNRIKGLLFAQGISDYEPLLRKRRERLEELRTGDGRPLPEHLKAQIGRELDRLELTLQQIKSVEAERDAMLSPSDEGTPAPGAMLKNLKGIGPEFAGVLWSEGLFRSFSNRRQVAAYAGLAPTPWRSGSVAHEQGVSKAGNPRLRTTMIQLAWLWVRHQPRSILTLWFHQRVQLNGGRVRKVLIVALARKLLIAFWKYVTAGVVLEGAEITAA

SEQ ID NO: 262961 - protein, 403 aa, unidentified
MIFVGVDWAEDHHDVCLLDEQGANLGKRRVPEGLDGSRQLQELIAEHTEGPEQVVIGIETDRGLLVRSLLAAGYQLYAINPLAVDRYRDRHTTSGAKSDTGDAKLLADLVRTDRHNHRPVAGDSELAEAIKVLARAHQNLIWARQRQLNQLRSTLREFYPGALAAFRDDLGSDDAIALLERAPTPYRGRSISQAKIVSALRKAGRERNLEQKAAEIQAQLRAPQLQMPNSVAQAYGHTVSALVLVIKQLNLQLRELEQELNQGFEMHPDAEIYLSLPGLGNVLGARVLGEFGDDRTRYSDAKARKNYAGNSPITKASGIKQLVLKRFACNHRLADACQLWAFCALRSSPGARSYYDQLKARGNTHRQALRALANRLVGLLHGCLEHRQLYREDVAWPPAAAPA

SEQ ID NO: 262962 - protein, 292 aa, unidentified
MKEDSVIFIGLDTSKLKISVAIADGSRNGEVRFFGDISSEPASVASMVSKLSKRGAKLHFCYEAGPTGYGLYRQIVELGHDCVVVAPSLVPKRAGDRVKTNRRDAMSLARLHRAGELTAVWVPDEGHEAIRDLVRAREAASDALKQARQQLQSFLLRHGRIYAGREPWTRAHRRWLTCQAFDHPAHQILLAEYCQAVADASVRLDRLTKLVVETAASWSMAPVVAAYQAMRGVAFMTAVTFVVEIGDVRRFDNPRQLMAYLGPRSVGKLNRRTGQAWRDHEGGQHKSSKGTH

SEQ ID NO: 262963 - protein, 350 aa, unidentified
MIIIGADYHPAVQQIAFVDTETGELQERRLEHPDGAEKFYRDLAAQGKKVRVGMEASGHARWFERLLAELNIELWIGDAAEIHRKRERKQKTDRQDAQHILRLLLKDDFPQIWVPSWENRDLRQLLWHRHRMVQARTRLMNQLQAVALNEGLRCKKRLWREAGRKQLEAFRLAPWASRRRQDLLELLDRLNPTIAELTQAMEREVEKCPEARRLQTHPGVGPLTALAFVLIIGKADRFQCGKQIASYLGLVPLEDSSGNRRRLGHITKQGNSLLRFLLVEAAQVTARSLPEWRSKYVHLTMRRGRKIAKVAMARKLGVRLYWMMRKGWDYEQVKKFGSHAGQPGNRHGVK

SEQ ID NO: 262964 - protein, 365 aa, unidentified
MTIVDAVRPVTGGVDARLDLNVAPCPVTGGVDTHLDVNVAAALDPVGGLLGVAEFPTTLAGHRELLGWLSGFGPVARVGVEGTGSYGAGLARFLRASGVEIVEVDRPNRQARRRSGKSDPLDAVEAARAALSGRASGAAKSRDGNVEAIRALVVAKRSARSAKIQALNQIRHLSFTAPEQLRQRLAGVSRHHLAAHAAGLRPATGAGADPVITATKTALRILGRRVLALDEEKAGIDALLAGLVTQTAPQLLAVFGVGVDTAAALLVTAGDNPGRLRSEAAWAHLCGTAPIPASSGKVTRYRLNRGGDRQANCALWGIVITRLGNDPRTKAYMTRRLAEGRSKPEVIRVLKRYVAREVYHRLPRP

SEQ ID NO: 262965 - protein, 355 aa, unidentified
MGSVAHLEAVRITVGVDTHRDEHVAVALDALGKKVATTSMPTTPKGYRDLLAWAEGLGAVEGWGVEGTGSYGAGLARHLKSAEHLVHEVIRPNRSVRRRKGKSDLVDAEAAARAVQAGVAAGVPKSGEGAVEMIRVLQIARSSAVKQHTQAINSMRGLIVTAPSELREALRGLSVPRVVAACCLLRPGELATPTAAVKFALRGLARRHRDLTEEIKALDAELAPLTLKAAPRLTRLFGVGIQVAGQLLVTAGDNPSRLHSEESFASLCGVSPVEASSGQTRRHRLNRGGDRQANAALHRIVIVRLRHDEETQRYMAKRTAEGKSKREVIRCLKRYVANEVYAALMTSADNPQKAA

SEQ ID NO: 262966 - protein, 416 aa, unidentified
MIHEQQFAAYVGLDWGDQRHSVHLQVSGQPKAESFELEQKPEALHEWVARLVERFQGGWIAIAIEQRKGAVIHVLMMYAFFVLFPINPKALARYREALYTSGAKNDPTDSELLLDFLTKHSEKLRPWIPDSEPTRELQALCEQRRKLVNRRVALTNRITSLLKQYFPQALDWIGEIASIQACDFLEAWSTLAAVQAIDHSQLRTFYHHHNCRKASVISERLDQIARARPLTNDLAIIEPYSLIVEASAAQLRNLICAIKRLDKRIAELFTQHPEHDLFDSFPGAGAACGPRLLTVLGTDRSRWNSAVELQSYSGIAPVTEKSGNSCWIHHRLACAKFVKQTFHEFADQSIRYSNWARAYYDLQRSRGKDHHAALRALAFKWIRIIFRCWKDGKSYDEATHVQSLRRRGSPIVEKLS

SEQ ID NO: 262967 - protein, 318 aa, unidentified
MDVHKESITACIMDKEGNVVRHHTFPYNKESIKAFLFGISNGEIEIAIEACGIWRGVYKVLKELGYKVKLANPNKTHDIACRKKTDKVDSRILADLLRTNYLPGVYIPDEEMLRLRDITRHKSNLTRLRVEIQVKIKGYLLREGIKYGKIWNEKALSKLAEDDPDVNNLINVYWSLKEEEKEVMRRIRKIAGNMRKANLLMSMPGIGEFSSLMILAEIGDIRRFESPKQLISYAGLCPGIYQSGNTERNVRNNAVNKWLKWIIYECSGRATMLDSRFQEYYYKIKQRKGFKVARRAVARKMLTIIWYMLTNEEPYRNN

SEQ ID NO: 262968 - protein, 358 aa, unidentified
MTILIDDVTVIGGVDTHKHTHYAAAIDDHGRLLGHQQFPATSPGYAALRSWMRGYGHLASIGVESTGSFGAALARELSRNGERVIEVNRPNRLARRMDGKSDRLDAEQIARAVLGETSTAIPKSKSGTVEVIRTLRVTRSSAVKARTQAFNTLFGVMIGAPSQLRDELVDLTKRTLVNRCLRLRPETEELLSLAAEPERMHLAGTKLSLRDLARRWKALDDEIKQLSAQIDALVTSAAPDLIQLHGVGTEIAGQFLVTVGDNTDRIRNEAAFAKLCGVAPQPASSGRTTGRHRLSRSGDRAANSALYIIAIVRMRRHEPTRAYVERRTAEGLSKREIIRCLKRYIAREIYANLPQIAT

SEQ ID NO: 262969 - protein, 343 aa, unidentified
MQVSTIGLDLAKNVFQAHGVSAEGKVVLTKQLRRGQVLSTFAKLPPCLVGMEACAGAHYWARELRKLGHDVRLMPARDVKAYVKRDKTDAADAAAICEAVSRPSMRFVALKTPEQQGRLMQHRVRDLLLRQRTQTINALRAHMAELGLVAATGRQGLGLLLAILADAKDERLPQDARASLKLLASQITALQAQIDTLDKRLHAQHRQCPASRRLETIPGIGVIGATALAATITDPKAFKSGRDLAAFIGLVPRNNSSGGKQRLGPISKQGDRYLRRILVVGAHSILKQARTRPDKHPWLARLMARKPGKLAAVALANKTARIAWAVLARGESYRAPTAPAAAG

SEQ ID NO: 262970 - protein, 369 aa, unidentified
MKQNNTCPKSSKRKRIRKGSLTIGMDLGDKTSHYYVVDSEGEMVRESTVATTKKGMKQRFGSLPRCRIAIEVGTHSPWVSRLLSSLGHEVIVANARQVKLISASTRKNDRLDAQTLARLARLDPELLRPIRHRSEKVQGDLMQIRVRAALVDSRTALINTARGMAKSMGERLPSCDADQMGVGKLAGMSSVVVEALTPVMEMVEALTLRIKAGEQKLEQLARNEYPETELLRQVSGVGPLIALTFLLTVEDPNRFGKSRDVGCYLGFRPRQSESGQSRPQLGISKEGDSYLRKLLVQGAHCILSERSPDTDLKRWGLKLAGKGNKNAKKRALVAVARKLAILLHHLWVSGEVYEPLLNSNRREKTKAAA

SEQ ID NO: 262971 - protein, 462 aa, unidentified
MDGTICGWCQKQAYFTKKARIKIFKAKNEEARVHFIPTLKDGVFVTLCAPLVINKSCGLDIHKRFVIATILSRSGEKQQHRFARDDDGILDLKNLVTSEKCDVVACESTSDFWVPIYEALIDHLPVIVGNARDMKAFTHKKTDKIDSEVIAKLALNKMVQPSRVFPKKHREFRSYVRLRLTLVRKRTDIKNEAHAILSSEMLHLGDVLTDIFGKNGRAILAGISSGKNIDQIIESLSPNVRKKSVQIREILDREISQSAAIRLQICLNLIKHLDEEIEVLEREIFNYAYQKHKREMEILMSVPGIGELGAATLIAEIGDFRDFPTGDKLASWLGIVPNVYQSADKYHNGRITKRGSKVARWILTQIAQAAARKKNSRLKEFFNRKKKTIGYAKAIIALARKIATIIWHLITNDEMYEDETGYQKGEVKKRKIVEADIFSVDERITIISGIIAIMGKKEGEST

SEQ ID NO: 262972 - protein, 425 aa, unidentified
MKSRLVKAQNQRVERITTTTLVIGIDIAKEKHAAQAINFRGIVLNNRPVMFSNDRSGFEHLGQTIRKLQKAHDMDDVIVGMESTGHYWFNLANWLVNQGIDVVLVNPMTTKRNKENRDNSPSKNDPKDALIIADAVSRGYYIPFSPKEEAFRRIRVVVTNREHWVVERGRIENRIHRWLDIRFPEYRQAFEDLFSTRSLATLRRFPTPSDVLKLTPERMVEIWGEYMSRPGGVRGKRKAIELLELARHSVGDTFALEEDKWELTHLVDEYERVQRIVDEADEMIEKILPEIPGSELVRSIGASIPATAAILAFGGDLSKLSHGNQLLRKAGLNLAERSSGKYKGQIKLTKRGNSLLRKHLYFTVFHLLSYNQAFQALHAHNIEVKRMTKMQSMMKLIGKLARMLVAMARTGEEFNLDKAQFPLAA

SEQ ID NO: 262973 - protein, 345 aa, unidentified
MQELIYVGLDLGSSHCCQSIINANGSLKFSRFIPTSEQHLREAFTGLNGEVRVHMEAGELADWVHSVIGPLVSRVVVSHPRSLAWIGKDSVKDDKIDAGKLAELLRLGRVHEVYCEQDDKRRTFKHLVTHHEQMSREQARRKSKIKARLRTLGVIRKDARLFTGNGQVDLLDAIESVEIKAMIAQSFAVLNRMLECEREAKAAMLEFSRRFPEVRLLQSAPGVGAITACRFVGYIQTPLRFSNKRKLWRYCRLGITRRESNGKRLSHPRLDNAGVGSLKDVSRKVFEAALRCKGDNSFKRCYEQSLDNTKNTVHARLATQRKILGCLRAMWLSNQPYRDFGSLKR

SEQ ID NO: 262974 - protein, 344 aa, unidentified
MQVTTIGLDLAKNVFQVHGVDARGVTMLRKQLRRDQVLTFFARLEPCLIGIEACGGAHYWAAKLTALGHRVKMMAPQFVKPYVKTNKNDSLDAEAICEAVARPNMRFVPLKSPEQQSVLSLHTVRESFVHARTAQANQIRGLLLEFGLIVPQGMRHIYARVPDLIEDANNELPGRFRLLIDRLLQHLKELDRQVHELEREIELWHRCSEVSRRLETIPGIGPLTASALVASAGDPGNFKNARQFAAWIGLVPHQNSSGGKTQLLGISKRGNVYLRTLLIHGGRALVQLAKTRVDRADTWLGKLTARRHHNIAAVAMANKNARLAWALLATGRSYEPMHMPARSA

SEQ ID NO: 262975 - protein, 338 aa, unidentified
MSLYCGIDLHANNSYVAVTSPEEEVVLGQRYPNDLGKILGALEPYREGLEGIAVESTFNWYWLADGLRESGYTVHLVNPLAAKQYQGLKYTDDRSDARWLAKMLHLGILPTGWICPPEERAVRDLLRKRTQLVRQRVASRLSLRNILERTTARRLSGNALERLSEEELAGWIEDEHVRLSMTTTLAVIETLDEQIELLEGVIFEQARKASAFSVLQTIPGVGPILASTIQYETGDLSRFAGVGHYASYCRLVRSERLSNERRKGQGLRKNGNAYLSWAYHEAAHFALRYQPSARKWHERKRSKTCALVAIRALAHKLARAAYFMMRDQVAYEPSRLFG

SEQ ID NO: 262976 - protein, 357 aa, unidentified
MKKRLNADTINVNGKTVNVGIDVHKLSWHVTALVEGVIVESATIKPSYRVLKKLLAQYKGARIRIAYEAGFSGFNLYDELTADGIECIVVPPSLIPVESGNRVKTDKRDSRKLAQYLENNLLKRVYVLSKQERAHRQFVRTRRQLSDHRTDVMRQIKSLLLFHGLPSFDGNRGFWTRPVLRALRSITPDEYVSHSLNMLIDLYEYLTQQVKNLTRAVRKLARTEPYARRVALLTSIPGVGVLSAMEVLVELQDVSRFATADQIAAFLGLTPSQYSSGQHVRMGKITHAGNHRLRTRMVECSWIAIKKDPGLNKTYQAIKMRRGGKRAIVAVSRKLIIRIRRILLDGVTYRTEYATAA

SEQ ID NO: 262977 - protein, 339 aa, unidentified
MSQKPNTAVAVVGIDIGKNSFHIIGHDQRGAIVLRQKWSRGQVEARLANMPPCLIGMEACVGAHHLSRKLKALGHDARLMPAKYVRPYSKGQKNDFRDAETIAEAVQRPTMKFVATKTADQLDLQALHRVRERLVSQRTGIINQIRAFLLERGIAVRQGQRFLRIELPRILATPPDVLSPRMVRVIEDLAGDWRRLDERIEELSGEIEAIACQDAGCERLMSVPGIGPIISSAMVAAIGSGEVFTKGRDFAAWLGLVPRQMSTGGRTILGKISKRGNRYLRVLFVQGAWVVLIRPKSWERYGLKSWIEAAKKRLHPNVLAIALANKLARIAWGVLAHGR

SEQ ID NO: 262978 - protein, 409 aa, unidentified
MERQLERCGGLDVHKETVAACVRVGGRTGPAEQHVQTFGTTVGDLLVLRDWLAAHGVTHVAMESTGVYWKPVFYALESDFTCLLVNAAHIKQVPGRKTDVKDCVWIAQLLEHGLLRGSFVPPAPIRDLRDLTRYRKAVIQDRTRVANRLHKALEEAGIKLAAVTSDILGVSGRAMLTALVQGTTDPAVLADLARGRLRGKLPALRQALANRFRPHHAFVLGQLLTHLDYLDEAIATLSTEIERVMAPLAEPLRRLDTIPGINQRTAEVILAEIGPDMRVFPSARHLASWAALCPGHHESGGKHKSGKTRKGNRWLRTALIEAAAGASRAKHSALQARFRRVLRHRGPKKAVVAVAHALLRMVYHVLADGTVYREAGADSYDRHHSQRVTRRALQALERQGYRVTLEPAA

SEQ ID NO: 262979 - protein, 324 aa, unidentified
MALGASGKVLVKKKFTQKQLLAYTANLQTSLIGLEACSGAHFLGRALRKQGHEVRLIAAQFVKPFVKSNKNDFIDAEAIAEAVERKNMRFVPIKTDDQLDLQAIHRVRDRLVSRRTAVINQIRAFLLERGLVFAKRPAQLKAAMADVLENAEADLTPMMRNLINVLWEEWKIVDQQIEELGDELERISAADAGCTRIRKIPGIGPVVATAIVAAIGNGAAFRKGREFAAWLGIVPRQYSTGGNARLLGISKRGNVYLRKILIHGARAAVLRMKRDRAPIGAWLDRLDARAHKNIVIVAMADKLARIAWAVLSSGNEYRPAAVPA

SEQ ID NO: 262980 - protein, 347 aa, unidentified
MNFYHSTHRYYCGVDLHARSLYVCIIDQQGEVQLHKEIKARPEPLLALLEPFRDDLVIGVECMLCWYWISDLCEEHGIHFILGHTLYMKAIHGGKTKNDRIDSFKIAMLMRGGNFPLAYVYPKKMRATRDLLRRRTRIVQHGAMLKAHAVNTLSQYNLPPSKANLNNPGGRSQLTAAFSDPDVQRNVDLDLAIVDCYQHELKKLEWHLEQQAKQHDPASLNVLKTIPGVGRILALTILYEVGDIQRFESVQKFASYARLVKCKAESAGKVYGTQGNKIGNAHLKWAFSEAAVLFIRNNDKAKRYVEKLQKRMNKPKALSALAHKLGRAVYFMLKDKRVFDEQRFLRG

SEQ ID NO: 262981 - protein, 377 aa, unidentified
MSSSIIWIGMDVHKDTVMVAVYSDDAREPEIVQQLPNDPRKLKRFFQRWGRRGEIRSCYEASGAGYVLQREITEWGHDCEIVAPSLIPIRPGERQKHDRKDATQLARLYRAGELVTIRIPSAAEERVRDLVRCRQCFQREILRSRHYVTKFLARRGLVYREGTNWTRRHRSWLQSLFQQGGLEPEDRSVFSEYLALLDYKVSRREDLDGQIEKLAFSPAYKPKIDRLRCFRGIDTLAAMTLVTEIGDWRRFERPGQLMAYLGLVPSEYSSGDREHRGPITKAGNSRCRHVLVQAAWKYKHRPTVSVDLKKRQSGQLPQAIAHAWKAQHHLHKLFHRIAARKSSRIAVVAVARELVGFLWAVMQELETEQAVTLSTAA

SEQ ID NO: 262982 - protein, 412 aa, unidentified
MRVLHERCCGLDIHKKFVVACLLATGSDGTVHKEVRTYSTMTNDLLALADWLRSEGCGPVVMESTGSYWRPVFNLLEDQCEVLVVNAYHVKAVPGRKTDVKDAEWLADLLRHGLLRASFIPSPAQRHLRDLTRYRIHLVDERARLTNRLQTVLEDANIKLAAVVTDVRGLSAREILQRLLGGETDTQALAELARGKLRAKRDALAQAVVGRLETHHVFLLREQLAHLDYLDAAIARLDAELEARLAAERDAAALLETIPGVGRRTAEVLVAEIGTDLSRFPSAQHLASWAGMCPGNAESGGRRLSGRTRHGNAWLRRTLAEVANVVSRMKGTYLAAQYRRIAARRGKGRAVVAVGHSVLVAIYHMLTRHEPYRELGAQYFDEHERARVQLRLVHRLERLGFAVTLEALPLPT

SEQ ID NO: 262983 - protein, 342 aa, unidentified
MEREQQYVGIDLHRRRSVIVRMNDAGEVLGVSKIDNDPVALSLAVAEAGPDPEVVLEACYGWYWAADLLQAEGARVRLVHPLGLHWDTRRVKNDVKDATELAHRLRRNDVPEAWIAPPPVRELRELVRYRAKLTALRTSAKAQIHAVMAKLGIIPPLGRMFGPTGQVLLDEMDFPGPYGLRVESLRDLLEIYDRELAMVEREIARWLKDDPGYKAIQALHGIGPITAAILVAEIGDVHRFPSARHLCSWAGMTPKLRESDTKSNKGNISKQGSTIVRWALVESVARYHGGEPIEPTYRRIAARRGGKIGNKIALIAAARKLLTLVYYGLRDGEIRCLAQEAA

SEQ ID NO: 262984 - protein, 476 aa, unidentified
MILSASNLLSSLAWFPVSTLNCSQPQGGARVVEYESQETALINKEAAMPKKTKSTAVDTVQMTGKKAMADLDIVYQRCCGVDVHKDIVVACCVSIGGKKQVRSFGTMMEELLELCAWLKAEQVEMVAMESTASYWKPIFNLLEVEEIPAILVNAQHVKNLPGRKTDVKDSEWLAMLLRVGLLKPSFVAKRDQRELRELVRYRKSIVEERSREFCRMDKVLQGANIKLSSVMSGLGTLSGIEMIRAIAGGENSEAVIAALAKGSLRNKKEDLLRALRGYIQPHQRMILSSMLAHIESLDAQIVMLDTEIQSRLAQCEDVVERLTQIPGVGSHSAQVMVSEIGTDMGQFPDAKHLVSWAGLCPGNNESAGKKKRGQARKGNKTLRTTLVQCARSAARTKNTYLSSMYSRIASRRGANVAAVAVARTILETYFYMLRDKVGYNELGACYYDERNLEHIRKHAVKRLESLGFKVSLEGVA

SEQ ID NO: 262985 - protein, 315 aa, unidentified
MAQQLWIGIDVSKKWLDVATFPASAVRRFPYTAAGLAALRDWLASLDLAGIAMEATGGIERDLAYFLADAGLAPRILNPKRVRDFANAITAAKNDRLDAAMIAQFAAIVPGEAIQRDPAREALAELVGLRQLFSDQVTALLNHGRGLSQPALRKQIARQIKALRAQIKQVERDIAAAIKASARFAEQAALLRTMPGVGPVVSATLLALLPELGQLSAAKLSALVGVAPFDRDSGGRTGKRHISGGRMAVRNPLYMAALTASRRNPVMKQFYDRLRARGKEGKVALVAVMRKMLTQLNAMVHTGQAWNPQHGHAHP

SEQ ID NO: 262986 - protein, 356 aa, unidentified
MSMVAHTHPFVIGVDAHARNHALAILACPTGEVLDEGQFPATGAGLQRAVDWVARRTGGDLDTLWVVEGVGTYGARLARAAADAGYSVAEAARMNARANRGVGKSDPLDACRIAQAVLPLDVAQLRRPRTDDGVRAAVRVLIASRDHISVERTAAINALTALLRVAELGVDARRALTGGQIALVAAWRTREEALATRVARAEAVRLAKRVLAADQEIASNAKQMTALLNSSPARKLLDQPGIGPVTAAVTLAAWSHPGRVRSEAAFASLAGVNPIPASSGNTVRHRINRGGDRRLNRALHMAVVTRMRMDPATRAYVEKRTAEGRTLREIRRCLKRYLARQIYRHLNAASDTLLAA

SEQ ID NO: 262987 - protein, 324 aa, unidentified
MLYAGLDIHKSFTQAILMSETGEVIKKGKVETSNEGLRNFFGGYTDVKIAIESTGIWQPVYEILESLGYDVRLSPPLKTKAIAYAKIKTDKIDAKVLADLLRAKLLPESYVPSSDVRALRNICRERKSLVCDRTRWKNKLRAELYKMRVEGIRDDLYTRAGKEWLLSLKLPKINRMLSIIEFLDEKIEEIDKTLKEICIPDVRLLTSIPGVGNYSAVLIYSEIGDVNRFSHSEKLSSYAGLVPSTHQSSLHTRHGKITKEGSRYLRWVLTECVQIHVSRYDTQLTRFYRRLVKRVGKQKAVIATARKLTKIIYWMLKNKEPFKG

SEQ ID NO: 262988 - protein, 418 aa, unidentified
MDLDEVVYRIACGLDVHFTFVTACLVATGPKGKPKVEERRFPTNRKGLSDLREWLTEAGCEAVGMEATGVYWMPVYAALEGACTLVVGNPQHMKNARGHKTDRMDARWIAGQVRHGRIRSSFVPPPEFREARRLARCRRQLVEARTSIRNEIQRLLAEVGITLAGVVSDVFGTSGTSILKALSEGKCVRDELSTHLYSSLRKKDKMASIAAALEAPLPEVSRQLLAIHLRRIEALDGNIDEVEALLFRQLTPHAAKLDLLQKIPGISKLSAHIILAEIGVDMTVWPTDKKFSAWAGVAPGCNQTGGRSKRAAVRKGNPYLCTILMECAGGAVQKLDSHLRTKHRRLCAQLGSKKKARMAIAHKLALIIYKVLGENLEYEDPKPSQPSEKAKRRILQTRVKDLERLGYRVVLEPIEAVS

SEQ ID NO: 262989 - protein, 346 aa, unidentified
MSQIIRIGMDTSKHIFQLHGVDSAERPVLRRKLRRGEMLAFFAKFPPTIIGMEACAASHNWGRKLRELGHEVRLIAPQHVKAYIKRNKNDGRDAEGLCEAMSRPTMQFVPVKSEEQQAALMLMGVREHLVKRRTQLGNAIRGYAAEFGLIIAKGLDKIEPLLARIAQDQSLPELAREIFVMQGRDYARLQVELKTIEAKLRAWHRANADSRRLAEIPGVGPVCAAALVMKAPDPHAFPSGRHFAAWMGLTPKDHSTAGKTRIGKITRAGDEMLRSVLVAGATAVIQQAKKGRGHPAPWLVALLARKSPKLAAVALANKIARIAWKLLTTGESYNGARMPGASAVAA

SEQ ID NO: 262990 - protein, 420 aa, unidentified
MSFKIFRFNCCGLDVHKTWIYACIGITDSNGRTDYKQARFSSFSKGLKELCDWLAKYNCSEVCMESTGKYWIPVFNVLEKANNSVILAHPKYTKPQKGNKTDRKDAKWICDLFMCEMIKPSFIPPADIRHLRDLVRYRFKLTCMITGEKNRAQNCLTVSNLKLDDVFSDVFGKSSRSITEYMLAHPGEIFDVAPFVDSRCKTPMEEIQAAVDGAISPEQAIKLRQCLNHIDELEKHLEEIEREILRLSDKYQAALDLIRTVPGFDKNPMTAIQILSEIGGDMSVFPSAKHLVSWAGCCPRNDQSNKRIKSTRISRAGNYIKPILVQVANGLLRSKKHPEITGRYKRIKSHRGHKKAIIAICRMLLTAIWHILSDLKPYTAEGFLESRPANKAKVLTTSQALNLLKQRGYTIKDDIVPAMN

SEQ ID NO: 262991 - protein, 418 aa, unidentified
METDYAVLIGLDWSSLKHDLCVLDTKTKETTRLVLTHTPKQINEWVSELIAKYPGQRIAICLEQSRGPLVYALMDCAEIDLYSVNPASFAKYRNAFQPSGAKNDVGDAALLLDMLLRHREQLKVWRPHTPAMRLLSSLCRDRRKIVDSRTKRTNALCAKLKEYYPQAIELVGDILYSELCCAFLKKWPSWDRLAAAKPDQIRKFYYAQRCRNPKVIEKRLELIATGCALTNDAAVIESNSMFIKALIDEIRVLNKSIAEYDARISKVFKEHPDTFIFKSFPGAGQQQAPRLMVAFGEDRDRYESAEDVASLFGVAPVLTSSGKQMSVRWRYHAPKFLRQSIVEYAGSSIIFSKWAKLYYNEQRKRGKGHNAAVRALAFKWIRILFKCWKDRVPYDEQKYLASLKQHGSWLAEAVNNAA

SEQ ID NO: 262992 - protein, 412 aa, unidentified
MIKREKIELVKGSDIYAGIDVSCEIHRVRFIDNLGQEVIKGISFSNDREGFNKLEEHMKKYGIDHNIIFGLEPTGDYWKPIGYYLKRKGYKVVLVNPYHIKRTKEIIDNSQQKDDRKDSYLIADLVKQGKYFFPIIPEGIYGEMREISISWRRTKQQITRLKCYLSNFLAKYFPEYKRVFSDILGKSSFYILSHYPLPEDIRRLGKERLTRIIKRVSKGKIKQEKIDRLYEIAKDTVGIKEGRKAAKMFLKEILKELERLIRRREKLKEKMKELLMRSGYGDYLLSIKGVGVVSACLFLGEIGDPRRYKKSSQIEKLAGYNLVEESSGKKEGEKQISKRGRETLRYVGYLVANVAIAKNKEIRELYRYKVDVLKKNKIKVMVGIAAKMLRIMFAVCKNKEYYNSEKIRKNFI

SEQ ID NO: 262993 - protein, 400 aa, unidentified
MLSVGIDVSKEKSTVCGMRHLGEIVFGPFEIAHTESDLSELARMIVRLDDDTRVVMEATGIYHLPVATFLREQGLFVTIINPYEMKVYRSQDIRKVKTDKRDSMVIANYGVDKWINLREFTPQEDVYAELRLLGRQYRFYMESRIEQLLNLTHLLDYTMPGLKSCFSGWSEYSGKDKLCDFVEEYWHYDNIIKFSESKFVERYQKWTKKKGYQFSETKAVQIYRLAKEGIPTVPSNAPSTKMLLLEATKSLREINSALFAILTRMKELAKTLPEYPVVRAMSGVGEVLAVKLMAEIGDVRKYHSSKSLVAYAGIDPPPYESGKLIGTNRHITKRGSSTLRKIGYEVMRCVKANGRSEDDPAVYDFMLKKESEGKAKKAAKIAALNKFLRIYYARVLEVYA

SEQ ID NO: 262994 - protein, 353 aa, unidentified
MYIGVDTHKQTHVLLAIDEEGRTGGSRTLANTPEGWATALQWAREQQQQHRWGVENSGSLGKGFAQFLLAQGETDVREVVPHRTAQYRRRGRTQDKTDTADALAMARLLRAEGELLPAVQADDASTELRLLSDHRDNLVVDRTRLINQLHAQMLQLDPRYAECSGPLTGATGVRYCRDLCLPEGNGIEQTRLLVVRQLATRLLQLDADISAATKALEQRVKATATPLLQCRGVGAVVAARLLGELGCTPRVHSAAALAALAGIAPLAVASGGRHGHRVNPGGNRKLNRAIHIVALTQRRCEPLAQAYYEKKRAEGKTGRAAMRCLKRRLVDVLFRLWQPRGQALPAAPPALAA

SEQ ID NO: 262995 - protein, 345 aa, unidentified
MKQPRVIAIDLAKSVFQVCLFDNAMQVLSNRAMSRAKLQALLARQGPAHVVMEACGTAHFWARMAQAHGHRVTLLPPKLVTPYRQGQKTDGNDVLAIGIASQQPQIKTAAVKTLEQQALQSLKRIQEHFSDQLTASGNALRALASEFGLVIAKGTASLKRRMPEILEDGENTLPMAARHGLALLWSHWQQLEHQRADAERQLQHYAETLEPCRRLQAIEGIGYKNAVALYLRLGDGQHFKNGREASACVGVTPRQHSSGGKIRLGGIGHYRGDQRLRSSLIVGCRAMVNALKRRAPRNATEQWLQQVIERRGPGRAAVALANRNVRTAWAMLRHATGYQPQPLAA

SEQ ID NO: 262996 - protein, 467 aa, unidentified
MVCFNPSTKLTRVRPAELIVAMPQGMSTRRKFVSYFAPLVGRGSDEECVSREVGTDMQVVHERCCGLDVHKKTVVACILITLANGEVQRHIRTFSTMTAGLLALSDWLESLAVTVIAMESTGIYWRPVFNLLEEGRSVILVNAQHMKAIPGRKTDSKESEWLADLLRHGLLKASFIPPAPVRELRDLTRYRKTLVQERAQEVNRLHKVLETANVKLTAVATDVLGKSGRAMLEALVKGATDPEILAELARGRLRQKLPQLQEALDGRVEPHHRLLLKHILAHLAFLEETLEQLQRDIEERLHPFEEAMTLLMSIPGIQALAAATIVGEIGDDMTRFPSAKHLVSWAGVCPGNKQSGGKRLSGKTTRGNATLRAILAEVVWVLSHMKDNYLSAQYHRLARRLGKKKAVMAVSHSLLVIISQILSTKQPYSDLGADYFEQRDSARLTQRSVRQLEALGYAVTLVPKEVA

SEQ ID NO: 262997 - protein, 387 aa, unidentified
MPQPNDLSRSLVALDQDSTIIAVVEMSQSSWLVGGVLPGIERQPCKKLEPSAERLLGLLHRWRDEAVKAGSHITRIALAFEAGRDGFWLARWLRARGVEAHVIHPSSVAVSREHRWAKTDRLDTELLKRGFLGWLRGERGHCTMARVPTIAEEDAKRPNRERECLVGERTRIVNRMKGTLARLGIRNFKPTLRKSAERLATLHTPEGSPLPPNVLAELQRDMARLGFLICQIREIEEARQKRLEQEPETGPHAMVRLLARVVGVGIETADMLVHEVLSRPMRDRKAVARYAGLTGAPDESGAKRREQGLAKAGNARVRRGMIQLAWRFLLFQKQSALARWYQARTADARAGARKTMIVALARKLLIALWRFVTTGETLEGVVLRPAG

SEQ ID NO: 262998 - protein, 319 aa, unidentified
MVVLGVDVSKGDLHAVLLTDDRHSAKRSFPNREIGFEQLVKWLKNRGVDHVHACMEATGGWGDDLGAYLHDRGHVVSIVNPARIKAFGQSEGLRTKTDGVDAALIARFCRAHQPDPWTPPTPKERELQALIRRREGLIEMRTQELNRSSAAHRTKAVGASIDDHVAYLTAMIEGIEGDIRKLVDEDDNLRGKRDLLTSIPGIGEQTAHSILGEIPNLAEFRDVKAVVAHAGLSPKHHQSGQSPGISRLCKAGNANLRKALYFPALAAMKSNPAIRAFAGRLQARGKRKMVIVTAVMRKLLVIAYGVLKGGRAFTASPAS

SEQ ID NO: 262999 - protein, 321 aa, unidentified
MENIALIGIDLGKNSFHIHCQDHRGKAVYRKKFTRPKLIEFLATCPATTIAMEACGGSHFMARKLEELGHFPKLISPQFVRPFVKSNKNDFVDAEAICEAASRPSMRFVQPRTESQQAMRALHRVRESLVQDKVKTTNQMHAFLLEFGISVPRGAAVISRLSTLLEDSSLPLYLSQLLLKLQQHYHYLVEQIKDLESQLKRKLDEDEVGQRLLSIPCVGTLTASTISTEIGDGKQYASSRDFAAATGLVPRQYSTGGRTTLLGISKRGNKKIRTLLVQCAGYSYKNWNTSLASWPTGSGSCCVVGKATLSSPVLWQTSWPE

SEQ ID NO: 263000 - protein, 367 aa, unidentified
MLFVGLDVYKEKIAVATAEGRRSGEVRFEGTIVNKLDAVRRLVEKHARRHGQLQFCYEAGPCGYAIYRQITRLGHDCTVVAPSLTPTRPGDRVKTDRRDAVTLARLHRAGELAAVWVPDEAHEAMRDLVRARTAAMESQRRARQQLQGFLLRHNRIFTGGHNWTKKHRRWLTPVRFDHPAHQIVLQDAIDAIDDAGARRARREAQVAELLPQWSMAPVVEAIQAMRGVGFITAVTVAAETGGLRRFESPRQLMSHLGLVPSEHALGGRTRRGGITEAGSKDTRRVLIESAWTYRTNARIGPTHQSRLDGLPKPVREIAWNAQVRLCSRYRRLAARGKPQTVVTTAIAREMAAFIWAIARHVQPAETV

SEQ ID NO: 263001 - protein, 365 aa, unidentified
MNFIGADLHKKSITLCVMDERLKILARKTVPCGQPDQIVESFRQFLPFKVVVEATASYLWFVELLEPLAEEIVLANPKKLRVIAESTKKTDRLDAQVLAEFLARDMIPRAYMPTPRQRQHRALVRHRQYLRGRMTSVRCKIRHVLADYNADRKDLFSARCGKSYFKQVALSDADGFVLKQLWSEWEDHQARLLATTRKIKAFIAKAPAREEEARAILKSAPGVGFVTAEVVLSEIGDVSRFGNAKKICAYAGLVPAVRQTGGKKSKDLHITKQGSGLLRWALVESAWRLVKSSPKWSALYSRLRERCGSKRAIVAVARKLLCVLYAMLKTSTPYKIIPAATPAEPPEPTRKRLVRVSTAAQAVTP

SEQ ID NO: 263002 - protein, 352 aa, unidentified
MYYVGADLHKEQTWFYVMDENGTKIDSKSISNSQDSLKNYFATIPTPFTLAVEATYNWYFFIDMAEKFAQTAYLANSYELKAFAKRHKKTDKIDARLIADILRKGFLPKVFIPNQSIRQLKELLHHRINLVRDRSRNIFRLKNTLDKLGADSSGDFTTVKRLQMIPVKTLPEHSQYVLTGYIEQIIQLSQRILKMKTYLRNELLEDKEIQNLITIDGLDYFSAALIKSEIVDINRFASFGRLCAYAGLAPKVSQSGDKAAYHGALMTNRRKDLQWILLETVFHFIRGSSERMSRYEELKIRKGANTAKVIMARQMLKVIYHVLKEQRPYYQDVTVMQEKQIQSVAAAALQGV

SEQ ID NO: 263003 - protein, 346 aa, unidentified
MKIIGCDFHPAWQQVAVLDNETGEIEELKLSHEDGEAERFYRALSAAALVGIEATGNSQWFLDLLQRLGHEVWIGNAAEIRASYVRKQKTDRRDAGHILRLLVEGRFPRLWTPSVEERDLRQLLIHRQKQVEIRTRVKNGLQHLAMNRGLQKKRKLWSVQGRADLEKLSLQGWAARRREDLLGLLGQLDKQIGELDEAVSAAAEKSPQARLLMTQPGVGPITALAFALTIGDVSRFQRSKQVSSYLGLIPRERSSGGKQKLGSISRQGNSFVRMLLVEAAQSTNQWDEGFRKQYAARCHYKPKAVAKVASARRLAVRLYWMLRTNTPYPEIARIESSPGVGMVSAS

SEQ ID NO: 263004 - protein, 450 aa, unidentified
MSTTYAGVDWASEKHDVLIADETGEEILAATFAHDEAGVRGLCRALVRHEVTLVAIERPDGLVVERLLDAGLRILPLHPNQVKAARDRFRASGGKSDRFDAFVLCELARTDHHRFRVLEPDSDQTKALRALTRAREDLVGTRTALVNQLRAELARFWPGPLGLFTSLHSQISLAFLERYPSPTDAHGLGAARLHAFLVRQHYTGGQKPRQLLTKLRRAPEARVGELELGVRRALVLSLVATIKTLNEQIKQLERQIATAIREHPDGPIFLSLFKKPNSVICAAELLAEIGDCRARYPTRDTLAADAGQAAVAVESGKRKAACFRWACNKRLRQAFVTLADTSRHHNPWAHDLYAAACARGHDHPRAIRTLGRGWCRILWRCWQDRTPYDPARHRALQRHVTVTIPTSSGPVPDTAATQRMLGTAVTQRAARRAERAALDGTPTSANALGG

SEQ ID NO: 263005 - protein, 379 aa, unidentified
MTETTRTAECNAAPAPLMMALELGSTKWTLGVTTGPGQRPRVRTIPAGDLLTLEKEILVAKARFGLPLDAAVWSCYEAGRDGFWLHRWLIAHGGQNVVVDSSSIEVNRRARRAKTDRLDVGKLLALLLRWCGGERTVWSVVHAPSPEAEAQRQLTREIATVREDRKRVRNRIQALLATQGIRLELGARFVEHLATAQTGDGRGLPAAYRLRLEREWAHLEAITARMTAVTAARDAAIAGGTDRVATVARQLCTVRGVAETSAAVFSAELFGTRTFRNGRQLGAVLGLVPVAYRSDQRVQDQGISRAGRADLRRIALQLAWCWVRWQPDSSLTQWFQRRFVAAGGRSKRIGIVAVARKLAIALWRYVEHGVVPEGARLKA

SEQ ID NO: 263006 - protein, 347 aa, unidentified
MNFYHSTHRHYCGIDLHARSLYVCILDQQGEVLLHKEIKPRPEPLLALLEPFRDDLVVGVECMHCWYWISDLCEEHGIHFILGHALYMKAIHGGKSKNDRIDSFKIAMLMRGGNFPLAYVYPKKMRATRDLLRRRTRIVQHGAMLKAHVVNTVSQYNLPPSKANLNNPGGRSQLTSAFSDPDVQRNVDLDLAIVDSYQHELKKLEWHLEQQAKQHDPASLTVLKTIPGVGRILALTILYEVGDIQRFESVQKFASYARLVKCKAESAGKVYGTQGNKIGNAHLKWAFSEASVLFIRNSDKAKRYVEKLQKRMNKPKALSALAHKLGRAVYFMLKDNRVFDEQRFLKG

SEQ ID NO: 263007 - protein, 467 aa, unidentified
MLFGPLEIVVSTPDRKAVTSASQLCWRLAPCPLFGRSRRMLNGPYTTPARKIVDAQVVIFCTREGRLKMTAIGVDVSKGKSMIAAVSYSREVLIPPQEILHTEAGLSQFIATVSNIPGKTRVIMEATGHYHEPVARAFYEADIFVAVVNPLLVYSYSDNSVRRVKTDKKDAVKIARYGLDNWDNLREYIPQDAVREKLRMFSRQYNLCIKTVHALENNLTSLLDKTFPGAAKFFTSQKKKNGHQKWVDFATTFWHANIVSDMSAEDFTREYQNWCESNSYKFSIAKAQEIYARSLEPFTTLKKNADTAILITSAAAQITALGTTLAQLKAQLIRLSSALPEYPMVISMYGVGMLTAAQLMAEIGDVRRFHSGRALIAYAGTDPLPQQSGIYEKKSAQTSKRGSANLRKTLFQIVVTYLRHSPADETVYKFLNRKRDEGKPYFVYMTATANKFLRMYYAKVKEFLENM

SEQ ID NO: 263008 - protein, 320 aa, unidentified
MQTTLATPVYIGVDVSKDTLVSCVYSSGVRRTLANQRSAIEAWLKGLPAGSAIGMEATSTYHELLADLAQRQGMLVYVLNPKDVHRYAKGVGMRAKTDRVDAALIARYIAHEHAKLHRYRPPSPEQRQLQRLLTRRAKLSRSRAGVQQSLHGLPGLKVPLRNLLERFDALIAVIDARIQALVNACPQRQAACQRLRRIKGVGPVVGPALLNPLERFGFKCADSFVAYTGFDPRPDDSGQRSGRRRLSKHGPSELRRLLYNAAMAAVTSPAWKPLYQHYLGKKLSRTEALVIIARKIARTAWSVYTHETTFDPQRLTSGLT

SEQ ID NO: 263009 - protein, 346 aa, unidentified
MVTIGADLHKRTHTLVATDAVGRELAGCTVKATGEGHAKALRWARRWDERTWALEDCRQVSRRLEADLLRAGERVVRVAPKLTAGSRRSARTRGKSDPIDALAVARAALREPNLPVAQLEGTARDLRLLVDHREDLVAERTRHQNRLRWHLHELEPGQEPGPRSLDRKCVLDALEVQLASSPTLVGRIARELVARCRELNARIKELEREIAGLTRVAAPTLLQLSGCGALSAAKIVGETAGISRFQSRSAYAMHTGTAPIPVWSGNRERHRLNRGGNRQLNAALHRIAITQLRDGGRGREYYERRVAAGETKKAAIRALRRRLSDEVFRRLRIDESGSTTHPSLAA

SEQ ID NO: 263010 - protein, 328 aa, unidentified
MYIIGIDVSKNKLDCALIDDSNHEKLKFKVVPNSEDGFITLMGWLSKHIKSADSKYHFVMEATGVYHEKCANWLFNTGAKVSVVNPAHIKYYGQSLGVRSKNDKKDSVVLARYGLTQKPIAWQPEAPEIRILKALASRLDAIEKDILREKNRYEKSSINPCSDSVLESIQMILAVLNKEKINLERLIDMHINQYVYLKHNYALLQTIPGVGPVVSRYMLIVIGSRTFKSASQCAAYIGLVPIQNESGSSLRGRSRLSKAGNPVIRAKLYMAAISALQHNPDIKIQNQRLLKNGKSKMSALCAAMRKLVHICFGVIKHQRPYQVQAKLL

SEQ ID NO: 263011 - protein, 433 aa, unidentified
MPTELLFIIVAGIDWGSQFHQICILDQKGHVLGEKLFPHSGEGIRQMLDWLINTAGCAPEEIAVNIEVPHGPIVDSLLERGIRVFSINPKQLDRFRDRFSPAGAKDDRRDARVLADALRTDPACLRPLNPLDANIVQLREWSRMSDELTAQRTRLTHQLRDHLWRYFPQFMKLGFPLHSPVIWALWALIPTPARARRVRLASVQKVLKKHRVRRLSAAQVLQCLRTEPLTVAAGVVEAATARIRLAIAQLRLLEQQISEANHAMETILASLDVDESSSDLDESGTPEASTAAGKPSSSGNELNDVEILSSIPGIGTKVLATLISEASSLLNVRDYRGLRCLCGVAPVTKRSGKSWRVVRRRACQSRLVNALYHWSRVAVQHDPISKAKYKALRGRGHSHGRALRSVADRLLAIACAMLRDGTRFDPSRTTAEA

SEQ ID NO: 263012 - protein, 319 aa, unidentified
MNCIGVDVSKQELVTYDGAKERIFSNTRGLEAFRRFLKRSKEPLVVFEPTSTYSRRLETLCRASQISCCRLNPRVVPHLRLVGKGRSKTDSSDAELLYRYGIERGQQEAAQLENDALAESIQARFTCYRVAQKARVAYQNVLEALSQDPATSGELLGEVREEIRELKSKEKQQVDAAQKLIEDDSDTKHRFDLLLSIPGVGPITALTLVALFRKYANSNRSQIVALAGFDPIRIQSGTSVHGKSRISKRGNREVRRRLYEATLSAARYNPSVRAIYRRLKESGKPEKVARTAAARKLLVIAHAIYKSGESFRQADQEEA

SEQ ID NO: 263013 - protein, 352 aa, unidentified
MQSTTTTGLDLAKDVFQVHGVDGEQNLTVKRQLRRKDVCAFFAKLPPCLVGMEACGGAHYWARELERLGHTVRLMVPRYVKGYAKRGKSDAADAAAICEAVTRRHVESVPVKSVEQQCLLMLHKTRAGLVEARTKETNRVRAHLAELGIVAPKGPEGFQRLLAMLREQASSAIPRLARLALLPVVAVLDALAQSIAELDAEIRGALKRDETSRRLEAIPGVGTMAATAFAAVANEVRGYRSARHYAASLGLTPRIEGTGGEVTLGPISKQGNGYLRRLLYLGAKSRLGWARRNPGKADLKLLRLLKEKEFKVAAIAVANQMARTIWALLVRGGTYIPGHRPAVPAARALGCR

SEQ ID NO: 263014 - protein, 450 aa, unidentified
MQQPVEVSVDESQQVVERVAAIDVAKATGMVCTRVPHETVASRRVTKVWEVKATTKGLLELADHLVAGRVERVVMESTSDYWRPFFYILEGAGLQVWLVNARQVKNVPGRPKTDKIDAVWLAKLAERSMVSASFVPDEAMRHVRDLARARFDLVGDRTRLKQRTEKLLEDALIKIGSVLSDIHGVSGRAMIEALIAGQRNPHVLAGLAKGRARVNLKALAEAVDGRFGDHHARLARLLLDQADDVARRIAEVTSLLDQAIAAVPAVTTALPVVDWATGEIITTAGALDSAVQRISVLPGGGADTARAVIGEIGLDMTVFGTAQRLASWAKISPRTVQSGRKTGRATTGKGNPYLKAALHQIAMSASKTDTFLGARYRRLAKRMPKVKALAALERSILTIIFHLLSDPTATFEDLGPDFYERRLDTARRTRNLVGQLQALGHTVTLTPTAA

SEQ ID NO: 263015 - protein, 395 aa, unidentified
MLYLGIDIGKNNHEAGLVDGEGKQRGKSLRFANDQQGFSALTSFLEQKVGPGEALCVGMEATGHYWLPLYSFLHGKGFRLHVINPIQSDSLRNFHIRAAKTDSIDCFLIAHTIRFGNFSETRLANEDVLALRNLARFRESLKDSCANYKRQVVTVLDQVFPEYDALFSNMFGESSKAFLKTCGTPEQTVELDTKSLAALLREASRGRHGTKKAEEIKDLAERSVGVPFCKDAFAFQLKILIEQIEFTEKQIGEIDKKLAKLLKKLNSVILSIPGVGPATGAVILGEIGDINRFDNPKKLVAFAGIDPTVMQSGNFSGSHNRFSKRGSPYLRRAIWMAAVVAARFDPVFKAFYEKKRSEGKAYGTAIGAVARKLTYTIFAILKADKPYEVRLNPEG

SEQ ID NO: 263016 - protein, 450 aa, unidentified
MRSTYAGVDWASDKHDVVIADETGEEVLAATFAHDEAGVRALCRALVRHEVRLVAIERPDGLLVERLLDAGLRILALHPNQVAATRDRFRASGGKSDRFDAFVLCELARTDHHRFRVLEPDTDQTKALRALTRAREDLVGTRTALVNQLRAELALFWPGPLGLFTSLHSRISLAFLERYPSPADARGLGEQRLQAFLARQRYSGAQKPARLLAKLRRAPEARVGELELGVRRALVLSLVATIKTLNEQIKQLDRQIATAIREHPDGAIFLSLFKQPNSVITAAELLAEIGDCRGRYLTRDTLAADAGHAAVAIESGKRKAASFRWACNKRLRQAFVTLADTSRHHNPWAQDLYAAALARGHDHPRAIRTVGRGWCRIVRRCWQDGVPYDPARHRALQRHVTVTIPTSSGPRPDTAATQRMAGAAVTQRAARRDERAALDGKPTSATALGT

SEQ ID NO: 263017 - protein, 355 aa, unidentified
MNSEKYIGLDVHQATIVVAVMDSSGKLVMESILETKAATILQFVAGLRGTLSVTFEEGTWAAWLYDLLKPHVDQLVVCNPRKNALLKDGNKSDRIDARKLAELLRGNQLKPVYHGETGVRMLRELSRSYLTIVKDLSRVMNRLKAVYRSWAIPCAGRDVYYTRHRAQWLAKIREAGVRRRAERLYEQLDMLRHLRQQARRELLAESRKHPITAKLRQIPFLGPIRSALAVALMQTPHRFRSKRQLWAYSGLALETRISAEYRYVEGQVRRSKKLLSIRGLNKDHNHDLKGLFKGAATMASVRPGPFQDFYQAALAKGIKPTMARLTLARKIAAITLTLWKKGENFDAEKLKSQAA

SEQ ID NO: 263018 - protein, 308 aa, unidentified
MDAYVGIDVSKDRLDVHVEPSGESFAVARDGEGLAGLIERLQPLAPRLIAIEATGGFEIVVAAAIGGAGLPLAVVNPAQVRHYAQALGKRAKTDTTDAAVIARFAEATKPEVRPLPDEATRLLADLVARRRQIVVMIGAERQRAKRMPRRLQKSCERVIRVLEKELAALDQEIDTTVRSSPAWRAKEDLLASVPGIGPIIARTLIAELPELGSLDRRKIASLVGVAPFTRQSGRWRGKAFIGGGRRTVRAALFLATMAAVRHNPAIRAFRLHLITAGKPKMVAMVACMRKLLTILNAIARDAKPWQPA

SEQ ID NO: 263019 - protein, 318 aa, unidentified
MTHASVFVGIDVSKTQLDLALRPGGRCSVSNDETGIAKLLEQVKAVHPTLVVLEATGGYEIPVTGALAAAQLPVVVVNPRQVRDFAKATGTLAKTDALDAQTLAHFAEVIQPARRPLPDEHTQALAALVTRRRQLVDMLTAEKNRLRQASTRIRPRLKTHITWLERAVQETDTDLAEAIRQSPIWREKDEWLRSAPGVGPVLTTTLLATVPELGTLTHKQISALVGVAPFSRDSGMLRGKRTIWGGRAQARAVLYMGAIVATRFNPIIRAFYQRLCQAGKAKKVALTACMRKLLVILNAMLKHRRPWCHAVETAGAGV

SEQ ID NO: 263020 - protein, 399 aa, unidentified
MLEQVWAGVDVGKEHHHCVVIDAEGRRLLSRRVANDEAVLLALISDVTGLAGQVRWAVDISTGEAALLLALLAAHDQPVSYLSGHQVNRAAGGYRGSGKTDAKDAAIIADQARMRRDLAPIRLPEEVIVELRMLVARRRDLQSDRVRAVNRLHETLLTISPALEKALDLTNQGPLILLTGYQTPAAIGQLGVTELTEWLRARKVRRASELATRAVAAANAQRIALPGEALAAHLAGQLAEGVMALDEQIKHTDKLIEGRFHRHHAAPVILSMPGIGFLLGAEFLAATGGDTAAFATPDRLAGYAGLAPAPRDSGRISGNLYRPKRYNRQLQRVFYTSALISIRCCPESRTFYDRKRAEGKRHNQAVLALARRRVNVLWALLRDHRPYQASPPVSTAAAA

SEQ ID NO: 263021 - protein, 450 aa, unidentified
MSKSKAKSQSLPVINPDAAGIDIGGSFHVVAVPPERCDESVQTFKAFTGDIHNMARWLAECRIKTVAMESTGVYWVPVYQILEEHGFNVVLSNARDTRAVPGRKTDVGDAQWIQRLHACGLLKASFRPESTIAELRTYMRVRERLLDYAAAHIQHIQKALTFMNIQLNIVVSDITGVTGMKIVRAIVGGEYNPGVLAKFRDPRCKADESTICAALNGNYQPEHLFALRQAVVMYDAYQVQIDECDIQIESVLDKLCLDSKEPEVPIPKAKHRTKQPNALNFNVREKLYRLIGTDITQIHGLGPFLALRLISECGTDMNKWATEKHFTSWLTLCPGSKISGGKVMSSHSRKSNNRVVAHLRLAATTVGRSDTALGAFYRRLSSRIGKAKAVTATARKIAILFYNAMKYGTKYVDPGAAYYEERYKERVLKNLKRQADKMGMCLQVKEECVS

SEQ ID NO: 263022 - protein, 422 aa, unidentified
MLEQTMDDEQIIERVGALDIGKAEVMCCVRVPGDGPSGRRRQEVQAYSTMTRSLLVLADRLRELQVTRVVMEATSDYWKPVFYLLEASGFDPWLVNAKDVQHLPGRPKTDKLDSVWLCKVAERQMIRPSFVPPPPIRRLRDLTRYRVDLVSARTAEKNRAEKLLEDAQIKLSVVASDIFGVSGRDMMAALIAGERDPKVLAQMARMRLRAKIGQLEEAFHGHFTDHHAFLLAKMLARVDAITADIDDIDAHIEDQLAPFVDAATRLQQIPGVGPVAAAVIVAEIGVDMSRFPTAGHLASWARFAPGVKESAGRNKGNGSTGHGNPYLGRVLGEAVVSAGRTSTFLGDRYRRLARRRGKQKAIVAVGRSILIVAWHLLSDPDAQFADLGPGFYDSRIQPDRKRREHIRQLEALGYRVTLEPAA

SEQ ID NO: 263023 - protein, 423 aa, unidentified
MSETVSGAEPRFAAFVAIDWADQKHVWSLQPANSEKRQHGQIEHTPEAVESWVAMLCGRFGNQAIAVAIEQSRGALVFMLSKYEQLHIYPIHPRAAAQFRAALFPSGAKDDPVDAELLLDLLVHHRARLRPLRPDTEQTRLVQHLVEGRRRLVDEKTRQSNRLTAKLKLYFPQVLNWFDEVDSALVSALLERWPTLEDLQKARPATVRSFLTGHGCRGNERIEQHLEQIRQAVPAIRDLAVIQSSVTTTKILVDMITTLREGIATFDQQIDRAVTAHPDFAIWDSFPGAGPALAPRLLAAFGSRRDRYETAADMQKFSGIAPVVERSGKMEWVHFRWACPKFLRQSFHEWAGHSIGFCGWARAYYQQQRQSGHDHHAAVRALAFKWIRIAFRCWKDGVPYDDSRYVASLRRRGSPLAQAISQP

SEQ ID NO: 263024 - protein, 413 aa, unidentified
MLHPKMRHVYVGLDIHRQTHTAVVINCFGEKLGEITFNNKPADFGRLLKEVNSHIGEGITPLFGLEDVQSSGRSLAVFLLSKNKAVKYVNPSLTYSERHNQTILHKTDSHDALCVARVLLNRMEELPDADPKDTFWMLSQLVSRRTAMVKASVALKNQIHAYIIHHYPSYRKFFYVFDCKTALEFWEKYPSPVKLKGTDAKALGEFLKLNSHGFLNEDRAVEILEYVEKDGDTTNEYQDTRDFLISSAVRQLKANNAEIAGVEKQIKGLLPLFDYKLETMKGIDSTTAAILIAEIGDINRFSSADKLAKYAGISPVSYSSGKTDKLLCNVLGDRKLNRVFFTIAVTVVNCAGDSGKPVNEIFHRYYKKKISEGKTKKQALKCVMRRLVNIIYGMMKNKTEYREPDIKMLTEVL

SEQ ID NO: 263025 - protein, 341 aa, unidentified
MTEIKRIAIDTSKSVFTLHGVDDAGRAVLRRNLRRGELLRFFERLPPVEVALEACGGSHHWGRALSAFGHQVRLIPPQYVKPFVKRSKNDRNDAEAIAVAAAQPSIGSVPIKSVEQQAAAMLLSVRELLVRQRTQLVNAMRGHAAEMGVVAPLGEKGFKELQAAIATADDAVVPAAAKQAIALLGREVERIEIRLRAIEATLMQQHKTNPLSRRLAAIPGIGPIGALNLALRVDAGQFASARHFAAWLGLVPRECSTAGKQRLGGISRAGDERLRQLLVLGATAVIQHARPGRPATSQWLLNLLSRKPRKLAAVALANKMARIVWAMMTSGEAYRPRPVVA

SEQ ID NO: 263026 - protein, 337 aa, unidentified
MATVRVFVGLDYHDAGVQVCILDPQGRVLANAPYPNDAAALAEFVAQHGNQVFAAIEACTGAADLADELVGRFGWSVDLAHPGYVRRMKQTPDKTDFTDARLLADLERVGYLPRVWTAPAAVRDLREVVRYRHQLAAQRRATKVRIRALLRQHRQKQPAVRPWTIAWHKWLRDGTTLPKSTRWVIDRHLADLADLAKRIKAAEMHLARLTAGDPLVQYLLAVKGVGPVTAVTLRAEIGRFDRFRTGKQMARFCGLSPHNASSGARQADAGLIRAGSPLLRMMMIEAAHRLARYQPRWRALKASLVGRGKPAGVAVAAVANRWVRWLFHQVQPPALAA

SEQ ID NO: 263027 - protein, 312 aa, unidentified
MDAIVVGIDVSKDRLDVAMRPTGEVFAVARDAEGIDALIARLAPLAPAAVAVEATGGYETVVAASLAAAGLAAVVVNPAQVRAFAQALGRRAKTDPIDAGVIAHFVEATKPAIRPLPDEKTRLLADLVARRRQIVAMLVAERQRQKRLTEKRLQKSIVRLIAALQKELSMLETDLDQAVRGSPAWREKEDLLASVPGVGKIIARTLLAELPELGSLDRRKVAALVGLAPWTRQSGQWKGKSFIGGGRADVRASLFLGAMVAARHNPQLKTFRDRLVQAGKPKLVALVATARKLLTILNAILRDRKPWRIQTA

SEQ ID NO: 263028 - protein, 312 aa, unidentified
MLPSLVYVGMDIAKATLDLHALTTPPQSRQFANSSAGHRALRRWLQGLGPLHIVCEASGGYERPVVLALQQASLAISVVNPRQARDFARAQGRLAKTDRLDAQVLAEFGQRLRPAATPALSVAQRQLAELVSRRQQVQQLRSAEHNRLEHTTHPAVRRQVQRHLLGLDRQLEQLDAWITELVQAEPALAHKVARLCEVVGVGRITAVVLLATISELGTLNRRQAAALVGVAPFNRDSGPRRGHRLIGGGRAVARRALYMAALVAAFANPRFKVFYQRLIAAGKAPKVALVAVMRKLIILLNQLLKNPSFQLT

SEQ ID NO: 263029 - protein, 424 aa, unidentified
MKPQINPAYAAYIGIDWADQKHDICLQAVGADVSEFAVLAHRPDTIEAWALSLKQRFQAQPVAVCLELTKGPLVYALQKYDFLVLFPVNPSTLAKYRQAFTPSNAKDDPSDARLLLDLLMQHRDKLKPLQPEGVEMRTLQCLVEQRRGLVNDRVRLTNQLTYALKQYFPQILEWFKDKDTLVFCDFLSRWPTLKQAQQARKTSLEKFFREHHVRYPKVIEARVSAIKAATPLTTDVSVILPHQLLVQTLAQQLRVQLTAIEHFDAQIAAFAQTLPDYVLFQALPGAGPIYAPRLLAAFGEQRARYQSAAELQKYAGIAPVTERSGKKCWVHWRLQCPKFLRQTFVEWAAETIPRSFWAGAYYRQQRAKGCSHQAALRALAFKWVRILYRCWQTRTPYDESTYLNSLKRRGSSLLNAIGENTKMA

SEQ ID NO: 263030 - protein, 412 aa, unidentified
MKVAGIDVHKKVLMVVVVDASAPEEKPARRRFVTMPSELHRLLMWLREQGVEEAVMESTAQYWRSVWLELEPHMRLHLAQAFSNRAPRGRKHDFKDAERLVRRLMANELILSFVPNGEQRIWRSMTRMKLQLTRDRVRLQNQIECLLEEMRIKLSIVVSNLLGASGLRILHALAEGETDPKKLAQLGDERLQCTEEQLIDALTGRVQPVHGEMLALQLQRLQLIDQQMGELNRLIAQAMKSHQDAVIRLAEVPGLGVDSAQQIIAEVGAQASTFPSAAELTSWVGTCPGKEESAEQNHSSRSAKGNKYLRRVLNQAAHAAVAKKGSHFQVVFRRLLPRLGYQSAIWAVAHRLCRVVWKILHEGVRFIEQGREVGPREKKKRAQMLARALRKLGYEVTITPINQLAARAAVRV

SEQ ID NO: 263031 - protein, 347 aa, unidentified
MNYNTQHKFYCGVDLHARSMYVHIVDHKGKSVFDRDLTADPDEFLDAIKPYRKNIVVGCECMFAWYWLADLCEDQRLPFALGHALAMKHIHGGKAKSDKIDAGKLANMLRGGLFPLAYAYPRAKRQTRDLLRRRSFFVRQRGQLIAHIVNTNSQFNLPPLPKKLRYAKNRTPELLDRFTDPSTRLMIGADLNLIDHYGEQIAELESYLIRSAKVDDAVTFGLLRTIPGIGPILGLILLYEIDQIARFPEAGNFLSYSRLVRCEHSSAGKVKGSGGKKMGNAHLKWAFSEAACLMIRSVPAVKSWLQRQEKKRGKRKALSVLEAKIGRAVYHLWRKQVPFDLKRFLKG

SEQ ID NO: 263032 - protein, 337 aa, unidentified
MEQRYVGIDLHRRRSVIYIMDGEGQKLSCVRITNEPDALMAAVAPAGEDAHVVVEATYGWYWAVDLLQDNGFDVHLSHPSGNDWGKRRVKNDERDARDLADLLRLGRLAEAWIAPPAVRELRELVRYRAKLVNLRSGLKTQVHAVMAKEGVLPNVLDMFGPGGARQLDGLELAEPYTLRIESLRDLVPVYDREILMLERKIHQRLSGDKGYEAIQELNGVGRTIAAIFCAEIGDVHRFRSAPALCSWAGLTPRHHESDTKVVRGAITKMGSRLVRWAALEAVARYHGGSWLHEDFCRIAERRGKKKARVAVARKLLTLVYYGLRDGEIRALRDRQAA

SEQ ID NO: 263033 - protein, 342 aa, unidentified
MGSIKGRRRSSHFMSACVCGLDVHKESTYATILTLEGKIVNQMKMSNDKVLSYLSRFNVCKVAMESSNQVAALYRKLENNGYKVIVSHPRKTRYIAEAKIKSDRVDSEVIAELTRLDALPLAYMPEKEIAMLREQVRRRAFLVRERVKLRVKVKSVLTYEGIKWPSDHGLFTEKGVLWLHSLNLEPVESYLRVLGPLNDEIKLVSSQLKGIADVDEDMELLMTIPGIGYYSALLVKSEIGDVNRFSFGDRLCSYAGLVPSTHASGGLVRHGHITKEGSRWLRWAMIEAAQVHVFKYDTAITRAYHRIAEKKGKQVAVTAAARRLLLCCYSVLKNKRPFHDQA

SEQ ID NO: 263034 - protein, 402 aa, unidentified
MNSVGIDISKGRSTIAVMRPFGEIVISPFEVRHTASELSELARLLKNLDGETRVVMESTGNYHAPVAWLLHDAGLYVSVVNAMLVHDYGKNSLRRGKTDKKDAVKLANYGLDHWLTLPRYVPEEDTRLMLKTCYRQYQQYSKVQTMLKNNLISLLDTAFPDANRLFTSPPRADGSEKWVDFVATFWHCECVCGLSKKAFTAKYQKWCKKHGYNFSEDKALDIYASACGHFSVMPKTDTTKLLVEQAISQLQTTSSALAALKQEMQSLSSQLPEYPVVMGMFGVGPILGPQLIAEIGDVRRFYSKKALVAYAGIDAPPNDSGDVIGRHKSMSKVGASSLRRTLFLVMSVYLQRAPLDEPVYQFMDKKRAEGKPYRVYMMASANKFLRIYYASVKAYLESLEHD

SEQ ID NO: 263035 - protein, 345 aa, unidentified
MGQITRIGMDISKNFFELHCVAADEKVVKKATLKRHNVVAFFSKLEPLKIGIEACGTSHHWARRLRELGHEVVLIPPQYVKAYVKRGKNDAIDAEAICEAMSRPSMRFVPVKSEEQQAVQMLVGLRSREVARRTQLANTIRGYAGEFGVIVPKGLSRIEALLKQVAERPQLPAMAHEMFEELARDFAATDIRIKRLTHRLLAWQRSNEQCRRLKEIPGVGPMNAALLTIKVPDIANFRSPRDFAAWNGLTPKNHSTAKRNRLGAITKAGDEALRSALVVGATSVINQVRRGRRKASPWLAKMLAKKAPKLVAVALANKMARVAYVLMATGQSFDRKRFEGMTAEA

SEQ ID NO: 263036 - protein, 309 aa, unidentified
MKQAIVYIGIDVAKAHLDVAWAGTFRRLPNERSGHAALVRWIKQSATPVQLICEASGGYEQALLESLEKSEVKVTLVQAVRVRQYARAAGILAKTDRIDAKVLAAFGSAMQPQPTSPLSAEQKRLRQYEAQRRQLSRILVAEENRLTQLSCAELRAWSRSLISKIKKQIKTIDRDLSDLIAQDQALCVKAQKLTAISGVGARTAALLLAQMPELGQLNRRQAAALAGLAPFNHDSGSVRGKRAIFGGRPALRSGLYMAALSAARFNPILSSFYQRLRAKGKLHKLALTAVMRKLLLALNQTLKTQPAIA

SEQ ID NO: 263037 - protein, 423 aa, unidentified
MMKLKYSICCGLDVHKNVIVATIVTTNKDGISEYLQKSFSTINSDIQRFHNWLIENNCYHVCMESTGKYWIPIFNYLENDIDVCLTHPKYVKAIKGKKTDKKDSKWIADLYKFDLVRCSFIPPKDFRQLRELSRYRFKLVCMKSSEKNRIQNCMTISNVGIASVLSDPFGKTATEIISYLLEHTADSMDEKAVRKLIKKGAKAKSDEIIEAIKGYNIETDQAKKLELARGHLEYLDDMITQTEVELYVRIKPYYEFVEFVSTMPGMTELSSTIVLAETGVDMDIFDDAKHLCSWCGLSPANNESAGKKKSVRIAKAGDYLKPMMVQCALAAIKSKKQPYFAIKYGRIKKRRGHKKAIIAIARMMMVCIYHMVSEKKPFTPTDYEELMDPQNHVESVVLNENNVFAYLESLGYDSSKLVKRNDN

SEQ ID NO: 263038 - protein, 319 aa, unidentified
MRKHSIICAGIDTGKRRLDVALDGCPDEQLQVPNSEEGYQRLSAWLRQRKVKRVGIEASGGYEQAVVCRLRRAGFSVVVFQPAQVRAYAKFHLQRAKNDKIDAALIAACTAAVRKLHAAPDPRLVRLAEHQTLIDQIVDQISRIKNYLESCRDPRLRRFWQDEIKRFRGLFKTELKALVAAIRRHRDLSERLELIASVDGIALRTATAILVRLPEIGRISREQAAALAGLAPYDNDSGERDGARHIAGGRQRLRNSLYGAAFAASFHWNAELINLYKRLIAAGKEHKVALVACTRKLLIFANAVVARGTPWESRAATTR

SEQ ID NO: 263039 - protein, 338 aa, unidentified
MQIATLGIDIGKMWFHVIGLDEAGKPLYREKLNRSKLMQFVGTSPRCLIGMEACAGSQHLARRFSSFGHEVKLIAPRFIKAYLKSNKNDFNDAAAIAEAVQRPTMRFVTTRSLEQADLQAVHRVRDQLISERTGCINQIRAFLLEYGIAIPVGRARLLQILPLVLEDAENELTTIMRSLIHQLRARLGRIADELQECTDRIEAVFSNDERCQKLRQIPGIGPVIATAIVAAVGNAAQFRRARDMAAWIGLVPKQFSTGGRSKLLGISKRGNGYLRKLLVQGARAVINKTDRKRHRFGTWLTQLEQRAHRNIVAVSLANKLARISWAVLRGNEPYRMAV

SEQ ID NO: 263040 - protein, 363 aa, unidentified
MIESRTVTVGLDVHARSIRLAAVRADELLEERTLPYDEDAVARLLGRWPAVRCCYEAGPTGFGLFRYLVERGIECVVVAPGLVPQRPGDRVKTDPRDARKLARLHAGGLLEPIHVPPPEVEAARDLVRSREDARLDRMRDRHRLSKFCLRHGRLLPTSGWTVLRRKWLGEQRFEHPAEQITFGTYLHAVDLVDARVEQLERAIREMAEQGPWRELVARLRCLRGIDTLTAMGLVAEIGDFNRFRSAEELMAFVGLVPSEHSSGERRRQGAITKVGNSHVRRLLVESAWHARRRPTVGYELSRRQRGQDAVVIERAWRCQQRLYQRWQRMAGRGKPHQKIVVACARELAGFVWAIATDQPLRTL

SEQ ID NO: 263041 - protein, 339 aa, unidentified
MPSTVYVGIDPAAESFTASYLVKPGISRTAPKPFNNAEEGIAGLEAWLRSEDIDLSQVHFCIENTGVYSELIAYQLHRQKYALSLLDPRTIWKAFGDGLPKNDPLDSRRVAEYGFRYADKLRLWEPQEVIVEQISVILSTREQLVHQKTAASNSRSTLARKAIQTPVANEALDATIAHLKAQIDALTDELKRLIRSQPTLMQGATILMSAPGVSWLLSGHLIVITRGFTDIPSYRTLAQYLGIAPNEHSSGTSVRKRDQSRGYGPPAIRKLLHLAARSRGTHHPRHARYYQEKVAAGKPKRLVLNNIANKLLKQLCAMLRSGTRYNPEHRSINPRYALA

SEQ ID NO: 263042 - protein, 298 aa, unidentified
MENFYFIGVDVSKKKLDFCVMFEGKVVHEEETANHQSSIMALLHQLEENYGIAGGQMLVCAEHTGQYTFPLACACKTVECRLWLENAAEIKYSSGVQRGKNDKVDAKRIAIYASRFQDKIQCYERPTEDIERLKQLESERTLYVTDLAKYKGQMKDQKDYMPKALYERKMKRLQALMDDLEEAIQAITDEMDEVIASCSVLSRQKELLMSIDGVGRVVATNMIITTEAFTRFDDPRKFNCYAGVAPFSYSSGSSLHSKARVSHRADKVMKKLLHLAAVAVTHRIGGCLLYTSPSPRDA

SEQ ID NO: 263043 - protein, 343 aa, unidentified
MQTVTTIGLDIAKSVFQVHGADAAGQVVIRRQLKRRYVLAFFQKLPRCLVGIEACGSSHHWSRELQALGHTVRLMPPAYVKPYVKRHKNDAIDAEAICEAVTRVNMRFVATKTPEQQSCLTLHRTRHLFIRQQTSVINAIRAHLAEFGIVAPVGRHGVEQLLGVVADASDKRLPEVARACVAALGAQLQTLKAQILEFDRMIRAWHRSSEASRRLDDIPGVGPVLATALIASVGDPRAFRSGRDFSAWIGLVPRQNSSAGKDRLGSISKRGDRYLRSLFTTGALAVIRYAKIHGTKHRPWLTALLVRRPTKVAAIALANKIARMAWAMMAKGERYKEPAALAA

SEQ ID NO: 263044 - protein, 411 aa, unidentified
MSELTSISASSIVSTSTTIASTSASDSRSMHFVGLDVHQKRSSICILDANGKQVKRFEVKGHWPAVLAQIEQHVPRPFAICYEASCGYGYLYQRLAPIARQVSVAHPAQLALIYKSKRKNDKVDAAKLAKLLYLDMVPQVHVPRADVRAWRALITFRHTLMNRRVGIKNQIRALLRGLGIVAPSGKRLWSGKGITWLKEQKLDESDALRRDLAAEELDEVNAKLKRVEKALNQRADAHPGVTLLKTIPGVGVRTAEAIVAWIDDVTRFSRNKKVGSYFGLVPCQDASAASNRLGHITRDGPAVVRKFLCEASWRGIRQGGAIKSYFERVMRGDPDRKKIALVATAHHLARVMAAMLRTGEAWREPPAAAAPHDDARASAAQQERKALSEAVRTDGCADGELASPPRKTAVA

SEQ ID NO: 263045 - protein, 341 aa, unidentified
MDTVSLIGVDLGKHCFHLHGQDASGRMVLRKKLTRSQMFTLLGNFQSCTVVMEACAGAHWIARRLQALGHETKLISPQFVKPFRQGNKNDFADAQAICEAACRPSMRFVSPHNETQQIVSALHRVRERLVRERTGTINQIHAFLLEFGISLPRGMAVIRRLPAVLAAESLPPRLVAVLERLQAHFKYLDEQIRQLEHELLTQLREDERSERLLEIPGIGPMTASVLMSELGDAHQYGSARQFAASVGLVPRQYSTGGKPTLLGISKRGDKELRRLLVQCARTIMQRIEHRTDALGVWIRSLLARRHSNVVACALANKLARIAWAILAKGTHYRSIEAVPSV

SEQ ID NO: 263046 - protein, 322 aa, unidentified
MQRYLGLDVHAESSTLAVISESGRRLKTQVLETNGRALVEAIRLIPGRKHLVFEEGTQSAWLYEILSPRVEEAVVAGVSKSRGQKDDQRDAYGLAEKLRTGTLEKRIFKSPGQFTMLRELARTHQMIGRDLVRVQVRLKSVYRSRGIQTPGKTVYAKAHREPWQQQLPASARTTAARLYEQIDFLVALKERAEQDLIRESRKHPITRVLETTPGLGPIRVARLLPIVITPHRFRTRQQFWSYCGLGIVMRSSSDWVRTPDGRWIRAQVQQTRGLTLQHNHALKDVFKGAATTIITQALYDPLYHDYERVTEAGTKPKADRAA

SEQ ID NO: 263047 - protein, 347 aa, unidentified
MSEQHHVGLDVSVKETAICIVDPHGKVVHRAAVESHPEVIGRHRIDLGHAYARVGLEAGPLSPWLYAGLVEVGLPAICVETRHMHAALWARINKTDRNDALGIAQMMRVGLFKPVHVKTPASQQRRLLLTSRKLLQRKAYDIESDLRGQLRNFGLKVGVVGAVGFEQRVRDLVLDLPFVAAVVLPLLEARAALRTQLAKLHKMLLEQVRTDPVCRRLMTAPGVGPVVALTYRTCVDNPARLGRSQCVGAHYGLTPRLYQSGETMRVGRISKCGDRMMRAALYEAALVLLTGSRGRWSGLKVWGLAVAKRRGMQKALVAVARKLAIVLHRMWRDGTDFRWSAAATTAA

SEQ ID NO: 263048 - protein, 411 aa, unidentified
MNPVVGLDIAKGESQVQAFLDKKTPFKRSFKITHTVEGFGQLLQFLQEIEDITNIKPVIIMESTGHYHSPVMQFLDNLRYLYIVINPLISYRAKSSSLRKVKTDVIDAYHLCELYYKEELEPYKKRGVQLLNLRNLTRQHDHLTGISSQAKLHFLAILDQVFPEYRGVFGDLYSNVSLLTLLEFPTSEAILIAGEEQLSKRIASLCTSRSKRWANEKAIRLIAAAEKNPFQVNLYNSLIISLEMHIKMVLQYKEHLSNLKAEIDVLVKEIEEYNIIQSIPGIGEKIAATIISEIGEIDRFDSPKKLVAFNGTDPSVYESGKFTGTKNRITKRGSSRLRHALFMAVRCAIRDTRKSKTSDEIIPRNKRLRQFYDKKREEGKPFRVTVIACVNKLLHWIYALLKSNTTFQDLA

SEQ ID NO: 263049 - protein, 325 aa, unidentified
MKDTMIGVDLAKNVFQLHGATMTGHLSFRKKLTRSRFRQFMAAQPPAVVVMEACGSASYWAREMVKFGHEVKLIAPQYVRPFVKRQKNDAADAEAIVVAAQRPEMRFVQPKSEEQQACAVLFRARERLLHQRTELVNALRSVLYEYGHIIPKGIAHIKRIESILDEPNSDLPALVREECFDLLEQIAEKTARIDVKTAKAKALSLATDTARRLQTMPGVGPQTALAISGFAPPMESFKRGRDFAAWLGLVPRQYTSGGKERLGRVSKAGQTDIRSLLIIGAMSRLTVLARKSIVEGSWLARMLRGKPLMLVAIALANKMARAIWR

SEQ ID NO: 263050 - protein, 345 aa, unidentified
MEIHTIGIDLAKTIFHLVGVNARGEVVVRKKCSRNQLLRFTANHRVCLVGMEACGGSHFLGRALREQGHDVRLLPAQYVKPYVKTNKNDYIDAEAIAEAVTRPSMRFVPIKTDDQLDLQSLHRVRERWVGRRTAVINQIRGMLLERGITVTRGRRHIEESLPGILEDSDNKLSGALRVLLTELRLEMQYLSRQIEESDKLILRIASELEPCRRLVAIPGIGPVIATATIAAIGNGAAFKKGRGFAAWLGVVPGEHSTGGKQTLTETSRRGNRYLRKLFVQGAHAVLQKRRTQSTGLSTWLAQLTTRKRIQVAAVALANKLARMVWAVLAKGEAYRPPVAALSARA

SEQ ID NO: 263051 - protein, 381 aa, unidentified
MSRQPAAPAAVLSALMKQKLTGKSIEQGSGEGKCNRVLKLGLDMHYRQVTVAMQEEAGAIKAVGRMGHDGFEHWVERKREAGWEIYSCYEAGASGYWLHRDLEQMGVKNLVVAPKAMGQDKAQKTDRRDSAELVDQLDRYLGGNRKALSPVAIPSIEQEQKRALIRYHRQIMADRSRYEARGKGLLCAQGIEVQGKWWQPQAWKELKTHGRFQSWMQTQLQGWRSKLLSAEQEQQKLRKQIEALAPALLPKGVGAYSAVALEYELKGLARFKTARALSSYTGLCPGIHSSDGRGKEGSINRCGNAAVRWNLVEMVWRLLKWQPHYQVVGQLGAALVRSKRARKRLVVKAARQLAIDLWRLETGRITAQELGLVMQPTSKAK

SEQ ID NO: 263052 - protein, 299 aa, unidentified
MQLTTVSVDLAKTVFQLHAIDQQGKTALRKQLKREQVVPFFANLEPCLVGMEACGGAHYWARKLQALGHTVKLMAPQFVKPYVKSNKNDVADAEAICEAVTRPNMRFVPIKTVEQQAILAVHCARQGFVKARTAQANSIRGLLGEFGVVLPQGIRHIVERLPDILEDHENALPGSLRQLMQRLMEHFKELDRQVVELEREIQQWHRSNEDSCRLAEMPGVGPLTATALVASVGDAKNFSNGRQMAAWLGLVPRQHSSGGKPTLLGISKRGDGYLRTLLIHGARSMVRVVESKTDPSAIG

SEQ ID NO: 263053 - protein, 403 aa, unidentified
MNRNAVGIDVSKGKSMAAILRPYGEIVSSPFEIKHTSGNIQSLIQQIKSIEGESRIVMEHTGHYYEPLARELSLAGLFVTAINPKLIKDFGDNSLRKVKSDKADAVKIARYTLDSWTELKQYSLMDEIRNQLKTMNRQFGFYMKHKTAMKNNLIGILDQTYPGVNTYFDSPAREDGSQKWVDFAAAYWHVDCVRKMSLNAFVDHYQKWCKRKKYNFSRDKAEEIYGAARELVPVLPKDDLTKLIVKQAIEQLNTASKTVEELRTLMNETAAKLPEYPVVMGMKGVGPSLGPQLMAEIGDVTRFSHKGAITAFAGVDPGVNESGTYEQKSVPTSKRGSSSLRKTLFQVMDCLIKTKPQDDPVYAFIDKKRAQGKPYYVYMTAGANKFLRIYYGRVKEYLMSLPE

SEQ ID NO: 263054 - protein, 352 aa, unidentified
MNVIHYIGFDVHKKSVSYCVKDAAGKILEEGKLRATRQALRQWAGDRTEPWHGAMEATLFSGWIYDTLKPFATELQMGHPAMMKAIGASKKKNDKIDARQTADLVRCNLLPACYVAPTEIRELRRMLRYRNVVVAQAVRMKNKMSGLLMEVGAEYNKQRLHGKKYFTELLGSLEEVPESVKDLLRLSRGALELFETTQKKILDRLQKEPRLVRRLEGLQSIRGVGVVTALSWALEICDPHRFPSIADAVSYCGLTSALVSSADKQQRGPLSQQRNAHLQTVLIEAAKLAPRWNSQLAAVHEREMNRGNRNRATLAVARKLVFYLLAVDKSGKPFQVQTPPAPATETEVPAVA

SEQ ID NO: 263055 - protein, 338 aa, unidentified
MKYCGMDVHKESITACIMDKEGNVVRHHTFPYNKESIKAFLFGISNAEIEIAIEACGIWRGVYKVLKELGYKVKLANPNKTHDIACRKKTDNVDSRILADLLRTNYLPEVYIPDEEILRLRDITRHKSNLTRLRVEIQVKIKGYLLRKGVKYDRIWNEKALSKLAEDDPDIKNLINVYWSLKEEEKEVMRRIRKIAGNMRKANLLMSMPGIGEFSSLMILAEIGDIRRFESPKQLISYAGLCPGIYQSGNTERNIRNNAVNKWLKWIIYECSGRATMLDSRFQEYYHKIKQRKGFKTARRAVARKMLTIMWYMLTNEEPYRNNIRVLRGQKGKGTPCV

SEQ ID NO: 263056 - protein, 397 aa, unidentified
MYIVGIDIAKRKHEAAVIDGEGTVIIKPFSFTNNCSGYNRLLAMLAKAKLPLDEVSFAMEATGHYWLALFTRLQKEGFRVQVINPVQTNSIRSFYIRQAKTDPRDALLIAEVIRFGHFSESTLHPENIYELRELCRGRHAIVSMQADVKRKVVALLDQVFPEYETAFTNMFGDTSMAILQTCPTPKELSEMPLEELCHLIEVSSHKRFRMAKARELQELARNSFGFAMAGDVFSTMIRLYAKHLDFLKQQVREMDRKIAEIMDTLDTPITTITGIGPTLGAYILSEIGDISRFSSAAKLAAYAGIDPTMRQSGEYNGVRNRMSKRGSPYLRHAIWLAASSAVLHDPALKLYFQKKRDEGKPYMASVGHACRKMVSIIYAVMRDNKAYTPCIPNEISA

SEQ ID NO: 263057 - protein, 407 aa, unidentified
MDVVIERACGMDVHKDNITACIITPQGKEVQTFSTKTVFLLKLLDWIKQHQCTHVAMESTSVYWKPIVNLLEAEDIEFLVVNAQHMKAVPGRKTDVKDAEWIAKLLRHGLLKASYIPDRNQRELRELVRYRRSIIEERARQINRIQKVLEGANIKLGSVVSDVLGVSSRDMLDAIASGEEDPEKLANFARRSMKKKKDELELALKGYIQSHQRLMLKTILRHIDFLTEEIEMLDQEVANRVRTYQEDVERLDSIPGIATRMAEQILAAIGTDIKKQFPSAAHMCSWAGLVPGQNESAGKRKSAKTKKGNKYLRSALTEAAHSVKGSKNYLGALYRRTASRKGKKRAGIVVAHAMLRISYYLLTRKEMYVDLGEDYFDKQRQQSIVRHSLRRLESLGYTVTLQEPEAS

SEQ ID NO: 263058 - protein, 327 aa, unidentified
MEMIGVDLHARQQTIAMLDTETGELVEKTLEHEGEKVREFYAALPGPVLVGIEATGSMPWFLKLMEELKIDCQVGHPAEVRKAETRQQKHDRRDARLLLKLLAENRFPSIWMPSTEQRDLRTLLRHRDQWVRMRTRVQNTLQALALSNGLQRGHGLWSQAGQQALEVLQLAPYTGQRRAALLRLYLQLQKSIDDLDQQVSEQARQRPQARRLMTHPGVGPVTALATEVFLGDPMRFADGKAVASYIGMIPSEHSSGSRQRLGALSKQGNALLRFLWGEAAMQAVGRDPELKRFYRRKLVQKGLGKARIAAARKLGIRLWIMLRDQID

SEQ ID NO: 263059 - protein, 464 aa, unidentified
MATLRIIGIDLAVTAAHRAIVLDSASNQFVSHVISFHANPAEIEGVLAIARKGAPANTRLIAVLEATGMAWFTVGTYLQRRGVEVYRVNGRQTADQRKVYHRHAKSDRIDARVLPRLYLNAAERITRLFLPEPRIMELQRLCREVTRLSQQISASKNRLLAIDNFAWLGIKDILAPYEAPARWFRRQWYNPWQVYQAGSEALKQAWLQSHADPEQDLSWVEALVAQAQQVMAFYGEPAPIDYPRLQAFLGREQARLEQVEAQKHLLQLKMLRPLYRQLYPQRYLESLPGVGQDSAAVFIAFVGDIRRFPSLNDFLGWSGMIPFSSQSGQGQTRGLHITQAGPDLLKRTAFLTANIARLYDPQIAVVYYDQMVNKGKHHLQAVCACATHLLTRVFVVLRENRPLELRDVDGSPISKQRARAICQQHYTVPEQVRRQNNHRVRTQRAEQRLEQRTQRRQLKQRSKG

SEQ ID NO: 263060 - protein, 347 aa, unidentified
MVVVGIDSHKDTLAACAIDTLGQVLEHRSFANTAVGHVRALGWVRGVGAGRVAVEGSGSYGRRFALVLAEAEVEVVDVPPQMTARARRTQRSRYKSDPTDALLIARVGAREHDLGSPRPSGKTEDLTAVVSYRSEQVSSRTKEANRLHADLTLLHPGYQETIRGKLTRPAALSQVMKLISADRSVRAQIARRRITTIRRLRKHIADLDRQIGELAHQTGAQTLTAIKGIGTLAAAEILAQVGDPHKYRTKARFAAANGTAPLQASSGRISRHRLNRGGNRRLNRTIHIAALTQIRHTGTEGHNYYQRLQARGKTKQEAIRILKRKISDRIWTHLQHLPTTPTAPNLT

SEQ ID NO: 263061 - protein, 356 aa, unidentified
MNHVSKLDFTGQQIYIGMDVHKKSWSVSIYTDQFEHKTFSQPPKVEVLMNYLKRNFPGAAYKTVYEAGFSGFWIHDQLQEQGVQCLVVNPADVPTKDKERAGKTDRVDCRKLARSLRSGEIEGIYVPSRPKAEDRGLIRTRHSMVKKQTRCKNQIKSILCFYGITIPDDLAKSHWSRRFINWIESLRMERASGDMALKVHLAELMNIRSLIADMNRAIRKLANTDEYRDNVRLLKTVPGISILTAMTLLTELYDITRFKTLDKLCGYVGLIPDTNSSGETDRKTGMTGRRNNHLRGVIIESAWTAVRKDPALMMAFNELCKHMTKTNAIVRIAKKLLNRIRYVLKNQQEYVPAVIQ

SEQ ID NO: 263062 - protein, 355 aa, unidentified
MKKVDPTIWQDKPLYVGIDMHRKRWHISIRSADGQVLFSQRIEGRWPVLKHRLEKYPGAQFMAVYEAGYFGFWLYDELTAYGVTTCVTPPSLIPSASGNKVKTDRLDSDRLAQLLQAGLLTSVHVPTEQERAHRQVVRRRRQFIQDRIRVKNRIKAELRLYGLELSGETKGPWTQRLMTQLRAIRFADAFHQTSFIALLAHHDFLSSQIDLLAGQLKTLAESEIYQERVEILTSIPGIGWLSAMEILLELQDVARFQRAEQLAAYVGLTPGQHSSGEHVRLGRITRQGKSIVRTLLVLAAWRLIDKDGAMREKYERIKARAGGKRAIVAIARTLLVRLRRLLLNREPYVLGLVSG

SEQ ID NO: 263063 - protein, 370 aa, unidentified
MSNATTFVGLDVHARSVKACAFVPETGETIRKSFGYEPGEIASWVSSLPQPARCVYESGVTGFHLCRELNAMGAACVIGAVSKMHKPAADRGRKTDRRDAQFLAVQLALGVVTEVHVPDAECEGARDLARALADARDDAVRAKQRLSKFLLRHGLAFDERTPTGRRKGNWTRAHWSWIESIRFAEGADNDVLAYYVDAVRRAAEEKARLEGLVEAEARKPRWRRRVDSLRCLKGVDTATAADLVFEAGEFSRFRNARSFAAWVGLTPSEHSSGESDRRGAITKAGNKHLRKTLVEAAWHYLTRSGRPKDLAKGQAPDRGARRHAAKGVRRLVERREALLARGVHNNKANVATARELACWVWAVGLMAEEA

SEQ ID NO: 263064 - protein, 300 aa, unidentified
MTIVEADRTVVGGVDTHLSVHVAAALDGGGALLGVEWFAAAPEGYAGLLGWMASFGTVAKIGVEGAGAYGADLTRFLHRAGIEVLEVDFPSRQTRRKRGKSDPTDAVEAARAAHSGKAQALAKTRDGQVEAIRALLVAKRSARQARIKALNQIRQLAYTAPDVIRQRLKGISSDTLAAAAARLRPRSGGDPVVLATTVSIGLLGRRVVALEAELDRIEALVGKLVVATAPGLLAVYGVGVDTAAVLLVTAGDNPERVRSEAAWAHLCGVSPIEASSGKVVRHRLNRGGNRQANSACGGSS

SEQ ID NO: 263065 - protein, 384 aa, unidentified
MKKNNTAKKSPKPKALSNFKKNQIREVAAKQRLTIGLDLGDRTSRYCILGEAGEVVSESQLPTTKAGLSSLFEKMPSSRIALEVGTHSPWVSRQLAGMGHEVIVANAHKVKLITQSVHKNDRIDAEQLARLARVDPKLLSPIRHRGPEAQADLAVIRARAELMEARTRLINCARGLVKPMGERLKKCGADQVKETLGEGLSEAAQRVIGPLLKSVEAISKQIAEYDQRIEEIAKRYPEQKLLTQVYGVGTLIALAYILTLEDAERFEHSRDVGPFLGLKPKERDSGDSHPQLGITKTGDGLLRSLLVQGAHCMLRKGAPDSDLGAWGLAKMKSGGKNAKKRAIVAVARKLAVLLHALWSTGEVYDPLYNRKAAQAAKSKGQIAA

SEQ ID NO: 263066 - protein, 382 aa, unidentified
MAILAIDVSKNYLSFFSDFIGSGTVENSPQGIVELFNKAFASSSDFSLVLESTGVFSFNVANFFFQNNVPVFWVKTDNIKLYRKILNRPKTDKIDAELIFSIASKFPESLVPFVNNSYIISELRNLTRLYLKFNEDIARLKLRLYSYVSLYFPKLDFKLNKTFECLLKDYTIEEIANMPIEELFEYIAKISRHNVSSQVLAEKLQTLAKDALRLSVNPSNTLRISIVSTIDLIQHYEKQIELVKKEISKLLKVIPNTLTTVKGIGEITAAGIIAEIGDINRFERASALASYAGLVWTINQSGNYKSENNQLTKKGNKYLRTYLVMAANGVKTYDPVYKEYYRKKYAEATTHKHMRALILTARKLVNLVYYLLKNNVPYVPMK

SEQ ID NO: 263067 - protein, 422 aa, unidentified
MLEESLDDQQIIERVAALDIGKAELVCCVRLPGPGGSRRRLQEVITYSTMTPSLQVMAERLLDLGVTRVVMEATSDYWKPPFYLLEAHGLQTWLVNAKDVKHLPGRPKTDRLDAVWLCKVAERQMIRPSFVPPPPIRRLRDLTRYRAALVSDCTGEKNRVEKLLEDAQIKLSVVASDIFGVSGRDMMAALIAGQRDPKVLAQLARSRMRVKIPQLEEAFVGRFGEHHRFLLAKMLQRVDAISADIAEVDARIDAEIAPFADTVARLDQIPGVGVTAARVIIAEVGLDMSRFPTSSHLTSWAKFAPGVKESAGRKKGRGSTGHGNRYLASALGEAAVGSARTDTFLGERYRRLARRRGSKKAMVAVGRSILVIVWQLLSDPNAHFHDLGPDFYANRLGADRTKRNHIRQLEALGYKVTLEPAA

SEQ ID NO: 263068 - protein, 352 aa, unidentified
MMIIGCDFHPRFQQISFLSEETGECGQRRLMHTAEAEQYYRSLSGAKVRVGIEATGSYGWFRRLLSELGHELVVGDATQIRASNPRRQKTDKRDAEHILGLLVQDRFPAIWQPPAENEQLRQLLLHRSRLVRLRTRVTNQFNGMAKNEGFVVAGGWSGKRRQAIEALPLPGWYAERRTDLLALLDRIEERIAPLNKAVSQAAASDTEACLLMTHPGVGPVVSLAYVLTIGNWQRFPRGKQVGSYLGLIPSEDSSSDKRRLGHISKQGNTFVRWLLVEAASTAQRYDASWHRQYVRLSMTKHHGVAKVAIAHKLAVRLYWMLRSGQDYGQMMERGSHARQSECPVGRSRRPIE

SEQ ID NO: 263069 - protein, 359 aa, unidentified
MRTSGKNIFEGQLTIGLDLGDRSSAYCVLNAAGEIVLEHKLATTPEAMKQVFGSLPRCRIAMETGTHSPWVSRLLMALGHEVIVGHAQKVRLITKSRRKDDRLDARTLARLARIDPELLSPVKHRSAQAQLHLTEIRARAALVSTRTALVNAARGLVKSYGERLRKCHTQQVGREMTRELSMGLREALKPLLQEVESLNERIKEYDRRIEKMAKEMYPETALLKQVKGVGDLIATAYVLTIEDPHRFRKSRDAGCFLGLQPGRRNSGESEPQMRISKEGDEYLRTLLVQGAHYILGPFGEDSDLRRWGQKLSARGGKNAKKRAVVAVARKLAVLLHRLWVSGEVYEPLRNSQKPMSTAA

SEQ ID NO: 263070 - protein, 307 aa, unidentified
MFVGIDVSQEYLDVAVTGHKRVLRVANDEVELQSLGRRLIEQAPELIVMEASGGYERSAAAILLGVGLTVAIVNPRQVRDFARSLGQLAKTDAIDARVLARFGEVVKPAPARLSDETEGQLHALEQRRRQLIEMMVAERNRLRTAPRTKDRIAEHLRWLEGEVKRTDKEIEGLVQSDSDLKAKSAILTSVPGVGRVVSASLLGSLPELGRLNRKEIAALVGVAPLNWDSGKLRGRRSVWGGRAHIRAVLYMAALVASRRNPTIRSLYERLCASGKPKKVALVAAMRKLLVILNSMLRTGTKWSAGTV

SEQ ID NO: 263071 - protein, 424 aa, unidentified
MNSRVKIACGLDVHRSKIVGSIVTSAGTNETRTFTTNIDDTLALKDWILTHECERVAMEATGIYWYPIYNLLEGHVTVQVANPLFIKGIPGRKTDQLDAEWIATLCLNGLVKPSFVPGLQVRNRRDLVRTLNRLIQIRTRHKNRIHKVMVRAGIRIAAHLSDLFGPSGLRILHGLLEGESIDTILKNLKNAKIAKKREQLAKSICGTLDENDVYLIRLELDAIGSVNRLIDDLRQRITHLMIPENEDLNTLMSIPGIGYDSAVNILAEIGDVRQFPSGKHLVSWAGLAPGMNESAGKQGPAHITKRGSKFLRTFLIEPAHSIAGMKRNNQLKRFFSRMRGKLGYKPAIIALARKLLMLVHHLLVNREPYFEENLPKKKPVKITSSSLVSMTPDQILKILSDAVAELSKADRVELVRKLNRIGNS

SEQ ID NO: 263072 - protein, 348 aa, unidentified
MTVYCGVDFHARKQTISYLTIEDGEVQQTELHHEQDDIRGFYAKLRNLGPVIVGFETSGYAAWFEEMLEELGCEIWIGMPAAIRRQARRRQKNDRRDADLILELMLRGDFPRLHRYTPASREVLQQLRYRHRLVKLRTIVVNSLQYMALSRGVSLRTKLLTGRGQERMKQLSLPDHLAKQRDEMCELLQELTQKIETAERWLDLKAKQDARVERLRTHPGIGPLTGLCLVYTLEQVERFANPRKVTAYVGFDPVEDSSGERQRIGAISKQGSRLLRFLLVEAGQVAVRTDPDLKAAYWRVQLRRNHQKAKVAVARRLLVRAFIMLRDEIDYAEFQRRGVAARSTRRTA

SEQ ID NO: 263073 - protein, 371 aa, unidentified
MNSIVYVGMDVHKESYTLCCYCYDTDKVGYKQTIPSDYKLILKYMESMRKVYGEDVSIVCGYEAGCLGYSLYHQLKDHAVDCKILAPTTMAITNTSHVKTDKRDAANIARCLAFHTYSEVYVPDNEDNSVKEYIRMRDDQKLMLKKIKQQILAFVLRQGKKFEGGKTYWTIAHMKWLKSLELKGLDKETLSEYLVTYDYLIGKIERLDNRIEELASGEKYKEKVKNMGCFLGVKTHTALSMVVEIGDFNRFEKAPKFSGFLGLVPSEDSSGDKVNRFSITKAGNSHLRRLMVEAAQSYTRGNIGHKSIALKQRQQGCSAEVIAYADKANERLRRRFYKMTLNKGVNRNVATTAIARELACFMWGMATGNIG

SEQ ID NO: 263074 - protein, 343 aa, unidentified
MQAVTTIGLDIAKSVFQIHGVDAAGNVIVRRQLKRRYVLPFFQKLPPCLVGIEACASSHHWSRELQALGHTVRLMPPAYVKPYVKRHKNDAADAEAICEAVTRANMRFVPTKTLEQQSCLMLHRTRHLFIRQQTAVINAIRAHLAEFGIVAPVGRNGVEQLLDVVADASDKRLPEIARACLLALGAQLRTLKVQILNFDRQIIAWHRSNEASKRLDEIPGVGPALATALVASVADPKAFRSGRNFSAWIGLVPKQHSSGGKDKLGSISKQGDRYLRSLFTTGALAVIRYAKIHGTKHRPWLTALLARRPTKVAAIALANKIARMAWAMMARGDRYKEPVALAA

SEQ ID NO: 263075 - protein, 289 aa, unidentified
MLYIGLDVHKEFCQACVMNKSGKVISNGRFLSTQEALDGFLDRFEDAKFVLESTGIWEFIYEGIEKRGFEAVLAHPLKVRAIAEAKVKTDKVDAETLAHLLRADLIPRSHVPPRDIRNLRQLVRHRAYLVRQCTSIKNRIHAELLRRGIRRPDDLKKLFSHKHVEWMRSLGILTITSSLDCLEGIQGQIKEVESFLLVEYNSRKDAQLIATIPGIGFYGALLILAEIDDVRRFPGPEKLCAYAGLVPTVHQSASTMYHGGITKNGSPHLRWILIEAVHVHTNYCPESQR

SEQ ID NO: 263076 - protein, 313 aa, unidentified
MATAVWVGIDVSKARLDVALGAAGELLSVANETRAIAGLVARLVELAPALLVLEASGGLETALVAELGAAQLPVVVVNPRQVRDFARATGQLAKTDALDARMLALFAERIRPELRRLPSEQERELKALVARRRELVEMITAERNRLGSAPKLLRKEITAHIRWLEGRLKERDRDLDRMLRSSPLWREREDLLRAVPGVGPVLCATLLADLPELGALSRREIAKLVGVAPLNRDSGTLRGRRTVWGGRARVRAALYMATLVAVRFNPVLKAFYLRLRGAGKPAKVALTAAMRKLLTILNAMLKQRSPWRPPCVA

SEQ ID NO: 263077 - protein, 326 aa, unidentified
MQSILGIDVSKKTMDVLLVTDHRVCHKVVKNDPKGFQQLEEWLKAENSGQVHACLEATGQYGEEVAEYLNICGHQVSVVNPARIKRYGESKLHRNKTDKADAALIAEFCQKEKPTLWQPLSPEIKRLKALVRRLQDQKANLQQEKNRLESGEKNRWVVCDLTTHIAYLKERIQATEKEIEELINLTPDLKFKRKLLTSIPGIGHLTAHILLAEIGDISKFDSAPQLAAYAGLNPQGHRSGTSVYKKTRISKQGRSELRCCLYLPAIVAMYHNPVIQDLSERMAGRQSHKMEIVVASMRKLLHIAYDVLKNQTPFDPDFGEQFNFSS

SEQ ID NO: 263078 - protein, 332 aa, unidentified
MSVYVGIDVHRKRSQVAVVDQAGEVLANRNVPNGVQPILGVIGGLPAGTPAAFEAAFGWGWLVELLEDYGFDPHLVHPLQCKAIASARLKNDKVDAAILAQLLRADLLPEAWIAPPPVRQLRAMLRHRAQLVRLRTLLRNRIHAVLADHGHGRPQGCWSGPGREWLASLELPAVSREVIDDGLALIDALQLPIDRLDWQVRQRARSEPAVKALTQLPGVGVFTALVLLAEIGDITRFGSARKLAAWAGLTPTVRGSDRTVRHGHISKQGSVWVRWVLCEAAQTAKRHPDFAATYQAIARRRGSKIATTAIARKLLTRAYHLLTDASSGGAPS

SEQ ID NO: 263079 - protein, 354 aa, unidentified
MKHNTKYVGLDVHQETTVASVRGESGRVLVRAVFPTEESAITEFFTGMRGAVHVAFEEGTQAQWLYELLTPRANRVVVCDQRGQSRHGNKADQGDADQLSDQLRRNGLRAVYHSDSHRTTLKELTRTYQSVVADSTRVMQRIKALYRARAIKTPGKSVYNPRQRAQWLAKLPERGARFRAETLYTQLDVLRELHPKAKAAMLAEACKDPASSILQTIPSLGPVRVALILATMQTPWRFRTKRNLWAYCGLAVVTRSSADYVMVGHQAVRRQRAPMTRGLNRNHNHVLKDVFKGAATDATGKPGPLQDFYFGMVARGMREELARVTLARKIAAITLRLWKRGESFDPTKLTTQAS

SEQ ID NO: 263080 - protein, 366 aa, unidentified
MTNLSNWIGIDDHADKWTIAQYRGTSGEPEREWELKPSESGYRKLIGWLKEMRGSVRIVYEAGPCGYELYRRLRRSGLDCQVAAPSLTPRKPGERIKTNGRDARKLARMLRAGELTLITVPDSRQESIRDVVRAREAANKDVLRARHQLSKLLLRQGYRYRDGKPWTQRFWAWVDQIELGEQYSREVLSQHVRVIGRRVELVAEYDRIIESVARESEYTPMVKALGVLRGVDWLTAMTILVEMGDLRRFATAPQLMAALGLVPSEFSTGDKTQRGSITKTGNAHARRVIVEAAWHYQRSFTRPGPRIRRRRLGQPTARLDIAERCDRRLHRRFTRLTSRGKRSTIAAVAVARELAGFIWAIGQIAY

SEQ ID NO: 263081 - protein, 404 aa, unidentified
MSVQVAPATSSTIVVAVDVGKASAMFSVTDGARQRLLGPVEFAMTCAGLSSTVHQVMAMVKPSTQVKVGVEAAGHYHRPVVDYRWPAGWEVLEFNPAHVAEQRRVAGRRRVKTDAIDLEAITELALAGRGQAVTAREACIGELTAWAHHRSRRVATRTATKNQLLGQLDRAFPGLTLTLPDVLGTKIGRLVAAEFADPARLRTLGTNRLIRFAAAREVQLRRPLAQRLVAAAADALPTRDAAVARQVLATDLTLLADLDAHVEAAETELAALLPRSPFATLTSVPGWAVVRVSNYAAALGDPCRWPGPRQIYRASGLSPMQYESAGKRRDGRISREGSVALRRALIDLGIGLWLTEPTAKAYALGLKARGKRGGIIACALAHRATRIAYALVRDHASYDPTRWG

SEQ ID NO: 263082 - protein, 316 aa, unidentified
MHYLGIDVSKQTLDCCHMTGGFFYARKYRNDERGYKELADYLSEYPKEEVRICCEATGRYYEAVAEYLHGLGYSVAVENPRKIKGFGVAVLQRSKTDKQDAELIARYCKAVEPRAWQPLAAEQKELRELVRYIGRLKRQRAAEKVKLAESSEAVRSSILNILAVIDSEIRNMRQALREFYRKRETLKEESRRLQTIKGVGEYAAAAIQTVLHDGHGFETAAQFVAYLGLDPKQHQSGTSVKGRSRISKVGSSEMRAALYMPAVVAYSRGGFPRLVRNMTANGKRPMQIIAAIMRKLAVVAFAIVKDKTIFDPAKHA

SEQ ID NO: 263083 - protein, 386 aa, unidentified
MSQPSDLNRSHTALEQDCTLIAVVEMSLNSWLVAGIVPGIDRHPLKKLAVDEHALLKLLRRWQAEAMKVGYTVKRIVVAFEAGRDGFWLARWLRARDIEPYVIHASSVAVSREHRRAKTDRLDTELLKRSFIGWLRGEPHHCHMAAIPTIEEEDAKRANRERENLVCERSRIINRMKACLIRFGVRAFKPTLRKASDRLVKLRTPERVPLPPNTIAEMRRDMARLLFVRDQIKEIERARLQRLAQAPRQRTHAMVRLLARVIGVGIETADMLVHEVLSRNMRDRRAVARYAGITGSPDESGRKRREKGLARAGNARVRRGMIQLAWRFLKFQKGSALAEWYRQRTADARRGARNTMIVALARKLLIGLWRLVTIGEVPAGIVMRAA

SEQ ID NO: 263084 - protein, 368 aa, unidentified
MITRFHGIDRHKKYSTVSVLDRDGRETRFLRSCQMEAYLDELGPEDAVVMEASCGSFYWADRVEATGATCYILDPMRFRIITDSWNKTDRQDARNMAKALWVFLVTGEFGIPTVSKPSETIRTLRRLFASYNLLNRQIRMLKNTIQAMLTEDGVTVSSNDRSRLFKGKESVAEILADRRLSEVIVDALQIQVDLLRTITESKEQLGRRIVEASAPLDEQIRLLITIPGITPLTASAFLADVGDVHRFPSLRRMNAYLGLVPRCHDSGGKSRPGHITRESRKLSRTILTQSIYQTIKGTPGWERYYEDLKARRGSGRARIAMIRRLCGIMRRMLLQGEQFHWLKEKLYRRKLVEYQKTLEEHKKERDAA

SEQ ID NO: 263085 - protein, 339 aa, unidentified
MTVKTVGLDLAKDVFQVHGISENGRVIFNKAIKRAKLLAFFETLPPCTIGMEACGSSHHWGRTLRKLGHDVRLMPANYVKPYVKRGKTDAVDAEAICEAVRRPTMRFVEIKTEDQQAILSIHRTRDLAVRQRTQLANMIRSLLREFGHILPIGVEAVTAFAKRHLDGDHPDLPEIANGMLGIQCYQFIGLNERIDGYSKMIEQHALLSTDARRLMRMPGIGPITASAIVATIGDAKQFRTGRDLAAWLGLTPLNKSSGGKERLGKITKKGDRYLRKLLVVGMTSRAVMAKRAPEKVDLWTAKIIADKPFRLATTAMANKAARIIWAMLTKKQEYRQPAF

SEQ ID NO: 263086 - protein, 418 aa, unidentified
MTVDSVARKRSVINPDALVIGIDLAKHTHVARARFCDGSYTRPVKVPNTRAGFLALIEQIGAWKARPDSAVIVGVESTGSYGVNLVRWLSEYGCQVVLVPSLHVCREKELLDNGRGTSDDKDALIIADLVARGQYLGFVELSGACLELRPLVSLRARLVREQTAWLNALHQTMDVLFPEFETIFADLKRPNVRLVLGRFGTVGAARAHSPTAMRRLLVRDGAARVSLAKLKRLQAAAAESIGPLAVSAGQERSLHEMLETLATLDERITGLEAEIVRLLEQLPEAEYLMSLKGVGAMTTAIILAETGGLKQYSCAAAVLKLAGLNLYQNSSGQYQSGRRISKRGRSQLRRALYMVAVQHAKRGWPLRPYYAALVARGKPKTVALTAVCCRLVRLLYALVRDGRCYSECPPNVDRPAAA

SEQ ID NO: 263087 - protein, 460 aa, unidentified
MNRKKWKSKIDRTMPVVHPNAAAIDIGATMHMAAVRADRAPEPVCSFGTFTADLHRLVDWFAECGVETVVMESTSVYWIPIFELLDARGFTVFLVNARDAKHVPGRKTDVSDAQWLQRLHSFGLLRASFRPKGQIAELRAYVRQRERLLEYAASHIQHMQKALTEMNLQLHHVVADITGATGLRIIRAILAGERDPEVLACLRHYSCHSSAETIAKALTGSYRPEHLFALDQALALYDAYHEKASACDVRIEAVLKELRIHRGRDYGSAPPVSRRRNRTDQANALAFDVRAALFGLLGKDVTTIDGLGPYLSLKLIAECGDDLTSWPSAKHFTSWLGLAPSNKVSGGKMLSSRTRRSGGRAAALLRLAAVTVGRTDTALGAFYRRLSSRIGKAKAVTATARKIAVLFYNAVRHGMDYVDPGASSYETRYRTRVINNLHRRAKTFGFVLQPLEPKAGAAVS

SEQ ID NO: 263088 - protein, 384 aa, unidentified
MNKYNMIFIGLDTHKVSTEVAHIEDQRGAKTVHQGKIKTNKAAITKLARQYQSKYPQATLHFVYEAGPCGYWIYRLLTSLGHCCYVVAPSLIPKKPGDKVKTDKRDAMKLAKLLKDEELTPIYVPEPEDEAIRDLSRARETAMKDLKDAKFQLKGLFLRNNITCKVNDNWSNQHLRWLTELVLPHPSQQIVLQEMIQTITERIKRVERLVNELAHQAKLWRYYPVVQALQAMRGIRFLVAVGTIAELGDLRRFDHPRKLMAYLGLVPKENSSGDNRKQGGITKCGNGRARRLLIEGAQTYKHNANVSTELQKRQEGLPKAVTDIAWKAQLRLCRRYKRLMQRGKHRNIVVAAIAREMLAYIWAISREVILVPVDPMARTSRVPA

SEQ ID NO: 263089 - protein, 417 aa, unidentified
MGKRRNRVCGADVHNDLIVATIECSDETTLRERFGTNRNELERFKDWLIANNCEQVAFEATGVYWFSVYDVLSPSIDTIVANPWMIKGLPKDKSDDHDSKSIASFCLNGQIKRSRIFSNDDRDLRTMTRSRSGYVKTRTQFRNRIHKYLAMRGIKLRSGIRGIFGKSGRHVLNGLVDGENIETILDGIPSGRIRKKRELIKAAIAIGLDDTTKLLVKDALEVLDNLENRIENMSRDILGRTLNKSKDLAIIMSVPGISFVSGSKILSEIGDYHDFRSPEQLAKWCGLVPGLNESAGKKRSSGITKQGSKHLRWILVEIAQVVARMKNTRFTRFFKRIMARKNHNVAIVALARKLICLIYHLLINQELYEDGRDKAMKSKPKEKAQGSFPENQLEDKVAAIVDAYYHMNPKSVLMGGG

SEQ ID NO: 263090 - protein, 346 aa, unidentified
MTIVEEKPAVTGGVDTHSEVHVAAALDPVGGLLGTREFPATAAGYAGLLGWLGKFGDVALVGVEGTGSYGSGLARYLAAHGVRVVEAGRADRQDRHRNGKSDPLDAVSAARAAQSGRAAGAPKGRDGAVEAIRALMVAKRSARHERTQAINQARALILTGPDELRARFAGHRAAALAEAVAALRPRPGDAADFAVRIALRELGRRVEFPDAQIERLDDLIIPLVTARAPGLLSLYGVGPDTAALLLIAAGDHPERLRSEAAWAHMCAVAPIPASSGKTRRHRLNRGGNREANHALWRIVITRMSAHPATRAYVQRRTAEGLSKKEIIRCLKRYVAREAYPYLRPGA

SEQ ID NO: 263091 - protein, 415 aa, unidentified
MVKVMEAIFRCCAGFDVHSKTVAVCVRRMGDQGEIHAEVRTFGTMTRNLLALCDWLLAEGVTHVAMESTGVFWKPIYNILEGQFQILLVNARHVQKVPGRKTDVKDCEWLAQLLQCGLLRGSYIPPRPQRDLRDLTRMRTQLTHEMASVANRIHKVLEDTNVKLGLVATDVLGVSGRKIIEALIGGETDAVKMADMARARLRNKMPLLEQALVGKVTEHHRFLLKALMDHWTYLESQIERFDQRIEEAARPFEKAITALILIPGFDRVSAQSVIAEIGADMKPFPTAGDLCSWAKICPGNNETGGKRKSSTTGHGDRWLKTILVQVAWAASHTKGSYFQAQYRRMAGRQKKKQAIVTVAHSILSTVYYILKYHRDYKDLGADHFDRIGRERIRRYHVKRLETLGFKVQLIEQTAA

SEQ ID NO: 263092 - protein, 466 aa, unidentified
MKPKKNSKKTNKKQPGSAGFAQIQPLVAGIDVGSEEHYVCAPTSGGGTEMRVFGATTPDLQEMAAWLQQLGVTSVALESTGVYWIPMLEVLDHRGIEVILADTRQLSRVPGRKTDAEDCQWIQKLHSCGLLQGCFRPKDDVCHLRSLVRGKAVLVAERADWLRRMQKSLDQMNVRVHRAVKDVDGVTGMAILRAIVAGERDAAKLAHLRDPHCRKSEAAIAKELKGNWRPDHLFNLEQALKMYDLIGERIADYQREILSKMAELHCAQADQNPIQPIKNKEKAKAIKKRGEEPMRQALHSIAGVDLTTIDTVGVGTAEVLISEYGTDLSRFPNEKKFIKHLRLAPRQSITGGKPQSKGKGKKTTTRAGQALRMAATTAHHSNSAIGGYYRRLAAHKGSDVAVFATARKLGSLVYRMLRWGQAYVDEGVAAYQQRYQSTRVHRLKAAAYELGFKLEPQTTALREAAK

SEQ ID NO: 263093 - protein, 366 aa, unidentified
MAQNTRPKKPRKRAIIGGVDTHADTHHAAVTLTNGGRIADAEFPTTHTGYQQLVAWMSEFGRLRSVGIEGTGSYGAGLSRHLCGLGVPVVEVNRPDRRQRRLKGKSDPLDAYAAADTVRAGWDTAATRALPKAGTGIVEAIRVLHTVRASAVKARTATINELRAVLVTAPAGLRDQLRELNPTALISACVRLRPGRQLADPEHASRYALRALARRYQTLTTDITAIEDQLHPLVRQACSGLLDIHGVGYETAAQLLITIGDNPDRIHTEAAFAALCGVAPIPASSGKTTRHRPSRGGDRQANRALYPIVCSRPASNAATRAYRDRRRTQGLSNPEIIRCLKRYLAREIYKALTSTNTQPEDLVTAA

SEQ ID NO: 263094 - protein, 406 aa, unidentified
MTVVMIGVDPHKRSHTAVAIGSDEEPLGKLRVRASVTQAQRLVTWAADWPERTWAVEGAGGLGHLLAQQLVAAGERVLDVQPKLGSRVRLLATGASNKNDPNDALSVAIAALRSRTQRPVTADDHDAVLRVWSRRHRDLGRAKNQVACRLHAVLCELVPGGVPEEITAAQATRILERSTPSDAAGQARRELAAELLDDMRGLDTRIRESKKKLAVAVRAAGTTLTDLFGVGPVVAATVIGDTGDVNRFPSRDHFASYNGTAPIEVSSGNRKINRLSLRGNRRINHAIHMAAITQIRHAHSDGRAYYDRKLAEGKTHKRSTPVPQAPDQRRPLRPLVRRRPPGSETPVAGPGGQPGNDSDSSAAGSHPVNRLFGQATPEPSLTLRPATTPAKRTSPTPTPKKARRSP

SEQ ID NO: 263095 - protein, 321 aa, unidentified
MNAPATVYIGVDVSKASLDFNAEGVRPGRVDNSPPAIRRELGRIRKCQPAEAALHVCCESTGCYHDKLKTVCQKMGLAFSTLNAFKVKEYAKSTSILAKTDRIDAELIRRYAQHIKPAPDLVLSQFQKELRDLAKTRASFTEMLVQAKTLLETAIMPQSKRHFTKHRSGLERTLKTLDRQMMELRRSDARCDAVCTKLAEIEGVGDVTAIMTVALVPELGTLGRRRSASLAGLAPYAKDSGNFKGPRHIRGGRGNVRRLLFMPAFVAMRHNPILRDIYQKKRAEGKPHKVTLTALMRKLFARMDRVAAIAIQEFEAAHQGT

SEQ ID NO: 263096 - protein, 338 aa, unidentified
MDHYVGIDLHSNNSYLGIIDTDNKRIFKKKARNDLSTIIKLLAPFSTQTKGIVVESTYNWYWLVDGLIDNGYRLHLANPSAIKQYEGLKHSDDITDAFHLANLLRLGILPEGYIYPKEERPVRDLLRKRQQLVHQRTAQILSFQNLAARNLGRQMHVQTINKLNEEDLENLFEERHLILSGKACIATIHFLRTRIIQLEKAIQRAAKLKNEFKLLKTVPGIWNILALTIMLETGPIERFEKVGNYASYCRCVQSNRFSNSKSKGKGNRKNGNKYLSWAYVEAANHALWNYEYVKRYYQRKAAKTNNVVAIKAIAHKLARACYYIIRDQKEFDPGKAFA

SEQ ID NO: 263097 - protein, 370 aa, unidentified
MSVRRILAKTIDTDLEYEAIGIDLAKNCVSAALLTTDGEVVCIDRLDYSELEKSAQALSSTTFAMEPCTEMNYLVQKLEAWGHRCLVIGGKNVQNYVENHYSGQKTDLNDAQALPFLAQDTQLRTIKAKDMEQQKYASLTTLREQYIKQYRQTIVSLKGICQAWGLNISKGISGKARLKDLIENHAAFPEELKESLVDMVTHAQTAQKALNKITKTLEELAKSDKVCQLIQTIPGLGSICSCRLRATVGDIKRFKSPKDFPAYYGLVPRSIATGHNEKKGKITHRGDRTMRSLMVQAAGSLVNMATKGKLKSKQLTKWILKKQKEKMPWGKLVCAVAAKLLRIVRAVLISNKPYNSKIAGVAKCSLPKGS

SEQ ID NO: 263098 - protein, 343 aa, unidentified
MAQYIGLDVSLKETSISVRQDGKRVWRGKCASDPKLLAEVIRKRAPSSERVVFETGPLSVWFFHALTAEGLPAICIDARHAKAALDMAANKTDANDADGLAHLAEVGFYREVRVKGFDSMLMRTLITARRQLLKMRVQMSNQIRGLMKTFGLVLPKGAGSVFERNVLTLLDGEDDLARIILPLLQAWRDIRLRAAELTTQLVRMAGSDQRCRLLTSVPGVGTVTATAFAAAVEDSINFKNSRAVGAWVGLTPKRYQSGEVDFEGHISRRGDAKLRSLLYEAASVILNRLSDTSTLRTWALALKERVGFKRAAVALARKLAVIMHAMLKTGELFDPKAGVALPA

SEQ ID NO: 263099 - protein, 343 aa, unidentified
MRYYVGLDVGHKRTSICVIDAEGTLVWRGEVDTHPEMIVSAVSRWANDLALVGLETGSLTPWLARALGSAGLPVVVMDARRASDALKARPVKTDRTDARALAEMLQTGWFTEVFVKSEDSHRLKALLTARDQLVRNKRTLFGQIRGMLRPFGIRLAARQGTRQFDEAARTACRDDDLLYACVNALLEALAAIEVQIAALDKQARARGQTSKPCWHLMSVPCIGPITALAFAAAIEDPNRFRHSRDVGAYLGLTPRRYQSGDRDIAGAISKQGDAMARHYLYEAANCLLTTWGGRSALKNWGLKLAKRVGAKKARVAVARKLACLLLRLWKDGTHYDERQMQTA

SEQ ID NO: 263100 - protein, 340 aa, unidentified
MSEITTIGLDLAKHVFQVHGIDAQGTTVLRKRLRRGQVLAFFSHIPRCVVGLEACATGHYWARELRALGHEVRLMPAQYVKAYIKRNKHDAADAEAICEAVGRPTMRFVPVKTAEQQAMALLHRGREQLVRQRTMLVNALRAHLAEFGIVAARGLRNVGQLIAIVRDDADIRLPPVAQQVLQVLASQLEQIEAAVAALERQLLTWHKTNPVSQRLASIPGIGPIIATAIATTVADANEFRSGREFAAWLGLVPRQNSTGGKIRLGGITKRGNRYLRRLLINGASANLLRSKATKADPWVIGLRRRRPPLVVAVALANKTARIAWAVMLREKEYQPRAMAA

SEQ ID NO: 263101 - protein, 341 aa, unidentified
MEDYIGLDVSMKETAVSIRRGGQRVWRGKCVTDPAAIAALIRKRAPAVKRVVFETGPLSVWFYHALNARGLPAICIDARHAKAALDMAPNKTDAKDADGLAHLAEVGFFREVRVKGFDSMLTRTLVGARNQLVRMTTQLSNQIRGVMKTFGLLVPAGKGSKFERNVRHLLADRTELAAIVLPLLEAWRSLRTQAADLGTRLVATARQSPDCRLLMSIPGVGAVTATSFVAAIEDPANFRTSRSVGAWAGLTPRRYQSGEVDYDGHISRRGDRHLRWLLYEAAAIILTRVRTESSLRTWGLGLRERLGFKRAAVAVARKLAVIMHAMLKTGEVFEPKPGPAT

SEQ ID NO: 263102 - protein, 388 aa, unidentified
MPAAETPVAYLGIDVGKSSHSACALDAGGGVAFRAELANRPDDIDRLLERAGSGALVVVDQKRNIGALVLARAHAYGNPCAYLPGYAEKQARGMFPGIAKTDAIDAEVIARTALGVPRALRPAPEEPEGTASLRILSSQREFASSARTRAKNRLRATLLEADPALEGAVDPSSRWQVSMLAEFGGAAGCSAAGWRRFSNAARRAGAPAAGARRLWEALLASSRSGRRLPAGEDVAVRMLAREIASLDADIEELDSLVADSLAGDEVYECLLTVPGIGPKTAAALVTSIDISAFRGHDELASYCGVAPSDRRSGSSIRSTSPQHGGNRQLKNLLIFSCNSLIGTDNRFGRYYGECRARGMRHSKALKAVARKRLKVIYAIMRDAVPYAA

SEQ ID NO: 263103 - protein, 345 aa, unidentified
MKSTTIGIDLAKNVIQVHGVDERGKAVLKKQLKRNQVAAFFANLPPCLIGMEACGSAHHWARKLESFGHTVKLMAPQFVKPYVKTNKNDAADAEAICEAVARPSMRFVPIKNAEQQAVLALHRARQGFVKVRTAQANQIRGLLAEYGIVIPQGIGHIAKRLPEILENGENDLPGAFRELLDRLGDHLKELDRQVGELEVQIQIWHRENEASKKLAQIPGIGPITASALVASIGDAKSFENARQLAAWLGLVPRQNSSGGKQVLLGISKRGDTYLRTLLIHGARAVIRVAERKAGYADSWLARLMGRRNKNVAAVALANKNARTVWALLAHGRDYQADYEPERAAA

SEQ ID NO: 263104 - protein, 427 aa, unidentified
MQDKILRITTTTLIVGVDVAKEDHWCRITDCRGVDLIKPFRIYNNINGFEILTRNIIKCRDKNKLSKVIVGMEPSGHYWKALGWHLKLNENIDELVGVNPYHVKKSKELDDNSPTKSDKKDAQTIARLIRDGRYFDVYLPEDVYAELRVLTNTRSQYLKKKKSAKCALIAVLDEYFPEYEKTFKNLLGKTSTYILRHYPLPGDIVNLKLEQLANKLYNASNGKEGIKRAKTLHEAAEQSVGVREGTESIKIKIDCLLDEIEFMDKKLEKIEKMMEAKMADTELNEYFESMKGIGAVISAVFLGEIGDVSRFDNWKQVRRLAGLNLAEQSSGKHKGKTKITKRGRPMLRNILYLAGVTTVNHNSEMRQLYSYLLKRPSNQLKKNQALIAVGLKVMRIMFYMAKNKEKYDANKALGEARIKQIQELSAA

SEQ ID NO: 263105 - protein, 335 aa, unidentified
MWHVGIDLHRRTVVLSAVNESGQAFAPVTIPCWDEQRIVEVLKELTPFRAVIEATATYRWLYNLISPYGAFLLAHPLKLRAMIQRRSKTDKIDAMLLANLLRIDQVPLAYIPSARYQYLRDVVRYRVRLGRSFGHLKVAVQALLARHNIFAPYRDLSGVRGESWLLKQDFGSAENWVRDDLVARLRSVRLQIIAAEEKLEGIRNEYPEVEALLDIHGVGLYTALLIIGEIGEPGRFVDGGQVSAYAGLTARVNQSGGHCYYGHITKQGSAWLRWILVEAGMQAIRRDDKLANFYARVRKRSSAKIARVAVARKLAEICWKRLRAWHRTHSIVGRV

SEQ ID NO: 263106 - protein, 388 aa, unidentified
MIYVGIDIAKLNHFASAISSGGEILIEPFKFTNDNDGFQLLLSKLDPLDKDSIIIGLESTAHYGDNLVRYLVACNYKVCVLNPIKTSTMRKNNIRKTKTDKVDTYIICKTLMMQESLRFVTFYDLDLMDLKALGRFRQKTIKQRTRLKIQLTSYVDEIFPELQYFFKSGLHQKSVYALLKEAPTPEAIASMHMTHLAHLLKANSHGHFDKEMAQQLRVLAQKSVGANDSALSIQVTHSIRQIELLDSQLERVEAEMTDIMKFNDSVIMTIPGIGYINGGMILGEIGDIHRFSNPNKLLAYAGLDPSVYQSGNYQAKKTRMSKRGSKVLRYALVNAAHNAVKNNATFKAYYDAKMAEGRTHYNALGHCAGKLVRVIWKMLTDEVEFNLE

SEQ ID NO: 263107 - protein, 318 aa, unidentified
MNSEAIYLGIDVSKENLDLAINPKKQIRRFHNTAIGIGKIVDYIAETGPVLVVMEATGGFEIPVAAALGEAGIPTAIVNPRQVRDFARSTGKLAKTDAIDAQILADFAATVHPEPRPLADLQAQELKDILARRRQLNEMITAEKNRVLRASGALRDHIRAHIAWMEKEMLDMDSALRHFIEDSPMWREKDNLLQSVPGIGPVLSSTLVAELPELGRLNRKQIAALVGVAPFNRDSGKMRGKRSVWGGRASVRAALYMGALVATRCNPVIKAFYTRLIAAGKAKKAAITACMRKLITILNTMVKHNTPWHYALEPAVIS

SEQ ID NO: 263108 - protein, 422 aa, unidentified
MFSESQDDEQIIERVAALDIGKAEVVCCVRLPSPGPGKRRVQEVTTHTTMTRSLTELANRLVGLGVERVVMEATSDYWRPPFYLFEAHGLQPWLVNAKDVKHLPGRPKTDVLDAVWLCKVAERQILRPSFVPPHEIRRLRDLTRYRVDLVGARGAEKNRVEKLLEDACIKLSVVASDIFGVSGRAMLTAMIAGERDPKVLADMARSRMRPKIGQLEEAFTGYFDDHHRFLLARMLGRIDAIDADIDALDAEIEAYLAPFGEAATRLDEIPGIGPVAAAIIIAEIGVDMTRFPTPGHLASWAKFAPGIRASAGKNKGNGSTGHGNRYLARVLGEAAVAASRTDTFLGARSRRIARRRGKKKAIVAVGRSLLVAIWHVLSHPETRFVDLGADHFDRHVDTATKKRNHIRQLEALGYRVTVEPAA

SEQ ID NO: 263109 - protein, 354 aa, unidentified
MEDTRGNIKQKKGGYHVSYFVGSDLHSRNTILGLLDEEGNRIYKVKVANFLPLILNELEAFRGGIEGVVVESTFNWYWLVDGLVEASYKVHLANPSAIKQYEGLKHRDDYHEAFHLANLLRLGILPEGHIYPKKERAIRDLLRKRLMLVRQRTSHILSFQGLYNRQTGCWLGGNDVKKLGEDDIDELFDEDYVALSAKANISTMRFLKREICEIERVVLSAMKLLPEFQKLKTVTGVGDILGLTISLETGNIRRFAKVGNYSSYCRCVSSQRLSNEKKKGEGNRKNGNKYLAWAFVEAANYAKRYCSYARRFHQRKTAQTNKIVAIKALAHKLARASYFVMRDRVDYDPMKAFG

SEQ ID NO: 263110 - protein, 342 aa, unidentified
MYYIGLDVHKKTISYCVKDAAGHVHREGKIGSTRRELDAWIGTLPQPRTIAMEATIFTGWIYDHLAPHASAIKVAHPLMLRAIAAAKKKNDTIDASKIADCLRCDFLPECHMASTEIRNRRRVLRYRHLLVRQMVQTKNRVSGLLLETGVEHNKSRLHKVGYFRRLLATNNDIDESIRPLLRISRENIERCQKTEYALVSSLERDPLLKERIRRLRTVPGVGPITALNWALEMGDISRFRSIKQAVSYCGLCGDEHSSADKTMRMPLSKQRNKHIQHVLVEAAKLAPRLSAELALIHQKAMEKGNRNRATLAVARKMVAWLLAVDRENREFIPAEQREIRAA

SEQ ID NO: 263111 - protein, 339 aa, unidentified
MELYAGLDLHSRNTYIGIMDNAFNRVFKKRVPNHLELILQTLDPFRDQIKGFVVESTYNWYWLVDGLMDAGYSYAHLANPSAIKQYEGLKHSDDQHDAFFLAQLLILGILPQGYIYPKNDRPVRDLARKRMFLVQHKTAHILSLQSFLQRCCAIKVRANDMRHLTVKELEMWLKEEHLVLSAQTNLDSINFLKQKIKQLEKAIIQKVKLDKAFEYLLTVPGIGNILAMTIMLEVGDINRFPKVGNFTSYCRCVPSRRLSDGKSKGQGNRKNGNRYLSWAFTEAAQLGRRHNERFRKYYNRKVAQANTSLATKALGNKLARICYYIMRDQVPFREELFCH

SEQ ID NO: 263112 - protein, 343 aa, unidentified
MGEVVTIGLDIAKSVFQIHGVDGDGAVVIRKRVSRGKVLEFFADLSPCLVGIEACPTAHHWSRELQSLGHTVKLMPPSYVKAYLKRAKNDANDAAAICEAVTRPSMRFVATKSKEQQGALMLHRTRQLFVRQRTMLSNAIRGQLAEFGIIAPVGRLGFARLLEMMDGPEELGVPKTAWVCLMGLAEQYQRIQGEIGKLEQFIQAWHRSSELSRRLEEIPGVGPIVATALVGTITDPHAFASGRHMAAWIGLVPQQNSTGGKDRLGGITKQGNRYLRWLLVAGAMAVIRYAQKHGTAKRPWLARLIERKPTKVAAVALANKIARIAWVIMARGERYRGPAPLAA

SEQ ID NO: 263113 - protein, 379 aa, unidentified
MDRIQAAGTDGIAGVGVLHVALELSKAKWVLASSAGGRKTRRKSVEAGDLAGFLDEVVKAKRAMKLPVTARVVSCYEAGRDGYWIHRWLQSQGIANRVVDPSSLQVSKRARQAKTDRLDAQMLVEQLVLLESGQGRMREVRVPTSEQEDQRRLHREMERLQKERTSHGNRIRGLLAGVGVDLRPGLDLPECLLRARLWDGKEIPAGLRQELEREQARWLLATQQLQELEGLRDQQVARPRDVAEAKAHKLTRLRGVGPASAWLLTREMFGWRTFSNRREVGASAGLTGTPYDSGESRREQGIGKAGNRRVRRVMIELAWGWLRWQPLSELSLWFARRFGEAGKRGRRVGAVAVARRLLIALWRWVEQDVVPEGALLKGA

SEQ ID NO: 263114 - protein, 338 aa, unidentified
MIVIGVDVHKHSLTAVAVDELGRTLAEHSSASEGGGILAWARSLGEERLWAVEDCRHVSRGLEQLLLEGGEQLVRVPPRLTAPERRHGRSRGKSDSIDALAVARAALREPRLQGPRPQEPQLRELKLLVDHRDDLVDERRRSQQRLRWHLHELDPSLQVPLGALDRGVWIERLGRQLARREQTTQVRIARDLLGRCRTLTRSIGELERQLQERTQTLAPRLLELAGCGPLSAAKLLCEIGPIDRFASDAQLARHAGVAPLEASSGKRRRHRLDRGGNRQLNCALHRIAVTQGRTHAPARAYLERKQNEGKSRREAIRCLKRQLARTVFTTLKSESALT

SEQ ID NO: 263115 - protein, 473 aa, unidentified
MARKKGKDPAGIGGLELTGEPVGVSDEPAEVIARAAAIDVAKGSGMVCTRVPHESRPRRRVQRIWQVSARYAEVAALMAELARLGIRRLVLESTSDYWRIWYYLAEAAGLEVWLVNARDAKHLPGRPKTGKLDCVWLCKLNERGMLRRSFVPPEAVRDLRALTRLRSRLAQDQARHQSRIEKILEDALLKISSVISDLMGASGRRLLAALVAGERAPGKLAALGGRRLKASPAQLEEALAGRFRDIHALEIGMLLELIDDITAKMARLDAEITARLARVPGIAPASAGCGEIGGGHAPSCPRAGAPVLSVIERLDELTGIGIGAAQVIVAELGTDKTTFPAPGHAAAWAKLASRTIQSGSTSKDGRTGKGNPYLRAALGRAAMTAAKTDTYLGERYRRIARRRGKQKAIVAVSRTICEIAWMIITDPSVRFSELGPDYYARLDAGRQTRNKIRELERLNPGMKVTLTPAATAA

SEQ ID NO: 263116 - protein, 366 aa, unidentified
MIVIGADTHKGSHALAAVDEGTGRIRGSRQIKACESGHMAAVRWARGLDEERVWALEDCRHVSRRLEQALVAAGERVVRVPPQRMGASRKGEREPGKSDEIDALAVAHAVVKDGVEQFPVAYLNEQAMEIRLLLDHRGDLVSERTRTVNRLRWHLLELCPELEQSLKRGALNQARVLERVERRLRKLPALARVRVARDQVSHLRTLNREIDALQCALVELVKVHRPQLLSELGCGALTAAILIGHTAGVKRFRTDSSFALLTGTAPIPCSSGQRTQHRLNRGGDRQLNHALHIIAITRARRDPATKEYLARKEAEGKTKKGALRSLKRHLARRFYHLLAEPPADRQQAAVDPNSNGVAPSPMVCVA

SEQ ID NO: 263117 - protein, 368 aa, unidentified
MKKETITSDGISGESLVNDVNRVLNLGLDMHYRQVTVAMQEDGGRIKAAGKMGHLDFLNWVPKKLEEGWEIYSCYEAGASGYWLHRELEKLGVKNLVVVPKAMGQGGKKQKTDQRDAGELCDSLDRYLRGQKKALSEVAVPTEEQEEKRALIRYHRQIMADRGRCEARGKGLLCAQGIEVRSRWWQPKGWQELNSDPRLKDWMKEQLVGWRNKILSTDEEQSALRERIAALAPAILPKGVGAYSAAVLHYELRGFEHFKNRRQVGSITGLCPGVHLSDGRGKEGSINRCGIGIVRWTLVEMVWRLMIWQPQYPPVRRLAAGLVKSKRARKRLVVQAARRLAIDLWRLSTGQTTPEKLGLVMQSNATGN

SEQ ID NO: 263118 - protein, 287 aa, unidentified
MNKNSNPAKTNSQSKEVFAFYIGIDLGDKYSDVCVFDAGGEVSKQFRLAMKEADIRKHFSSIGRSRVAMEAGGQSRWVAEVIESCGHEVYVSNTRKVPYIHDSDDKDDAGDAHKLAELVHFKPRLLHPIQHRSKQAQADLSWIRARQALVDVRTQLINTVRGISKSFGERLGRCSTEAFTAKMAEKIPGAIGGAVAPLLELIDQINERIRYYDEMEEHIARERYPKYGLLEQVNGVGVHTALSYMLTIGDPERFEKSRAVGCFLGMRPRKRDSGSSQPAIGNHQSRG

SEQ ID NO: 263119 - protein, 364 aa, unidentified
MQKVTTHVGLDVHSERIVIATLTGQTREPTILDIPNDPKVIRRTFKRLAADAYELRCCYEAGPCGFELFRQLTSMGVACEVIAPSLIPVKAGDRIKTDRRDASKLARLYRAGELTTITVPTSDQEAVRDLVRAREDVRKDLTAARHRLGKFLIRHGRIFSEGHNWTDRYWIWLRKQQFEREGERLTFEHYAREVQHLQQRRADLDLEIERVARTEPYAAAVGKLASLRGISTLSAMALLAEINDFRRFESPRQLMAFVGLVPSEYSSGGKETRGKITKTGNSHARRILVEAAWGYRHRPSFGPRVKAVLSAQPPEVVEYATKAQHRLHRRYCRLVGKGKKSQLAATAVARELCGFVWGLMTMAA

SEQ ID NO: 263120 - protein, 311 aa, unidentified
MEANGYIGIDVAKEWLDIAARPNGDAWRARNDEAGITELTSQLVERAPRLVVLEATGGLETALAAALTAAALPFVIVNPRQVRDFARATGQLAKTDAIDARVLAQFGEAVGPEPRPLPEAATRELAALMARRRQVVAMLTAEKNRLRSAARPVRRAIQQHIHWLERRLAGLDGDLGKTIRQHAQWQDRDRVLRSTPGIGPVSSCTLLANLPELGRLNRKEIAALVGVAPLNRDSGSLRGRRTIWGGRSHVRSALYMATLVGVRCNPVLRTFYERLLAAGVIVGDDRRLRVTRPLLGDEVAREVLALAPIEC

SEQ ID NO: 263121 - protein, 341 aa, unidentified
MDKELYFGVDVSKKTLDLAYYDGEAIDWKNAHIKVSNDDAGFKKIGSWIAKVGKDFGIFLFCMEYTGLYNQNFRLWLESQKYIYGMVEPRKMHHFEPDLDDDQRSLDRIKTDELDAFRIAIYCEQNHKKILRNPSKLPSPVYFKLKRLLAERKQNTKQSTLYKQQLHDICAYDTDLSVERKKLQLKNMQENQKAIDREIDSYMNEDASISKNYDLLTSIPGIGRIIALETIVLTENFTAISNSRKYACYIGIAPFKKESGTSVRKRTSVSKKGFSEAKADLSIAVLSAIKNNPSIRDYWIRKRKEKCGGIVLNAVKFKLVLRMFAVIKRGTPYVETDAYKN

SEQ ID NO: 263122 - protein, 297 aa, unidentified
MRDSRTLYVGLDVHKESIAVAYAREARDAEVVCWGRLGTRQRDSDKRIRTLTSKAQQLVFVYEAGPCGYGLSRDLSRKHLRCGVVAPSLVPTKAGDRGKTDRRDATQLARLLRSGDLTAVDVPTGADAAIRDLARARAEAIRDRQAAKNRLTAFLLRQDLRYEGRATWGPAHRRWLAAVVCPTPAQPIVFQEDGRAVAAHDARRQRLETARREPVQGWRLAPVVQALQARRGGQCTVAVTRVAERGDRTRFEHPRPLMSDLGLTPSEYSRGERRRPGTMTTAGHTGARRALIAGAWA

SEQ ID NO: 263123 - protein, 343 aa, unidentified
MKLHVLGIDLGKTVFHLVGLDSTGKVVIRKKCSRTQLLAFTANLQVQLIGMESCSGSHFLGRALREQGHEVRLMPAQYVKPYVQTNKSDFLDAEAIAEAVQRPRMRFVPIKTEEQLDLQALHRVRERWVMRRTAVVNQIRSLLLERGLTLPKGRSYVDRQLPRILEDGELRLSGCFRILLAQLKLELEQLSARIEEMDRVIQKTAKENEDCQRLTEIPGVGPVTATALIAAVGNASAFEKGRNLAAWMGIVPREYSTGGKQKLLGISKRGNKYLRTLFIQGARSVVQQRHKQSPGLSHWLEQLLGRTHQNVVTVALANKLVRMAWAVLCKNERYRAPVLAVTT

SEQ ID NO: 263124 - protein, 366 aa, unidentified
MENNVTHLGLDVHKDSIAVAVLRPGELEPDQRVIANTPDALRKLINRVSDRSSLVACYEAGPTGYGTQRLLASLNVACDVIAPSLVPKRSGERVKTDRLDARNLARLHRAGELTAIRVPTTAEEALRDLVRLREDLKDDRRRMQHRIKSFLLRHDRRCPDHRRGWSRRYRLWVSSQRFEDANTQLAFDHLLSALNTRTVHLDNIDRQLAEAAARPPLGDAVARLRTFRGIDTLSALTLASEVCDFRRFPSARSFMGFTGLVPSEHSSGLRERRGSITKTGNAHLRRVLVEAAWSYRHKPFVRPAMAERFAGQPPDVVAYSWQAQVRLHERFRSVAARKNRNVAAVAVARELTGFVWGLMNERTDAV

SEQ ID NO: 263125 - protein, 353 aa, unidentified
MNNMHYVGLDIHKKTISYCVRQSDGTMLQESTIAATRPALDTWMRQLPQPWTAGMEATMFTGWIYDHLVQSGATVKVAHSAMLKAIAAGKKKNDQVDARKIADLLRCDYFPECHMAPREIRDRRRVLRYRNLLVRQAVRMKNKVSGLLMEVGVPYNQQKVHGKKYFAQLLHEQRKEMPPSLPELLQLSRSTIESLTGMERQLLRALEQDDLLAARVERLATIPGVGRVLSLTWALEMGEISRFRSVKNAVSYCGLCGAEKNSGGKTERTSLSKQRNKHLQSMLIEAAKLAPRWNAELALVYEREKQRESQPGHARSGAEAGCLPDGGGSEREGLQQNAGQGWREASCLIGYKD

SEQ ID NO: 263126 - protein, 411 aa, unidentified
MEVIVERAAALDVHKAQVTACVRVPAGRERVQEVVQFQTTVRGLLTLRDWLQAHRVTQVAMEASGVYWKPVWAVLEDDFELLLVNARHVKQVPGRKTDVSDAAWLCQLAEAGLLRASFVPPKPIRALRQLTRYRKAQVKERQREAQRLHKALEDTGIKLDCVATDILGVSGRAMLDALVQGTTDPELLAELARGKLRKKIPALKEALEGRFEPLHALLVGSILAHLDFLDEQIERLSEAIEERLRPFKPAVELLRSLDGIETRTAQNILAEIGLDMSVFPSAAHLASWAGQCPGNDQSAGKRRSGRSRKGSKWLNDALKDAAMAAIRTNDSYLQAQYQRLRPRIGHGRALGAVKHSIICACWHMLTTGELYRDLGGDYFRKRDPERQTRRLVAQLERLGHKVTLEALPEAA

SEQ ID NO: 263127 - protein, 318 aa, unidentified
MKCKNNQNEINVGVDTGKQQLDIHIRPLDIFFTVSNSEQGIKKAISEIKKHKPTRIIIEATGRLEHAFIMACSNASLPFVVANPAHIKRFAGAIGRLAKTDKLDAQLIAHYGEAIKPPLSQLKPAVMRKMSDLLSRRRQLIQLQTMEKNRLTIMPKELVSLINPILTAIKKQLEKVDQKLLILIESCEEYKTKNAIIQSMPGVGNVVAISLLSNMPELGYITNKEAAALVGVAPINRESGLYQGQRQIHGGRHQIRTVMFMAMMSAMQCNPVFKATYQRLVAAGKPKKVAIVACVRKMVVILNSMVRDGTHWDPDFAN

SEQ ID NO: 263128 - protein, 308 aa, unidentified
MHYLYYVGLDVSKETFDASLVAFEDANEMAHRKFANSRKGICSCLHWVEKRHGIRLDDVIFCAEDMGSYISEMAVCASDRTLNFNFSLISPLVIKYSMGIARGKTDRVDARRIAEYAITHYRKIALYLPAEKELCQLRTWLILRAHLAKQRVAKLVLLEKLDYKEKFADVSIQRSMLQEEIAYAETHMKTIEREMKELIAADSNICRNYKLLTSIKGVGPITAIVMLCSTLNFTKITDHRKFACYCGLAPFEHSSGTSVRGGCHTSSMANRDIKVQLNRRALIAIRCDPQLKAFTNAKWLKVNINSAS

SEQ ID NO: 263129 - protein, 359 aa, unidentified
MNDGSSNHPRTTAGLDLGDKYSYLCLIDADSGEAIEEGRLRTTPEALRRRFASEQQPLRVAIEAGTHSPWVSRLLEECGHEVLVANSRKLRLIYANRRKTDEADAENLARLARLDPKLLYPLKHRGEEGQAHMALIRSREALVSSRTQLVNHVRGTVKSFGARLPKCPARSFHKRAQEHIPEPLLPALGPILETIGSLTERIREYDRKLEAISEERYPETELLRQVEGVGPLTALTFVLTVEDAHRFEKSRSVGAYLGLVPARNQSGDRDPQKRISKEGDEMLRRLLVGSAHYVLGPFGSDSDLRRHGEKIASLGGKNAKKRAAVAVARKLAVLLHSLWVSGEVYEPLRNTHRVGGRAA

SEQ ID NO: 263130 - protein, 362 aa, unidentified
MRIIGCDLHARQQTVAMLDTTTGEVLSMTLKHEGNNVREFYSSLPRPVRVGIEATGSMQWFVNLMEELGIECQVGHPAQIRAAEPRKQKHDRRDADLILKLLVENRFPAIWLPSQELQDLRALLRHRHQWVRMRTRIQNALQSIALANGLRRGTALWSQDGQHTIAALPLAPHTAYRRSELQAMYAKFEAEIEKLNQRVEEQACGRVGARLLMTHPGVGPVTALATEVFLGDPARFADSKAVASYVGMIPREYSSGARQRLGGLSKQGNPLLRFLWGEAGAHAVRRDPELGRFYRRKLNQKGFGKASVAVARKLGIRLWIMLRDQIEYNEFCRRGQKQQNGSEACAGMPETRHGAKCHRPVD

SEQ ID NO: 263131 - protein, 377 aa, unidentified
MSKIRFIGLDVHAETIAVAIAEPGGEVRSVGIIPNRLESIRKLLGKLGSVQHLKTCYEAGPTGYVLYWQLTALGVACEVVAPTLVPTKAGDRVKTDRRDAEKLARCFRAGELTAVWVPDAAHEALRDLVRAREAAKKDQLRARHRLGKFLLRRGRRPTDAGKAWTKKYLEWIKTHVRFDQPALEATLAHYLQEVDHAAEQILKLEKAIDEAVAQASPEIRSVIEALQALRGVAQMAAATIVCELGSLSRFQSPRQLMGYSGLVSREHSSGNRIQRGAITKTGNAHLRRVLVEAAWAYQHRPNVTGFLLRRQKSLALSDEVKQMAWKAQYRLHKRYQAFALRGKNKNQIVTALGRELLGFVWAIAVHTEAQLKLAKAA

SEQ ID NO: 263132 - protein, 389 aa, unidentified
MKIFVGIDIAKLNHFAAAISSDGEILLEPFKFTNDADGFQLLVSKLESFDKNSIIIGLESTAHYGDNLVRYLVAEFYQVCVLNPIKTCQMRKNNVRKTKTDKVDTFVIAKTLMMQDDLRFITFFDLDMMDLKALGRFRQKTIKQRTRLKIQLTTYVDQVFPEIQYFFKSGLHQNAVYALLKEAPSPKEIASMHMTHLANLLKVNSHGHFTKEQAKELRVLAQKSVGANDSAISIQITQTIQQIELLDSQLQKIEAEMTDIMKFNDSVIMTIPGIGYINGGMILGEIGDIHRFSNPNKLLAFAGLDPSVYQSGNFQAKTTRMSKRGSRVLRYALVNAAWNVVRNNATFKAYYDAKRAEGRSHYNALGHCAGKLVRVIWKMLTDEVEFNLE

SEQ ID NO: 263133 - protein, 414 aa, unidentified
MIVAEEPTGARVCGGVDWAKDDHAVCIVGTEGQALQRFMATHDRSGLKDMVRRLLRAGVEEVGIERPDGPVVDALLAAGLTVLVIPPAQVKNLRSRYGSAGNKDDRFDAYVLADVVRTDRRRLRPLERDTVATVALRTTVRARRDMVVHRVATANQLRSHLQIVFPGAVGLFDAIDSDVSLRFLERFSTQGQADWLSPKRLGSWLASIGYSGGTDPEVIYARITAAPRGTTGTDAATHAVTTQSYIAVLRTLNTQIRTLAASIAEQLDVHPDAKIFTSLPRSGSVRAARLLAEIGDARGRFPTASSLACLAGVAPSTRQSGKVKAVTFRWGADKELRDALCDFAGDSRHSNPWAADLYAKALARKCDHQHAVRILARAWVNVIWRCWQDHTVYNPADHGALQRILNQDQQPAAA

SEQ ID NO: 263134 - protein, 393 aa, unidentified
MICVGIDVAKDKYDCFILSSEGEVLADVFTIPNNAEGFDTLLQTIRRCARPEDKIKVGLEATGHYSYNILGFLLNEGLDTYVINPLHTNLYRKSLSLRKTKTDRVDARTIAAMLMSDVDLKSYTDTAYHNEELKSLTSNRFDKVRERAKLKQSVSRLVTILFPELEKLVSTLHMASVYALLSEFPGAKQVSEAHLTHLKAVLYDASKGRYGSDMATTLRDAARCSVGSVMPAKSLELRHTIRLIHELDAEIEDIEAAIQSMMGEIQSPITTIPGMGVRTGAMILAEIGDFSRFDSPDKILAYAGMSPSTYQSGQLSLSGTYSHMEKRGSRYLRYALYNATKYVCLWNPTFAAYLAKKRAEGKHYNVALSHAIKKLVRLIYALEKSKRPYSTAA

SEQ ID NO: 263135 - protein, 351 aa, unidentified
MIVLGADTHKRSHTIAGVGATTGELLGERTVQVGRAGFGALLAWARALGGERVWALEDCRHVSGSLERFLIERGERVLRIPTNLMAETRKSARQRGKSDGIDAINVARAALREGLATFPAAHLDGPELDLRLLVDHRERLVNHRVELNNTLQWHLHDLWPELELPGGALFSRKWSTRIARRLTRAEQTMRVRIARDELRRLRELTDTIKKLAREITQLVEQIAPQLLAEPGFGPLIAAKLIGEIAGAQRFATDAKLARAAGAAPIPASSGNTRRQRLDRGGNRQINAALHRVIVTRARCHQPTRDYIERRRQEGKTTREAIRCLKRYLARQVWNLLRAPTPAMALTTPSIS

SEQ ID NO: 263136 - protein, 443 aa, unidentified
MSFDRLKRPRRRKRLPGHKLKPSWATLFVQNSKPHLSMKPTYFLGIDAAKHKMRVALSNRSEHVLFEQDLPAQATGLRQLLAAIKRQVNDPQQLLVLIEATGLLHLNWSAALTQAGYAVAVINPLIARRLYTLQNSIRDNKSDPIDARGLCTIGLLHGEKLLVHYRFSLRPEQFTLQRAQSVRKALRSALTNLKKTYQSLMDLSFPELGGLLQLDGVGIRQLLIQAPTPAAIAGKRLSTLEKNWMVRPKAAALKALAADSMADPDLAAASGPALVALLQSVAAMEARLHALDQQIAKLACTSVDPQTKALIETIPGFGPVNVAKILAWLPTEILHSGSNRKVAARLQAFMGNDPRLRQSGQWKGHTKMSKRGVEMLRTAFFQSAFSAAHNDPELRAYYQCKRAQGKTHEVALSHLMRILTRRLVAVLRSGKPYQSHYNLKNAA

SEQ ID NO: 263137 - protein, 345 aa, unidentified
MGEVSTIGLDIAKSVFQIHGVDRDGEVAIRKRVSRAKLLEFFAGLPPCVIGIEACPTAHHWSRKLQALGHTVRLMPPSYVKAYLKRSKNDANDAAAICEAVTRPSMRFVPIKSEQQQSGLMLHRSRQLLVRQRTMLSNAIRGHMAELGIISAKKGRNGTAELLKIIATENDDCIPAAARFSLDVLARQYVAIAAEIGVIEKRIHAWHRSCAESRRLEEIPGIGPIVATALVAEVGDWKAFSSGRNLAAWIGLVPKQHSTGGKERLGGISKQGNRYLRWLLVAGAMAVIRYARQHGTKRLWLARIMNRRPIKVAAVALANKIARIAWAMMVRGERFKEPRLLPAVT

SEQ ID NO: 263138 - protein, 405 aa, unidentified
MTVMIGVDPHKGSHTAVVIGPGEEPLGELRVESSPGQAEDLLKWAAQWPERTWAIEGAAGLGRLLAQQLVAAGELVLDVQPKLAARVRLLQAGGTGKSDPHDAQSVAVAALRSRACRQVAAEDHTVVLKIWARRHRDLARARNQVACRLHAVLCELVPGGVRKQITAGQAASVLEGVTLSGPIGAARRELAAQFLEDLRRIDGQLREVNKKLAAAVRASGTTVTEVFGVGPVNAGTIIGDVIDVNRFPTRDHFAAYNGTAPTEVSSGGRKVYRLSLRGNRRVNHAIHMAAVTQIRHSHSGGRAYYEKKIAEGKTHKEALRCLKRKISDAIYARLRADARMAAKPAGEGPEGQSGNGSGSSAAGSHPERRLFGQATPGPATTLRPPARAARQQPRTRRLKDLEKTL

SEQ ID NO: 263139 - protein, 336 aa, unidentified
MMMTDAEKAATEVILGVDTHLDVHVAVALDRLGRRLGELSVPTTAKGYESLVRWAEGLGTVRCAGVEGTSSYGAAITRYLRTAAIRVAEVERPKRRHLHRNSKSDSRDAESAARAVLAGETAGEPKSADGRVEMIRVLRTARRSAVKSRTQAANQLRNLVVTAPDGLRHRLRELSTKELVAVVARFRLKDAPNNVWEATRFALRSVARRYEVLSEEIAQLDAHLDRLVLGTAPELVSLPGIGTDHAATLLIVAGDNPKRLRSEASFASLCGVSPVQASSGMVVRHRLNRGGNRDANRALYMICLARMRRDRRTKEYIARRTAEGKSRREIIRCLKR

SEQ ID NO: 263140 - protein, 343 aa, unidentified
MQVTTLGLDLAKRVFQVHGVDAAGKVVIRRRLQRSEMAAFFADLPACLVGIEACATAHHWARLIGASGHQVRLIPPSYVKPYVRRSKTDAADAEAICEAVGRPSMRFVPVKSAHQQAALLHHRARDLLVRQRTMLINAIRGHLGEFGIIAPAGRHRIADLVNLLQGADDAEVPALAREALQSLFAELSALEARIKAVEAMIMREHRSNVVSRRLATIPGIGPITASALAVTIADPSAFRSGRELAAWIGLVPRQHSSGGKQKMGRVSKQGDRYLRRLLTVGATAVMRRLPGKTDGLSLWVRALLDRRPFRLASLALANKMARIAWAVMVRPEPYRASAMTVTA

SEQ ID NO: 263141 - protein, 407 aa, unidentified
MFRVCAGIDVHKKMLAVCLLKPGPGDEVGREVRTFGTTTRQLLGLLDWLLTERCESVAMESTGVYWKPVFNIVESSVKVVLANAQHVKALPGRKTDVQDCEWLAELHLHGLIRASFIPSPEVRELRDLVRTRTKLIGERARHANRIQKVLEDANIKLGSVASDVLGVSGRAMLDRLVAGETDPQALAEEARGRMRSKRPALREALEGRIRPHHRLLLRTHLGLMDSLDAAMSALTEEIEERMRPFVEIRDRLDAVTGIGPDVATVYLSEMGADASPWPTYRHAASWAGLCPGHHESAGKRKSGRTRHGNRWIKQAFVQAAWSAQRANGTYMQAHFRRIQVRRGPRKAAVAVAHSLFVRCFLLVARGSQYQELGGNYFDERRKERVTQRLVRRLEELGYKVSLNTAAA

SEQ ID NO: 263142 - protein, 370 aa, unidentified
MNKYILIGCDIHEKTLVLRWSLRGRDVQEATVANAPEDRAAMVQMFQTLCRKHRCAGIHFAYEASGLGFGLYDQLTDAGMKCYVLAPSAIPRSPKHASSKSDGRDAARLLEILSAHVVAGNRIPDIWVPDKQTRSDRDLLRLRQDLGHAVAAIKSRIKSLLRLHDIPIPEGHRLWGCKHMAWLKAISRKSSPRSPLLGSSRLTLASLLRRLESTQKEIRTLDGHIKELAETPRYATLAKELIRLNGVGLMTAMVFLTEIGDPRRFRNRKQLAGFLGIVPRSHESGKMDDCKGHITRQGPGRVRGILCQATWAAVRTDAYLKAVHRRIAKRNPRKRKIAIVAIMRRLALRMWHVMQEHWPEETPAAEPAAS

SEQ ID NO: 263143 - protein, 386 aa, unidentified
MLPRSDFHPGLRRPLAAGALSVVTERKSVAVTIVAHTRPYVVGVDTHARSHSFAILVAATGELLATEQFPATTSGLTRAIAWAGRRTGGDLATLWVIEGVATYGARLAAAVGQAGYEVVEAARMNARAHRGTGKSDPLDAHRIAAAVLPLEPVNLRHPRRDDGVRAALRTLITAREHMTTERTATINALIALVRVVDLGVDARRPLTAAQVNQILRWRARTEDLATGIARAEAVRLAKRVSDLDEDLRDNHNQLTAVIRASKAATLLDKTGIGPVTVAVVLAAWSHAGRVRSEAAFAALAGVNPIPASSGNTVRHRLNRGGDRRLNRALHMAVITRMTHDPATRAYVERRRAEGRTTKEIRRCLKRYLARQLYRTLNALHTTPETT

SEQ ID NO: 263144 - protein, 388 aa, unidentified
MIYVGIDIAKLNHFAAAVSSDGEILIEPFKFTNDYDGFYLLLSKLAPLDQNSIIIGLESTAHYGDNLVRFLISKDFKVCVLNPIQTSFMRKNNVRKTKTDKVDTFVIAKTLMMQDSLRFLTLEDLDYLELKELGRFRQKLVKQRTRLKIQLTSYVDQVFPELQYFFKSGLHQHSVYALLKEAPTPNAIASMHMTHLAHILEVASHGHFGKDKARDLRVLAQKSVGVNDSSLSIQITHTIEQIELLDSQLFHTELEMANLVTCLHSVIMTIPGIGFVNGGLILGEIGDIHRFSEPKKLLAFAGLDPSVHQSGNFQAKKTRMSKRGSRVLRYALMNAAHNVVKNNTTFKDYYDSKKAEGRSHYNALGHCAGKLVRVIWKMLTDNVEFNLE

SEQ ID NO: 263145 - protein, 349 aa, unidentified
MTMVCGLDLHRRQITFDALEVDSGEEWRGKIWQPDRDRFGRWLRDDMTRRANGGLVALAVEGCTGWRYVVEEIEAVGFEAHLAEPADTQAARGRKHRAKTDRSDARLLRDLLAAGELPESWIPPEGVLEWRERVRLYVSLVNQRTVWCQRIHAELYQHGVAVPEGAIRTVKTRALVGDESLVLSPAARQRITVGYRMIDATDAEAQPLKKDLQRFGARQPACRALVDAQYGIGGLIAVAVWSELGDCRRFARSQQAVRHTGLDVTVDSSDRRRAGGFLSRQGPETLRWALYEAAKNSSHLRSPDHDYYAKVKARHDGKIAAISVARQLARRCYHVLRNVDPDLVYAMPA

SEQ ID NO: 263146 - protein, 422 aa, unidentified
MLESTQDNEEIIERIAALDIGKAELVCCVRVPGQGPGGRRRQEVSAHSTMTRSLLVMADRLHELGVTRVVMESTSDYWKPAFYLLEAAGFDTWLVNAKDVKHLPGRPKTDRLDAVWLCKVAERQMIRPSFVPPAPIRELRDLTRYRVDLISTRTAERNRVEKLLEDAQIKLSVVASDIFGLSGRDMMAALIAGQRDPKALAQMARSRLRTKITQLEEAFVGRFTDHHGFLLAKMLARVDAITADIADVDQRIEEQIGPFIDAGRRLDEIPGVGPATAHVIISEIGVDMSRFPTPAHLASWARFAPGVKESAGKKKGAGFTGHGNPYLARVLGEAAVAAGKTDTFLGERYRRIARRRGNRRAIVAVGRSILTVVWHLLADPTTRFTDLGSAFYDTRVNPERRKRNHVRQLEALGYTVTLASAA

SEQ ID NO: 263147 - protein, 348 aa, unidentified
MAHKTTTQMTTIGIDIGKNTFHVIGLDGDGHIVLRRKLSRSQVVARFANLPPCLVGMEACVGAHHLSRQLQALGHDARLMPAQYVKPFLKGQKNDFRDAEAIAEAVQRPRMPFVPTKSVEQLDLQALHRVRARLVRHRTAIINQIRALLLERGIAVRQGARFLHAALPEILSQNSELLSPRMLGVITDLSGDLRHLNKRLEAVTSEIEGLANSDDGCQRMMTVPGIGPVISTATVSAVGNGAAFRKGRDFAAWIGLVPRQLSTGGETILGRISKRGNTYLRTLFIRAARVILLRPENWSKHGFGPWLHAASRRMHRNVLAVALANKLARIAWSVLAGERHYEARCVTA

SEQ ID NO: 263148 - protein, 382 aa, unidentified
MSQTASRWDSTSWGSGLFMALELGWSKWRLAFGSAMDQKAWQMTIAARDVMGLTRAIGKARQRLGLPSDCPVFSCYEAGRDGFWIHRLLLKMQIHNIVVDSSSIEVARRARRAKTDRLDAAKLLSMLQRHHAGEKKLWSIVHVPTPEQEDGRHLQRQIRTLKKEQTRQLNRIRGLLANQGVAVRANRGGLLEPLDSIRIWDGSPLPVGLRRRLEVEIARHAFIHRQLLDLELERDARIRQSQDRAAQIARHLMRLRGIAQVGAETYSREFSWRGFTNRRQVGSLIGLTPTPHQSGDSSREQGISHAGNRHMRGIAIDLAWLWLRQQPHSELTLWFNRRFAHASPRLRKIGIVALARKLTIALWRYADFAEIPKGALLKSDAA

SEQ ID NO: 263149 - protein, 364 aa, unidentified
MYQLNNTTELSSLEETRRQFNGGTGVIKLGIDVHQDFYVVVEQLGGSNPKPPQRFKKEAFVLWAAKLKKQGNQVHAVYEACGFGFGLQRQLSALGIDCHVVCPQKLDEQNRRVKTDGLDAKALCLKLDRFIQGNRAALARVRVPTEKEEQLRAIHRQREQLVKARKRLEAQGRSLMVNHGIEPTQQWWKGRAFARLRVPTWMQELLATSQPILLALEQKIKTLTLQLQNAAEPNQPRGFGSLTSVVIDREIGNWQRFNNRRQIGSYTGLCPGEHSSGNTRLQSCVTKHGNPRLRAALVELAWRLVRFQPNYKPIVKWRATLAKGALATGAARKKAIVAVARQLAVDLWRIRTGRLQAQELGLIN

SEQ ID NO: 263150 - protein, 362 aa, unidentified
MKTLHQRCAGLDVHKQEVVACLRLVTQGRVHREVRRFPTTTRGLLELAAWLEAARCTIVAMEATGVYWKPVWHILDGSFELVLANAAHIKGVPGRKSDVNDATWIADLLAHGLIRASFVPPQPIQDLRDLTRTRKQLSREIVRHTQRLQAVLEEANVKLASVITDILGASGRRILKAMITGETDPSHLAELGSRRLGCSRDTLVEALDGRVRDHHRFLLDQHLKTIEQLEETMAAFDARIEAALAPFRDTVERLTQVPGLSTRAAEVVIAEIGLDMSRFPTAGHLLSWAGLVPALDESAGKRRSTRVTKGAPWLKPVLVQCAWAAANGQQRTRRTATSRPNSCASRDAAAPRKRLSRSPPRS

SEQ ID NO: 263151 - protein, 433 aa, unidentified
MKVKYEDRLKQKLLAITPDTLVVGVDIAKNYQWARFVDFRGIEHSRALKFKNRKGGFEIILARIRQICKEENFTKIVVGMEPTGHYWKVFANWLEKQVGITVVLVNPYATKQAKELDDNSQTKSDKKDALTIAKLVKDGRYFELYLPHDIYAELRGLSTTRTGLNKRKNALKNTITAILDEFFPEYEEVFKHPLTGKASRHILKTCPFPKFIIELGEEGVTAEIKKAVKKTVGRKKAGQLVEAAEGSVGVDYGEEAARLKLRLMLEELELLEKQTEELESQMESALENTDYAEFLLSIKGIGVVTLAACLGELGDPTRFDSPRQMSRMAGYNLVEDSSGKNKSGTKISKRGRKNLRSVLYQMALTMVATNAEMKQLYHYLKTREEAPLRKMQALIVVSKKILTLIHTLAKKKESYDSGKVFGAVRREQLKAAA

SEQ ID NO: 263152 - protein, 386 aa, unidentified
MQTLNNLSRSLIALEPASTLIVVIEMSLSSWLVAGIVPGIERQPLKKLAVDESALLRLLHRWREEAEKAGCRIERIVVAFEAGRDGFWLARWLKARSIEAHVIHAASVAVSREHRRAKTDRLDAELLKRAFLGWLRGERNHCKVVAIPTLKDEDAKRPSRERESLVGEQSRIVNRMKAALIRLGIRGFNPKLKRAAGRLDSLRTPEGEPIPPNTLAELRRDMERRRLISNQIRQIEEARLKHFEQAPNDGPHAMVRLLARVIGVGIETADMLVHEVLSRNMHDRRAIARYAGLTGSPDESGRKRREKGLARSGNGRVRRGMVQLAWRFLTYQKESALAQWYRARTENARGARKPMIVALARKLLIALWRFVWQGVVPDGVVLRLAQ

SEQ ID NO: 263153 - protein, 410 aa, unidentified
MKVLHRRCAGLDVHKAEVVACARVFAGRKVVHEVRRFGTTTRELMALAAWLKSLKVTHVAMEATGVYWKPVWHILEADFTLILANAQHVGNVPGRKSDVNDATWIADLLAHGLITSSFVPPQPIRELRDLTRTRRQAVGEAVRHQHRIEKILQDANIKLSSVLSDPMGVSGRRMLAAMAAGETDAGKIAELGSPRLECGRGALIEALSGRVSEHHRYLIGWHLRLLDEIEAKIAELDQRIEAQIAPFRAAIERLTGIPGIKQVAASAIIAEIGADMSIFPTAGHLLSWARIVPRLDESAGKKRSRRVKKGGAWLKPVLVQCARAAARKRDSYYGAQYRRLKARIGDQKAIIAVAASILTAIYHMLRDGTEHADLGAAYLSRREGDSKAIAHQLARRIRALGYQVDLREAA

SEQ ID NO: 263154 - protein, 403 aa, unidentified
MNSVGIDISKGRSTVAVMRPFGEVVISPFEVRHTDSELSELARQLKSLDGETRVVMEATGNYHAPVAKLLHDAGLYVSVVNAKLVHGYGNNDLRRVKTDKKDAVKLANYGLDRWLTLPRYVPEEDTRLLLKNCYRQYRQYSKVQTVLKNNLISLLDTVFPNVNRLFSSPIRGDGSEKWVDFVAEFWHCRCVSEKSQKAFTNKYQRWCRKHGYNFSEAKAHTIHAEACGHIDVIPKSETTKLLVEQAVAQLRATSAALAALKHEMQALASMLPEYPVVMDMFGVGPTLGPQLMAEIGDVRRFYSKKALVAYAGLDAPPNDSGDVTGRHKSMSKIGASSLRRTLFLVMTVYLQNAPLDEPVYQFMDRKRAEGKPYRVYMMASANKFLRIYYATVKAYLESLEHTA

SEQ ID NO: 263155 - protein, 331 aa, unidentified
MLDLSGTKDTRRFSTCMEDLLNLREWLIETKCQRVAIESTGIYWIPTYTLLEGKVETIVANPFQIKNIPGRKNDDIDSEWIAEVCLNGQIKPSNIPPKEIREIRELTRTHVKLTQARTSFKNRVHKILSRAGVRISGVLTDIFGKSGMIIINGILNGKTIDQTFAEIKDKRIKIKKTEIKESLKGELSQNDIFVIKECLESIKFFDKKIKEFDSKINQNLKGMQKEMEILMSIPGVGFTTAAAIMAEIGNIDVFSKPKKLVGWSGLAPSINESAGKSSNGHITKKGNKFQFLFWQLILSLLEDQISSGFFIRELKQKKVIKKQLLHLQESL

SEQ ID NO: 263156 - protein, 350 aa, unidentified
MRFYKNHHQFYIGIDLHARNMYVCVINNLGEKVFHKNLPCSVENLEIIINTFGNDIVVGVECIFTWYWIADFCLERNIDFALGHALYMAAIYKGKTKSDKIDSEKIADMLRGGFFPLAYAYPKQTRAVRDLLRRRLYYVRQRAELSVHLQNTNHQYNINEPLTASKIATKKYRDTIGEKFSDPAIVDMVDADLYLYDQYHLIISKIERQINDLVKLQLPQELKILQTIPGFGFVIPLTILYEIGDVSRFKDVGHFLSYARLVKCTHDSADKKQSGGHNKIGNVHLKWAFSEAAVMILSGNPEAQKWHERLVSRYGKAKSMSIIAQKLGRTVFYMLKRKESFDEIKFYTGQ

SEQ ID NO: 263157 - protein, 401 aa, unidentified
MLNCGVDWASDHHDVCIVDADGTVRWRKRIGHDPAGIAELRAAIAVHEPDPAQVAVGVETSHGLLVGALVEAGYVVYPINPKAAERFRDRRKPSGGKNDRLDAEVLAQAIRTDRANLRPLLPDSPLANEIATLARDRHALVREHTRLTNQLRSALNEYFPAVLVAFDLGADSTLAFLARYPTPAAAAKLSAFQIAAFLRARRANRDLAAKAAAAKDAFRAPAPAARPEIARAKARLVRVICLQLQALRPELSAYEGELARLLKTHPEGELLLSLPGLGTVLASRVLAGTGDNPARFASAAGLCAYAGTAPMLLQSGTRTVVKARNACPKEFRDAVQQWADQARRRSRWAAVFYRRHRERGHNHNESLRALGNRLLELLFELRRRGLRYDEAIHAANIRWAA

SEQ ID NO: 263158 - protein, 388 aa, unidentified
MLPVINALEVQKGKPAMKKNITELENPRRRVVRKNKQRELTIGVDLGDKTSRYCVLDREGNVLFERSTATTKKGLAQAFASMGASRIAMEVGTHSPWVKRLLESWNHEVIVANAHRVRLITESTRKDDRLDARKLARLARVDPELLSPIRHRSEGAQAHLVMIRARAALVEARTKLVNSARGVTKSFGERLASCDPDQMRVKCLVGLPSSLESALQPLVTAVESLTRQIHEYDNKIAQIARSEYPETARLRQVTGVGELIALTYVLTLEDPQRFGRSRDVGGYLGLRPKRRDSGASRPQLRITKEGDVYLRMLLVQGAQYILGWHGVDTDLRRWGLKLAARGGKNAKKRAVVAVARKLAVLLHRLWITGERYEPLRHSQRASSLPLAV

SEQ ID NO: 263159 - protein, 397 aa, unidentified
MNNAYGSVAYGGMDVHYKFSNVTWRDGVGEVVRRERLDHRDRAKLRAHLAQWPSGTPVVLEASFGWGWISDELERAGLEPHLSNCYKVEQMRKARGLAKTNEKDADLLSLLPAEATRWWEVWRAPPSVRDGREWMRHRAGLVAVQTETKNRIHALFHRHGVFYEETTDLFGGRGRRFLQTLARDGRHAGGVLPPGALETLRGLMRMLVHLRAELATVAWHLHRRLVRDPLVRRLDGIPGFGLILPGGTFRSHTLAAEIGDIGRFRNHRRLASYACLAPWSKDTGEADRTRAPLGRHLGDRGNRTLKWAFIEAAHGAVRHGGRWRVMFDRATQGGKKNRGRGYIQVARELVKVVHVVWSRGVEYCETPPPRPGSGRPRRRRRTSRPGTGQSSRAMVPA

SEQ ID NO: 263160 - protein, 313 aa, unidentified
MYYIGIDVSKKALSVFDGKVSLEFENVAGLKPFYRYLKKHYKHFDNLVLIFEATGIYSSNLREFCNLHKIRAYILNPKQSHNFAKSLGVRSKTDKIDARVIWRYQSLIPKERIQVPVIDPEIKMLASYLTSYQFIQVQRTAVSNHLESVTDNTLRKLLEKELLRKQQLEARLLGDIKSYIQEHPGLAEDYQRLMTISGIGEKLAFSLLFLFRHYQGTNRAQITALVGLDPIYKESGTSVKGKIKISKNGNRYIRKMLYLPTLCAIKNNKRISLFYQRLINNHKPKKVAVIAAMRKLLLVAHAVYHNKTEYVPG

SEQ ID NO: 263161 - protein, 382 aa, unidentified
MQASRKSTPTAGHCGTIFVAIELSQKTWLITLHSPDRDQFSRHRLEGGDHAGLLALIEKVRARATQQLGSTPRVVSCYEAGYDGFWLHRLLEAAGISSLVFDAASIAVEQRSRRAKTDRIDGELLLRTLMAHLRGEPRVVRIVRVPSVEEEDARRASRERDRLITEQTAHTNRIKSLLRLLGMAVGNPRRRDWLAWLKRQRDWQGHPLPPHLLAEAQREHARLMLVREQLAALEQVQAAQASPVPVPMAERRDLLQRLKALGPAFSATLVNELFYKDFRNRREVASYCGLAPSPWQSGGIDREQGISKAGNRRARHKAIELAWLWLRHQPNSALSHWFRTRTANAGRRAKRIAIVALARKLIVALWRYLTAGLVPEGATMKA

SEQ ID NO: 263162 - protein, 335 aa, unidentified
MHYLYYVGLDVSKETFDASLVAFEDANEMAHRKFANSRKGICSCLHWVEKRHGIRLDDVIFCAEDMGSYISEMAVCASDRTLNFNFSLISPLVIKYSMGIARGKTDRVDARRIAEYAITHYRKIALYLPAEKELCQLRTWLILRAHLAKQRVAKLVLLEKLDYKEKFADVSIQRSMLQEEIAYAETHMKTIEREMKELIAADSNICRNYKLLTSIKGVGPIPAIVMLCSTLNFTKITDHRKFACYCGLAPFEHSSGTSVRGGCHTSSMANRDIKVQLNRSALIAIRCDPQLKAYYERKVAEGKHKFSVLNAVRAKIAARCFAVVRRGTPYVALQI

SEQ ID NO: 263163 - protein, 411 aa, unidentified
MPDDYDLYVGIDWATEVHRVCLLDPQGRLLEERGVAHTGAALAELADYLAGRVDDVRRIAVAIEVPRGAVVETLLERGLHVYVLNPKQLDRFRDRYTVAGAKDDRRDARVAADALRTDRAAFRRLQIEDPHVIQLREVSRLHDDLGQEHTRLANRLREQLLRFYPQALTLCPAADEAWLWTLLEQAPHPEAGQRLSVAKLQTLLRQHRIRRFTGEDLRAALHATPLRVAPGTVEAAGEHIALLVPRLRLVRDQQAHCERRLEALLLALATPTAGEAREHRDVEILRSLPGVGSLVAATMLAEASRPLTAREYQTVRAQTGVAPVTRQSGKHAVVVMRYACNHRLRNAMYHWALNSLRYDAACRAHYARLRKQHHHARALRGVADRLLRILMAMLEAGTLYDPARHAEKIPA

SEQ ID NO: 263164 - protein, 344 aa, unidentified
MKNTTIAIDLAKSVFEVGVSDRPGHVAANHRLSRAEIAPFMANQPATTVVMEACSSAHYWGRTFQSFGHDVKLLPPLYVRPYVQRGKTDRADVKGMLEAWRNSAIRPVPVKSESQQQLTALHRVRAGWMTTRTMRINSARGLLREFGMIFPLGAATLADRVREVIADDHTQLTMPTRELLHQLVLEIGELEKRVTGVEKQLEALAAQTPVVALLRTIPGVGLLTGTALVGFVGDVQRFRSGRHFASYLGLTPREYSSGLRHRLGRISKLGDVYLRTLLIHGARAVLVGAQAKSNPDRLRAWALQIQGRCGNNKAAIALANRLARIVWAVWKSGKPFESRLQVSD

SEQ ID NO: 263165 - protein, 388 aa, unidentified
MIFVGIDIAKLNHFAAAISSDGEILIEPFQFSNDYDGFYLLLSHLAPLDQNSIIIGLESTAHYGDNLVRFLISKDFNVCVLNPIQTSSMRKNNVRKTKTDKVDTFVIAKTLMMQDSFRFMSLEDLDYIELKELGRFRQKLVKQRTRLKIQLTSYVDQVFPELQYFFKSGLHQNSVYALLKEAPTPNAIASMHLTHLAHILEVASHGHFDKQKARDLRVLAQKSVGVSDSSLSIQITHTIEQIELLDSQLLHTELEMANLVTCLHSVLMTIPGIGFVNGGMILGEIGDIHRFSEPKKLLAFAGLDPTVYQSGNFQAHRTRMSKRGSKVLRYALMNAAHNVVKNNATFKAYYDAKRAEGRSHYNALGHCAGKLVRVIWKMLTDEVEFNLE

SEQ ID NO: 263166 - protein, 420 aa, unidentified
MKVIYQTCCGVDVHKSFLVATIIKTSSGVQPSYQKKRFSTFNNSILEFKKWLLDNSCRDVCMESTGKYWIPVFNLLEDELNVTIANPKWVKAVKGNKDDTKDSKWIGDLFRMGLVPGSYIPCKPIRILREFTRYRYKLTSCRSSEKNRFQNALTVCNVALDSVVSDIFGKSATSVIDYLLEQSDNSINHEEISSRLLRSLKKKSESVIESIEGYQMTDAQKYRMRLVHAHMDYITSTLTDIDSMINSLVEPYENAVQLLCTIPGVDRNSAITIISEIGTDMTQFSNSKRLCCWAGLTPGNNESAGKKKSVRITRAGVYLKPALVQVAHAAVKSNKSPYYKAKYERIMKRRGKKRAIIAVARMILTAVYHMLSTGETWNPTDLYKIDMPEPLKNKQKEKAVKQAMKLLIAEGLIKESQLVS

SEQ ID NO: 263167 - protein, 343 aa, unidentified
MDHFAGLDVSVKETSVCTVDDTGRIIREVKVASEPEALLEVLRNPAWHFKRIGLEAGPLSQWLFSALAEAGLPVICVETRHMRAVLKAQINKTDRNDARGIAQMMRVGLYRPVHVKTLRSQKLRMLLTHRKLLQSKAIALENDLRSTLRNFGLKVGMVGAVKFEGRIKELVENLPDLAVLVEPLLVVRRVLHEQIVILHRRLLDIVRNDDVCRRLMTVPGVGPVVALTYRATVDVPSRFKNSKAVGAVFGLTPSRHQSGESDRPGAISRCGDEMMRMMLYEAAQVMLTRTNKWSWLKAWAMKIARHRGMKKAIVALARRLAVIMHRMWVDGTEFRWTQDVAAA

SEQ ID NO: 263168 - protein, 345 aa, unidentified
MHIASIGIDLGKTTFHLVALGERNKILLRKKFSRSQLLAYTANLPSSLVGLEACAGSHFLGTVLREQGHQVRLIPAQFVKPYRKTNKNDFIDAEAIAEAVTKQNMRFVQVKTQDQLDIQAMHRVRDRLVQRRTALINEIRGFLLERGITFAAQPIHLRKNLPTVIEDAEQNLSPRLRWLLDRLWQEWKQIEIDVEVITEEIERISNEDARCRQLRQIPGFGPLVSTATVAAIGNGAAFRRGRDFAAWLGVVPRQYSTGGKQKLFGISKCGNIYLRRMLIHGARAVLFRVKYDTGGFGQWVQRLAQRAPRNKVVVAIANKLARIAWAVLSSGKDYRHQPLLQLAAA

SEQ ID NO: 263169 - protein, 348 aa, unidentified
MRFYTKKHRYYCGIDLHARSMYICILGDEEKPLVHRNCKASPEAFLKAIEACRDDVVVGVECMFVWYWLADVCAKEKIPFVLGHALYMKAIHGGKSKNDRIDSQKIAALLRGGTFPVAYVYPRKMRSTRDLLRRRNHLMRKRSELLAHIQNTNSQYNLPELEKKIAYKANREGVTDHFPDPSVRKSIEVDLQLLDFYDQLLTNLELYIVKKVKAHDVRSWYLVRSIPGVGKILSLVLLYEIHDIRRFPPVQDFVSYCRLVKCPRESGGKKFGAKNSKIGNVHLKWAFSEAACLFLRGNEQAQHYHSRLVSKHGKGKALSILAHKIGRAVYFMLKRKEPFNMETFFVRA

SEQ ID NO: 263170 - protein, 408 aa, unidentified
MQVVHPVCCGIDCHQAQLTACLRRVSEDGQITTELRAFGTTYQELLALSDWLVTEACPVVAMESTGVYWKPVYHVLSAVMDVYIGNPFDMRRRPGKKTDKADATWIAELLAHGLIQPSFVPPPSIRALRDLTRTRVALVQTRTQAKNRIQGILQDTNIKLSSVVTDVFGKSGRRMLEALIAGERDPKTLAAMALGKLKRKRPELELALTGQFTDHHGFIIEGALRLIDLVEEQIADLDARIGDLIEPLQPQIEQLDSIPGVDVTGAWQILAEIGVDMSRFGSAARLSAWSGVSPGNNESAGKRRRGRSRRGNRYLRRVLVQCAWGARKTDTFLGRTFRRLEVRIGKKKAAMAVAHKILVIIYHLLSEGTFYDEGRYAHVGPKQQERERKRAIKALERLGYRVTVERVA

SEQ ID NO: 263171 - protein, 481 aa, unidentified
MAKRKMSTFERLRSGRMNRQERKEWQQRLYAEDAGLEVVHADAAGIDVGSASHFVAVPPDRGQPVQEFGSWTADLRRMAEWLKRCGIRTVAMQSTGVYWVAVQEILEREGFEVCLVNARGTKNLPGRKSDVQECQWLMKLHTYGLLRNSFHPPEQIRAVRTIWRQRDRLVKEAGREVQQMQKALTTMNVQLANAISDVSGLTGQAIIRAILRGERDPQQLAKLRDYRVAASEAEIAHSLEGNWREDVLFELQQVVDAYDFHQKQIAACDVELQKYLSALPMRSGPEAGEPSTADVRAEKSKGRRQHKLQKNQPTFDLAAELRRTMGVDVTAIDGVDVMTTQVILSELGPDLGASFPSESHFTSWLELAPRRDISGGKILRQKSRKSNNRVATALRMAAQSLWRSDSYLGARYRHLKARLGGQKAVKAMARYLACLIYRLLTKGKAYVDRGAAHFQSKRTERELLTLRRKAAELGMQLIATP

SEQ ID NO: 263172 - protein, 329 aa, unidentified
MYHVGMDVSKAKLDICLLADGLDGKRKTKSLPNGISSAEAVINWLVMQKRDPKQARIVMEATGIYHEHLAYGLHREGLSVSVVNPCRIREFAKGMGILTKTDKVDAYVLACYSSLKQPQEWQPPSEEIRKLRALLQHRDVLLEDKLRTENRLNTLSSTQSTEEVMMSLSLMINHLKDELARIEALISKHVDNHPGLKDDLSLLTSISGVGPQTGLNMLVVLRGNTFESASQAAAYLGVVPIERRSGSSVRGKSRLSKTGPSKLRAKLYMAALTAISKNMHVKNQYERLLLKGKAKMQALGAAMRKLVHLCYGVLHTQQPYSQDFGMATE

SEQ ID NO: 263173 - protein, 345 aa, unidentified
MLIIGCDFHPKFQQIAFTDTETGECEERRLHHPQEAEQFYRALAGGKARVGMEATGSFRWFRRLLSGLGHELGHELWLGNPTEIRASAPRRQKTDKRDARQLMKLLLEDRFPQVWLPTVADEDLRQLLLHRCRLVRLRTKVRNQLDAIAKNEGLVGQRIGTRKGRQQLAALPLSGWYQQRRQDLFELLDQLERRIVPLNQAVQQAAEERADAQRLMTHPGVGPVVALGYVLAIGDWQRFPRGKYVASYLGLIPEEDSSSNKRRLGHITKQGNSLVRWLLVEAATKAQQCDPGWHRQYLRLARNKHHGVAKVAIARKLAIRLYWMLRSGQDYEQVKERGSHAGQSV

SEQ ID NO: 263174 - protein, 344 aa, unidentified
MATYYIGADVHSNNTELAIEQRGKIVARYSVPTTVPAISTVLNSLQGKKIFAMEEGPMAGWLYRNLNEKVEKFIVSEPRRNKLITCEGDRDDRIDSGKLAVLLRGNFLKAVHHTSDSHRAHLKHWINLYHDRVRDAVRNINKIRACCRMHGIAIPRKVVRNQVHRHDWLSGLDNPVLKVQLQMLWIGYDATKEQVVLAKKQFSLLARKYKIIKYWRKLPGVGLIRAATIFAYLDTPWRFKNRAKLHKYCGVGLVRATSGKDKKGRPKPARLKLPWAVNRRLKNAVIGAATSAIGHEDNAFKDYYERMVSNGITPANAKHSVARKMVSTMSAMWKTDSKFDEKLL

SEQ ID NO: 263175 - protein, 463 aa, unidentified
MPQSRKRREKIASKVDWTSGLETLPHHAAGIDVGSAQHSVAVPVGRDPQPVRTFGSFTADLHRRAQWLRACRIETVVMQATGVYGVALYEVLDSYGFQVQVVNARYTQTLPGRKSDVQECQWRQKLHTFGLLNNSFRPPEQIRVLRCYLRQRENLVQQAGTCIPQMQKVLTEMNLQLANVISDLSGVTGMRILQAILEGERDPYKLAALAAPGIRASRKELAQSLEGHWRQELLFVLQQTHDLYLTFLQKIRPCDGCIEAHLQTMAAKVDEVARPLPPARPKNRLPQRKHIPQFDLRAELYRVAGVDLTQIDGINVQTAQVVISEVGVDMARWPNEHHFSSWLGLAPNNDITGGKVIRRRTKKVLNRAARALRLAAQSLHHSHTALGAKYRRFRRRLSAPEAITAMAHDLARLVYRILRFGTEYHDKGMEHYERRYRETQIKWLQKQAAMPNMQLTPAQAVAR

SEQ ID NO: 263176 - protein, 383 aa, unidentified
MATRQDYDGFAEQLAAIGRPIIVGFEATGNYHRTLAHRLLTAGFELRLISSVALARTREALHNGWDKNDSKDAQVILHMLRIGATQRYVDPLVAGINDLQELSKTHETISRMKTQTWHRILTHYLPLYFPEIARFAGNSRSDWFLALIERFPTPATITALDREAFSAAAWPLIGRKVSKARLINDIYETASASTALPVPENSAAITMFRMVIAQGRSLIHQRDEIERLAHARLADDVDYQLLRNIPGIGPINALTILAEAGDLRRFNHHRQFLKFCGLDLATCQSGTFRGRTKLSKYGNARLRRTFWMAAQVAARQRDNSFRDKLGRYVAGHADDADRRRKAMTALTAKMARVAHAVIKTGTEYRPFLERSDARWKDPSLQVP

SEQ ID NO: 263177 - protein, 394 aa, unidentified
MRENTNKEDVKEQESVSRAGSMLLKKLEIARKKREVASACQQIEYYIGIDLGDRKSYYCILDAEANILAEGSFPTTASGFDGHFKGLCRSRIALEVGTHSPWTSDLLECQGHEVYVANPRKMGGRKNRRKNDRLDAELLARQVRSDPAQLYPIRHRGEKTRRGLVLLRARDAMLNARTKLVNGVRGLVKSTGGRLAKCDSSRLHKVDMSCLPKELQVALQPMLDQIGQLTEKIKAYDKEVKRVSLKEYPETEVLRQITGVGFLVALAYVLTIESPEFFSKSRDTGAYLGLVPKQYDSGKSTPQLRVTKTGDRMMRKLLVQSAQYILGPFGKDSDLRRHGLKIAERGGRNGKRRAVVAVARKLAVLLHRLWLTGEVYEPLYNNRSGDGNNLPKAA

SEQ ID NO: 263178 - protein, 349 aa, unidentified
MRYFAGLDMSLEETAICVVDETGGIVQELRAASEPQALIAALSELGLDVERIGLEACSLTAWLHDALRAAGLPAICIETRQANAAMKTMPNKTDRNDARALAQIMRTGWYRQVHVKSRQCRQWRSLLVARRAVLNEMRSIENVVRAVLREGGIKLGTPGRKSLAARVRALAGGDADMMRLVEPLLAILATMLVQLQRLTRQVVDIVRREEVCRRLMSAPGVGPITALAFRATIDRPDRFRRSRDVGVHLGLTPARYQSGETDIQGRVSRCGDELARTALYEAAHSLLVRSRKWSSLRAWGMSIAKRRGMARARVAVARKLAVVLHRMWSDEAEFRFGKEPGADAGRVAA

SEQ ID NO: 263179 - protein, 399 aa, unidentified
MTPDDIDLWVGLDVGKSAHHACALDRDGRTVYDKPLKQDERTIRAMLERLSGRGRVLLVVDQPNTIGSLPLTVARDMGVRVAYLPGSSMRKTADLLPGKAKTDRRDAYVIAWAALKLPESLRDAGPDDETLAALKILAGHDEDLAHESTRHINRLRSLLLHTHPAFERALKGERITRDATLALLERYGGPAAMNAAGADEVRRWARDNRLHAGRIIDDMFRTIGEQTVTVPGTATAESIIPAIVRDIRAIKERRRQVSEQVESLLEDHPLLTVLTSMPGIGVRTASNILLSIGGDVTGFASAAHLASYAGIAPVTSQSGTSIKGEKPARAGNKRLKNALWQAAFVASVKHPASRTYYKRKREQGKHHNAAIICLARRRCDVIYSMLKNGTLYQEQTLAA

SEQ ID NO: 263180 - protein, 347 aa, unidentified
MAMTMVSAGLITGGVDTHLDVHVAAALDRIGGLLGVAEFDTTQAGYEALLAWLLSFGSLERVGVEGTSSYGAGLARFLMGHDLEVIEVDRPNRQERSRHGKSDPIDAIEAARAALSGRATGLAKTKDGPVEAIRALLVARRSARNQRISALVQMRHLVFTAPQPLRERFFGLSKTQLVNQTAALRPRDNGDVVTYATKVALKTLAQRVQLLDAQISQIRHMLPPLINAAAPNLLNVYGVGVDNAAILLVAAGDNPERLKSEAAFAHLCGVAPLPASSGKVIRHRLNRGGNRQANHALYQVVISRLASDPDTKRYVERRSKEGKSIGETVRMLKRYVAREVFKHLPAA

SEQ ID NO: 263181 - protein, 367 aa, unidentified
MKKTSIAASEQSGNISQQKLTIGLDLGDRNSWYCVVDETGQIQREQRVRTTAKALQEVFGGMPRSRIALEIGTHSPWISRLLGELGHEVIVANARKVRLIGESRQKDDRLDAQTLARLARIDPELLYPVKHRSAQAQADLMMIRARASLVRTRTGLVNAARGLAKSYGERLRGCNVRNLDPEKAENLSPELQQALEPLLAAIAEVSARIVEYNDRIEALAQTSYPQVELLKQIKGVGTLIALTFLLTLEDPHRFRKSRDVGGYLGLQPGRRNSGQSEPQLHISKEGDPYLRTLLVQGAQHILGPFGIDCDLRRWGLKLAERGGRNGKKRAIVATARKLAVLLHHLWVSGEVYEPLHNRNRITVAAAA

SEQ ID NO: 263182 - protein, 351 aa, unidentified
MNYVGVDYHKKYSYMVVKDENGNVAGRGTVNNTKEEVQRFLEPYRPGMAVVEATRNWGLIYDWLDEVLDDVALAHPLKVKAIAEARIKTDKISADILADLLRAELLPKSYAPGKETREVKSVLRQRMFFVRVQTMVKNRIHDILDRHPEALGQAPEVSDLFGAAGIKWLSQAVLQGKDNDLLIDELKLFKFLRELISQSDSTVRKLGEIDPRAKLLRSIPGIGPFFSVLILYEIDDISRFREDKKLCAYAGLVPSTYASGGKVFHGRITKRGNKWLRWAATEAVQRAVRWDAEFRSYYQRIKVKKGTNAAKVATARRLLTIVYRILSQRRLYEKRAIAQEEKAVPAALISI

SEQ ID NO: 263183 - protein, 345 aa, unidentified
MERVECIMTTGLAAGTYELFVGIDIAATTAEVSTQRPGAKAGRSFKIDQTPEGFHRLVHTLQATDNEPSHVLVVMEATGSYWMSLATRLVHEGFRVSVINPSQAHHFAKALLKRAKTDAIDAQTLAQLAMVLQPEPWMPPPQIYYALQQRLAQRDDLLNLRQQVRNQLHALDQHPEVIASVRTRMESLLLLFQSQIDEVEGEIAAALNQDSAWAAAAERLQSIKGVGWVTAAWTLVTTLNFTTCDTVDALTAYAGLAPMPRQSGSSVWHRPSIGHSGNGRLRTAFYMATLTAARFNPAIKAFYNRLLEAGKPEKVARCAAARKLLHMAWAVVKKDQPFDPNYAQG

SEQ ID NO: 263184 - protein, 388 aa, unidentified
MPQQRKPNDLSRSLTALDMDTTLIAVVELSLSSWLVAGIVPGVERQPLKKLKTDESALLALLNRWRDEAVRSGYKILRIAVAFEAGRDGFWLARWLNARGIEAHVIHASSVAVSREHRRAKTDRLDTEHLKRAFVGWLRGERDHCKMAAIPSFREEDAKRPSRERESLVGEQSRLVNRMKATLIRLGIRGFNPKLRHAEQQLEALRTPEGEPIPPNTLAELKRDMQCRRFICDQIRSIEQERLERLERTPDTKPHAMVRLLARVTGIGIETADLLVHELLLRNMRDRRAVARYGGLTGSPDRSGATSREKGMARSGNARVRRGMVQLAWRFLLFQKDSALAQWYRQRTEKAPKARKTMIVALARKLLIALWRLVREGVIPEGVVMRPA

SEQ ID NO: 263185 - protein, 401 aa, unidentified
MASVRENSQRIKRFRELKATLRTDRTRLLVGIDVAQAEHVVHLRHAHTRVVTPKLVIPNTTRGFAQLWARVQQAQQTTGGREVVVGLEPTGTYHQAVATFLEQQGADVVLISSSVAPWNRRTQDGTWDKTDRKDAANCADLLEQGKVLFYSQPTGPLADLRRLVKVLRRARAELASCKARWRTSLRPALAPMGAALPQRLWAELPGVLQAWERAAPGRPAVPKGRLPLGLATACADLGTQVTAVQARIAALEAACTPVAERLPAYALLRTIPGIGPTVGAILVAEIGDIAWYTAFSQLRKLAGLAIVRVQSGQFTGQHRISKCGRSLLRWACYQAAVGLVRTAAGQHRFAAAKAKRRGDRCGGFKAMVELAAKQLRVVWGVWRSGQPYDPRRAGGVRRPRR

SEQ ID NO: 263186 - protein, 404 aa, unidentified
MEQVIIGVDPHKLSATIEVVDQHETLLGSGRFSTDQAGYAAMRKYAKTWPDRVWAVEGANGVGRPLAQRLLEAGEHVVDVPAKLAARVRLFDTGHNRKTDALDAHSIAIVAVRTDTLRVLKVDGELEAMRLLTDRREALTRRRVQTVNRLQALLAELLPGQAKKDITPLQAKVMLASVRPRDVAGKTRRRIAAEELAELIAVDSKIKKATAELKAMVLARDSRLMEIHGVGPVVAARILADVGDVTRFADRNRFASWAGTAPLDASSGEQNRHRLSRAGNRRMNHMIHIAAVTQLRLDTDGRAYYRRKRADGKKPMEAMRCLKRRISDAVYRQLVADAQRAALTASTGAGPGGHCGASQESSAVDLPPHIDTSDQPLPGPANSTLQRTQRSRKTSPKKTPQMTS

SEQ ID NO: 263187 - protein, 320 aa, unidentified
MTQYDFVGVDVAKDKFDIAIDINGHYRHLVFSNSPKGHKEFYDWLTHHTQTPWVCMEATGHYSVNIADFLVKKGIRVSVVNPFQVKNFARASLVRNKNDSIDAKIIAQFGQRMDPRVYQTTPAEQKEVKDLTKLLDMLKAQLVQLNNQLHSIQGKIARKALEKMVDKLEKETAKIEKKIADLVASNESLKEQFKLLTSIKGIGKLTAFHIIALMPDVNSFATAKQFAAYIGITPKQNQSGTFIGKTTISRLGDSRLRKSLYMAALVAKNFNKGLTNFVSRLQQKGKNPKTIICAVMRKLAHIIFGVLKSKQPFNENFACL

SEQ ID NO: 263188 - protein, 392 aa, unidentified
MLFVGIDIAKNNHVASMMDEYGKVVFKAFSFSNTTDGGNALFSKLSSYSSNPSDFEIGMEATGHYWLSIYSFLFEKGFLLHVINPIQTDGWRKGTEIRKRKNDTIDSVLIADLIRYGQFVQTRLADEDLFSLRTLTRFRTYLVESISDLKRKVVCVLDQIFPEYQSIFSDIFGKTSKEILLQFSSPIDFENISSESLAELLAQLSRQKIGAAKAEQLKAAASSSFGITFAKNSFTFQLKALIEQISFIENQVKETESEISNIMRKLNSPITTITGIGNVTGAAIISEIGDISKFDNPRKLVAFAGLDATVTQSGEFEASHNVMSKRGSPYLRKAIFQAALIASFHDPVLSVYYQKKKAEGKHHLTCVGAVARKMCNIIYAVLKNNQPYVPKA

SEQ ID NO: 263189 - protein, 423 aa, unidentified
MIPAIIERCAGIDVGKKFLAVCVMTGPANEEGQAEVRKFGTVRHELESLRKWLQSEGCTHVVMESTGVYWKPVLNVLEDDRQYALKIILANPQQVKAVTGHKTDPHDARWLAHLLRHGMIRPSFIPPRAIRELRDFTRRRKQMIGIAAEERNRVQKVLEDANVKIGDVLSDVFGLSGQLMLEALVNGLGGDGPLSAFDIAQLARGHAKKKLNELTAALEGHQMRDTHRTLIRHAMRHMAFLAEEIEALDQDIAALIRKADLTPAYELLQTIPGIKSQAAATILAESGPDMKQFPKAANFSSWSGLAPGNNESAGKKKRAPAMKGNPHIKTALVEAAWSATRTKQSEFQDRYQRLRPKIGHKRAIVASAHTLALRIYEVLQAGLPYQPHGSTLTPRSVNRLIRHHTRRLRCLHHWLNDRGTGGQ

SEQ ID NO: 263190 - protein, 405 aa, unidentified
MSKALAGQDADRVVVGMDPHKRSVTIEVMAGDETILGGGRFATTVEGYRAMRAHVAAWAERVWAIEGCAGIGGHVASRLLADGEQVVDVPPKLSARARVFTTGQGRKTDATDAHSVALVGTRMTGLRPVVDDAQLAVLRVLVDRRRSLGEDHTRMVCQLHHLLLQLIPGGAKKDLSAAQAKALLASVRPRDAAGKTRRRVAAELIADLERIYQRKKAADKELTALLAQTGTSLLTLNGIGPSGAARLLVEVGDITRFPSRAHFASWNGTAPIDASSGDQVRHRLSRAGNRQINRVLHIMATVQLRNPTVGRAYYDRRRADGKTSMEAMRALKRRLSDIVYRTMFGDALRPTQAGAAAAQTTGPGGHSGAATNSSAVDSNPGIDASEKSLPGPATEQPTTPLPTAS

SEQ ID NO: 263191 - protein, 431 aa, unidentified
MKPIVKQNIEPDPAPDFAAFLAIDWADEKHAFCLQVVGQSKIETGTLEQKPDVLGPWLAKLRERFGGRPIAVGLEQSRGALIHALMAYDFLVLYPIHPTTVAKYREAFKSSGAKNDPLDAGQILEILTKHQDRLHRLNPDTVETRLLGRLVEDRRKAVNLRTTHVQALGANLKEYYPQALELTHDNLSSRLACDLLMKWPTFEDFQQAKPSTIKRFYYGHNVRSPEVIERALTLAEKSQALTTDPAIVESGRRLTQMYAQLLQALRPTIADYDQRIQRVFDAHPEAQLFNDLPGAGPVMAPRLLAFFGTDRSRFAAAFNVQSFTGIAPVTKSSGKSKVVHARAACPKFDRQTFHEFSRLSVTRCQWARNYVQYYTDKGKKYHTIIRALAYKWIRILFKCWQQRTPYNEDKYVETLKLRGSIFATWHLQNKS

SEQ ID NO: 263192 - protein, 411 aa, unidentified
MELRYPRCAAIDVHKRTAVAAVAWADEAGRHRREVRTFATATGDLERLRDWLAARGVTHVAMESTGVYWKPIFNVLEERFAVVLANAAHVKAVPGRKTDVRDSEWLLELMQHGLIRASFIPPAPIRELRDLTRHRANLVEERARAANRVQKVLEDANIKLAAVVSDVLGVSGRLMLQALIAGETDPGALAALAKGRLCTKRAALVEALTGRVRAHHRLLLRELLGHLEYLDGAIGRLSAEIAERLRPFAADLALLCSIAGIKGRVAEVLLAEIGADMGAWPDARHLCSWAALCPGNNQSGGKQRSGRTRHGNRWLKGVLLQAALAATRVKDGYLGAQFRRIAKRRGAQRAAIAVAHSLLTIVYHVLKTGTPYREAGAAYFDRFDSGKQARYHLRRLAELGYEVPAEPRSAA

SEQ ID NO: 263193 - protein, 361 aa, unidentified
MSRMAESAGPVTGGVDTHADMHVAAVVDQVGRVLGTESFPAGADGYAGLLAWMHGHGELARVGVEGTGSYGAGLARYLAACGVPVLEVTRPDRQRRRRRGKSDAVDAVSAAISALNGDDCGTPKSSDGAAESIRALRVARTGAMKARTQAGNQLRDLITTAPEPLRAQLQGLSTSRRIRVAAGFTCGDAADPVEGTKKAMASVAARWLDLDAETTRLEAVLEELVARVAAPEFLASCGAGYLSVAALITAAGDNPGRITSEAAYAALCGVSAVDCSSGKQQRHRLNRGGDRQANSALWRIAITRMQHDPATQDYCARRTAAGKTRKEIIRELKRYIARDAYRTLIRPGFAATAAPSSRQAA

SEQ ID NO: 263194 - protein, 346 aa, unidentified
MNKNTMVGVDLAKEVIQVCIYTNKKVQSNEEMTHHEFLAWLFEMKPTTIVFEACGTSNYWKQKAIEAGHKASLISAKLVATVRQNQKTDKNDALAIIQAAQLPDINFIKGKNVEQQQLQSVMRLRELAIKQKTALSNQIKGLLLEFNVRVSTKNGGLEGAINSFIEDAENELSFEFREALDTAYQQYESIAKSVNLYESCLEKIVNQHADCQKLLRLEGVGVVNAVNLYIALGCAEIGTFVKGKDASACIGLTPLQYSSGGKTKMGSIGKYVKNSLLRSQLITGAMAVVRQVTKKMAVTKKEAWLQALIERKGKKCAAVALANKTVRTAFAMLTQGTEYKAEILPA

SEQ ID NO: 263195 - protein, 354 aa, unidentified
MEKYCIGIDIDKKTFKVCLLYRSSDLTKRVQGSKTFSNGKEGFKEFITWISKKIKVKGVPQSYVMEATGVYHEQLAYFLEGQGKNVHIALPLKSKRYLQSLGIRSKTDKIDAKGLGMMGCEQSLGSWHPSSPALLKLRSLTRQIESLQTHRTSFLNQLESANHAAIIDRMVIKSLKTMIKQVENQITKLEKQVKENIRMDEVLRRKYKLISTIKGVGLMSFAVVVSESNGFSLFKNQRQLVCYSGYDVVENQSGQRRGKTRISKKGNAHIRRILHMASLSSVNTDEIIFRNLYQRVVDRTGIKMKGYVAVQRKLLVLIYTLWKKDMEFDPNYEISGIQESEPLFSVAPLGASGV

SEQ ID NO: 263196 - protein, 429 aa, unidentified
MQYALIQVLPDVPAGEVCAGIDWAAADHVACVVDMAGRIKDRFSAAHDKAGLNTMITRLRRAGASEVAIERGDGVLVDALLAAGLTVVVITSRQVKNLRSRYGSSGAKDDRFDSFVLADTLRTDRARLRPLVPDTAATIALRAAVRARRNLVAHRVAACNQLRAHLAVAFPAATGLFYELDSPISLAFLARFGCYDAVARVGEQQMTAWLQTVPVRGNTAPASVLCARLRAAAPGATGEEGAAQAAVTAALAATLTALAAQVKTLETRIAAQLAAHPDAHIFTSLPRAGTLRAARLLAETGDCRSKFPEPESLAGLAGIAPVTRQSGKHASIEFRWAVNRQLRDAFCDFADGSRHASPWAAGIYADARARGKDHPHAVRILARAWSYIIWRCWQEGTAYDLAKHTALQRILEQQASQPADPAPEPGHAR

SEQ ID NO: 263197 - protein, 337 aa, unidentified
MKYSGIDLHSNNSVVTVTDEEDRVVAEKRLPNDLTKIVGLLTPWREEMAGVVVESTFNWYWLVDGLQAAGFKVHLANTTAIKKYEGLKHSGDETDARYLAHLLRLGILPTGTILPPEQRAVRDLARKRMQLVRSRTTHLLAVENITACQQGVRISSNQVKQLTADAVDQMHLPEEVALAIKANVAVIATLSAQIEFLEKRLQEKVGARMEYGLLTSVPGVGQVLATMILLETGPIERFANVGNFASYARCVDSVRTSNGKKKGEGNTKNGNKYLAWAFVEAANFALRYCAEAKRFYERKKAKTNNVVAIKALAHKLARACFHILKERKPFDVTRCFA

SEQ ID NO: 263198 - protein, 316 aa, unidentified
MNIIGLDISKDTIDATLHKTNGSIHYIKFKNNDDGLKQFRLWIKGNRKAYIGMEATGIYYEKAADMLSSYYTVYVINPLKIKDYGKSRFNRTKTDKADSNLIADYIKRHQDTLIPYQIPKNKALQKLINLKNQLHQHQKQIKNRLHSTEEDFIRNIHQDLIDTIQDKMEQVKIAISEQIKKQTDNNHYRNLQTIPSIGKDTASVLYAQLTEKHFKTANQFVSYAGLSPAIIQSGTSVRGRGRLSRYGNRRLKSTLYMPALCAYRFNAFPKLINNLKKAGKPKMVIIVAIMRKLAKLAYYIVKTGQPYDAERHRLNQ

SEQ ID NO: 263199 - protein, 401 aa, unidentified
MRFYTAQHQYYCGIDLHARRMYICVLDAEGKVRVHRNGPATPEHFLNVIAPYREGLVVAVECIFTWYWVADLCAHEGIPFVLGHALYMKAIHGGKAKNDKIDAHKIAVLLRGGMLPMAYAYPRAMRATRDLLRRRCHFMRKRAELLTHTQNTASQYLLPPFGKKIAYHGNRTDVAERFADPEVRKSIETNLTLLDHYDRLLTDLELHLTRTAKVHDVNAFYRLRSVPGIGKILALVLLYEIHDIRRFPSVQDFVSYCRLVKCGKESDGKHYGYSGAKIGNAHLKWAFSEAAVLCLHGNPAAQLYAARLATKHGKGKALTILAHKLARAVYYMLRRGHAFDPNRFFHDPSPGEASRGAAVDVEAPPGPAPRPAAPPRKAQRRPRHLAPTTTAAVEMAATLAN

SEQ ID NO: 263200 - protein, 424 aa, unidentified
MANTIKKRKEPVMKEKIYVGIDLAKGDSKVAVIDDSGEAIFKPFNITNSKEGIRKLLSKLSSYKTGQIVCGMEVSSNYWENMCSYLKEKDVTPILLNPYQVKKYRQAMGFKIKTDPIDATAIAGLISGRKYESLYISDDSMMELKELVRIKYSFQRRVKDLKKSVLSLLYLVFPEYTKIISHPFSKVSMHILSKYPTSCHMAKASVSKLVKIFRRYQGCNFNLDKAKDLISAAKDSFYSGKASRSRGMTITMQLDEISSLSLKIKDIEDEIMSILDPKDPKGGSSDYDILNSIKGVGIGTIATFKGYVGDVSRFSSSDKLISFIGFYPNIFESGKYRKKNPTIQKAGPKELRYMLYLSSVACIKHNSQLRKYYHDNVSAGMPAKKAIIKVAVKLARMMYSMLKHKTEYESSKVFMQSLPLKKAA

SEQ ID NO: 263201 - protein, 388 aa, unidentified
MSTSTVEHCVIGLDAHPDTCSAAGLYGQDAGTAKVKWVDHPIRVERLEQWAAKRVGPHDTVVIEASGNTFELAGRLQRMGCHVVVLESQRVGQVGKTYCNTDKVSAVKIARVFLSGLAVVVWKPDEQTRQRREIFRQYQASVTDTTRHRNRISGWLTGHGIKRPKGLTLTRPSGRDWVMDHPEWSPMQRLLLEQMLDQLLTAHQLRKRLRRIIALEVAQDPALLRLVRLFGIAEITAFALGAFIGDVHRFRSPKQLVAYVGLNPRVKLSGKGGRISSLGHHGRKELRALLIEAAQNLLRYDNPLKKWGWKLLIAKGRNVAAVALARKLTVSCWYLMMGRFTPLEQPGPTLRTKIAKMVAIIGKKTVTELGYSKCLEFEKYLLQRIIVS

SEQ ID NO: 263202 - protein, 339 aa, unidentified
METTIIGVDLAKNVFQVHGATETGVVTFRKKLTRIQFRKFITEHKPVIVAMEACGSAHYWAREAALHGHIPKLLPSQYVKPFVKRQKNDAADAEAIVIAAQRPEMRFVEPKTESQQAKVTVFRARERLVHQRTQLVNALRAGLYEFGIIAPTGIYNINRLDAFVEDNDCNLPDLAREEFKDLLVQIYEITERIEAKLLKLKKMAKTTDVSRCLQTMPGVGPITAVAIEALAPDMSTFRCGRDFAAWLGLVPKQYSSGGVAKLGSVSKAGQADIRRLLIIGAMSRIGWIGRKTIPENSWLSRLLERKPKMLVAIALANKMARAIWAMLTNKEDYKVPVFN

SEQ ID NO: 263203 - protein, 386 aa, unidentified
MAIGTTNRGTARPIIAWWDAFTTLDSKVGGLLLRPYLEQLNAPEGPCPFEPVTTRMRMTTTIKNQNISAPPCWIGVDVSKTELQIHAGRKSVKLPEQVVYGKAGLNTITRLLLKLERPHVVFEASGGYDLALLEKLQASGIACSRVNPRHVRNYAKAKGLLAKTDKIDAMLLADYGATMRPAITPEADPALANLAALIAYRRHLVEALSQERMQMEHPKPPCILVMIKSRIKALESQIQKLDESIASHVSGEPSLNRAVTALSAVKGVGSLSAAALLAAMPELGTINRNQAAALAGVAPFNRDSGSLRGTRRIHGGRPEVRQALYMAAVSASRHNEILRVAYQTMLNRGKPKKVALVALMRKLLICLNSIMAKILRESNAPILSPC

SEQ ID NO: 263204 - protein, 428 aa, unidentified
MNNQEIIRREQFCQIVKEITGSDQYMVVGIDVGKDKHHAFVGTATGICLFKKLIFENNLDGYARLLTIVDQLKTQNCLEKIVYGLEPTGNYHKPLASHLIRCACNVVLVAGQAVKNNRQLIDGRWDKNDTKDAANIADLVSRGKCLYYDCPSPQINELRGLLSLRRRLKREEHSLRMRIRNNLLAQYFPEMDKFYSACESESLAIVKWCLDPDKISVMEFDKFFNMVTKTRRGIAQTLRLRNIHNLAVKSIGCPMGPAAEYEAELLVEKRQQVAKQIQKTADLIEDVCLGFPEYSYLLTIPGFGPYISAKVLASIGDPFRFNNRKQVIKMAGYDLSAKRSGKTSDQAVPVISKKGNGELRYALYQAANVAAGRTDLFRAYFTKILRGRERERGIKTKMRVKLATKMLIIAWTLMKTKQSFDPEHLNID

SEQ ID NO: 263205 - protein, 350 aa, unidentified
MIIIGCDYHPGFQQIAYVDTETGELQERALQHREEAEKFYRELAALGPKVRVGMEASGHARWFERLLAELNFELWIGDAAEIRRKRERKQKTDRQDAQHILKLMLKDDFPQIWVPSGENRDLRQLLWHRHRMVQARTRMMNQLQAVALNEGLRCKKRLWREAGRKQLEGFRLAPWASRRRKDLLELLDRLNPTIAELTQTIEREVEKCPEARRLQTHPGVGPLTALAFVLIIGQADRFQCGKQIASYLGLVPLEDSSGSRRRLGHITKQGNSLLRFLLVEAAQVTVRSDPGWRSKYHHLKMRRGRKIAKVAMARRLAVRMYWMMRKEWNYEQLNKFGSHAGQLGTGDGVK

SEQ ID NO: 263206 - protein, 337 aa, unidentified
MSRARIYKEGNPTVQPNSNAKCWAGIDVSKDWVDVAVLVEEQKVEQFRCVRSVVELEQLAQKLLPYGPQGVVLEATGGLEGSVITALVAAGLKVMRMNPKRVRDFARAQGLLAKTDQLDAHILALFGARMQPPLRAWPEAERQQLAAWIARQQQLTLQRAAERTRLHQATEPQLSKSVERVIAFLGKELARLEKQMGKWMAQSEIWTEQESLLRTAPGVGPKTARLLLAQLPELGHINRREIASLVGLAPLACDSGHWRGKRRIHGGRGAVRAILYLASWSAVRPPGSLREFYRRLVAAGKPRQVALIAVARKLLLALNEMMRLNQPWRSPKESIPA

SEQ ID NO: 263207 - protein, 368 aa, unidentified
MHEKQKHIYVGVDLHKHHHVAVIINCWQEKLDEIKVENKPSAFSTFLLDIDKLTEEGLTPVFGLEDVGGYGRALAQYLTDHGQVVKEVNPALSYAERKSHVTVQKSDSWDAECVARILVRQLSHLPDAKPHDLYWSIQQLVTRRNALVKAQGALKNQLHIQLSHHYPSYKKFFSEVDGKTALAFWEQYPSPSCLEGMSIKQLTTFLLEVSNNACSVKKANEILKLVIEDGNTTKEHQETRNFLVESIVRHILFGKQEIGKVERELKQLMSLLDFQLDSMPGIDLVTASALIAEIGDVRRFPNANKLARFAGIAPVYFGSGGKGKEQKSKQGNRALHALFYNLAVQQVQVAKEVNYRGTLCFMLIINEN

SEQ ID NO: 263208 - protein, 348 aa, unidentified
MKIVGCDLHARQQSIAMLDTETGELTEKVIRHEGNAVREFYASLGKPVVVGIEATGSMQWFLELLEELGIESRVGDPAKIRAAETRKQKHDRRDALLILDLLERDRFPAIWMPTSEQRDLRSLLRDRHQWVKMRARLQHTLQAMALNRALRKGPSLWSGTGQEALRKLPLPQYTSQRRNELMSLYAQLQRRIQELDKQVEAQAQQRLQARRLMTHPGVGPVTALASDVFLGDASRFTTANEVASYIGMIPSEHSSGKRQRLGKMSKQGNSLLRYLWTEAGMHASGKDPELKRFYRRKLIQKGMGKARIAAARKLGIRLWIMMRDQIDYEEFCRRGKLRQIGESPCGNA

SEQ ID NO: 263209 - protein, 354 aa, unidentified
MSQKLNTAIAVIGVDIGKNSFHVVGLDQRGAIVLRQKWSRGQVESRFANMPPCLIGMEACVGAHHLSRKLKGLGHDARLMPAKYVRPYSKGQKNDFRDAEAIAEAVQRPTMKFVATKTADQLDLQALHRVRERLVSQRTGIINQIRAFLLERGVAVRQGQRFLRAELPGILATPPDVLSPRMVHVIEDLAGDWRRLDERIEGLSGEIEAIARRDAGCERLMSVPGIGPIISSAMVAAIGDGDAFAKGRDFAAWLGLVPKQISTGDRTILGKISKRGNRYLRVLFVQAAWVVLIKPKSWERHGLKPWLEAAKKRLHHNVLAIALANKLARIAWSVLARGRSFEARKIDEAATQPA

SEQ ID NO: 263210 - protein, 344 aa, unidentified
MEPMYYIGLDVHKRKISYCVKDSGGKVHAEGSLAARRLDLDRWMKTLPQPWSAAMEATMFTGWIYDHLKPHAAALKVAHPLMLRAIAAAKKKNDRIDASKICDCLRCDFLPECYMASTAIRERRRTLRYRNLLVRQMVQMKNKIGMLLMEAGVSYNKQRLHKAGYFRELLASNPDIDAGLGSLLRLCRETVVRLQKTESALVRSLERDSSLTDRVERLMTIPAVGPITALTWALEVGDVQRFSSIKKAISYCGLCGAEKSSGNTVQRTPLSKQRNKHLQTTLIEAAKMAPRNSAELAMLYDKEKQKGNANRATLAVARKLVAYLMAVDRGHRNFHVVETSTIAA

SEQ ID NO: 263211 - protein, 422 aa, unidentified
MLAEAEDQEEIIARVAALDIGKAELVCCVRLPAPRGRRKRLQEVSTHSTMTSSLTELANHLVELRVQRVVMEATSDYWKPVFYLLEAHGLDPWLVNARDVKHLPGRPKTDVIDAVWLCKLAERQMLRPSFVPPLPIRRLRDLTRYRVDLVAARTAEKNRVEKLLEDAGIKLSVVASDIFGVSGRAMMAALIAGERDPKVLAQLARKRMRTKIARLEDAFNGHFDDHHRFLLARMLGRIDSIDADIAAVDEQIEAHLAPFAKAAARLDEIPGIGPTAAAAIIAEIGLDMSRFPTAGHLCSWAKFSPGINSSAGKSKGNGSTGHGNRYLARSLGEAAVVAGRTDTFLGERYRRIAKRRGKKRAMVAVGRSILVIVWHLLAHDDARFTDLGPDHFTKHLTPDRQKRNHIRHLEALGYTVTLTPAA

SEQ ID NO: 263212 - protein, 450 aa, unidentified
MRSQPQEIEDEEHEQVIDRVAAIDVAKASGMVCVRVPHESKPGRRVSRVWEVPATTRAVTELADYLVCQGVGKVTVESTSDYWRIWFYLLEAAGLDIQLVNARQARNLPGRPKTDKLDCVWQAKCTERGMLSPSFVPPAQIRQLRDYTRLRSDLTQERTRHWSRLEKLLEDALIKVTAVASTIDTLSVRAMIEALIAGERSPAVLAGLAIGKMKAKRAALIEALTGRFDQRHAELARMLLDQIDALTGHIDTLDGRIEQLIAAMPAARGVDADGTTGPGAGLGPGAAVRPAAGRLDEIPGIARRTAQVIIAEAGLDMTRFPTAGHLVSWAKLPPRTIQSGARSSSGKTGKGNPYLKGVLGQAAAAAAKTDTSLGERCRRLARRIGKLKALVAVARSILVIIWHLLSDPAARFTDLGPGYHASRIDTGRKTRNHIRQLEALGYTVTLAPAA

SEQ ID NO: 263213 - protein, 328 aa, unidentified
MAPVSVGIDVSKRELVVAVEPSGVQWTSATTPAALTAVVARVRGLMPHIIVVEATGGYERALVAALAAADLPVAVVNPRQARAFAQATGRTAKTDAIDAALLARFGARLEPAPRPLADPATQTLAALVARRRQLLEMIGMERARLEHAPPTGHLTRELRRHIRWLERRVDDVDDEIGTSIEAHPTWRVHDELLRSVPGVGPTTARTLLGELPELGRLDRRSIAALVGVAPLNCDSGAQRGQRHIWGGRAAVRAAIYMAALSAARHNPVLRAFYRRLRDAGKPAKVALVATMRKLLTILNAMIKHQSHWTAQVASTPASLARSARAATV

SEQ ID NO: 263214 - protein, 338 aa, unidentified
MGIVYVGVDLAKNVFAVHGVDELGKPALVRPAVPRARLHELIASLPPCVVAMEACTGAHHWARLFGARGHTVRLIAPKFVTPYRMSGARGKNDAADAAAICEAAQRPAMRFVPIKSQQQQSQLMVHRARQGFVQARTACINRIRGLLAEFGHVLALKADTVRRQAAALLEDLPGWANTVIGDLLSELHRLDERITQYDRHIAQIAREDERAAQLMRLNGVGATTATAVVAMIGNGHEFRCGRQFAAWLGLTPWQYSSGGKTRLGRITKAGDGYLRSLLILGARSVLALAKSRSDGLSSWALALQQRRGYWKAVVAIAAKNARLAWAVLHRGEAFKMPA

SEQ ID NO: 263215 - protein, 362 aa, unidentified
MKHIAIDLGGRESQICVRDQTGQIVEEGKSATSKLGQFLQKQSKSRVVLEASSEAFFVADAALKAGHEVRVVAATLAPALGVGSRGVKNDRKDARVLSEASTRVDLPSIHIPSQTSRELKAFCASREATIRARTLIVNVIRSWARTIVLGLGGTPETLSARVLEATAKTDSPCPPHIEAILVTLDHLNEQIKSADRELKQLAQASAVCRLLMTVPGVGPVTAVRFLAVVDDVARFENAHALESYVGLTPGQKQSSSQNHKTGLTKAGSPRLRWTVVQAAWSAYRTRPNDPMVLWAKEIQKRRGKMIAVVALARKLIGILYAIWRDQQPYDPRKGAAAMTVSQEPETVMGGVSVLREAHQPLE

SEQ ID NO: 263216 - protein, 409 aa, unidentified
MTVMIGVDPHKGSHTAVVVDAGERSLAELRVRSGPKQLERLLAWAQRFPERTWAVENATGLGYLLAQQLVAAGERVLDVQPKLAARVRLLASESTNKNDPHDALSVAIAALRSRTPKAVGVEDQAAVMRLWARRHRNLSSTRTQIACRLHAVLCDLVAGGVHDEIYVEKAASLLAEVEPDSAVAAARVELAQELRDDLRRVDRQLAESKKRLEQVVAASGTSIVNIFGVGPFVAATIVGVTGDISRFPTRDRFAAFNGTAPIEVSSGGRKVWRLSRRGNRTLNHAIHMAAVTQVRWRHSPGRGYYDRKIAEGKTPKEALRALKRRISDALWSAMVADARPATATTEARSLKAGPGGQPGNDSVASVAGSHPDTPALRPSHSRAQPKATSRTTRPSRRATAATTTGRRTA

SEQ ID NO: 263217 - protein, 356 aa, unidentified
MLNKFSKNLDFTGHNVYVGLDIHGDSWAVNIIVDEIEHRRFTQPPNPVVLYNYLCKNFPGASYYSAYECGFCGYHHHRKLLELGIHNIVINPADLPITDKEKTNKRDPMDSRRISRALQNNQLKGIYVFNPDHEQFRSLNRMRWRAAKENRRVKNRIRSFLHYYGINPPEELNPEYWSIAFLNWLKQLRLPTEAGTLALDYLLIAYQNTRTQVLQVTKHIRRQVKLHYSNVYKRLITVPGIGPINAMCMIAEIGDMSRFKSCKHLASFVGLVPRSHQSGSKDPNCSLTYRSNKYLRSALVESSWMALRYDPALLKYYKERIVKHKAQVVITKIAHKLLNRIRNVWLNENTYQIGLS

SEQ ID NO: 263218 - protein, 326 aa, unidentified
MMYLGIDIAKKKFDVALVKERQLIATGQFDNTLAGFKKLGKWLKNKGAEPVWACLEATGRYGDDLAEYLYQQGHQVSVVNPARIKKYAESKLQRNKSDRLDARVTADFCETQEPALWSPPPPEKRELQEMVRRLSVLIQERTRERNRLQSGLRSEIVKASLQANLDFLNLQISDLEKKIQAHINQHPDLKRDRDLLTSIKGIGDKTAARILGELPNISQFDNSGQVVAYAGLSPQSHDSGSSVHKRARLTKTGNQNLKTAMYFPALSAINHNPVVIAQANRLEKRGKEKMVIVGAAMPKLLQLAYGVLKSGQPFDPYYSANIQGSV

SEQ ID NO: 263219 - protein, 349 aa, unidentified
MKFYTKQHKYYCGIDLHARSMYLCILNSEGKVVFHKDIKTRPEALKIAIAPFLDDLVIAVECMFSWYWVSDFCEDNNITFVLGHALYMKAIHGGKAKNDRIDSYKIASLIRGGTFPVAYVYPRGMRSTRDLLRRRMHLMRKRAELLTHIHNTNTQYNYPEIGKNLRYKSNRKLVDGRFSDPSAQRSVDLDIQLINFYDKQLSSVEFYIRKNARVHDYHSYMLLKSVPGIGDIISLVILYEIHNINRFPTVQDFASYSRLIKCRAESAGKTYGSSGAKIGNAHLKWAFSEACVIFLRGNPTAKMYVNKLTKRHNKGKALSILAHKLGRAVYFILKRKQPFNMQRFFAATA

SEQ ID NO: 263220 - protein, 400 aa, unidentified
MKGFLHMKLIGIDIGKNKHFFCIMDQQTGEIISQPISFSNDKEGFDFLVQKIKSYPKDSILIGMEDTGHYHFALLKYLLNLQYTVALINPKTTDFNRKMQGGITKNDKLDTINICDVLDTPERKKQYRITKVNSFDLYEQKQLTRHHHNLKEEENVYKNRLQKCIDIVFPEFNNLFNSKYGTVYMNILKMFGSAENIANTDIRTIRKCFEIEGRGNRISLTPERLKECAGSSIGISSSAEVIQIKHLTAQIELIEEQLTEIDKKIEEFSIQNNSPILSIPGISHFSGTSILAELGDISNYSKPSQIIKFAGVAPLHYESSQFNAQHTAITKKGSKYLRKTLYQIMLPVIRHNPVFNKYYQLKISQGKGHRCAQGHCVRKLIRIIYHLLKTNQQFDPQLLR

SEQ ID NO: 263221 - protein, 401 aa, unidentified
MEGPIVSIDVSNGNSHYMCFIKNNKRFGKVKKIDHDIEGFKRLLEDIQKLEAETNEKVCAVFEATGVYTKPLERFLSKNSIKTYMINPLESARKRKEEIHNKKTDKLDPISISKVYYDKEEMMELKKKDETYNWLRKKNRLYEDQLNHLRKYKVTFQNQLSICFPGYLDLFKDGYSDIPMTILKKYPHPDLLKNKKAETVARYLEKNTCHNHKVSLEYALKIIEFAKKTYPGCEKDDVEIEIFKILLDKVIETQRECEKTLNEMITVASTLEEYRYISSIDGIGPNLAARIIAEIGDIEEFKSREALVAYAGLDPHIYQSGGQDGKHLKISKKGNKYLRCLLFLAVGCSIRGAKDNPVNRFYQKKKQQSNPLNSKAAKTACTAKLLKIIYGICKNKTTYER

SEQ ID NO: 263222 - protein, 345 aa, unidentified
MGHFAGLDVSVKETSVCIVDDTGRLVREVKVASEPEALVPVLTNPLYRFKRIGLEAGPLSQWLFSALAGAGLPVICVETRHMRAVLQAQINKTDRNDARGMAQMMRVGLYRPVHVKTLRSQKLRMLLTHRKLLQSKAIALDNDLRGTLRNFGLKVGMVGKAKFEARIQELVENLPDLAELVEPMLIVRRTLREQIGILHGRLLAIVRNDDVCRRLMTVPGVGPVVALTYRATVDVPARFRNSKAVGAVFGLTPARYQSGEIDRPGAISKCGDEMMRAMLYEAAHIMLVRSTKWSWLKAWAMKIARQRGMKKAIVALARRLAVIMHRIWVDGTEFRWAREQAAAAA

SEQ ID NO: 263223 - protein, 350 aa, unidentified
MKVTTIGLDLAKNVFQVHGADAAGTPVLRKQLRRAQMAEFFAQQPPCVVAMEACGGAHHWGRKLRALGHQVRLIAPQYVKPYVKSQKNDAADAAAICEAATRGHMRFVSVKTVEQQSVLALHTARSGFVKQRTALSNQIRGLLAEFGVVVPQGLSKLSGQLPIVLADQNNELTDTIRNLFRTLHAELAHIDDLVARLERQIREWANQDPGARLLQQILGIGPITASALSAVIGDIRQFKNGRQLAAWLGLVPRQHSSGGQSVLLGITKRGDKYLRTLLIHGARAALKAYQRNPEKMPAHLAQLLARKHPNVVCVALASRNARVAWAMLSRGEDYKGWEVAKRPALPAQLS

SEQ ID NO: 263224 - protein, 353 aa, unidentified
MLIIGCDFHPGFQQIAIFDNQTGAYEERRLSHRAEAEQFYCSLAGQQVRVGMEACGHYPWFERLLAELGFELWLGDAAKIRASVVRQQKTDRRDAEHLQILMREDRFPRIWVPSLEERDVRQLLVHRHKQVQARTRTKNQLHALALSQGVQKKWKLWTAAGRAELESLELLPYAAQRRRQLLHRLDALEAEIAGLNRQVEEEVKGRPAAVKLMTHPGVGPVTALAMVLTLGPAERFRDGRKVGSYFGLIPSEYSSGGRQRLGHISKQGSSLVRFLLVEAGQSAVRKDAELGRFYRRLGARKHRALAKVAVARKLAVRLYLMLREDWTYAQLCRAVVQASPSHSVAASKNRPLE

SEQ ID NO: 263225 - protein, 400 aa, unidentified
MISVGVDVSKGKSTVCILKPYGEVVSSPFEIHHVEKDMEDLDNLLSKLDGEIRIVMEATGIYHLPVVTFLHDKGYFVSVVNPFAMKKYAKDNSIRGAKTDRLDSIMIANYGIEKWFKLQRYEGTEETYAELKLLGRRYRYYMELHVKALQELTHVLDYVLPGIKKMFNSWNEANGKDKLSDFVERSWHFDLITSMSLEKFTEEYIAWAKEKKYHRSRSKAEAVYELASSGIPTLSSSTPSTKMLVQEAVSVLRAVDSSLSLILTRMQELAKSLPEYSVVREMGGVGNVLAVKLIAEIGDVRKLHNAKALIAWAGIVPPPYESGQFIGSKRRITKRGSSTLRKVGYEVMRVLKSHSAPKDDAVYNYILKKESEGKSKKHAKIAGLNKFLRIYYARVMEVYQ

SEQ ID NO: 263226 - protein, 400 aa, unidentified
MKGPIVSIDVSNGNSHFQCFTQRGTKMGKVHRISHTVEGFNCLKSKIEELEKKTNEEVVAVYEATGVYTKPLERFLEKNEIKQYSISPLQSAKQRKTEIHNKKTDKKDPESIAEVYYIKELREDEKEADLYHELRTANRVYEDCLVHLRKYKVTFQSHLSIVFPGYMKLFQDGYSQISLQLLEMYPHPDRLKNKQPEKVAKKLNKHTDHSFEVCLKTAEKAIAFANKTYPGCDKEDAWVAVLVDDIHHLQDTMEEAEAKLDKIIELAKTTPYYSIILSIDGIGPNLASRIIAEFGDISKFKTRGAMVAYVGNDPNRAESGDIEGYHLSISKKGNKRLRCILYLAVTCSIRSRKENPINAFYQKKRQQSTPLKSKAAKVACITKLIRTIHGMCKTGTVFTS

SEQ ID NO: 263227 - protein, 373 aa, unidentified
MGGPPRSRLSWSAVSTREREALVVEYLGIDWSYRRAAWCALSEGGELIGEGAVPADEDGLARLVVQHGRGVRGVVEMMSGAIWVRDTLAAAGWEMQIAHARKVRDVAPIACKTDKVDARVLAELCRRDLVPALWVPGLEDRELRERLRRRTHLVRLRASAMNRIFGLLTQWGLRMSLKRLREPGAMQLLAARGVPEVWQRSISEALALIDLLDERISPLDQELRPLAAADARVVLLDTIPGVGELLGLTLASEIGDISRFASPRKLIGYAGLAPKINQSGDRSRTGALSKAGSRTLRWAAVEAAQHAWRESNPWHQLYNDIAARAGKNPAKAAVARKILIASWHILSRHEPFKAPTSRRPDPASASSRCFLAA

SEQ ID NO: 263228 - protein, 281 aa, unidentified
MFPVGIDVSKNTLDLCMLYDGIKGRIKTRNIQNNRHSVENILRWLRLQHCSPEDVHVVMEATGVYHERLATELHDAGFRVSLANPHRSREFARGMGIMTKTDKVDAYMLACYAFLKKPHRWEPPAPEIRYLGALLRRRDVLLGDALREENRLEKYLSTDTPADIISSCRRMAQLLREEVSNIERQIKAHIKASPALRRDYTLLTSIKSVGPQLGMHMLVVLRSHNFVSAEQAAAFLGVVPIEKRSGTSVRRRPRMSKIGPPQLRAKLYMSALCGKIYNKRM

SEQ ID NO: 263229 - protein, 438 aa, unidentified
MEEAGDEPLFCERAAGIDIGKQVVSVTIRVHSDTRRGGRQQETREFGTTRRQLLEMADWLRCWQVERAGMEATSDYWKPVYFLLEREGFDCLLYQASQVKALPGRPKTDRLDSAWLARITEQGSLAGSFVPPEDIRRLRTHTRYRRRLTQARTAEKDRCEKLLEDAHLKLSSVISDIHGVSGRDMLRAIIAGERNPEVLAQMARTRMRRKITQLREALDCSFFTPDHAFVLQMMLDNIDQLTAQIAVLDERIAILCEPYERQLAQLDGIPGFGVRTAQDLIGEIGVDMTAFPTAGHLCSWARLAPRVRESAGRRKGKNATGRGNPYIGGTLGEAAAGAGRTQTFPGAKYRRLCTRMPKKKAQGAIMRDQLVITHALLSDPEAEYRDLGAGYYEQRERTRRRASSHVRSLERLGYKVTIEPLAPDADPETGELITRTAS

SEQ ID NO: 263230 - protein, 386 aa, unidentified
MPKPADLNRCLAPLDQDHTIIAVIEMSQSSWLVAGIVPGIARHPLKKLAPDQDALLKLLHRWRAEAGQAGREISRIAVAFEAGRDGFWLARWLRAHGIEAHVIHPTSVAVSREHRRAKTDRLDTALLKRVFLGWLRGEPEHCHMAAIPTLEDEDARRPTRERECLVGERTRIVNWIKAALVRLGVRGFKPTVRNALEHLDALRTPEGTALPPNTRAELHRDMARLHFVTEQIQQIEAARGERLEQAGAGPNAMVRLLAQVVGVGIETADMLVHEVLSRNLRDRRAVARYAGLTGSPDESGSRRREKGLAKAGNARVRRGMIQLAWRFLLHQKESALAQWYRARTADARGSTRKTLIVALARKLLIALWRMVTTGEAPTGVVLRPAA

SEQ ID NO: 263231 - protein, 314 aa, unidentified
MSHGFVGVDVSKDRLDVALYPETSSWSVPNDEAGIEDLVQRLRPLHPARVVLEATGGYEMPAVGALAAAGLPVVAVNPRQTRDFAKAAGLLAKTDRIDAAALARFAEAMKPEIRPIPDAAARELGALITRRRQVVQMLTAEKNRRPMAPKRLHKDLDRHIAWLEEALRRLDDELQKTIRNSPAWREKDDLLQSVDGIGPKTSALLIAELPELGRLDRWEIAKLVGVAPMNRDSGRYRGERHIQGGRAPVRSALYMATLAAIRCNPAIAAFYHRLRDAGKKFKVAITACMRKLLVRLNAMLRDGVAWREKSPQIT

SEQ ID NO: 263232 - protein, 351 aa, unidentified
MEYVGIDYHTRYAVATRMTGEGEILSEKRIPNLKDDIRNYFSQLPVDTQVVLEATNNWAAFVEWTHDLPIEVKLANPAKTRAIAEARIKTDSLDSRVLADLLRSNFIAESYLAPREVRDIRELVRYRMTLVRLKSQLKTRIRSVLFKVGERVPTANIAGPLAREMLSKFSLRDIYRDEINSCLSLIETFSKQIGEFEEKIESQAKLDSDTKLLMTIPGISFFSALLITAEIGDYRRFSSGRKLCCFAGLVPSVHASGGKIRHGRIIKRGSANLRFALLQAIPHLIRKHHGLARHYQRISRKKGVKTARIAISRKLLAIMLTMLKTRAPFRLDTRVKEKPMLTLSASARESV

SEQ ID NO: 263233 - protein, 354 aa, unidentified
MSHLNSGIAAIGIDIGKNSFHLVGQDQRGAIVLRQKWSRGQVEARLANLPPCLIGMEACVGAHHLSRKLRALGHDARLMPAKYVRPYSKGQKNDFRDAEAITEAVQRPTMKFVATKTAEQLDLQALHRVRERLVGQRTGIINQIRAFLLERGIAVRQGLRFLRAELPTILATRSDALSPRMLRLVEDLAGDWRRLDGRIEAISGEIEALARQDQACERLMTVPGIGPIISSAMVAAIGTGDAFSKGRDFGAWLGLVPKQISTGDRTILGSISKRGNRYLRALFVQAAWVVLVKLGKKWERYGLRSWIEAAKKRLHHNVLAIALANKLARIAWAVLHRGRAFECVKMDEIAPRSA

SEQ ID NO: 263234 - protein, 339 aa, unidentified
MNYYIGIDLHSTNTYVGVIDQENRKVFSKKFPNQLDTIIQALEPFRSAVAGVVVESTYNWYWLVDGLKEKGYRVHLANPSAIKQYEGLKHADDVTDAFHLANVLRLGILPEGYIYPQAERPVRDLLRKRLHLVQQRTAQILSVQNLLTRNLALRMTAAEVKKLNVWDAGQLFTERHLILSAAASIGTIGFLGARIKELEKAVRTAGNLKRDYHLLQTVPGIGVILALTIMYETGEISRFARVGNYVSYCRCVKSTRLSNGKSKGAGNRKNGNRHLSWAFVEAANIAVWNYGYVKSYYQRKAARTNTVVAIKAVAHKLARACYHIISQQQAFDPKRAFAY

SEQ ID NO: 263235 - protein, 454 aa, unidentified
MGKRGEKRERRSAILEPDAAGIDIGAEEIYVAVPPDRDEQATRRFSSFTCDLYALAEWLECCRIRTVAMESTGVYWIPLFQILEERGFKVYLVNAHSLKTVPGRKSDVSDCEWIQYLHSVGLLKASFRPPEDICAVRTLWRHRGSLLQMAAEHTQHIQKSLSLMNLQLHHVLSDITGASGLAILDAILAGDRDPVCLAHLCNIRVKSPRETVAQALVGDYRPEHLFTLKQSLDGYRYYQKLIAELDDEIARLMHTLPNATDHPAPIPKRTKRTAYQRMGNDPLFDLRSELYRIAGVDLTDIPGVSAIAAQVVLTEVGPDVSRFRNASAFAAWLGLCPDKRISGGKVLSTKTRKVKNRVAIVLRLGAKSLSRAKDYFGAFFRRMRARLGTAQAITATAHKLARVVYHVLHSKEPYTEVVFHRCDEQEQQRAEMRLRKHAAQLGFQLLPISTNPAA

SEQ ID NO: 263236 - protein, 400 aa, unidentified
MISVGIDVSKGKSTVCILKPYGEIVSKPFNITHTQKDLSELSSMLFRLNDEVKIVMEATGIYHLPVLTYLQEKGFFVSVINPYLMKSYRNESLRKAKTDKIDSRIIANYGLDHWFKMKEFQISGVIYEELKLLGQQYRHYMKLHLLSLAELTHLLDLTMPGIKNLLASWNETNRKDKRSDFVERFWHYDVITSMSEQEFTEKYILWAKEKKYVPSQEKAKVIYTLAQESIPTLPSETSSVKMLVTEAVRVLKEVDATLGLILSRMQEIAKTLPEYSVVREMGGVGNTLAPKLIAEIGDVRRFRNGKALVAFAGIDPPPYESGQFVGCNRKISKRGSASLRKVGYETMRSLKMRSRPEDPVYRYVVKKESEGKSKKSAKIAGLNKFLRIYYARVTELYKNI

SEQ ID NO: 263237 - protein, 389 aa, unidentified
MPTVADRPEAQTTIQTNLAAIFISLELSRSIWLITSLSPGGGEKMSKHSVPAGDIAALLARFSELKQKALARTGKSFPIVTIQEAGLDGFWLHRVLQSEGIESHVVDPASIATSRRRRRAKTDRIDGEVLLRALLAFKRGEPRVCAMVRVPTPEEEDRRRLCRERKVLIAERVKHVNRVKGLLFSQGVSGYEPLRRDRRQRLDELTTGDGRPLPTHLKTQISRELDRLELLLDQIKAAEAERDALLAAQQAATPAPAGRMLLDLKGIGPEFAANLWLEGLFRHFDNRRQLASYAGLAPTPWQSGSVDREQGVSKAGNPRLRTTLIQLAWLWLRHQPQSALAQWFKERVSRNGGRLKKTTIVALARKLLVALWKYVTAGVVIEGAVMKAA

SEQ ID NO: 263238 - protein, 347 aa, unidentified
MDYYAGIDVSLEQSSICVVDASGKLLREAKVSSEPEALIAWFCGLPFGLSRIGLEAGPLSQWLYAAMKEAGLAVELLETRHVRDAFKAMPVKTDRKDARGIAQLMRLGWFRPVHCKSVAAQEVRALLTARKLVQSKLYDVEMSLRGILRGFGLKVGPTNVKSFAGRIKELAAGHPTLQAIAEALLSVHTVLARELAGFEKKVRSIARCDARVRLLMSAPGVGAIVAMTYVFAIDDPARFKSSRMVGAHFGLTPKKYQSGETDVTGRISKIGDSSVRAALYEAAHVILTRAVKGSDLKSWAMRLAKRAGMRKAKVALARKLAVVLHKMWVEGTKFIAEKACRPVATAA

SEQ ID NO: 263239 - protein, 347 aa, unidentified
MKRIAVDLAKSVYQVAESVRSGQVVQRKRLNREAFRRYIQEQAEPVEWVMEACGTAHYWGRLAQSLGHQVKLLHPRYVRPYRRRNKTDRNDCNAMLEAARCTDIHPVPVKSHEQQQLQQLHGLRETWNKSRTQRINLLRGLLREAGIDAPASSTAFIRAASELVEQPELEPLSRLLHIVLAEINLYEQCMAECEQQLKCWHADDEIVRKLDEVSGIGLLTASALTTAVGKPERFASGRQLSAWLGMTPREFSSGNSRKLGHISRQGNVYVRTLLIHGSRAALLAAQRCQARTPEKLTQLQRWAVESAARIGHNKAAVALANKLVRICWAVWCHERRFSGNWQSVKPA

SEQ ID NO: 263240 - protein, 419 aa, unidentified
MSFKIRKNNCCGLDVHKTWIYACIGITDSFKRTEYKQARFSSFTKGLQELCLWLAKYNCIDVCMESTGKYWIPVFNILEKHNLWVTLSHPKYTKPQKGNKTDRKDAKWICDLYMCGMVKPSFSPPADIRQLRDLVRYRFKLTCMITGEKNRAHNCLTVSNLKLDDVFSDIFGKSSRSITEQILQHPGEVFDVAPFVDSRCKTPIEEIQAAVDGAISHEQAVKLRQCLKHIDELEMHKAEIEREIFRLSQKYESVLDLIRTIPGFDKNPLTAIQVLSEIGADMSVFPTAKNLVSWAGCCPRNDKSDRKIKSTRISRAGTYFKPVLVQIANALIKSKKHPEFTNRYRRIKARRGHKKAIIAICRMILTAIWHILTDLKPYTPEGFLESRPVNKEKVLTISQALNLIKQRGYIIKDDVGPVT

SEQ ID NO: 263241 - protein, 415 aa, unidentified
MALKIVYKICCGIDVHKTFVVACIASTNDKGITSYESHRFSTYTSGLKTLLQWLLDRDCKDVCMESTGKYWIPVYNILESDCSIVLAHPKYVKAIRGKKTDKKDAKWIADLFKHDLVAGSFMPPADIRQLRDLMRYRFKLTCFKSSEKNRLQNCLTVSNIQLGNVVSDTFGKSAQAILDKLLENPADTSFDLEPLVYKSLKKKLPELRDAIDGYITPEQAGKLKVIKAHYENLESRKAELEELILALAAPYQQELAILQTAPGISSDFTAIGIISEIGTNMEAFPSAKHLCSWAGLTPTNNESAGKKKSVRVSKAGCYIKPLLVQCANAVVKSTKHPEMRNRYLRLKKRRGHKKAIIAIARMLLTALYHMLKNGENYNAELYQKSDLLPVDREITVEQALMIARNQGYKIKSATA

SEQ ID NO: 263242 - protein, 313 aa, unidentified
MSQNIMTTIYTGLDIAKLNLQLHFAGRSHDLPNTAAGHRRLLKLLTTQAGVHVVCEATGGYEREVVAALHEAKVPVSVLNPARVRHFARATGQRAKTDDIDAAVLTAYGQALQPKPTAPRTEQEQQLAELIRRRVQVVEILVAQRQQAERLTVPALRRQAQSLVRRLERDVAQIEVQLKALRTQASALDARVQKLEAITGVGAITALGVLAELPELGSLNRRQAAALAGLAPHPRESGQWHGRRSIGGGRAPVRRALYMAALVAAHSNRQLKEFYQRLRAAGKPAKVALTAVMRKLIVLMNHILKNPNFALQN

SEQ ID NO: 263243 - protein, 342 aa, unidentified
MKIIGCDFHPSFQQIAMVDSETGEYREKRLTPEEARQFYVELKGPVLVGMEVCGNTLWFERLLASLGIELWLGDAGKIRAQEVRKQKTDRRDARLLLQLLLDNRFPQVWVPSVQQRDTRQLLLHRHKLVQMRRQVKNELQHLALNQGVQQKRKLWSAAGRQRLEELPLTGWTAQRRQDSLELLDELNRRIAKLDVAAQQEADRDAVARLLQTHPGVGPITALAYSLTLGEIERFAHSRQVASYLGLNPTEHSSGGRQRLGAISKQGNPMLRSLLVEAGQSAARSVPELKRAYQRLKHRKHSGVGKVMVARKLAVRLFWMWKTQQPYTAARTQGSPGHHVVAV

SEQ ID NO: 263244 - protein, 392 aa, unidentified
MLYLGIDQHGKQLTVNLRDEEGRVLIARQVSTEWKRVRAFCEQLRQQGQAAGGFKSVLEVCGFNDWLVKMLRDEFGCADVVLAQPVSRSRKKTDRRDAAKLSELLWINRQRLERGEKPPGLRRVVLPSPEDAENRQLTAFRKRLGECRTKTLNKIRMILMRHNLQQECPTRTRHSQAARRWLEQLALPEIDRLEMKLLLEQWTFWDKQLVEVEKKICERHAKHAEAQLMATIPGARDYTALALASRVSGIDRFPRASSLANYWGIVPGCRNSGEATQRLGSITKEGSALARFLLGQLVLHVLRKDRPMKDWYQRIKRRRGAKIARVAVMRRLATVIWHMLHDRRSYQEVRDQEQARGAPRGVAGTCEESPPRRLAAVERGTAKRAKKQSARV

SEQ ID NO: 263245 - protein, 364 aa, unidentified
MTEGICFAGLDVHARKTAAAAVQLGSGEVFKAQLPGSPRAVIEWLVGLPGPVRAVYEAGPTGFGLARQARAEGVEVMVCSPGAIPRQPGDRIKTDTRDALKLARLHAAGQLRAVLVPTLELEALRDLVRAREDLRGDLMAARHRIGKLLLRRGLIFPGPGDPWASQRHLAWLGSIGLDDRLAQIVLGEYLACHEALLARRDRLDALIAEQAQTERWVGVVGRLRCMRGIDTLTAVGLLAEIGDFSAFAHPRQLTSFVGLVPSERSSGDKRRQGSITKAGSSHARRLLIEAAWHYRRQPAVSLTLRRRQDGQPPAAIQVAWRAQLRLSKRWAHLDARRAKRRTTVAVAVARELTCFVWEIARQPD

SEQ ID NO: 263246 - protein, 337 aa, unidentified
MFVGIDVSKERLDVHLRPSAETFTVARDDQGLEQLVVRLATAGPALVVLEATGGFEITVAAAVAAAGLPLAVVNPAQIRAFARAIGRLAKTDRLDAELIARFAEQVRPEPRPVLDEQTQILAELVARRRQIVEMIGMESNRRRQARSAKVLRGIERTLAALQAALAELDQEIDGQVRGSPAWRAAEDLLTSVPGIGKITARTLIAELPELGRLDRRRIAALVGVAPVNRDSGAWRGHGRSPAAGPRCGTRCTWLPSAPPPGTPPSAPFICACVPEDDRPRPPSSPPCASSLPSSTRSCATVDHGKALDPQHSHSGLGSGLRRLRRPAPHALSATFVA

SEQ ID NO: 263247 - protein, 339 aa, unidentified
MNNVSTIGLDLAKKVFQVHGVDGGGEATVRRTLRRSQVLAYFGKLAPCLVGMEACATAHYWGRELSKLGHTVRLIPPAYAKAYVRRNKNDPADAAAICEAVARPAMRFVTIKTAEQQAAAGVHKVREMLMKQRTMLMNSLRGLMAEFGIVVAEGPRHIGELVAILADPDDRRIPAPLQGGLVRIAEALRHLERQIEVIDKQILDWGRGNAICRHLITIPGFGPILSTAMAAIVVNPATFRSGRDFSASLGLVPRQDGTGGKVKLGPISKRGNGYLRRLLVSGAMSVLSGRRAKQDPWLVKLLVTKARKVAAVALANKMARIAWAVMMRQEDFRTVPAAA

SEQ ID NO: 263248 - protein, 375 aa, unidentified
METIYIGVDFHARQQTICYLTTESGEFVTHELKHQDKDEVRTFYAQFGGRVIVGLEASGYSPWFEQLLEDLGHEVWLGDATEIRRRARWRQKNDRRDAELILDLLVHDEFPRLHRPSLESREILRMLRYRHKLVKMRTIIKNSLQALALQSGLSRRTKLFTKAGQQELRAAPMSPVMKQQQEQWLELLLVLNQRIVETTLWLKQQSLNDARLRLLRTHPGIGLLTSLGLVHTLAPVSRFRNQRKVTAYAGLEPMERSSAERKRFLGISKAGSRLLRFLVIEAAHTAVKKDDDLKRFYRRLQERRGRPKAKVAVARKLLVRSFIMLRDEIDYAEFQRRAVVARLARQSSRPSVPDRLIGQPASSESQECVRSESKK

SEQ ID NO: 263249 - protein, 416 aa, unidentified
MKIVHPICCGVDVHKRTIVATIAATGQNNITSYSTKSFSTLNSDLFAFRDWLLESNCLHVCMESTGKYWIPIFNILEPCVHVILTHPKYVHAIKGKKTDKKDSKWIADLFKHDLVKSSFIPPKHNRSWRELARYRAKLVYMRTSEKNRYQNCLTISNIGLASVLTDPFGKTAQNIMRHVLSSSVFDETKCKTLIKKSAKKKTDLILQSVKGCSVESDQKYKMNAAMAHMEFLDNAIIKTETELFVRMQPYYHFVEHITNVPGVSQLSAALILAETGTDMNVFETAGHLTSWAGLTPANNESAGKKKSVRISRAGQFLKPLLVQCALAAVKNQKEPYFANKYQRIKKRRGHKKAIIAIARMMLVCIYHMLKTGEVFKPSDYEEFQNPAPKRVVLNETNAFEFLRQQGYDISALKKAM

SEQ ID NO: 263250 - protein, 343 aa, unidentified
MKRRTLGIDLAKDCFQVSVSHGDGRVIGRHRFNRAQFTEFMAQSPASRVLLEACGTAHHWARTCNALGHQVELLPAQHVRPYRRGNKNDRRDADALLEAGRCDDIVPVPIKNENQQAVIQLHRLREQWKTTRTARINSLRGALREFGLDLPAGAVNAIKHAPRHLDHLPGHLRTALQAVLQEIETLQLRLLAVERSLEEIATEDAAVKRLRQVEGIGLLNATAMVATAGSASHFPSGRQFAAWLGITPRESSSGFRRNLSRITKRGDVYLRTLLIHGARSVLARAKQVNRIDPTRLSRLQQWGLQLQRRIGHNKAAVALANKLARICWAVWRTETRYEPGYGA

SEQ ID NO: 263251 - protein, 348 aa, unidentified
MVHFVGLDVSVKTTSVCVVDDAGKVILEQKVPTDPADIIAILSSLGVSFGRIGIEAGPLSQWLVNALTVANLPVICVETRHMKALLTAQQISKTDRSDARGIAQMMRVGLFKPVHVKTLVAQEQRMLLTSRKLLQRKLLDVESDLRGTLRNFGLKVGVVSGGRYEARIRELVAGFPRLAVIVEPLLSVRRVMRQQFAVLHKMLLDMVRADLVCRRLMAAPGVGAVVALTYRATVDQPQRFVHSRAVGAHVGLTPKCYQSGEIDYEGGVSKCGDALLRTMLYEAAHSLLTCNRKWSWLKAWGVRVAQRRGMRRAIVAVARRLAVVLHRMWVDGSEFRWRKDSAAVPAVA

SEQ ID NO: 263252 - protein, 368 aa, unidentified
MIVHIMTYERSTLVNSEKYIGLDVHQATISVAVMDPRGKVVMESILETKASTILEFFAGLRGTLWVTFEEGTWAAWLYDLLKPHVAKLVVCNPRKNALLKHGNKSDRIDARKLADLLRLNDLEPVYHGETGVRMLRELARSYLTIVKDLSRVMNRLKALYRSWAIPCAGRDVYYTRHRSEWLEKIPEAGTRRRAEQLYQQLDMLQHLRQQARRELLAESRKHTITAKLRQIPSLGPIRSALAVALIQTPHRFRTKRQLWTYSGLGLETRDSGEYHYVQGQPRRRKKQVSIRGLNKDHNHDLKGLFKAAATRASVRPGPFQDFYQRSLAKGIKPTMARLTLARKIAAITLTLWKKGENFDPEKLKSQTT

SEQ ID NO: 263253 - protein, 409 aa, unidentified
MSVEHDPSMRRPTAGIDWASTEHALAIVGLDGVEVQRMIVEHTATGLRKLLRCLQQTGVLEVGIERPDGPVVEALLEAGLTVFVIAPNQIKHLRRRYGAAGNKDDRFDAYVLADTVRTDHHRLRPLTPDSPATLTLRMTVRARKDLIAARVAMANQLRAHLEHVLPGVIGLFRDIDSAITLSFLTRFPTQDKVDWLSPRRLQNWLHAVSYPNPARAGLLHAHLLAATRGTTGPEATARAHVTAALVAGLTTLREQINALEEQIEVQLLQHPDAEVFTSLPRAGIVRAARLLAEIGDARGRFPTPEALTCLAGAAPSTRQSGKVKVVGFRWAVDKQLRAAVIDFAGDSHHANPWAADLYQRARARGHDHPHATRILARAWLHVIWRCWQDCVPYDPIRHRALQAVLATTA

SEQ ID NO: 263254 - protein, 393 aa, unidentified
MVCVGIDVAKDKHDCFIISSEGEILADVFTIPNNAEGFDTLLQAIRRSTRPEDKIKVGLEATGHYSYNILGFLLDKGLPTYVINPLHTNLYRKSLSLRKTKTDRVDARTIAAMLMSDVDLKSYTDTVYHNEELKSLTRYRFDKVRERAKLKQSVSRLVTILFPELEKLVSSLHSASVYALLSEFPGAKHISSTHMTHLKAVLKNASQGRYGQEMAETIRNAARSSVGSVMPAKSLELQHTIRLIRELDAEIEDIETAIQAIVDEMQSPITTIPGMGVRMGAVILAEIGDFSRFDSPDKILAYAGMSPSTYQSGQLSLSGAYSHMEKRGSRYLRYALYNATKHVCHWDPTFAAYLAKKRAEGKHYNVALSHAAKKLVRLIFAMEKSQRPYCAAA

SEQ ID NO: 263255 - protein, 357 aa, unidentified
MKVATIGIDLAKDVFGLHGVDGKGRVAFKKRLVRSRLLEFMSQLPPCLVGLEACSSAHYWARKLERLGHRVRLMSPRFVKPYRKSDKNDANDAEAICEAVTRASMRFVPIKSEAQHEVQALHRVREQLLKSRTALVNQVRGLLAEHGIVAPLGIARARRLLLEILADPERHGLSGLFRETLQEMAERLRFFDERVGAYDDRIERRFKEDERCRRLAKIEGVGPLVATAVVAAVGNASEFKSGRELSAWLGLVPRQPSSGNRSQLLGISKRGDRYLRTILIHGARAALRRADHKSDQRSRWAMRIKQARGYNKAAVALANKNARIIWALLTRGENYRPPAISVASPTADRISLTQVQA

SEQ ID NO: 263256 - protein, 433 aa, unidentified
MLKLNYMSILFVGIDVSSKTNAVYAMDFEENKYISSSFGNNQPGADQLVNMIAECMQKHKNLDTVLIVLESTSVYSVHISNFLSASEVLMPYRPYVFCVNPKAASNYRKSYIGMEKTDPTDAYLIADFGRVGRTKKLEPWRGGQFISLKRLTRHRMHLSECITREKTYMVSNLYLKFSELQLLEGDDKPFGSLYGATSSAVLTEFLSPQEIIDMPEEDLLTFLAGKSRNRISDLSKTSELLRKAARDSYRLDKCMYEPLSISLASSFNCIHAYQKEIKLIEQAIEKCINGMNPNALLILQSIPGIGPIWASGILSEIGDITVFHSSDALAKYAGLYWPKGDSGDFTSEDNKMSKAGNPYLRCYLGEAANSVRKHIPEYADFYARKYAEVTKHQHKRALALTSRKLVRLVFGLLVKNQLYTGEKLDTEYNIESN

SEQ ID NO: 263257 - protein, 423 aa, unidentified
MDTLYERVAGLDVHKDTVVSCVRIMADGKTKRECRTFATTTEQLEQLRAWLGECRCTQVAMEATGVYWMPVFRILGEGVFELIVANAAHIKNVPGRKTDVNDATWIADLLACGLIKASFVPNEEIQEFRSLTRTRKQLVREQTRHVQRIEKTLVEANIKLNSVISDIMGASGRRMIEAMIKGVRQPRQLAELAGKGIKATPKELYDALHGRLTEHHRFLLDLHLKQWDGLDETIRKIDREIDQRIADTHTKGGSGEVPFRTLIELLSTVPGISTVSASAIVSEIGGDMSRFPTAGHLVSWCGLCPGNNESAGKRKPSRLRKGAPWLKTMLVQCAWAAKRKKDSYYRAQFFRLQSKRGPQKAICAVAASILTAVYHILKNGIEHHDLGASYFDRRPVELKAGRLVAHLKKLGFNVQLQPIPEAA

SEQ ID NO: 263258 - protein, 367 aa, unidentified
MQNTIVHYEGATSLEAVATKVKPSSARIKIGLDVHARLYVAVAQYDHLLPKAARRLRPEQFVPWVEELLRRGHTVHVVYEACGFGFSLYRQLIAAGAHCYVIAPRKLDEECSRVKTDPRDATTLCQRLSRYLEGNTRELAVIRVPSQEEEQARHVSRQRTQLVCHRQKLEAQGRSLLISHALPAPAHWWKEQTFSRLSKHLPVWMVERLEVHRPALLSLQKQIELLSTELEASAASGIPRGVGKLTSVVLTREICDWRRFNNRRAISSYTGLCPGERTSGSKRVPGSVTKRGNPRLRAALVECAWRLVRFQPQYPPVQKRLAVLAKGSPALGAARKKAIVAVARRLAVDLWRLHTGRCTAEQLGLEL

SEQ ID NO: 263259 - protein, 455 aa, unidentified
MKKGNVSKPSRIVEMTLIHPNAAGIDIGDTLHSVAVPLGRDTECVKNFGAFTCDLVAIVEWLKKCRVDTVAIESTGVYWKNLYSMLIQNDIEVYLCNARQTHNITGKKTDESDAQWIQRLHSCGLLNSSFLPDDRIETLRTLVRYRRSLSNDSSSYILRMQKSLELMNVKIHTVISDLMGKTGTAIVEAIINGERKAEHFLPLVDGRIKADRETILKSLEGNWRTEHLFLLKQSYTMYQFIQNQLLVCEQEVEKTLQLMVAEKQEGVIEDIAPKSTHLTNPLKKKTKNQPAFNTREYLKIIHGADVIGIYGISETVALEVLSETGTDLSKWSTEQKYVSWLNLCPNRKISGGKLISSKRLKKKPNIAAQAFRMAANSLMASNNWLGDYFRRIKAKGGHKYAIIATARKIAIIYYRMVRYKEDFTPYDYEQYKEKFRLTKIASLEKVLKRLKNEAA

SEQ ID NO: 263260 - protein, 469 aa, unidentified
MSKHSNKQNQTQRKKHYRKKQSDSFPVINTNAAGIDVGSTEHWVAVPKDRDEQPVRNFKCFTADLHAMADWLKECAIQTVVMESTGVYWIPLYQILESQGFEVKLVNARHVKNVPGRKTDVSDCQWLQRLHTYGLLSGSFRPEDSICVLRSFWRHRDTLIRYASSHVQHMQKALTEMNIQLHKVISDITGLTGMRIIRAILAGERDLVTLAHMRDPRIKSSAEDIAKALEGDYRKEHLFALQQAVELYDVYQQKIQACDQQIEHYLTQLDSKIDLESNPLPSSTKSNKTPKGNAPHFDLRTHLYRISGVDFTQIDGLDAVSVHTILSEVGLDPAAFHTEKHFCSWLGLSPNNRITGGRIKSSKTRKVINRATSAFRMAAQSLTYSSSALGGYYRRMCARLGAPEAITATAHKLARIFYHLWKNGGIYQDPGPLYYEQKYKERVINNMIRKAKQLGFQINIEPLNELQVF

SEQ ID NO: 263261 - protein, 316 aa, unidentified
MKTNQSALHIGVDVGKSQLDFHCHESGQHFFVANTSQGIRHAFKQLPDHITRLVVEATGRHEQLLVQAAQKRETPVVVAQPISIRRFAGALGVLAKTDKLDSRVIAHYAAVIQPEVRKLPDKKTRELKDLTIRRKQVISMLTMEKNRLQVMPAFLRAEIRKSIASLKRQQQRLDARILALSEQVDAWRERRRIMESMTGVGVTLSTTLLSDLQELGTLNQKQIAALVGVAPMNRDSGKMRGRRRIRGGRAHVRTVLFMATLSAIQHNPVIRSFYQRLLANGKNRKVAVVACMRKMIVLLNAMVRDGTCWGEMKSMA

SEQ ID NO: 263262 - protein, 342 aa, unidentified
MTQFLSFVGVDIASATFMACMGTPPWKITVKPLQFDNDEAGFVAFLGWLQAHHLKAESTVVCMEATGVYSEGLAYFLHASGYTVAVEPPLAIQRKFPLNASKTDELDCQYIAEYAYRYQDKLSFWKPRPEILEQVKALLTTRQHFSVQLTGHKNALHALKRKQVSSELAKHAHQTMIEQIVKAIKAIDQEIRRLIDSDPTFKQTLLLLLSVPGVGLQLAAHLLILMQETLDPRVLAAFIGISPIQHESGTSVHSAPTSRHFGPPTLRKLLYLAACSVRTHKKQFQHYFFRKVAEGKHRKLVLNNIQNKLLKIACAVVRSQQPYIPNYAPVNPLVFQKTLTPS

SEQ ID NO: 263263 - protein, 430 aa, unidentified
MNNPEQQAGSWLEQRGFGGLDWATEHHSVVVVDPQGRVLEDFEIEHSALGWKKFRERMQPYGSIPFGIETSQGAAVEQLLEAGMQVYPLNPKSAQSYRERKAPSGVKDDRLDAWSFADACRVDGQGWKALRPEDPLIKELRLLCRDEVALIEQRTAFINQLRHALAEYYPTALEAFEDWGALSAWMFVQRFPTPQALKEAGKRQWEKFLHSRHLWRTESGPRRLELFAHATDLCGSVPMAHAKSQLALSLVSILFALEKQLGIYRQRIEELFGRHPDHDLFGSLPGAGPKIGPRLLSEIGDDRGRFGEEPQPLQCLAGTAPVTRRTGKARTNPPRWPCHQRWACDKHLRHAMHLFAEQTLTRCTWAEIYYHHHRQKGHSHADSLRRLGQRWLKIIFRMWMDRKPYDAMLHNQNQLKHGSWVLQLNPVQDT

SEQ ID NO: 263264 - protein, 390 aa, unidentified
MIYVGIDVSKFKHDCVIINSDGEILVDVFQVSNNLEGFTKLKNIILENVPNNDLQKIKVGLESTGHYSNNIINFIHQNSFPLTIFNPLSTNLFRKAQTLRKTKTDKIDAIFIATMLFSDNSKPYSPKSYHMTEIKSLARHRFRLIDYRAKLKISYTRLLDIVFPELASVIWSVHQNSAYSLLLELPTTRDISLCHLTKLTNILSKASKGKYGKDRASEIKELAKNSIGTCSLGVSFELQQTIRLIKNVDDEIKLLDKKVKVMLDELNSPIMSIPGISYVLASIILSEIGDIQCFSTPAKLLAFSGLEPSTHQSGKYTASHSKMVKRGSKYLRWALLQAALLTTNKTQTFKSYFQKKKSEGKHHLVCLSHVAKKLLRVIYHLENTNTAFID

SEQ ID NO: 263265 - protein, 482 aa, unidentified
MKPKPEEKTKEATCHPKQPHWHEMNRKQRLETMRKIQSEDLSLEMVHPDAAGIDIGNESHYVAVPPKRDSQPVRRFGCTTAELKAMAEWLKQCRIRTVAMQSTGVYWIAVYDILEEAGLQVYLVNARETKNLPGRKSDVQESQWLMKLHTYGLLRNSFRPSQEIRRLRTYWRQRHDLVRSAGRHIQRMQKALTQMNIQLANVLSDVSGTTGQAIIKAILAGERDPHKLAVFRDPRVKASKEQIARGLEGHWEEDLLFVLKQEQDGYEFCQKQMAECDRRLEQYLQQREDRSQGACLPEEKRKERLRKKKGNAPQFGLRADLFRMTGTDLTQIDGIDVMTATTILSEAGWDMSKWKTEDHFVSWLRLCPDNRISGERIIGKGRLPTNNRISIALKMAASTLRMSNTYVGAQFRRLRTKLGAPVAIKAMAAKLARLVYRMLRYGMKYVDQGAEFYEAQHRNRQINYLKWKAAKLGFQIIEAPAA

SEQ ID NO: 263266 - protein, 344 aa, unidentified
MVTIGIDAHKRNHTAVIVDGQGRQLAQRTCGATSNDHFALLAWAAQHDSVRVWAVEDCRHLSRRLERDLLAAGERIVRVSPKLMAQARSSARSFGKSDPIDALAVARAALREPELPVARLDGPERELRLLIDHREDLVGERTRMISRLRWYLHELDPELEQATRSLTALRTLDKLAVLLADNTETVAPFARTLLEHCRRLTGEINKLERQIDARVSQLAPTLLAIHGCGALSAAKIIGETAGIDRFKSNDAYARHNGTAPLPVWSSNRQRHRLSRTGNRQLNAALHRIALTQARSHPAAQAMLARRRAQGDGGLEALRILKRRLSDVVYRALLADLATPRTNAT

SEQ ID NO: 263267 - protein, 343 aa, unidentified
MQSISTIGLDIAKSVFQVHGVDAAGQAILRRQLRRRHVLAFFQKLPPCLVGIEACASSHHWSRELQALGHTVRLMPPAYVKPYVKRQKNDTTDAEAICEAVTRPNMRFVSTKTVEQQSCLMLHRVRHLFIRQQTAVINSIRAHLAEFGIVAPVGRRGVEQLLEVIADTADRRLPEVARACLAALGSQLRALKAQILEFDRRILVWHRSNATSKRLDAIPGVGPALATALVASIAEPGAFRSGRDFSAWVGLVPKQNSSGGKDKLGSISKQGDRYLRSLFTAGALAVIRYAKIHGTRHRPWLTGLLARRPTKVVAIALANKLARMAWAMMVRNERYRQPAALAA

SEQ ID NO: 263268 - protein, 421 aa, unidentified
MDVVHQRVAALDISKTDAKVCIRVPGKRKGTFTREVTTWSATTNQILALRDHLIGAGVSLVVMEATGVYWKPFYFVLEDGLEVMLVNARHVKNVPGRKTDVSDAQWLAQLGAHGLVRGSFVPPEPIRQLRDLTRARTRLTGERSREVQRLEKFLEDAGIKLSSVSSDIMGVSGRAMLEALISGVDDPTGPPDPTVLADLAKRRLRSKIPALVEALTGRFTEHHAFLVRLHLDQVDRLTAALDALAARIEAHIAPFRPAVELLITIPGVDRRVAEVIVAETGADMAVFPTADHLASWAGVAPGHRESAGKNKSGKTRPGNSYLKGALGIAAFGAAGTNGSWLQTRYRRLTARRGPLRALVAIERSILVATWHMLTNQVPYTDLGADYYTRQNPDRAARRAIGVLEALGYTVTLDHPDLEPAA

SEQ ID NO: 263269 - protein, 414 aa, unidentified
MEWGEQVLFVGDDWAEEHHDVELQNEAGRVLGRAKLPEGIAGIARLHAMVGEHLGDDPDDAAVVVGIETERGPWVQALIAAGYQIYAINPLRVARYRERHSVSGAKSDTADAHVLADIVRTDRHQLRPIAGDSVQAEAIKVLTRAHKTMIWERTRHLLRLRHALREFFPAALVAFDDLTATDTLELLTAAPDPASAAALTIEQITAALTRARRRNRAAKAEAIAAALRGEYLGQPPVVTAAYAATVRAQAAILTVLNTEIKTMEEQVEAHFGQHPDAEVYLSQPGMGVVLGARVLAEFGDDKDRYADARARKNYAGTSPITRQSGKRKIVLARYVHNDRLVDALGLQAFAALRGSPGARAYYDQLRGRGVGHRAALRQLGNRLVGILHGCLKTGTKYDENTAWPALQENLQTAA

SEQ ID NO: 263270 - protein, 379 aa, unidentified
MTKTMTRSPEFTVAEPCLLLAFELSARSWKLGFTTGHEQRPRLRDVPAGAVDRVLEEVRRAKARFGLPADARVISCYEAGRESFWIHRWAVAQGWTNYVVDSSSIEVNRRARRAKTDRLDLAGLLRSLTRYLHGEDHVWHVVRVPSETEEDARHLHRWRETLQQERTRMINRLRGLLTTQGVDLPVRADFLERVATVQRWDGTPLPPGLTQRLRAVWAQLTSLTRQLAEVDAARAALPADPATTTGRWVIRLATLRGIGSIGAWSLTTEIFGWRQIRNGRELGALVGLVPAPYQSGETSHDQGITRAGNRHVRRLVVQLAWSWLRYQPTSALSRWYRTRFDRGKRLRRIGIVALARKLVIAWWRYGDTGIVPEGAVLKA

SEQ ID NO: 263271 - protein, 459 aa, unidentified
MAQSKKRKGKGAGGTRMLPVLHPDAAGIDVGAEEVFVSVPPDRAAEPVRSFQTFTRDLYELADWLQFCRVRSVAMESTSVYWIPLFQILETRGFEVFLVNAQHVKNVPGRKSDVSDCQWIQYLHSVGLLKASFRPPDQICVVRSLWRHRESLVQMAAEHTMHMQKALTQMNLQLHHVLSDITGLSGMRILDAILSGERDPVKLAALCHGRVRSPRETVAKSLEGDYRAEHLFALRQSLVGFHFYQQLIRAVDQELEGAMRQLPRAEGAPEQMPPRTKKCFYQKAGNEPAFDLKAELFRISGVDLTDVPGISAITAHTILIEVGPDLSRFRNASAFASWLGLCPDKKVSGGKVLYTGSRKVKNRIAIALRLGAQCLYHANNYLGEYYRKMKWRLGAPQALTATAHKLARIVFHMLVTKQPYNESILVKWDQQANMRAELRIRTQAAKLGFDLTPAAKPHT

SEQ ID NO: 263272 - protein, 340 aa, unidentified
MNLTVFGVDVAKRVFQVHSVDPETGEITSKQLKRAGFLEHFANRAPCLIGMEACGGAQHWARRLKEMGHQVKLMPGKAVKAFVSGNKNDVADARAIWIAAQQEGVKSVAIKSEAQQAVLALHRMRQQLVKFRTMQSNGLRGLLTEYGEVMAVGRAALDRAMSDVLARLTERLPAVLIDTLREQWEMLGKLDEQIAEIERRLSAWMKQDKACKTIAEIPGVGLLTATAAVATMGDAKAFKSGREFAAWLGLVPGQVGTGGKVRLLGISKRGDTYLRTLLIHGARAVLTHAKEPSAWVQEISKRRPPNVVTVALANKMARTIWALLAHDRQYESSYMSVKPA

SEQ ID NO: 263273 - protein, 281 aa, unidentified
MTKYHVGIDLHKTVAQVCVTDEQGGVVAERRLPVADAADGRALVNFLAQWREGGRFVVEAIGMNRWLVNACREIGLDLVVADAAKLGLSTLGKKTDRRDALEMARRLRLGDIDRHAVTYYPSDREHGVRKLVRVRHGLVHVRQEFVNQARGLLNAYLVRPPVAELHSRKGLAWLRTCTLPTETMTACLRAIAVAMTSVQEQIDGLSARVDAVGKEETVRGLEEYPPGVGALTATTLAYELGDVTRFRNARAAASYAGLVPKVAQSADTSHHGRLTKRGSRV

SEQ ID NO: 263274 - protein, 455 aa, unidentified
MTPCKVSGARRRQRLQVTNPDAAGIDVGADAHWVSVPEDRAAEQVQRFGTCTADLEAIADWLQACAVTTVAMESTGVYWVPLYELLEGRGFHVLLVDARQVARAPGRPKTDVKDCQWIQRLHSYGLLSAAFRPQDQVVVLRAYLRQRDMLVTYAGQHIQHMQKALEQMNVKLTEVVSDITGVTGMSIIQAILRGRRDPQQLAKLRDPRCKESEATIARALLGNWRPEHLFALQQALALYEFYHQQISACDQAIEAHLRTFTDKSGGEVLPCRPRRRKREANEPRFDARARLHCLCGVDLTEIEGIDETTALVLLSEIGMDMSRWPSLKHFCSWLGLCPQHKISGGKILNRRVRRGASRAKRCLRLAARSLHHSKSALGAFFRRIKARQGTPMAITAAAHKLARFVYSLLKHGTAYVAQEMADYEAKYRERKLQAVSRQAHALGFHLVPVAVAATG

SEQ ID NO: 263275 - protein, 406 aa, unidentified
MSVHAAPVTASTVVVALDVGKASAALSVTDAARRRPLGPVEFAMTRSALVELVGRVRAVLPGAEAAVKVGVEAAGHYHRPLIELSAWPAGWEVLELNPAHVTAQRRVQGRRRVKTDAIDLEAITDLVLAGRGVPVTGRDLVIGELAAWSGHRARRIQTRTATKNQLLGQLDRSFAGLVLVLPDVLGTKVGRLVAAEFADPARLAALGVVRLIRFAAARGLQVRRPMAERLVRAARDALPTADAAVARRVLTADLALLVDLDTQIAAAEAELARLLPVSPFQPLTTVPGWGVVRASSYGAAVGDPCRWPGSRQLYRASGLSPMQYESAGHRRDGAISREGSVELRRALIDLGIGLWHSDRAAKAYAAGLKARGKPGTVIACALAHRANRIAFALVRDHTGYDPDRWT

SEQ ID NO: 263276 - protein, 370 aa, unidentified
MRQSTTLSSGLDVHQDSMAVAYGAQAHGAAVTFLGTIGTRQCDLDQRIRTMPSKATQLLFVSEAGPCGYWLSRDLRKKGSDCWVVAPSLIPNKPGDRVTTDRRDAVPLARLARSGDLTVGSVPQVADEALRDLARAREDALRDLQSAQFRLNACVLRHAMRYTGRATWGPAPRRWLSDVVCPTPAQPIVFHADVRAVNEHTDRLQRLEQALQEPVNTWRLQPVVGALQALRGVQFTTAVTMVAALGDLTRCESPRELMKCLGLMPSEYPSAARRRQGSMTNAGTTHARSALVEGAWAYRSPAKLSRHVQLRLAHQPTLIQASRWKAQVRRCTRSRQLIARGKPANVVTVAMAREVVGCMWAIAQQVLVTP

SEQ ID NO: 263277 - protein, 343 aa, unidentified
MKQYVGLDVSLEQTAVCIVDEHGKALWRGKSASTPEAIAAVVKARAPHVERIGLESGPLSTWHWHELKKRGLPMICLDARHAKAALLLQVSKTDPNDALGLAQIVRTGWYREVTVKSLDSQVIRSFLNSRARLVEVRVDLINQIRGMLKPFGLVAGKGGRQPFIDRVRELVADGPLKDAVEALLAALQEVSRQIGILSRRLMALARQDQAGRRLMTAPGVGSLVALAYISVIDAPERFSRSSSVGAYLGLTPRRYQSGEVDRSGRISKCGDPLLRTYLFEAAGIILNRVSRWSSIKAWGTRLARKVGGKKAMMAVARKLSVILHRMWHDGTDFRWSNKEGLPA

SEQ ID NO: 263278 - protein, 340 aa, unidentified
MGEVTTIGLDLAKHVFQVHGVDASGATVLRKQLRRSQVVAFFAGLPRCLVGLEACATAHYWARELQAVGHEVRLMPAQYVKAYVKRNKNDAADAEAICEAVRRPSMRFVAIKTAEQQAALLLHRGRERLVRQRTTLVNALRAHLAEFGVIAPQGLSNVARLIAIVRDESDTRLPYLARQVLQVLATQLEQLGAAVAAIEKRLAAWHRGNPVSQRLASIPGIGPIIATALAATVVEPIGFASGREFAAWLGLVPRQHSTGGKARLSGISKRGNRYLRRLLINGASANLLRSKATNADPWVRGLRRRRPSLVVAVAVANKTARIAWAVMRREESYRPRAAAA

SEQ ID NO: 263279 - protein, 358 aa, unidentified
MNSVGLDVHKTRCVACVKTQEGRILEEFAFQNSPDGHEELITHLKAYPETQVAIESTGNLWIPIHNRLEDEHIHTILTNPKKTRLIAEAKIKTDKLDARILADLLRANLLSASYVPPPEIRMQRSIIRERARLTQLRTIIKNRIHTLLDKHAYKSPYTDLFGKHGLEWLSKLELPASDRTLLEVNLEQVASLNHSIDKLTESIAASAIENPEVKLLMGFTGIDYYSAMFLINEIGPIARFPSPKKLVSYAGLAPSTHQSGNHTTHGPITKEGNSHIRWILIEAAHQAARHDPRLSQFYLRIMKRRGHNRALVAVARKMLVTIYHVLNHHSQYRGLRPELYENKIRRLERITNSSLQTA

SEQ ID NO: 263280 - protein, 351 aa, unidentified
MKNVAYLAMDVHAAHCVLGHMSSDGTFLGNKTFTTAEGNIIDALKAIQAKEKYLALEESNLAYWVAQVATPYVTEVISSDPKENALIYKSPNKTDKVDTRKLCRLLRLGELKRVYQPETDDRAIFKTAIQHYIDLRDQQTRLKNKIKASYRHWGVVDVRGQAVYGATHRETFLNKVKHLHIREQLQRLYTLMDQAESLQEQALKAVKQLGRKYPEIKKFKEIPGIGDVIAHTFDAFIQTPERFTNKRPLWRYCRLGITDRNSDGKPLGYKRLDKSGLSELKSLSYRAWLCAMKGDNEVKRFYSNSLRRTLNRVHARLNTQRKIIAVMYGMWKRGEPYNPKLFLDPSESGVV

SEQ ID NO: 263281 - protein, 321 aa, unidentified
MNKNVTVPKYVGIDVAKATLQVHLQGHQIEFENTPLGHLLLCNKLLALTAPHVVCEATGGYEAAMAQAFHDANIAVSVVNPAHVRAAAQAQGKRAKTDPLDAASLTDYGQRFQPAPTPKVAALQRQIRDLALWLKQLIDARAVAKAQAEHQVDAFVKQQHAQLLAHYLEQIKLTEAKVKTLLAQDHALQQRVDCLVQIEGVGLRTALMVLVYMPELGTINRGQAAALAGLAPWTRDSGTMKGKRCIGGGRAEIRPVLYMSSLSSIRHNSILKAFYKGLRERNKPGKVALTAVMRKLLVYMNYKLKNLQSPLSDQKLQPPKL

SEQ ID NO: 263282 - protein, 315 aa, unidentified
MRNCIGIDISKHSFDVFVLEKNKELVLTNDSEGIFKCVELCQKIQPGLVVMEATGGYEMPLASHLQAKGFGVAIINPRRIRDFARALGQMAKTDKIDAQVIAKFAATLEPMPHELISDNSRKLKALIARRKQLLGMHTAELNRMEHAFDNEVKQSIEAIVKAIEKQLDKVDKETDDVIRQMPELKQKAEFLQSIPGIGKTTAHMLVAELPELGILNRRQIAALVGLAPINRDSGAFRGKRMTGGGRKHVRTKLYMPTLVATQFNPVIKKYYRSLVDERGKCKMIALTAAMRKLLCIMNTMLKNSQYWQPDFAENA

SEQ ID NO: 263283 - protein, 440 aa, unidentified
MAVRKRDEEVFSNAAGIDVGASSHWAAVPPHVTDTPVREFGPMTDDLNALADWLLGCGVDVVALESTGVYWIPVYEVLESRGLKVWLVDARQVKYVPGRKSDVQDCQWLQKLMSHGLLRGAFRPSAEVCTIRAVSRQREVLLVQQASWVQRMQKALVQMNLQLTEVISNVMGQTGQAIIRDIVAGERDARVLAQHRHWRIRASEDEIVRALTGNWREEHLFVLGQALGMYDDIARHLDECDRKLQALLAERASVEADLGKQPREGTKARAGFDTRQALANWAGVDLTRINGLGLDSVMKILSEIGPDLSRFANVKHFCSWLGLCPSTRISGGKVLSSGTRRSANRARQAFRMAAMALSRSDSALGAFYRRLCSRMDKPRANTATAHKLARMVYFMLTRGEAFVDQGQQHYEEQQRQRSVAALKRRAAALGFQINPLAPAA

SEQ ID NO: 263284 - protein, 353 aa, unidentified
MNKVNYLSFAGQTIYCGLDAHKTNWKINCRMDDMEIASFSQNADALLLKKHMNKNYPDAKIKVVYEAGFCGFGIQRSLQELGIECIIVNAADIPTTDKERKRKDDKRDARKLSRELADGDLKSIYVPDQSMEHARSLVRQRHRLMQDQTRCKNRIKHLLMFSGLRIESTQERWSQKYLKQLRQLDCGTESLRSALDLAVEQYQQIRKLLKEATLLMRKLSKQEPFTTVQKYLQSIDGIGIINGMTIQTELQDIYRFKTLDSLCDYAGFVPDISSSNDTVVIKGITHRCNEFLREAIVESSWMLLRKDPAMLMKYNEYRKRMNPNKAIIRIGKHLLSRIRYVWKKQIEYERGIV

SEQ ID NO: 263285 - protein, 331 aa, unidentified
MKFKDFIGIDISKKTLDVYIYSSKTSEVFENSNSGFKKLVNRVEASTNILAKEAIFIFEHTGIYSNNLSLFLEERGIPFVLVPGLEIKRSMGLTRGKEDKIDAKRIAIYGFRLRDELEPVKLPSKKLADLKLLLGLRDRLIKDRTGFLANLKESKAFMVRKENEVFFKVQETMIKKLSKEILKIEAEVKNLIDEDKILKQNFNLLLSIKGVGSQTAAHMIAYTDNFSKFKTWRKFASYSGIAPFPHSSGTSIRGKNKVSHLANKKMKTLFDLCAKTAIQYNQEMMQFYNRRMEQGKNKMSTINIIRNKLLARMFSVIDRKSPYVDIYKYAA

SEQ ID NO: 263286 - protein, 387 aa, unidentified
MAQVNDLSRSLTAFDPISTLVLVVEMSKAKWLVSGAVPGVERQPLKKLEADATALLRLIERWRNEAVRAGRPISRIALAYEAGRDGFWLARWLIARGIEGHLIHSASVAVSRERKRAKTDRLDAAMLMRVFLGWLRGERGHCGMVAIPTMEEEDARRPSRERECLVNERSRITNRMKSALARLGVRGFKPHLRKAPERLAGLRTAEGTDLPANIIEELRRDMARLALVREQINSIEKARAARLERAPDTGPHAMVRLLARVIGIGIETADMLVREILSRRLRDRRAVARYAGLTGSPDESGLKRREKGLAKAGNARVRRGLIQLAWRFLVFQKDSALARWYRTRTEGPSGARKTTMIVALARKLLIALWRLVTTGEVPDGVALRPAP

SEQ ID NO: 263287 - protein, 401 aa, unidentified
MVFCGWDWGATQHGVCVIDDAGQVLWRDVVPHRQASLTAVFDRLAGLADPGQLPVAIERGEGLLVGLIADAGHPVLVADPAGFKAARPRWGPTPTKSDLADAFMLADYARTDGHRLRRYEPVAPATREISVLARSRTGLVAARTAASNQLWALLSEYWPGAAGLFAKLTSKIALAFLTDYPTPQSASRLGEQRMAQFCQRHHYNGQRSPAELVARLRSAPAPTDGVSPVVLEAAVHALVAQIRVLNTEIAAVEDQTARALQAHPKTTLLRSLPRTDTVSLAQLIGEVGPILDRCATVEQAAALCGVVPVTRASGKVHTVGFRYACHKPARVALTGFADNSRHASPWAALRYQQARARGARHPHAVRIVARTWLRVLWVCWHTNTAYDPDAHDARRRARAGT

SEQ ID NO: 263288 - protein, 423 aa, unidentified
MPATFSIPGTNDLERVMTAVMIGVDPHKGSHTAVVIGPAEEPLGELRVRASASQAEKLVAWAADWPERTWAVEGAAGLGRLLAQQLVAAGERVLDVQPKLAARVRLLQAGDTNKNDPNDALSVAVAALRSRTARPVMAEDYPAVLKVWSKRHRDLARLRNQVACRLHAVLCDLVPGGHPKEISAAQAARLLEQASPSGAVDRARAELAAEFLEDMRRLDAQLRGTRKKLAAAVRASGTTLTEVFGVGPVIAGTIIGDIADVSRFPGRGHFAAYNGTAPVEVSSGNRKIHRLSLRGNRRINHAIHMAAITQIRHKHSEGRAYYDKKIAEGKTHKEALRSLKRRISDAIFACLLADARRAGQRPARTAREGTRGTTLTPARPAHTPNAGSSDKPLPDLGTTIRPGTRAATPSPSKPASKKTPATT

SEQ ID NO: 263289 - protein, 377 aa, unidentified
MKKELYLGLDVHKDCIITAVAEEGRKGEVRESGAISNDLHAVGKWIGRLRKAHGKETLLRACYEAGPCGFGLARRLRQLGVECHVVAPSLTPTRSGERVKTDKRDARKLARLLRAGELTPVYIPEPTDEAIRDLCRARSDAVDDRRRSRHRLKGFLLRHGYRYQGKSSWSAAHERYLRELVLPHPAMKVILEEYLQAIAAAGERIERSEEAMRVVLEQWRLAPAVRALMAMKGFQTVAAMILVSELGEVHRFAHPRQVMAYLGLVPTENSSSDRRRQGHITKCGNAHARWLLVECAQHYALPPKVSKELSRRQQGQSAQVRAISWRAQNRLHNRYRRLLARRLQRNKAIVAIARELCGFIWELLRTQLCYQAQSTPV

SEQ ID NO: 263290 - protein, 346 aa, unidentified
MNSNDPRYKLYLGVDTHLEIHVATLINELGQVVKNKAFSASISGYGELFAWCKSYGFLQKAGIEGTGSYGAELTKFLLKNHIDVYEVMRPNRMERRLKGKTDAIDSENAARSVLSGEAKVIPKSHTGAVESLRGLLLTRNSAVKARTQAMNQIRALLVSGPDELKQSLYLPKPEVCATACLARCSNSSEPLMISLELLAQRCGFLNDQVKTLDKVLKKLTLNTAQSFVSRFGVGANVAATLLVAAGDNASRLRKESSFAALCGVNPIPASSGKTTRHRLNRGGCRSANNALWTVAMVRMRGDPRTKDYVARRTAEGLSTKEIARNLKRYIARELFPLILKDLARPA

SEQ ID NO: 263291 - protein, 444 aa, unidentified
MKVIYKQVAGLDVHKKTVVAARMRVTEEDRVEWETKTFGTTTPDLLELHDWLSEWELTHVAMESTGDYWKPVFNILEDSFEVWVVNAEHVKHVSGRKTDVKDSEWLAELMLHGLLKPSFIPPKPQRALREMTRYRTTLVQERTRIVNRVQKLLEGANIKLASVAADIMGASGRAMLAEIATGQTDAELMADLARGRMRNKIPELEKALTGIVQEHHRFVLAQQLDHIDYLDEKIEMISAEIGKQLESMSWPDEPSQPGVSESAEEGTGSADESELPLTWDAAVALLDTIPGIDRRIAEVILAEMGLDMRQFPTADHLASWAGLAPGNHQSGGKRYSGRTTKGNKALFSIMVQAAWGASRSKDTFLKSRYHRLAARRGKKRAIVAVAHSMLVSVWHMLTYQQPYQELGSDYFDERKKESKVNYLVRRLEKLTGGAVSIELQPVAA

SEQ ID NO: 263292 - protein, 456 aa, unidentified
MDKIQKKSQRPDVVSMPLANPHAAGIDVGDTEHVVALPEGPLERVRKFGTMTCDLMTISEWLQKAGITTVALESTGVYWKPLFSLLNRNGFEVYLVNARMVKNVTGRKTDEDDAMWLQKLHSCGLLKSAYLPNDEQEALRTLVRYRHCLVQDCSRFKNRMQKSLELMNIKFHTLFADITGKTSIAFIEAILHGERNPDAFLPLVDGRIRARTEDILKSLQGNWRNEHLFTLQQSYAMVKTYQEHLTQCDKAIEEQLRNYEAEINEGVISEAVPQESEQKPMKRKQKSKTAPKFDVRNYLEKIYGVDVLSIYGLSEMGGLEILAETGENLSKWESEKHFVSWLNLCPNNKISGGKVISSKLLKKHPNAASQAFRLAANTLQRSDHWLGDYFRRMKSRGGNKFAVVATANKLATIFYKMVTQKQSFKPMELVKYQEKYKNIKIAFYERKLNELKKASA

SEQ ID NO: 263293 - protein, 339 aa, unidentified
MDRQYVGIDFHRRRSVIVRLDAAGERLAVTRVANDPFEVTDALREAGPSPAVVIEATYGWYWAVDLLQELGATVHLANPKALNWGDRRVKNDVVDAHDLADMLRMGRLAEAWIAPPAIRELRELVRYRAKLVQLRSGLKAQVHAVMAKEGVLPDTLDMFCQSGQRQLDQMELGRNYAIRVQSLRGLIGAYDREIVMLERDIHQHLRADRGYQAVQAINGVGRTIAAILVAEIGDVNRFPTPAHLCSWVGLTPKHRESDTKTRRGKISKQGSRLLRWALIEGISRYHGGEVLKHSYQQIAKRRGTNKARIAVARKVLTLAYYGLRDGEIRCLAKPVEAAA

SEQ ID NO: 263294 - protein, 339 aa, unidentified
MVKIPVCVGLDYHKDAIQVCALNDRGVVLFNESIPNSVEGLIQLASKRGWLVQRIGIEACSGSADFSDELVLATGWSLNLAHAGYVRRMKQNPDKTDFSDARLLADLTRVGYLPKVWLAPQEIRDLRRVVRFRQDLVRRRTATKLKIMALLREHRVVIAGTRWTQKWLQTLKALSGLPTGTRFVLTSHLKELTHVIDQITKVEARLGKMTAGDELVARLMKQRGVGAVTAWTMRAEIGRFDRFNTGKQLARFCGLSPRNASSGNRQADAGMIKAGNPGLRTTLIEVAHRLTRYDVRWAAFKAKQRQAGKPGSVIAAAVANRWVRWLFHQMQPAAWEGAA

SEQ ID NO: 263295 - protein, 372 aa, unidentified
MRDDSEVYVGLDTSKLKISVALAEAGRDGEVRFLGEIDSTPEAVERLVRKLAKRHRRLAFAYEAGPTGYGLQRQIAALGHDCAVVAPSLIPKRPGERVKTNRRDALTLAKLHRAGELTPVWVPDPGHEAMRELVRAREAAMEDLRAKRQHLQSFLLRHGRVFTGRGAWTRAHTRWLCELRFEHPAQHLVLAEYRQAIADAETRLERLTRQVAELVPSWSMAPVVAAYQALRGVAFLTAVTFVAEIGDVRRFDSPRQLMAYLGLVPSESSTGEKVRRGGITKAGNGRARRVLIEGAWTYRFRARMSRLLQERQAGLPKAVCDIAWKAQLRLCARYRKLMARGKRQGVVTTAIAREMAAFLWAIGREIEPQPAN

SEQ ID NO: 263296 - protein, 404 aa, unidentified
MVFVGIDWAEAHHDICLLNEDGRVLARRRIVDGLSGVSELHAAVAEHAEEPRQVVIGIETDRGLLVGSLVAAGYQVYAINPLAASRYRERHVMSRAKSDPGDAKMLADLVRTDRHNHRPVAGDSELAEGISVLARAHQSLIWSRQRQVNQLRNALREFYPGALAAFGEELAAPSSVALLEQAPTPERGRTLARAKILAALRKAGRVRGLEDKAVVIQAQLRAPQLAAAPRVAQAYGRTVAALVAVIAQLNQQIAGLERDLAESFEEHPDVEIYLSQPGLGVVLGARAIAEFGDDRTRFAHPKARKNFAGTAPITKASGTRRVVLARVARNRRLADACYWWAFCSLTRSHGARHYYDALRRRGKTHHQALRALANRLVGILHGCLEHRQRYSEHVAWPTPVVIAA

SEQ ID NO: 263297 - protein, 321 aa, unidentified
MSEIGFKQVVSRGCGIDVHQKQVVATIKGEGLKSQTREFSTFTSSLTSLKEWLLSEGVTHVAMESTGVYWKPVYRILECDELTVWIVNARHIKYVPGHKTDKKDSAWLCKLLLAGLLKPSYIPRKEQRVLRDLTRYRKKLVEQNASEQNRILRILEDCNIKLSSVLSHVSGVAGTKLVEKLCNGQTITMSDVDEVYHWRMQSSREDLYEACQGFIESHHIYLLRTIKANITHTESVILDINRQIRYLLEPYEHRVEQLREIPGLDRKTVEDLIAEIGLDMSVFPTEKHLASWVGICPGNNESAGKKKVDESHTATNKQRQP

SEQ ID NO: 263298 - protein, 333 aa, unidentified
MNVAGIDVGSEKLAMVIGKDGRLHKPRDFINESTGHAAIINALRSAKVPRVCIEATGVYHLDLAVALHDAGIGVMVVNPKAARRFAEAMMSRTKTDPVDAALLAEFAARMPYVAWVRPSDEVLALRAYARHLAALTKLRTQLKNQLHAWQQSGTVPAAIVAAVLEHIKQVDAHIESMRGKALDLVGSHASLQKPYELLLSVKGIAEASAIALLGELLVLPEGMSARQWVAMAGLDPRHSQSGKSVNKKPRISKAGNRHLRMALYMPSLSACRHDPHLRGFYRHLIDHRGLKKLQAVCAVMRKLLTALHAILKTAKPFDGSRLFALQQEAPANA

SEQ ID NO: 263299 - protein, 418 aa, unidentified
MEVMYARCAGLDVHKETVVACVRIVEGGEVSRSVRTFATTTASLIELGEWLEVNGCTHVAMEATGVYWKPVWQVLADSSFELVLANAAQVKNVPGRKTDVNDAAWLSELLAHGLVRARFVPEPAIQELRGLLRTRKQLVREKASHVQRLQKTLEEANIKLETVLSDVMGRSGRAMIQALIDGETDPAKLAALAHWKVRASAATLREALHGRIKRHHRFLLRLHLQQVDALDAAIAEIDREADAGLACFRDAVKQLSTIPGVSELSAQVILSEIGTDMGRFATAPHLRSWAGLCPRNDESAGKRRSTRLRRGAPGSRPCSFNALGPPRAPKLPTCTRNSCDCAVDAGRRKRSALLPPPSSRPPITCSKTARSMKISEPFTSIVGGPRRKRAASSNASPNSAFPSNSSPRRLSHEQSVSL

SEQ ID NO: 263300 - protein, 361 aa, unidentified
MQITTIGLDIAKNVFQVHGIDGAEKVIVRKQLRRGQVMAFFEALAPCVVGMEACATSHYWARELTKLGHEVRLMPAKDVKAYVKRNKNDAADAEAICEAVRRPTMRFVRIKSAEQQGQLMLHRARDLLMRQRTQVINALRAHLAEFGITAAQGREGIKELLAIVAQEEGSRLPSDAHASLTVLAAQLQAVQTMIGSLEKRIVAQHRSNEASKRLETIPGIGVIGATTIAAVVPDPRVFRSGRDFAAWIGIVPRQDSTGGKQKLGPISNRATNTSGAFSLSEPMPFCGVRASSPKNIPGSLSFWPVDRSRSSRSHLPTRWRGLPGRCWPRAGPTGRPNSWQPDKELGNGRMRLRLCVHELQG

SEQ ID NO: 263301 - protein, 360 aa, unidentified
MGLYVGLDVSQKQTWICVVDDKGKTVAEGCSLTRASDVYGWLGNRVQHADIVKIGLEAGNMSSWLYSGLTKLGMPVAVLEAFQAHRFISTQRNKTDKNDARGLAQLTRMGEGFLKLVTVRSQGNQEARALLAMREHLAGQKVGLENHIAGILKPFGLIVPRGGAVPSTFRENVIQALCRAEDNGVHIKAMVLPPLDLYRSACEQLAVLNKQVETLAKDNPICRRLMTAPGVGPVVALSFYSAIDYPERFRKGEDVGAYFGLTPRQFQSGETDYMVGISKRGDKMVRHHLVTAATVLMTATKKWCPLKAWGVRVAKRQGFSKARVAVARKLAVILHKMWINGQDFEWKSVPKEELEAMQAS

SEQ ID NO: 263302 - protein, 437 aa, unidentified
MHEVEDEPLFAERVAGIDIAKAEVMVTVRVPGDTGSGRRQQETRSFRATCKDLLHLADWLRSWGVTRAGMEATGNYWKPVYFLLEREGFECQLYHAAQVKALPGRPKTDKLDSVWLAKVTERGALPSSFVPPEPIRRLRTCTRYRRHLTQARTAEKQRCEKLLEDAHLKLSSVITDIHGVSGRDMLTAIIAGERNPKVLAQMARTRMRAKIRQLEEALDCSFFTAEHAFALAMMLANIDHLTAQISELSARIDALCEPYLHQIGQLDAVPGFGIITAQDIIAEIGTDMTVFPTAGHLASWARRCPQVTSSAGKRKGSNATGRGNPYIGAALGEAAVNAGRTSTFLGAKYRRLVKRMPKKKAQGAISRTQLVITHALLSDPEAVYTDLGTGYYEQRASIRRQVRSHVRAIERNGYKVTLEPIGPDPIDPGTLPVATAS

SEQ ID NO: 263303 - protein, 397 aa, unidentified
MYIVGIDIAKRKHEAAVIDGEGTVIIKPFSFTNNCSGYNRLMAMLAKAKLPLDEVSFAMEATGHYWLALFTRLQKEGFRVQVINPVQTNSIRSFYIRQAKTDPRDALLIAEVIRFGHFSESTLHPENIYELRELCRGRHAIVSMQADVKRKVVALLDQVFPEYETAFTNLFGDTSMAILQTCPTPKELSEMCLEELCHLIEVSSHKRFRMAKAQELQELARNSFGFAMAGDVFSTMIRLYAKHLDFLKQQVREMDRKIAEIMDTLDTPITTITGIGPTLGAYILSEIGNISRFSSAAKLAAYAGIDPTMRQSGEYNGVRNRMSKRGSPYLRHAIWLAASSAVLHDPALKLYFQKKRDEGKPYMASVGHACRKMVSIIYAVMRDNKTYTPHIPNEISA

SEQ ID NO: 263304 - protein, 368 aa, unidentified
MHLQCPVLQLGYSNWRIIMNLNDPKNQLVLGVDTHLDLHVAVLINMIGQVVCTEEFETNKKGYNRLLKWCYSFGQLLKAGIEGTGTYGAGLTRFMIGNDVSVYEVNRPNRARRRLRGKSDPTDAENAARAVLANEAKAIPKTQNGSVEAMRFLLIARRSAVKARTQAINQIRAVLVTALDEVRKKYLITSTFACIKACNEIEVLGDSTLLKMLTTSLKLLAKRWLNLTEELKVLDKNLKALTKIRAPLLTQQYGIGPYVAATLLVTAGDNPERLKKESSFAALCGVSPVEASSGKVVRHRLNRSGSRTANNAIWTITLIRMRSDPRTKVYVARRTKEGMSNREIQRCLKRYIARELFPKILNDLAIAA

SEQ ID NO: 263305 - protein, 369 aa, unidentified
MEQYTEAFVGIDTAKNKHALAIADPGRDGEIRYLGEIDSAPAAVQRMIRKLAGRYEKLYFCYEAGPTGYGLYRQVRALGHDCIVVAPSLVAKRPGERIKTNRRDAVTLARLLRAGDLTPVWVPDTVHEAVRDLVRARTAASEDLRRKRQQLLSFLLRHGRIYSGRKHWTKIHLHWLAQQKFDHPAQQIVFQDAVEAIEDAATRLRRLDQQVAEIVPSWSMAPVVEAYQAMRGVSFGVAVTCVAEIGDLRRFDNPRQLMAFLGLVPSERSTGDRVRRAGLTLAGNKRARRVLIEGAWSYRYPARVSQTLQARLEGLPKTVRAIAWKAQIRLCARYRRLTAAGKKRPLVIAAIAREMAAFLWIAQHVVPAA

SEQ ID NO: 263306 - protein, 494 aa, unidentified
MERPCPCLSVVLGHVGDIGETVRTVIPFERVSTATYPSRRGNPTPMMEEGMAARKRMALELAHPNAAGIDIGSASHYVAVPPDRDDDPVREFKSFTEDLEQLADWLIRCGVDIVAMESTGVYWIPLFELLESRGLTVYLVNARHVKNVSGRKSDVLDCQWLQQLMSYGLLSGAFRPKDEICALRAISRQRDMLLSYQSRHVQHMQKALAQMNVQLVNVISDIVGETGQKIVRAIIAGERDGKVLAKMKNARIRASEADIEKSLRGNWRDEHLFALKQAMALFDTYGERLIECDGQMESMMAALRQKGIGEPGKPKHGSRTKNAPKFDVRKYLFQICGVDLTRINGIDVTTALRVIAEVGPDMSRFKSAKHFASWLGLCPGTKISGGKVLSGKSKRTANRAAQALRLAAAALRSSQSSLGAYFRRQCARLDKAKAITATAHKLARLIYTMLTKGTDYMDKGQDYYEERYRQRVMHHLNNRAQKLGFQLTPIPDPT

SEQ ID NO: 263307 - protein, 364 aa, unidentified
MGVERTSVGLDVHARSVSAAAIDGVTGELFKQRLVPDQRVVIDWVRGLPGPAVVTYEAGPTGFGLARALADAGIRCEVAAPSKIVRPSGDRVKTDARDAVLLARLLRLDDIVAVRVPTVAQESARDLVRAREDVRGDLMRVRHRISKLLLRHGHVYYGGQAWTGKHEQWLNQIHFDGPERAGTQAAYDADREALAIAVLRRRRLDEQIAALAADSEFTPVTRRLCCLRGVSELTGFALAVEIGDWSRFTGASIGAYLGLVPSEHSSGSSRRQGGITKTGNSHVRRLLVEAAWHHQPRYSIGATMRARWAQAPAAAQARGHAGNQRLHDRWGQLSTRKKTHTVACVAIARELAGWCWSLATMPDS

SEQ ID NO: 263308 - protein, 411 aa, unidentified
MLFVGDDWSEEHHDVEIQDEAGRKLAARRLPEGAAGIARLHELIAAYLGGDGDPGQVAVGIETDRGLWVQALAAAGYQVFGLNPKQVARFKERYNLSGAKSDAADAHALADMVRAERHQLRAVAADTAGAQAVKVVARAHQTLIWERTRHTLRLRSALREFFPAALAAYAGLGLTGADTLELLTRAPAPAAAAKLTATQVSAALQRAGRRDVAAKAKVIKDALRAPQLAQPAAVTAAYAAAVQAAAAVLITLNEQIRRLEAQVEAHFMQHPDAETYLSQPGIGTVNGARVLAEFGDAPGRYACARARKNYAGSSPITRASGRSKAVLARFIRNDRLADALQSQAFSALTASPGARAYYDKQRARGLGHNPALRQLSNRLVGILHGCLKTSTRYNEATAWPNAIAHTEPLAA

SEQ ID NO: 263309 - protein, 418 aa, unidentified
MDNRPPFLYQATVGIDWADQKHDVFVRFTNGDSYRRKIDSRPEAIQEWLLELRSVCAEGKIAIALEQRRGALFYQLCTHLNWIDLYPVNPHSLSSFRLTFFSSRAKDDPIDSQLLEELVRTHADRLRPYRPESVTERKLDQYCRHRRSLLDLATKTELKLISTLKQYFPLAVNLFAAVGMKSDIALSFLSRWPTLSELQRAKAHTVRSFFYAHNSRSQSRIEKRLQQIGQAHNVTDDLALIEPLVLTTKCLVGQLRQFNHAIKEFDHEIKELFKSHPDHFLFANFPGAGEQLAPRLLSLFGSDRARWADATDIQKYSGIAPVIERSGKSVWVHRRLSRPKFICQTFHEFAQQSVQHSSWANQFYQHQRDSGKSHHSAIRALAFKWIRIICACWKANKPYDESFYLQALAGKNSPLPST

SEQ ID NO: 263310 - protein, 358 aa, unidentified
METKVKKVDFSGQKIFVGIDCHLKNWVVTVMLDQLIYKTFSQNPSARDLANYLDRNFSGGTYFSAYEAGFCGFSVHRDLEAHGIHNIVLNPADIPTTDKERKQKEDKRDSRKIAKSLFSGEAKGIYIPSEIAIGIRSFVRYRRTLVKEISRNKSRVKSLLYFNGISIPLEMDSASKYWSAKFTAWLKDLSFNSPYSKELLNHTIDITEQLRLKLLTVTQQLRAIYKKGPYPENLRLLIGIPGIGRVTAITLLSEIEDINRFRNIDRLSSFVGLIPTTNSSGERELAGSITSRSNNSLRSILVESAWVAIKHDPSLALSFCNLCKRMKKNEAIIRIAKKLLSRIRYVLKNEQEYVECIV

SEQ ID NO: 263311 - protein, 391 aa, unidentified
MVCVGIDVAKDKHDCCILDSEGTPLVDCFTIPNNMDGFKSLLQTIQACSQKSDKIKVGLEATGHYSYNILGFLLDNDLPVYVMNPLHTNLYRKSLSLRKTKTDRVDAKTIATMLLSDVDLKSYTDTAYHNEELKSLTRYRFDKVQERAKLKQSVSRLVTILFPELEQLVSSIHGTSIYALLSEYPGAKQISEAHLTRLANILVKTSRGHYRKDKATHIRDAARTSIGSVMPAKSLELKHTIKLIQELTSEINEIEDAIRKIMDELKPPILSIPGMGFHSAAMILAEVGDFSNFNSPDKVLAYAGCSPSTYQSGKLTNCYAHMEKRGSRYLRYALYTATKYVCYWNPVFTEYLTKKQAEGKHYNVALSHATKKLVRLIYALQKSGKAYLAVT

SEQ ID NO: 263312 - protein, 463 aa, unidentified
MAKKTTTSRKGKSKAGKNVLERINLNAAGIDIGANFHLVAIPEDRAEENVRKFGPFTSDLHQLADWLTEHHIETVVMESTGVYWIPVFQILEQRGFEVKLVNAAHVKNLPGRKSDVSDCQWLQQLHTYGLLNGSFRPKDEVCVLRSFLRLRDTLVKDCSSHVLRMQKALTEMNVQIHRVLSDITGYTGMAMIRAILAGERDALKLAQMKHPLVKASTQQIVKALEGDYRAEHLFALQTALELYDAYQLKITECENKIEQQLEQFDSKLDFEQVLEQSGALKTRSAQVRLQLQRQAHLSSVCGVDLTRLPGLSTLAVEVIISETGLDMSCWKSEKHFCSWLKLCPDNRISGGKLLSSRPRKTKNRAAAMFRLAAQGAMQSKTALGAFIRRLKARLGAPTAINAGAHKLARLFYRMLKFGAAYVEQGQAYYEQKYKDRLLRNLTKRAKEFGFQLTPFEPATDLVS

SEQ ID NO: 263313 - protein, 357 aa, unidentified
MPAHTKSAKCKSLIAVIGIDIGKNVFHLIGLDKRGAIILKSKLSRGQLENFLANLPSCLIGMEACAGAHHLSRRLVALGHDARLMPAKYVKPFLKGHKNDYRDAEAIAEAVQRPTMRFVATKTVDQLDLQALHRVRARLVSERTAAVNEIRAFLLDRGIAVAQGIQRLRKALPEILAKHPDLLLPRMIRIIEALLADWRRLDGRIEEISNDIEELAQKDAPCKRLMTVPGIGPLISSATVATIGGGDMFAKGRDFGAWLGIVPKQLSTGGRTILGKISKRGNSYLRMLFVQAARVVLIKRSNWERYGLKPWIEAAARRLHPNKLAIALANKRARIAWAVLRYGRDFEVRHADAPQHA

SEQ ID NO: 263314 - protein, 344 aa, unidentified
MDTIGLDLHKRESQLCELTEAGEIVERRIVTSRERFTAVLGGRPAARIIVEASTESEWVARHLESLGHEVVVADPNFAPMYATRRRGVKTDRRDARTLAEACRLGAYRPVHRASAPQRHVRAQLAVRDALIRTRTRYVSVVKALARRDGLRLPPGTPAHTEAKLAALPLPAPLAEEVAPLRAVLDPLNREITTADERLAAVAAADPVVARLRTAPGIGPVTAVAFVATLDVVTRFASAHHVAAYLGLTPREYSSGEQQHRGRISKTGSPRMRALLVEAAWRVLRSDDPAATPLRAWAERIALRRGKSVAAVALARRLAGILYALWRDNAVYRTPAPHPDAAAEA

SEQ ID NO: 263315 - protein, 350 aa, unidentified
MVHYVGLDVSSKETAYCVQDDRGTIVVEGMVETCPEAISAVLRGCTPELIGIETSSLSHWLVTELQNRNLPAILIDAKTMAALLSTQINKNDQNDARAIARALRTGGYRKVEARTPESQSASALLSARDLLVRQRVQIKNTLRGLLKIHGIVIRTCGTLSFEESIRSRIKPLDPVFSEAIHSLLEQFSVLTASIKKLTRHAENLAAKDEDTKLLMTVPGIGPLTALAYKIAIGNPKRFASSQDVGAYLGLTPRQYASGETDYKGRISKHGPKKVRNLLVEAAVVMLTRTKSWFSLKTWGMQLAKRKGLRKAAVACARKLAVLLHHIWLSREPFRWAKPDSCEAKEVLHSA

SEQ ID NO: 263316 - protein, 338 aa, unidentified
MKLYGGIDLHSNNSVLVLIDEEDRVVYEKRLRNDLALILQQLGPYRKKLTGLVVESTYNWYWLVDGLMAAGFGVHLANTAAIQQYEGLKHTDDRHDARWLAHLLRLNILPEGYIYPRQARAVRDLLRRRHRLVQQRVANLLSIQNQFARLGMNGFSAERLKRLQPAELEALIADGNVRSAIAANLALVQCLNLEIVRLEREVLAQVKLAAQFAPLMSVTGIGKILALTVMLETGEIGRFAKVGNFASYARCVDSQRLSNGKKKGSNNAKCGNPYLAWAFVEAANFAIRYSPRVKRFFERKCAKTNKIVAFKACAHKLARATFYVMRDRVAFDEARAFA

SEQ ID NO: 263317 - protein, 358 aa, unidentified
MNYIGCDCHITSLDFAVVNERGQETKKQRVNTGVKEFMDFVKSISKPRTVIIEEGTLAGWLLEICTAYGEKLIITDPKRNRWISQAGQKNDTIDANKLAHLARGGYIKEIHHPIGHRRRFRELVLSYHDTVKSQTRIKNKLKAKFRQNGIRCSGETVYSAKHRKEWRKKLPKDKIVQVIVEGLWQQLDQIHEVQEELLSHIRRQGRNYSEIKRFKKIPGIGNVHAATISAIMENPHRFAHKKKLWMYAGFGLAEKGSGEKVYSRNLARDYNRLLKNALKQATEAAIIAKDNQFRRQYLRLTIEQGIPSHRAKLTVARSILATLYGIWKSGEDYDPNIDRRRTESNKTQVRAYHLVRSG

SEQ ID NO: 263318 - protein, 444 aa, unidentified
MLRFVGCDVHKRTAVFTILLEDGTLFASYTVPVTREALPAFAERQLTRQDRLAMEATTNTWAVAGVLRPFVKEIIVSNPLKVRAIAEAKIKTDKVDSRVLAELLRCSYLPVVWQPDAETQRLRRLTHRRAALVSDRTRLKNRLHSILHHGLIPLPEFDLFSKRGIAWLRESPLPEEERQARDSDLRLLEQTELEIAELEQRLVREAWQDEKVRLVMSIPGIDYTVAQTCLAAIGDVARFANGKKLAAYLGLNPSTRQSGPHCYHGPITKQGNAHARWLLVQAAQHLGQYRGPLGQTMRRIIQRKNRSVAVVACARKLAVLLWHVLTSGEPFRYALPKSLEAKYSRLRVRATGRRRRGGVAKGTPRSARYGMGRTRTVPSLPQVLTKNDLPEIAPLARGEKIMLERKRLEGFYRELQTPSRIQANTRKTQPQESEEDAKSQLTQS

SEQ ID NO: 263319 - protein, 353 aa, unidentified
MCKGMKNFSIGIDVSKEKFDLTVKKVYYGTKQPEFLHYDVYENNPTGFRKMLKVLEKVTGRADKSEWLFCLETTGAYELHLCNYLYAKGYDVWRESALQIKLSNGIAKSKNDQVDSERIADYAIRYMDKMVIYEPEDEKLRTLKSLFLFRERLVKEKRSKQTSSQEIKCTHVMNDEMRWMQTRSQQDIARLNKEIKECEDHIRSLIASCEEIEKNYQHVMSIKGMGIVTTTALIVYTHNFERITSARKASSYCGLAPFYAQSGSSIYYEKNVSNYSNPQLKGYLTQAAFIATRYNEDIANYYNRLRASGKPIGICVNNVRNKLLRITFSLVQNDCNYEENHEWKRSQSLKEAA

SEQ ID NO: 263320 - protein, 397 aa, unidentified
MYIVGIDIAKRKHEAAVIDGEGAVIIKPFSFTNNCSGYNRLLAMLTKAKLPLDEVSFAMEATGHYWLALFTRLQKEGFRVQVINPVQTNSIRSFYIRQAKTDPRDALLIAEVIRFGHFSESTLHPENIYELRELCRGRHAIVSMQADVKRKVVALLDQVFPEYETAFTNLFSDTSMAILQTCPTPKELSEMPLEELCHLIEVSSRKRFRMVKAQELQELARNSFGFAMAGDVFSTMIRLYAKHLVFLKQQVQEMDRKIAEIMDTLDTPITTITGIGPTLGAYILSEIGDISRFSSAAKLAAYAGIDPTMRQSGEYNGVRNRMSKRGSPYLRHAIWLAASSAVLHDPALKLYFQKKRDEGKPYMASVGHACRKMVSIIYAVMRDNKAYTPCIPNEISA

SEQ ID NO: 263321 - protein, 349 aa, unidentified
MVILGIDAHKRTHTMVAVDAVGRKLGEKRTTSTTTEANLELLRWADRFGPERRFAVEDCRHLSRRLEADLLAAGEELIRVPPKMMAHARDAARTYGKSDPIDALAVAQAALRNPDLPVARLDGPSRELRLMVDHREDLVRDRVAHINRLRWHLHELDPSWDPTPRSLIRFKQLDAVAARLHGLDSMLGEICRDLVGLIRELTEKANALERRIVELVRALTPTLLEVAGVGALTAAKIVGEVADVRRFRSKDAFARHDGTAPLPVWSGNRQRHRLSRTGNRQLNAAIHRIAVTQMRIHEPAKTYLERRMMQGNTKTEALRALKRKLSDVVYRALVVDADPAAHACLSEAA

SEQ ID NO: 263322 - protein, 450 aa, unidentified
MGTEPVEIEAEEHEQVVERVAAIDVAKASGEVCTRVPHASLPGRRVTKVCTVEATTDAVVELAERLARDGIERVVVESTSDYWRPFFYLLEARGLTVWLVNARDVKNVPGRPKTDKLDAVWLAKLNERGMLRPSFVPPVEIRRLRDYTRLRTDLTRDRTRHVQRLEKLLEDALIKLSSVASDIMGASGRAMIEALIAGERDPRVLAELSRGRMRVKRPRLVRALTGRFDDHHAELARLLLDQIDALTAHIDQLTLRIEQLIAEIPAAQAPTAPDDDRPRDPDRAPLPVVERLDEITGIGVTTAQVLIAEVGLDMHQFPTPGHLVSWAKVAPRTIQSGTKTKPGKTGKGNGYLKGALGEAAIAAAKTNTFLGERYRRLVKRRGKLKALVAIARSILVIVWHLLADPTARYHDLGADFYTKRIDKNRRRRHLTHQLEALGYAVTLQELPTAA

SEQ ID NO: 263323 - protein, 404 aa, unidentified
MELTAIYRCVAALDVHQSKLTVCILYENESGEIITELKEFGGFKRDRRAMADWVASFQPELVVMESTGIYWKSPYAALEKQGLTIWVVNARHVKQVPGRKTDFADAQWLAILARNGLLRGGFVPPAIFRELRLIARQMQKLTGILSGEKNRLHKILSDGGIRLGVVVSDLHGKSAKAMIKGLLAGESPEQVLKYASNRLKASEEELLDALAGDLSPAHQFVLTELMAHIDELEARIETFRQALLQGLAPYQAILRSLQTIPGLDETGAALLLVEIGDDMSAFGTPERLASWAGVCPGNNESAGKKKTGKTRKGNPYVRRILCEASNAASRTQCRLQDMFKGLLIRRGRKRAIFALAHKILKIVFLLIERGDYYRDATVDYEKLSVQRNAPRWIKTLKKYGYIAA

SEQ ID NO: 263324 - protein, 315 aa, unidentified
MIVLGIDIAKRKFDCALLLGERFRTKVFENNAVGIEACVAWLARHAGEPVHACIESTGPYAEAVAEALFDAGHTVSLINPARSRAFSESLGVRSKTDEVDARTLARFCQGLKPEPWIPAPKSARELQQLVRRLDALIQMHTQEANRLAVAHEAVRASIEEVLSFLDRSIAEIKEAIAQHIDRHPDLRAQRELLDSVPGLGPATCAWLIAELNAKRFACARSAAAYTGLTPAHWRSGDTVNGKPRLSKCGNARFRKALYWPAITALRCNPIVQALAERLRARGKHKMVIIAAAMRKLVHIAFGVLKSGKPFNPAGA

SEQ ID NO: 263325 - protein, 341 aa, unidentified
MKQSTTTSYLGIDVSKAWFDVSLMQVVGHQKQPMRSTQFDNTAKGIKQFAHWLKSEQVTDPENTLIVIENTGVYHRLIWKFCSDQNLPLYIGNATHIKWSMGITRGKSDLVDSQRLCMYAVKEHDGLKLTPGLDIVVLQLKDLMTARTKLISQLRSMQVYLKELKLSNDPSIQQVLEKLHKDALKGMKESIRLLEQQIQLILNNNAAIKTNYQLLVSVPGIGHITALYLICCTNNFAGKISGKQLASYAGVVPFEYSSGSSIRGKNRVHKMANKDLKKLLYMCAMTTIQHYPEFRDYYDRKLSEGKHTLIVLNAIQNKIVLRAAAVINNRQPYVENYTKAA

SEQ ID NO: 263326 - protein, 367 aa, unidentified
MTIRLVTDHSELMSIGVDIGKDVFHIVGFDTAGEIVLRRKIKRLALTKTFEKLPRCVVGMEACLSAHFVSRSLRGLGFQPRIIPAKYSRPFNKGQKNDYNDAEAIAEAALRPNLKTVPEKSQEQLDLQALHRVRSRLVSRRTATINQIRAFLIEQGITVRSGARSLRNSLLTILEKRSDEISPRMEGVIMGLYEDWLWLDERIESTTDEIEMISKREGNCQRLMTVPGIGPLISTAVVAAIGTGEAFERGRDFGASLPGSGMPAYRERGLGLVPQQFSTGGKPVLGRISKRGCRYLRTLFIQAAHVILMRPQNWQNFSFGPWLEQASQRLHKNKLAATLTNKLARIAWSVLRHGKTFDDDRIEATAI

SEQ ID NO: 263327 - protein, 339 aa, unidentified
MTEIIRIGLDLAKSVFEVHAVNAQEQVVVRRSLRRNQLLNWFAKQPACLIGMEACGTANHWARELSALGHTVRLIPPAYAKQYVRRNKNDAADAAAICEAASRPSMRFVPIKTAEQQADTATHKARQMLIKQRTMTMNSLRGLMAEFGIIVPQGPQHISKLLAILADPEDTRVPAVARIALNTMSEMLSALEKQIGILDQDIKVRVRTNATARRLNTIPGFGPILSSAIAAIVTDPRHFDSGRDFAASLGLVPRQDGTGGKVKLGPISKRGNGYLRRLLVNGATAVLNGKNARSDPWRAKMLDSKPKKLAAVALANKMARIAWAVMTRQEDFRPRAAVA

SEQ ID NO: 263328 - protein, 423 aa, unidentified
MNQSTLSVGADVHLKDIVLRAVDQSDGHQVIEPFSVANNLPGARSAAETIAQAATRSGYRRIQIGYEATGMLWIPFHRFLSTTSILEPFDPQLVCFNPKLVADFKDALVLRGPKNDERDTFDVAARVRFGEWPDSYVPGPFWQGLRRLTRYRFKLAQDLSREKMRFRSYAFLKWSDWKRVKPFSNLFGATSAALLTEFTTAELSEMTHDQLADVIARRGRGHFYDPHAKARAVQRSLRSSYPIDPQTDEMLTATLATQLDHIRFIKRSQKRLEQHIGRVIDPVPNPIISVPGLGPVITAGLLAEIVDISRFPEHRHLAQYFGISWERRSTGNSVSQNTRLSKVGNPYGRYYFIQGAEQVRRYAMEYKAYYWRKYNEVSKYRHKRALVLTARKLVRLVHALLTKNQPYVRPQMPTNTQEGHSHS

SEQ ID NO: 263329 - protein, 417 aa, unidentified
MNPLFVGIDVSSKNNVAYLMKPDGSKHSSFSVQNNLGGAKLLSERIVSALGSMQLERVVIGLEATSIYGDSLVYALREDGRLGRFQRKIHVLNPKQVRKFKEAYSDLPKNDWVDAFVIADHLRFGRINREVYMDDYRYKALQTLTRARFDVIQNLTREKQRFANYLFLKCSGMAQDKDIQNTSATTIALMEHFETVDDLANADLEELTAFITETGRGKFADPDATAKAVRAAAKGSYRLPKTVNDTVNQAMAVSIASMRALKGQVKVLDKAIEQQFEIIPNTLTSIPGIGKVYSAGIIAEIGDIHRFDSQASVAKYAGLVWNRSQSGDFEAEHSRMIKSGNRYLRYYLLEAANSVRRCDSEFRRYYDLKFKEVNKYQHKRALALTARKLVRLVFRLLKATACISRRRAESAACHSDS

SEQ ID NO: 263330 - protein, 350 aa, unidentified
MIAINKDIIATIGVDLGKNTFHICAMNDKGTILLRERLTRAALPKRLANIPPCRIGMEACAGSHHIGRQLTALGHDVRLMPAKYVKPFLKSHKNDYRDAEAIAEAVQRPTMRFVPFKSDEQLDLQALHRVRSRLVGQRTAVINQIRAFLLEHGVAVRQGPGALRLALPSILAQRTDVLSPRIIHLIEGLTGDWRRFDERIADVTREIEQLAKQDQYCKGLMGVPGVGPMTASAMVAAIGDGAAFSRGRDFAAWLGLVPKQISTGDRTILGGISRRGNRYLRTLFIQGARSVLQRSDGWEKKSFGRWLIAASKRLHKNVLAAALANKLARIAWAVLYNAREYDTALAPKAT

SEQ ID NO: 263331 - protein, 338 aa, unidentified
MATYAGIDLHSSNNYIGVINSKDKRLYGRRHENNIKHVVRALSPFKKTLKGVVVESTFNWYWLVDGLQEAGFKVHLANPTAIQVYKGLKYTDDKWDSFWLAHILRLKLLPQGYIYPKQERSVRDLLRRRLMFVRQRTTQILSLQSMIARHRGLNYSGSTIKGFMDPFIERLFDDPYLALLAKSQMATIRHLSQTIKEIEAKVRSKISLRKQYQLLLTTPGIGQVLGLTIMLEVGDIDRFKKAGNYSSYCRCVESKKMSNNKKKGENNKKNGNRYLAWAYVEAAYHAARSNKFAQRFFQRKMAKSNRTLATKALANKLTKATYFIMRDQVPFDESRLFR

SEQ ID NO: 263332 - protein, 342 aa, unidentified
MKYFAGLDVSLEETAICVVEESGRIVKEMRAASEPEALIKALRKVGLPLERLGLEACSLTAWLHDGLRAEGLPAICIETRQANAAMKTMPNKTDRNDARALAQIMRTGWYRQVHVKSRQCRLWRALLVARRTVLNEMRSIENVARAMLRETGVKLGTPSRTAFADRVRELAGTEVMAMVEPLLAILSVMLKEFARLTKQVLDIVRKEEVCRRLMSAPGVGPITALAFRATVDRPERFGSSRTVGAHLGLTPALSVGRDRRPGQVSRCGDELARTALYEAAHSLLVRSKKWSSLRAWGMNIARRRGMARARVAVARKLGVILHRMWADATEFRFGKEPAALAA

SEQ ID NO: 263333 - protein, 338 aa, unidentified
MKYKRIAIDTSKHVFTLHGVDEQERPVLRRELRRSQMEAFFGKQEATEVVLEACGGSHHWARVLGQLGHRVRLIPPQYVKPFVKRAKNDRNDAEAISEAASRPSMRSVAVKTVTQQADGIILKHREMLVGQRTQAINALRGHAAEFGVVAAKGTTNIAALLIELAADAMIPATARAMFEQMAAHIETLDSRVAAVDAELAALHKANPLSQALAEIPGVGPLGAITMALTVEPTNFASARHFAAWLGLTPKEHSTGGKQRLGKISKAGNERLRQLLVVGAMAVIRFAKPGSKSASAWLLKLLERKPRKLCAVALANKMARIIWAMMARGEAYRRKPVAA

SEQ ID NO: 263334 - protein, 367 aa, unidentified
MKKGSTAAARQSRNISRQQLTIGLDLGDRNSWYCVVDEAGQIQLEQRVRTNVKALQEVFGAMPRSRMALEIGTHSPWISRLLRELGHEVIVANARKVRLIGESRKKDDRLDAQSLARLARIDPELLYPVQHRSAQAQADLMMIRARAGLVRARTGLVNTARGLAKSYGERLRSCNVRNMDPKKAESLSPELQAALEPLLAAIESVSERIAEYNERIEKLAQASYPQVALLKQVKGVGTLIALTFLLTLEDAHRFGKSRDVGGYLGLQPGRRKSGQSEPQMHISKEGDPYLRTLLVQGAQHILGPFGIDCDLRRWGLKLAERGGRNGKKRAIVATARKLAVLLHHLWVSGEVYEPLHNSNRTTVAAAA

SEQ ID NO: 263335 - protein, 420 aa, unidentified
MSNSNIWTARVQEPGQRLYAGVDLALEKNAVVILNQAGQVVDRFQFTQDREGYAYFEQRGERVRQREQAQEIEVAMEPTNYFWKLLAQELEEKERVYRLVNAYTVKKHREGNQLDRSKDDWRDAREIAELARQGQCTQTHLQQGVYEELRQYATLYWQVTRAMQREKAIVCGLVGQVFPEFFCVFQKATSETAQAILQSGVAAVEICQGSLEEFVAGVRAVYPGRRLAVTKLRRLYARAATSIGVRQGVPAIQFALRLHLRILNNLDQQCKQLRAALQGCLSQVPDAAYLLSMPTVTSVTVALFFAEVGDPQRYRTAAQWVKLAGIQPVPNRSGRKQRSQTPMSHQGRPHLRTLLYYAALQLINHDPHFIQLYTHLQRRSTNPLTRMQALGVLMNKLLHVWWALIQQHTLYQSVLSPAKA

SEQ ID NO: 263336 - protein, 421 aa, unidentified
MRGLKAKRVNTVNEGTLIATVDIGVVNNTGYCTTLDGRSTQPFRFDNTKEGFEKFWCMTIASKTRFGCDEVLVGYESTGPYAEPLVHYLANKQVKIVQVNPMHTKKMKEVNDNSPLKTDDKDPRVIADIIRLGRALTLVVPEGDAAYLRRLNNARERHVGEQTAFLNQLQQLVFLIFPEFKTVLKNMKGKTAQHILKIYTTAERIGTLSKEVLGEEMRKWSMGKFGVKDAESLIGLARETVGIKEGIAGISMDIRHILMQLEAEVRFISEIEAEMGATLERIPCAVRLLSIKGLGIVSVAGLIGEVGDFSKFSTQSEIMKLAGLDLYEISSGKRKGQRRISKRGRSLLRKILFYAAIQMIRKNGIMHEYYTRLTGRGMERMRALIAVSRKLLRIIHAIVRDNRDYVGQYQAPERRVMKKAA

SEQ ID NO: 263337 - protein, 295 aa, unidentified
MSKLSKKVIGVDVGAKFLTVSFTDNVNQDQVFNIQNNQRSILSFLKKFPTEDYCLAIEATGNYSSRILHLSLDNGFESSLINCMSVKYFSRMKNIISKTDAEDAKVIRLYGEIFRPEVYIPKSIEIEHLDQEIKLLNDLEEEKRRYSVKLKWLRYNPQLNPNTEKHYEKRLKQLDKEIREVEMRLPQLQDEEFREIKGLIQSVSGIGEKTSLQLMTATSGFKNFDSSKSLVKYFGLAPRIYQSGKKSYSPGKCRTSKTHIRSLLYVCSWTAIKHNTQCKELYLRLLEKGKPKNLH

SEQ ID NO: 263338 - protein, 338 aa, unidentified
MLYAGVDTHRSSTHVTVMDESGNILRRRRVSSSREGLREALGTNPEPMKAVVEATYNWGPVYDWLAEIADEVVLAHPTKVRAIADARIKTDTIDSQTLAHLLRADLIPEAYAPSKETRAVKRVLRQRVFFVRLQTMLKNRIRALLSQHTVMLPDVTDLYGKAGLEWLRTLTLPDPDNRLFHDDFDLLAIIRKYVASTDNLIAELGQGDEVITWLASLPGIGPFFSVLIRYEVDDITRFRTAKKFAAYTGLIPSTHASGSRVFHGALTKQGNKWLRWALIEAVSPALRTSASLRKYYQQLKTRRGPNDARVATARKLAELVWTVWTERRSYVQRPHPGR

SEQ ID NO: 263339 - protein, 406 aa, unidentified
MEVLIERCCGLDVHKKSITACIITPQGKEIQTFATMTRNLIELVDWVKQNRCTHVAMESTGDYWKPIYNLLELEDLKPIVVNAQHIKSVPGRKTDVKDAEWIAKLLRHGLVQGSYIPNREQRELREIIRYRRSIIEERTREANRLQKVLEGGNIKLASVASNVLGVSGRNMLEAMINGETDPSVLADFAQKKLKLKKEQLKLSLEGRLGAHQLLMIEKQLAHIDYLNELVTELDAEIDERMAPFADDLKLLDSIPGVGKRTAEQILAEIGTDMSRFPTPGHLCSWAGMTPGHDESAGKKRSAKARKGNKKLRSALVEAARAVTRKKNSYLAAQYHRIAARRGKNRAAVAVGHTILTIVHVLLTRKQEYEELGFDYFDKRKRDTLITNSVKRLESLGLTVTIQEQGV

SEQ ID NO: 263340 - protein, 418 aa, unidentified
MDEIQSWFAGVDWASQKHDVWLTDASGKRLGKRTFAHSGVGLAQMCDWLIATSGGKPEDIHVAIEVPHGAVVETLLDRGFKVYSINPRQLDRFRDRFSPAGAKDDSRDAETLSSSLRTDRRAFHQVSLAGPAIIQLREWSRMADDLRADQIRHANRLREQLQRYYPQMLQFDSDLAEEWVLKLWEAAPTPAKAARLRQAEVEKLLKRHRIRRIGAAKVLAILKEQALIVAPGVTEAALAHIRVLIESIRLFTQQLKEAHRQLDKLCKLLAEPIASENEQTGPEPEQTLGAILQSLPGAGRIVISTLLAEAFETLQRADYPILRKLCGVAPVTRRSGKSRAVTRRLACNPRLRNAIHYLADAARRCDEKSKAKYLALKARGCSHARALRTIGDRLLYVACAMLKNRTMFDPGLESQKCA

SEQ ID NO: 263341 - protein, 389 aa, unidentified
MLQPDRGNKEGERIAVGIDPCKEFLQLAILSPGRNAEFRKLPLLPSITEEIAKSTDPARTQIAIESYASYGRLFIHELLQKGYDIREVNPSVSNKLVDLFTEEHSDRRDAESFAKALSIIPDLPRVSFTEEKLWLTKLSRSRKKLVKDLNGYINRLHIALTESYGAVYRQICRTLWTGKALTFFETYPTINDALAHQRKVQRALGEAKWQLLRQAGQWSEGFYLELLGKEVQSLTRLIRVLQAARKEIDEQIRRIGEKDEDVRRLRTFPGIDYLTAATLLGEIGNIERFENEGRLSSYCGVSPVMWQSGTSKLKAKRRKRFSRRLKGVLYFISLSQIRINPESRQYYWRKRREGKSHWQAMNALSRQLIKIIYYMLKNKESYSRKEVVN

SEQ ID NO: 263342 - protein, 399 aa, unidentified
MFVGIDWASRAHELCVVDREGVVVERFGFAHSERGIAGALERLAKLGEPGELPVAIERPDGLLVDRLLAAGHQVVPIHPNAFHAARPRWEGAGSKSDAGDAFRLADLLRTDRHRLRALRPLDQPTRELQALVRLRDDHVAARVAATNQLAALLALHWPGAAAIFARLDSEIALCFLDRYPTPHSTMRLGEARLAAFLRRHSYCGRRSPHELLARLREAPQPVHALDPETVAELVHAQTQLVRTLLNTIADLDRAIAASLDQHGKAQLLRPLPRIGTISLGQVVAEVGPLLDRTSNAEQAAALCGACPITKRSGQQRSVSFRYATNTKARKALMLFADNSRRASPWAERIYRDARARGCRHPHAVRILARAWLRVIWTCWNTDTPYNPERRHHREALTLT

SEQ ID NO: 263343 - protein, 351 aa, unidentified
MSLAELVDHVIGVDPDRDRITAAVVCARTQGEIASKSFATTARGYGQAMRWAKDHTTDGRRAWSIESTGSYGAGLASALATRGEFVIEFDHPATRPSKDGAKSDSLDAVRAAREILGRKTWATPRSRGAREGLRTLITARDSAKLARVAAINVLKALVVTAPIDLREELRGRPLMDLVGRCQRLRPDTAIDPEHAATKLSLRSTANRVRHLTDECRELELAMIPLVRAMAPALLDEPGIGVLMAAQILVSWSHPGRCRDEAAFARLGGVAPLEATSGQTQTRHRLSRGGDRQLNRALHTVILARAKHHQPTKEYIARRITEGKTKREAMRCLKRYYARHLFRLLEAATMTA

SEQ ID NO: 263344 - protein, 341 aa, unidentified
MNGSKNVVGIDIAKRVFQLHSIDMETGEIVSLQLKREKFLEHFANRQTCLIGMEACGGAQHWARKFRAMGHQVKLLPGKAVKDFVTGNKNDRHDARAIWTAVQQPHVKAVAIKTEEQQAMLALHRMRSQLVKFRTAQINGLRGLLTEYGEVMPQGKAGVRKGITDALARMADRLPAMVIDTLREQWARISKMDEEIATIEQRIKLWLKNNEACKRIAEIPGVGPLTATAAVAIMGDAKTFKSGREFAAFAGLVPRQTGTGGRIKLLGISKRGDTYLRTLLIHGARAVLTTAKEPGPWASELRQRRPLNVAIVALANKMARTIWAMLAHERTYQREFVSQPV

SEQ ID NO: 263345 - protein, 340 aa, unidentified
MKLYGAIDLHSSNNVTVVIDQQDRVVYQKRLPNDLVLILKELSVYQSEIEGIVVESTYNWYWLVDGLMEQGHRVHLANTAAIQQYKGLKYTDDHSDARWLAHLLRLEVLPEGHIYPRAERPVRDLLRKRGQMVRQRTTNLLSIQNLLTRNTGSSISANRVKALDAQQIDELLADGDLALAVKANLSVMSSAGEQVELIEKTVSQRVKLRSQFSFLKTVPGIGEILALTIMLETGDIKRFASVGNFASYCRCVGSQKVSNGKKKGQGNTKNGNKYLAWAFIEAAHFAVRYNAKIKSFYERKKAKTKIVVALKAVAHKLCRACYYVMRNRVAFDTSKAFGQN

SEQ ID NO: 263346 - protein, 349 aa, unidentified
MEAYDGPQIVGMDLHRRRSVLVRMSEDGQKLATARITNSPARLAAEIGRAGLHPQVVLEACYGWYWAADTLAAAGAEVHLAHPLGVKAFACRRVKNDELDARDLADLLRMGRLAEAWIAPPEIRELREITRYRCKLVHIRTSCKDQVHGVLAKLGIQVTCSDIFGAWGTQWLDELPLPQPYSWKVASLRQLIGWLTSEITVLEQVTADLLAGHDGYRAVQQLPGIGPVLGAVIVAEIGDITRFRHPARLSSWAGLTPRHYESDTKVIRGRITKQGSRVLRWAVIEAVQRTPAGTPVRELKDAIIARRGKEARNIAKVAAARKLLTCVFYAMRDGHVRSLIARAAEQEAR

SEQ ID NO: 263347 - protein, 341 aa, unidentified
MREQQYVGIDLHRRRSVLVRMNDAGEVLAVSKIDNDPVSLSMAVAEAGPDPEVILEACYGWYWAADLLQAEGARVHLVHPLGLHWDSRRVKNDVKDATELAHRLRRNDVPEAWIAPPAVRELRELVRYRAKLTALRTSAKAQIHAVMAKLGILPPQAEMFGPTGQVLLDEMDFPGPYGLRVESLRDLLEIYDRELVLVEREIAGWLKDDVGYRAIQALHGIGPITAAILVAEIGDIHRFASARHLCSWAGMTPKLKESDTNSNRGKISKQGSTLVRWALVEAVARYHGGAPIAPTYRRIAERRGGKIGNKIAKVAAARKLLTLVYYGLRDGEIRCLYNEAV

SEQ ID NO: 263348 - protein, 410 aa, unidentified
MGYETLIRRAHVMTRKNTLKSLPTDTEFRVVGLDLAKSDVSVAAIPVDDNTPSLVDRMTYADLLDWAGKISPTLFAMEPCNGYSLLCLQLENLGHEIKVISGSTVSMWINTHLSGQKTDLNDAIALARLAVSDAELTPIRHKSITEIRIQTVQAVRQQLMSQRSKSIVSFKALAQQWGIPCAAGHRNLKKLRESIEAKVDLITRPVANAMLFLLDAVKSLDRQIGQLNQTLQELVMSDERGRLLQSVLGVGTQISARVITVVGNIERFNSPRSLVAYVGVAPRNFITGHKNLTKKKHGNCPDLSHKGQGKISRRGDKLLRSLFIQGAACLYMQFCKDQLPECQLKRWILKQLARQKTYGKLIVSLAAKLIRIVWAVLTYREKFNIQKAGMTRSMWSEMALETPLNKEVPA

SEQ ID NO: 263349 - protein, 376 aa, unidentified
MSFKIFKFNCCGLDVHKTWIYACIGITDSNNRTEYKQARFSSFSKGLHQLCVWLAKYNCNDVCMESTGKYWIPVFNILEQHKIRVTLSHPKYTKPMKGNKTDRKDAKWICDLYMCGMVKPSFIPPADIRELRDLVRYRFKLTCMITGEKNRAQNCLTVSNLKLDDVFSDVFGKSSRSITEQILQHPGEKFDVSPFVDSRCKTPIEEIQAAVDGNISKEQDVKLRQCLDHIDELQKHISEVEQEILRLSDKYEAALNLIRTVPGFDKNPMTAIQVLSEIGGDMSVFLTAKHLVSWAGCCPRNDKSDRKIKSTRISCAGSYFKPVLVQIANALIKSKKHFEFTTRYKRIKTRRGHKKAIIARCRMRDCEKKSVNKIPL

SEQ ID NO: 263350 - protein, 437 aa, unidentified
MTKVIKFDEIHANGAGIDIGSREIFVSIDGEQVVKFGTFTSDYRSCCQYLKENGITSAAMEATGVYWMSLYSMLEESGIQVCLVHPMEVQQVKARKSDTKDSRWIQKLYSAGLLRESIVAKGQLKDMRILIRERLDLIEMGSTYVNKMQKYLELMNIKLRNVISQIHGVSGLRVIKAIIEGERDSEKLLILCHESIRNKKREEMVKALEGNYHQAYILLLKENLRLWEEHQASIQNIEKQIGQLLEKMNQDNKHIEVTSPSKPARHHHPQIEDLHIKMVQMYGGINLTTIAGINDSTMLRLLGEVGNDMSRFPSKEDFVSWLTLCPKNKQSGKMKKRIKCPANNAGLIFRQSAQSLLASKHNAIGAFMRRLSARKGPKVAVKAGARKIASAFYDALTKGIDYVEQGAIKYQEQQKQREINFLNKLAKKHNYNLASLS

SEQ ID NO: 263351 - protein, 343 aa, unidentified
MDEVSIIGLDIAKNVFQVHGIDCSGEPVVRRQLKRGRVLAFFGKLPPCLVGMEACATSHHWARELEKLGHEVRMMPPRYVKPYLKRNKNDAADAEAICEAVQRPTMRFVPVKTPVQQSVLMLHRTRQLFVHQRTTLINAIRAHMAEFGIIAGVGRNGVEALLKIVAAGSDERIPPAARECLMALATQLELVKRQILEADRRVLAWHRASKVSKRLEAIPGVGPLIATALVASIPDPHAFRSGRDMSAWIGLVPKQNSTGGKERLGNISKAGNRYLRKLLVIGALSVIRRAKILGYTKHPWLVRLMERRSTMIAAIALANKIARMAWAMMARNETYRTPRAQPA

SEQ ID NO: 263352 - protein, 411 aa, unidentified
MQYFIRKEGMPMLSIGIDVSKGKSTVCGMKPGGEIVYAPFEVQHTREGMSELVLLLHNSGEEVRAVLESTGSYHCPVVAALLENGIFVSVVNSLRMKRFCSQSIRKVKTDRIDAMQIALYGLAYWQELQPTKLPEDTYRELQLLARQYYQMTSLLIKAKVDFNAICDQVLPGMQELMNDHAGRHKLSDFVLRYRHTTHILEMGETRFRKDYCKWAEKKGYRNCERMAVLIFATAQNGIPVLPNAPSTQIVITEAIRVLHTVEASRDAILTQMQALAKTLPEYSLVREMPCIGDTLAPRLIAEIGDVRRFHSKRALIAYAGIDAPPYQSGKFCANNRHISKRGNRYLRKTGYEVMQSYVMHKPANDPIFTFIEKKRGEGKSGKLAMVAGLNKFFRVYYGKVTELYRSLPAIE

SEQ ID NO: 263353 - protein, 310 aa, unidentified
MDGIFVGIDVSRDRLDVHVLPAGEAFHVSRNGEGIADLADRLKVLAPSHVAVEATGGFETVVAAGLAGAGLPVVVVNPAQVRHFARALGERAKTDPVDAAVIARFAQATRPEIRPLADEATQLLADLVARRRQIVEMIAAERQRQKRATLKSVVRSLARLIAALEAELASLDADIDDGIRGSAAWRQAEDLLTSVPGVGPITARTLIADMPELGSLDRRQVSALAGLAPYTRQSGQWRGKSFISGGRACVRTVLFLAAQVAKRHNPPLKLFYDRLIAAGKPKMVATIAVARKLLTILNAIIRTKTPWQNA

SEQ ID NO: 263354 - protein, 334 aa, unidentified
MEKVTTLGIDLAKSVFSLHGVDGAGQAVLRRTVRREQLVKVVAGIAPCLIGMEACSGAHEWGRRFQGHGHAVRLMAPKFVAPYRKSGKNDGNDAEAICEAVTRPSMRFVPVKSLEQQALLAIHRVRQGFVVERTAIINRLRGLLCEFGVVLPLRSVTVRRQAAQAAENLPDLARRAIGDLLDELRVLDERIGGYDREIEAQAKLCEPAQRLMKIRGIGPTTALAIVATVGNAREFKNGRQFAAWIGLTPSQYSTGGKPRLGHISKRGDAYLRNLVVQGARSVLNNAGMHPDRMSRWILELQPRRGYYRTLVAIANKNARIAWALLAKNESMRSA

SEQ ID NO: 263355 - protein, 412 aa, unidentified
MRIVGLDVSRSVAEIAYLEDGVLHAGGRAGLRRDELERFAASLRSTDHVVLEATGNTAAIVNVLRPRVARVAIANPLLVRLIAEARVKTDRIDAAVLAQLYASHFLPEVWMPDESTLALRRQVSRRSQLVRQRTRLKNEVHAVLAAHLIERCPATDLFGRKGRVWLTAQPLPMDERLGVEQRLRELDRLGEDLHEVDKALAQASIGDERLRRLLTITGVNATVAIGLLSAIGAVERFPNPEKLVSYFGLNPSVYQSGPTPARHGHITKRGRSYARGLLVEAAWGAAQAPGPLRAFFLRVRDRRGQQVAIVATARKLAVIVWYVLTRNEPFAWDRPALTAHKLRALELQSGMPAQHGSRKGSAAAYSLKSVRDQERAIAEQAERTYQRLFSRWKQTRPNKREVPLVWPGTPTS

SEQ ID NO: 263356 - protein, 368 aa, unidentified
MEFHEPLFGGTAMRKGNTKSAKGKRLAVTEADRVVVGLDVHKREIHAAVRVNGQEVGTHVLPARPAAVEKFLAPYRPGLKHVVYEAGPTGYGLARHLRSAGVPVDVIAPSKTPQTPGDRSKSDRLDCLELARLDEANLLKAVGVPTEEEEAERQVIRLRDQAVADRRRVRQRIKSFLLMHGLAEPAGLGHWSAAGVAALGSMKVGNGRLRFCLDLLLEELANADETIEKVVHEMKEMAEEPRHAPAVRALTAHVGVGRTTALAFEMELFRPERFSNERQVSAMLGLAPRVRQSGGRRQEGPLIKAGRGRLRALLVEAAWVWIRHDAEARKVYQRLVHNTGSTQKAIVGMARRLGLDLWRLLVKTRAAA

SEQ ID NO: 263357 - protein, 367 aa, unidentified
MSERTRFVALDAHALTITVAVAEEAGTPTEHGVIPNAPSSVRRLVGRLGGPGVRLVACYEAGPTGYALHRHLQALGVECMVVAPSLVPTRSGDRVKTDRRDALKLARLLRSGDLTPVWVPDEEHEALRDLVRARADAKADELRAKHRLSKFLLRRGIRPPHGMRAWTTRHRTWLARIRLQESCAQIVLEDYLSVVRAADDRVRRLEAALLTAVPDRHRALVAALQAFRGIAYLTAVTIVAEVGDLRRFATAPQFMAYVGVVPSEYSSGASRHRGRITKTGNAMLRHVLGEAAHHCRLQPRVSTTLRRRQQAVPTAVVELAWRAQTRLHQRYRHLSARLGRPKATTAVSRELAGFVWAVGQQLEVPAA

SEQ ID NO: 263358 - protein, 481 aa, unidentified
MGEKKSAPRGKSGHGGKRRGRGVQKALQVVNPDAAGIDIGAESHYISVPEDRSEEPVRQFGCYTPQLEEMAGWLLECGIKTVVMEATGVYWIPVFRVLESRGLEVLLVNPKHVKHVPGRKSDVADCQWLRQLHTFGLLRGAFVPPQDVAAMRTYWRQRRTLVEAASREILHMQKALTQMNLHLHVVLSDVTGVSGMKILRAIVAGEHDPVRLAGLAGTQVRASREEIAQALSGHYTGEHLFVLGQALELFDVFQAKIRDCDGQLAMHLSRFEGKAGAGAPPSNPKRSRRVSRRKNEPYFDLRAELWRLTGVDFNRIDGIDSLTAFTVLSETGFDVSAFATEHHYASWMGLCPNNSITGGRVKRRHTRRVINRAADALRIAAQSLWRSKSYLGAYYRRLAARMGAPKAITATAHKLACIMYRAVKYGQQYVDKGEQYLEEQHRKRNLKSLVHRAKDLGYMLVHSETGECLSLTNQPLTRCVS

SEQ ID NO: 263359 - protein, 406 aa, unidentified
MGASTVILPSTLLKLTELAMAKVDDLSRSVIPLDQGSTLICVVELSKSSWLIAGMVPGVERQPLKKLEPDASALLQIIERWRNEAIKANRPIERMVLAYEAGRDGFWLARWLRSRGVEAHVIHSTSVAVSREHRRAKTDRLDTAMLMRVFIGWLRGERGHCSMVTVPNLDEEDAKRPGRERESLVGEQTRIINRMKAALARFGVRGFKPELRRALARLENLRTPEDVLLPPNTLSELRRDLARLMVVREQIKAVEQARLEAIRQAPDKPAHRMVRLLTRVIGVGVESADMLVREVLLRDFRDRRAVARYAGLTGAPDESGAKRREKGLAKSGNSRVRRGLIQLAWRFLVFQRNSALARWYVERTSGSNGARKTTMIVALARKLLIALWRLATTGVVPEGVVLRSAS

SEQ ID NO: 263360 - protein, 402 aa, unidentified
MRFTGIDIGAERHMVAIVDESGAVLLRATSVTEDAPGYRRLLELLGDAGDCLVAMEATGHYWRNLYAALATAGFTVALLNPLRTSRFAEEELQRTKTDAIDALGIARFAAQKRPAATRLPEAALEELRELVRLKEQIVQQFGDRVRQLHRAVDLGFPEFTRHVRTLQSELATAILSRYPTAAALRTASVSKLARLCYDGSHHVSEALARALIEGAKQSVGAHHGEPYQLEVRYACEDIDLLRRRLRALEGDIERRLGQHEVGKLLTTINGVGPQTAACIIAEVGDPLRFHSARALASYVGVIPRLHQSGKRKFSASAKVPLGNARLRRALWMPALTAIHHNPWLRAYYQRLRAAGKRPKVALVAVIRKLLAAVYSVAKHRRPFVLPPIFTPAAGGAVVPATQ

SEQ ID NO: 263361 - protein, 398 aa, unidentified
MYRADFAAGPMATLIYRLFASSGENLMRWTAPERHRCATLVAVEGNELKEPSAVKITTIGLDIAKRVFQVHGVDADSKVVLRRKLRRAEVLSFFEDLPPCLVGIEACSTAHYWAREIRSLGHEVRLLPPSYVKPYVKRGKTDAVDAEAICEAVTRPTMRFVPIKSAEQQAVLMLHRTRDLLVRQRTMLVNALRGHMAELGIIAPQGIARVADLVAVLLGEDTRCVPALARQALGGLVAELESLAKRVDEVEAAIVAWHKDNEASRRLATIPGIGPITASAIVATITDPSQFQSARQLAAWIGLVPKQHSSGGKQRQGGISKQGDRYLRRLLVLGATAVIRHIGNKSMAEAGWLKSLLERRPARLVAVAQANKTARIVWALLVTGEAYRAPGTAPAVAA

SEQ ID NO: 263362 - protein, 460 aa, unidentified
MNYNTQNAKIASITEKTLIVGIDVGSETHYARAFGWRNYEYSKKPFAFSNDEAGFSSFKDWMDDIAEKHGMEAVIPGMEPTGHYWLNLGAYLQEQGMKPVHVNPHHVKKSKELDDNNPSKNDRKDPKTIAGLVNEGRFSYPYIPTGIYAEIRNLSNLRIQTQEEITRIKNRIARWFSIYFPEIKDVYRNPDAVSGLMVIKQAPLPCDIKELGVDGVNKIWRDARLKGAGIKRATTLVTAAEHSIGNTEAPRSARKEIRNLLNDYEIYKNRMDELMEEIEETLSEIAYIDKLMEINGIGIKTVSCFIAEVGDIGRFDNPKQVQKLAGYAIVADSSGKHNGESRISHRGRKRLRYALYEAAISVIGKNKEFKEIHCYYRTREKNPLKKMQSVIAVACKLIRIFYTILTKGIEYDGQKMLSDIVRLKCSQQHKEKETVNHGRSEPLKGKNGRLRPAMIAGRNK

SEQ ID NO: 263363 - protein, 368 aa, unidentified
MNTAYCTTIGADVSDRTTKICVMSNESGKPKVVRETTIPTTPDGFRAFLEGQDKSAPLVFETGTHSRWIDKVGTGMGFKTFIANPCRLRMITESKTKNDKNDARTLARMALADVELLHPVRLRDDEHQKMVNLHEIRDQLVKERTAEILQIRTIAKSMGFRIPDCSSECFHNIAKDSLPKALSDIVWPLMKELKSKAVTIKTVEKQMRRLAKSDVFKAQVERLMEIPNVGFITATCFVAVTGGDMDRFDRPRDIGPWLGVTPKQDQSGDVDRQCHITKAGSKMLRWKLTECAQRVLQKNSADMDLKVKGLRIRARGGKIARGKSVTAVARGLAVLMVAMLKKPDEPYVPLSEDKAKELAQIRAAMTAA

SEQ ID NO: 263364 - protein, 419 aa, unidentified
MALKIVHTICCGMDVHKSFVVASIAATNNKGVTTYKQSRFSTFTNGLKKLAQWLAENQCQDVCMESTGKYWIPIYNILEPTCNIVLAHPKYVKAISGKKTDKRDAQWIADIFKHGLVFGSYIPPFEIRQLRDLTRYRTKLTGFTVGEKNRAQNCLTVSNIKLDDVFADVFGKSATAITEQLMLHPDGQFDVPQFIHGRCKAPIEKIQAAVDGLMCSEQMSKLKIIQSHMNSLSVCKDNLDSLILSLSKQFQPQIDLLLTVPGIQLSSAITIISEIGVDMSVFPTAKQLCSWAGLVPQNNESAGKKKTTRITRAGAYIKPRLVQCALAVCKSDKHPEIKSRYLMLKKRRGHKKAIIAIGRMLLTAIYAILKKAEPYNPTLYRKETVSLAPASRVISTEQAIAYIQRQGYIIVDPDGEIAS

SEQ ID NO: 263365 - protein, 370 aa, unidentified
MKKNSSQKQNSGKSNPPREKEGFASYIGIDLGDKYCDVCVLDGQGEVHEEFRLRMKGPELQGNFTSIGRSRVAVEAGGQSRWVAEIIQRCGHEVYVSNTRKVAYIHQSDDKNDPGDAYKLAELVHFKPRLLHPIQHRSLEAQADLSWIRAREVLVESRTQLVNAVRGMSKAFGERLAKCSVESFTAKMAGQVPEAIRKAMAPLLETIDHLNEQIYYYDLMEAHIARERYPKYRLLEQVNGVGVHTALAFMLTIGDAERFAKSRQVGCFLGMRPKKQESGESKPQLGITKAGDVYLRKTLVNCAHYILGPHGKDSDLRRFGLRLCARGGKNAKKRAVVAVARKLAVLLHRLWVSGEVYEPLRNSKAREVAA

SEQ ID NO: 263366 - protein, 407 aa, unidentified
MASLQVVYERCAGCDVHKKTVVVHAVAPGRSELRTFGTTTRELLTLLEWLAEWQITHVAMESTGVYWKPLYNLLETTDMTVYVVNAAHMKAVPGRKTDVHDAEWICDLMRHGLLKASLIPSRPQRELRELVRYRISLVGERTAEANRIQKVLEGGNIKLGAVLSDMLSKSGRAMLEALAAGQQSPEDIAALADSRVRATRAELADALRGRLTPHQHLMLRLQLDHVRYLDQQIEAVEAEVASRLAPFPAQRTQLDTIPGVSARVAEVVLAEVGTDVTRFPSAAHLTSWGGMCPGSNESAGKRRGARTRKGSPTLRRTLTEAGQAAGRTKNTYLGAVYRRIAARRGRKKAAIAVGRRILEIAYYVLRDGVAYEDLGANYYDEHKKHAVVRNTVKRLERLGYKVTVEAA

SEQ ID NO: 263367 - protein, 372 aa, unidentified
MQSYYVGLDVHSRESVFVVENEAGAIVARGSVPTTVNGLKHLRDSCSLPAATGIVLETGTSAFFVARELARLELKPVVIDAHEVRRKAQRPEQKSDTRDALELCEGLRRGFYRSIVHVPSPAISDLRTTLSRRRHFIRIQTAEVNAVKRLLRGVGRNSGRRGSLRTDAHWQSLLAGDLVPEQLQEHVRHHYAVWRQAAERVRALDLSLGDSARERRDAVKRLETVSGVGPIVALTAIAVFAEVSRFESAKHAASYAGLVPSTFQSGERDAHGHITKRGSAELRAMLCEAAHHARRPTHPLHPHFARVCARRGYKTAVVAVAHRLCRILFAMLRDGADFSVTRVGVEEGDFERTTTYKYRLRPKPAGRLPAAG

SEQ ID NO: 263368 - protein, 345 aa, unidentified
MHYVGVDYHKKSSYVTVMDERGKVVKEGQIANTREALAALLDGTAEGASAVLEAGRNWPVMYDWLDELVDEVTLAHPAKVRVIAEAKVKTDRIDSRMLAHLLRADLIPAAYVPGAVTREQRRRLRQRMFLVRLSTMVKNRVHTLVDRHPELSRQAGGWSDLFGKAGRAWLEQLELPAGEAEILRTDLDLLEAIQEHIKSSDRWVSQLARKDGRAKLLSTIPGIGEFFAVLLAVEIDDVGRFLRPEKLAAYAGLVPSTYASGGYVHHGRITKRGNKWIRWACIEAVYPATRQDPALAALYQRLKATKGANVAKVAVAKRLLTIAYRVLREGRPYRPAEEQAALKRR

SEQ ID NO: 263369 - protein, 322 aa, unidentified
MSDSVTVGIDVSKLTLDVHVSPAQLRQTVSNSNSGFAELKKLLSMQQVSLVLLESTGGYEDAVVCFLQSLGYDVSVINPRQARDFARSMGRLAKTDKIDAELLAQLASVIDSRPDRARFVKKITDDSRRKLACMVARRRQVVNMISTEQQRKSTASHYSTDSINKVLSFLRSELKSIDADISLHVRSHFADISGLLASFKGIGPATIGVLLGEVPELGRLNRRQISALIGLAPFNRDSGVMRGRRTVWGGRAMVRNALYMPTLSAVRFNPVIREFYTRLISQGKPRKLAQVAAMRKLLCIINAMLSSGTMFNHALHRKQEVQ

SEQ ID NO: 263370 - protein, 441 aa, unidentified
MAMRKREEDEVFPNAAGIDVGGSSHWVAVPRQGDAEPVREFGAMTDDLNAMADWLLSCGVDTVALESTGVYWIPVYEVLERRGLAVWLVDARQMKYVPGRKSDVQDCQWLQKLMSLGLLRAAWRPGDEVCVVRAVVRQREVLLAEQASWVQRMQKALVQMNLQLTEVLTDVMGMTGQAIVRAIVAGERDPKVLARHRHGRLKASAAEIERALTGNWREEHLFVLGQALAMVDSLAQRILECDAKTEALLLPLGCHEVELDGPGKRRGKNTPGFDARTALARWAGVDLTRINGLAVTTVMTILSEIGPDLSRFANVKHFCSWLGLCPGTKVSGGKVLSARTRRSTNRVRQALKLAAMSLSRNDSALGAFYRRLCSRMDKPRANTAVAHKLARMVYFMLTRGEAFVDQGQQHYEEQQRQRSIDALRRRATALGFQITPAAQTP

SEQ ID NO: 263371 - protein, 401 aa, unidentified
MKAKQQPSAQTGNPTIKVQNLVDFTGRDLYIGIDVHKQRWQVAVYYDGLILSNTSIEASPGALFTHLRKRYGEAHFSCVYESGPFGSSLCRSLWAAGLDCMVVNPADIPNTNKESRSKSDPVDARKLALHLAARLLHPIYVPSEKLQKQRSLIRFRKKLWGDLVRSKNRLKSELIFQGITVPKQYDNKHWSHNFLDWIEQQALKEEDLKETLLLMLEEVKLLRVLLLKTERKLRELMWSEDFKVKSELLRSIPGVGPLTAMLLLLEVGDVSRFKSFDALNRFVGFCPDSHSSGESQKHSGISIRRHNQLRSMLVEAAWQLIRRDTAMLDNYRQLCTRMKGQDAIIRIARKLLRRIRAVMLSERMYVIGVGGHMVTSEIGAPQLSQPKKRGRPKKLGIATYK

SEQ ID NO: 263372 - protein, 348 aa, unidentified
MRFYTQPHQYYCGIDLHTRTLSLCLLDAAGAIRLEATLPPDRDRLAAALAPFRDGLVIGCECLFAWYWLADWCAAEGIPFVLGHALYLRAVHGGKTKTDAVDAAKLARLLRGGTFAEAYVYPKGMRATRDLLRRRTYLVRQRATLIAHLQTTFLQYNLPAPQKKLAYAANRAELDLSVFPDPSTRSMLAADLAVAAALDAQVKRLEAELVRTAKVHDPQTFARLRSVPGIGPVLALILLYEVQSIDRFEHEGQFLSYARLVGGVRESAGKSKGTGGRKIGNAHLKWAFGEAACLMLRESAKAKTWVARKERKLGKPRALGALACRIGRTVYHLWRKRESFDAAKFLAS

SEQ ID NO: 263373 - protein, 393 aa, unidentified
MICVGIDVAKDKHDCVILNSEGKILAGVFTIPNNADGFDTLLQKIRSCTSSDDKIKVGLEATGHYSYNILGFLINQGLPTYVINPLHTNLYRKSMSLRKTKTDRVDAKTIATMLMSNVDLKSYTDTAYHNEELKSLTRYRFDKVRERAQLKQSVSRLVTILFPELEKLVPTLHMSSIYALLIEFPGAKQITEAHLTHLKSLLKDASKGRYGRDMATEIRDAAKHSIGSVMPAKSLELRHTIRLIRELDSEIEDIEAAIEAIMEELQSPITTIPGMGFRMGAMILAEIGDFARFDSPDKILAYAGMSPSTYQSGQLSLAGTYSHMEKRGSRYLRYALYNATKYVCHWDPGFAAYLAKKRAEGKHYNVALSHAAKKLVRLIYAMEKSRQPYKRAA

SEQ ID NO: 263374 - protein, 376 aa, unidentified
MREKLRFLGLDVHAETIAVAVAEPDGEVRNLGTIANREDSIRKFIKKLGSPEQLRACYEAGPTGFVLYWQLTQLGVDCVVVAPTLVPKKPGDRVKTDRRDALKLARSHRSGDLTAVWVPDEDSEALRDLVRQREAAKQDQLRARHRLTKFLLRTGQRPPLGLKAWTERYMRWLEQVRFTQPAQEVTLRDCLNEVEHMSARVKRLEEAILEVVKLAPQSMQEVIRGLQALRGVAHISAVTIAAELGNISSRFQSARKLMGYSGVFPSEDSSGNRIRRGGITKTGNAHLRRIVVESAWCYRHWPRVGARLRKRQQGIPAEITEIAWKAQNRLHKRYMKLSMAGKDPRKVMTAVARELLGFIWAIAIKAEQAFQQPIAA

SEQ ID NO: 263375 - protein, 343 aa, unidentified
MGEVSTIGLDIAKSVFQVHGVDAAGQVVIRRQLKRRYVLAFFEKLPPCLVGIEACASSHHWSRELKVLGHTVKLMPPAYVKPYVKRQKNDATDAEAICEAVTRSTMRFVATKTPEQQSCLMLHRTRHLFIRQQTAVINVIRAHLAEFGIVAPVGRKGVEALLDVVANPTDKRVPVIARACLAALGAQLRRLKEQILEFDRMIVTWHRSQETSKRLDAIPGVGPVLATALVASIADPKAFRSGRNFSAWIGLVPKQHSSGGKDRLGSISKQGDRYLRSLLVAGALAVIRYAKIHGTEHRPWLTALLARRPSKVAAIALANKIARMVWVLMARGERYKEPIALAA

SEQ ID NO: 263376 - protein, 415 aa, unidentified
MEVMHPRCAGIDVSKRDAKVCIRVQGSGGRRTSSTVTTWGAMTNQILALRDHLAAQQVTVVVMEATGDYWRPFYYVLEADFEVMLVNARSVKNVPGRKSDVSDAAWLADLGAHGLVRASFVPPEPIRQLRDLTRTRTHITAERTREVQRLEKLLESAGIKLSSVATDITGVSGRLMLQALIDSQGTADPAVVADLAKRRMRSKIPVLTEALNGRFTAHHAFLTRLFLDRIDAHTKDIAALSERIDGLMAPFLPARDLLESIPGFSQIIAEVFIAETGGDMTQFPTPEQLASWAGVSPGSNESAGRVKSTKTRPGNRYLKGALGVAALNQAKSKKTYFSARYRRLASTRGPMKAIVAVEHAMLTAAWNMLTNAEFYRDPGADYYTRQDPAKTRARAVRQLEALGYQVTIQPVQQAG

SEQ ID NO: 263377 - protein, 439 aa, unidentified
MNSKPLEAKRHFINGKTIIGIDPAKRNHQAVIIDSIGVPVGNSFKFSNNFYGFHQELFSKLTSHIASVNPDNLVFAVEISINLWQKLCSFLCNKGFTVLMVSPLFTHHERPKINNNFSRTDPKDALAVANCARQGYFNFYRQYPQDQNAMHRLSITYDKLKKHLTQAKQRIRSQLELIFPEFLYALDIDTDTARYLLSKYLSPREFLQMNVFEELPKVMKISGRQHGEATLKALKQAARQSIGITIANEEIIAERTTLNCWLDQYNLLKEQINSVLKQLVCLAEKTPYFGIITSLKGISDISASRFIAEIRDLSYFNHYKKIEAISGINLKLSQSGQYTGYRRITHIGNHRLRAVIYKMAEETKNHIPEIRIRYLKRQMKQPRYRKNIIASCSNLLKLITALVKEEQNYQYRKEKQTELLELENEYKEFKKKKKYKKSA

SEQ ID NO: 263378 - protein, 341 aa, unidentified
MDHYAGIDVSLEQSSVCVVDGSGSIVREAKVASEPGALVEWFGSLGFVVARIGLEAGPLSQWLFAGMKEAGLAVELLETRHVRNAFKTMPVKTDRKDARGIAELIRLGWFRPVHCKSMEAQETRAMLTTRDLLKRKLRDIEMSLRGLLRGFGLKIGETTAVRFGARVEDLVAGHPTLETIAGSLLAAHRVLLREFKAIEKRVLGIARHNERARLLMSVRGVGAVISLVYASAMDDPARFKSSKNVGAHYGMTPKKYQSGETDITGRISKTGDKRVHRALYQAAHIILTKPVKSSGLKNWGMQLAKRVGMKKAKVALARKLAVIMHRMLVDGKAFNFTAKAA

SEQ ID NO: 263379 - protein, 362 aa, unidentified
MTMLAEPNEKVEDPAILDAAVGGDTHRDTHYLEMLTGAGVLISRITIDNDADGYAEALAWIAEHTPGPRVLIGLEGTRSYGIGLCRALQAAGLEVVEAEQPKKAQRRGRGKSDPIDAHLAALTVLRMPADRKVLPRNDGDREALRILLGARREATTIKTKQTNRLRALLLTGDDDDRALSKGAMSDARLGTIARLRARKGENTEQQVRREEATRLALAIRRVTSELKANKTHLTELVEEFVPGLLDTVGIGPVSGAQAIVSFSHVGRCRNEAAFAALAGASPIQASSGRTHRHRLNRGGDRQLNRALHDIAKTRWRHCERTKAYITRRQAEQMPDREIRRCLKRYIARELFRTLTAAGVDNT

SEQ ID NO: 263380 - protein, 377 aa, unidentified
MSKVRFVGLDVHADTIAVAVAEPGGEVRAHGVIPNRLESVRKLIGKLGPAKEIRACYEAGPTGYVLYWQLTQLGVACEVIAPSLVPMKAGDRVKTDRRDAEKLARCYRAGELTAVWVPDAAHEALRDLVRAREAAKKDQLKARHRLGKFLLRHGKRPEGMKAWTKQHLEWIGTHVKFDQPALEATLQDYLDEVKHVAERIVKLEKAIDEAVRQAPPQIRAVVEALQGLRGVAQTTAATIVSELGSLSRFESPRQLMGYSGLVAREHSSGNRVQRGSITKTGNAHLRRVLVEAAWAYQHRPNVTGFLLRRQKSLAISDEVKQIAWKAQHRLNKRYKAMSARGKNKNQIVTALGRELLGFIWAIATSVEKQQQAQAAAA

SEQ ID NO: 263381 - protein, 434 aa, unidentified
MFFSNQMNSTSTNDNTQNDYAAFIAIDWADQKHTFSLQEAGQSKTETGTLEQKPEVIGPWVAKLRERFGGRPVAIAVEQSRGALIHALLTYDFIVIYPLHPTTVAKFREAFKSSGAKSDPLDTDQILQILTKHRDLLKALNPDTEETRLLARLVEDRRQAVDLRTGHIQALTAALKEYFPQAHELLNGNLASRLARDFLIKWPTFEAFQQAKPSTIKRFYYGHNIRSPQVIEKVLGLATTAQALTTDAAIVESGRRLSQMYAQLIQTLNPVIEGYEKRIEKVFHDHPEAHLFNQLPGAGPALAPRLLSFFGTDRTRYEAAGNAQSFSGIAPVTKSSGKTRVVYFRHACPKFDRQTFHEFARLSLAKCQWARNYVDYYTGKGKKFHTIIRALAFKWIRILFRCWKNRTPYNETRYMDNLKKRGSIFATLHLEQKS

SEQ ID NO: 263382 - protein, 390 aa, unidentified
MIYAGIDVAKDKHDCLIVDSNGKSLSKVFTITNNKQGFDELFVNLRTHSKDLSEIKVGLEATGHYSDNLLEFLIANDLPTTVINPLHTNLYRKGLSLRKTKTDKVDAHSIVTMLRTESLEPYSHSSYHIRELKSLTRYRFTLVQDCARLKTSFARLCVILFPELEKLVPSLHMASVYALLCELPNARAISECHLTRLTNLLSKASKGRYGKDKAIEIRNAAKDSIGSYSQVKSLELQQTIQLIQTMENQIAQTEARINPIVDNLHSPIMTIPGIGYRMAAIIIAETGNFASFDNAEKVLAFAGLEPSVYQSGQLTSTHAKMVKRGSKYLRYALFNATKYVCHWDPGFGQYLARKRAEGKAYNVAVSHAAKKLTRVIFHLVKTNQPFVSQA

SEQ ID NO: 263383 - protein, 334 aa, unidentified
MNIITLIGIDLGKHTFHIHCQDKSGKALLRKKFTRNKLMAFLAGCPSATVVMEARAGAHFMARRIADLGHETKLISPQFVRPFVKSNKNDFVDAEAICEAASRPSMRFVTPRTETQQAMRALHRVRESLVRDKVKTTNQIHGFLLEFGISLPRGDAVIKRLSLVLAEHGLPDYLVQLLMQLHAHYHYIVEQIVGLEAELKHTITTDDTAQRLMTIPGVGPITASLLSSQLGDGRQYAKSRDFAASTGLVPRQYSTGGKNTLLGISKRGNKNLRRLLVQCARVFMQRLDHYSGKLADWVRQQLERKHSNVVTCALANKFTRIAWAITKQHSIFDA

SEQ ID NO: 263384 - protein, 459 aa, unidentified
MARVQEHRKTRTSKSVEGLPAIRRGVAGIDLGSERHWVCAPTADRTNREVADFGATTPELIRLAEWLKERNVESVALESTGVYWIAPHEVLESAGFEILLVDTRRMAQVPGRDKKSDPSDCEWIQRLHSCGLLTGSFRPPEDVCMLRTLARDKANLVAESGDWVRRMQKSLDQMNVRVHRAVSDIDGVTGMAILRAIAEGERNPRKLAQLRDPRCRKSEEEMAEQLTGHWREDHLFSLRQSLQMYDSIQQRIADYDQEILRKLASMKSDKLRNQPPPKVKNPEKERAIKKRGEEPMREALYRMSGVDLTSIDAIGVQTVQVVLSEYGPNLSRFPTEKHFVSHLKLAPRKPTSGGKPLNKKRSMASTRVAGALRMAAMCLRHSPSALGAYYRKYAQRIAKDVAVFVTARKLATLIYRMLRWGQPYVDEGAEAFERRYQQTRLNALKTKAKELGFQLVANA

SEQ ID NO: 263385 - protein, 388 aa, unidentified
MLLGMLAPSIARGVIDRSWRRRPTVGPVIPHPHIMRWTVPALISCEEPPEGERAMAMMTIGLDISKSWFQIHWITADGEIIRKKLARGKVLDFFSRLPSCLVGLEACGSAHHWARELIKLGHRARLTPARYVRAYVKTNKHDAADAEACWEAVQRPGMRFVPVKSAEQQGLLMLHRTRDLLTRQRTGATNALRGHLGELAIVTGKGKANARELMALVDVDDRIPQSARRALSILVDQINDLELNIESYEKMILATARDNEVCRRLMKVAGIGPFAATALAASVDHPQHFASARHFAAWLGLVPKQHSTGGKERLGGISKRGDGYIRKLLIHGARAAVHRVRIHQVTNTWIIELLGRRPFNVVTVALAHKTARIAWAIMANGEEYRARA

SEQ ID NO: 263386 - protein, 345 aa, unidentified
MKLLKQVLGIDVSQKELVVTLGRLSDDLTIDLYAYNVFKNTESGFLKLSQWVEKLTEKDIKVRYVMEATGVYHQKFAYYLDERQADLSIVLPNKISNYMRTLEIKTITDKTCSEGIARFGLERKLDNWKKPKEIYRILKQLTRERRQITDERTIAKNQLHAEQSEAIPHISSIERLKKRIQFLNTLEKEIKDEITNNVREHTDLMQDITNICTIPGVSILTAATVIGETNGFELIRSKKQLTSYAGLDVREKLSGTSVKGKPAISKKGNRYLRSALHLPALSTIKWDDNFRDQYARIVTKHGIKMKGCVAVQRKLLELIYIIYKNKTVYDKDYESKKIACQHKMH

SEQ ID NO: 263387 - protein, 474 aa, unidentified
MARTRNRPASPPVPGDAGAEVTDEPVQVISRAAAIDVAKGSGMVCMRLPHESRAGRRTQKVWEVTATFAAVVALMDHLVCQGVERLVLESTSDYWRIWCYLAEAAGLEVWLVNARDVKHLPGRSKSDRLDCVWLCKLNEWGMLRRSFVPPEPVRDLRALTRLRANLTHDRVRHQNRIEKILEDALLKVSSVISDLMGGSGRRFLQALADGERSPAALAALGDYRLHASKAELAEALTGRFRDIHGFEIGMLLELIDDLSAKITELDERIEAQLENVPGLGGVCTSCGQPGPDGPCTGCGEPVLGVIARLDEITGIGRGAAEVIVAELGTDMTQFPTPGHAASWAKLTPRAIQSGATSKAGRTGKGNPYLRGATGVAVMTAARTETFPGARYRRHARRRGKQKAIVAGCRTIIEIAWRVIADPGFRYIELGPDYHDQLDPRRKTRDKIRQLEKLNPGMTVTLTPRPEPGGQAPAA

SEQ ID NO: 263388 - protein, 416 aa, unidentified
MKSPSNHAFTAYVGIDWADKKHDVCLQPADSETREFSVIPHKVDMINEWAQSLIQRFGSPIAVAVELSKGPIVYALQKFDCFVIYPINPLSLAMYRETFTPSRAKDDPTDAEFAVDLLLRHPDHFKPLRPQSMEMRALATLVEQRRTMVDEKNRITNRLRSALKHYYPQVLDWFDRIDTPLFCDFIRQWPTLIQVKRARKNTLETFFHQHNMRFAQVLADRLDAIKTATPLTTDEAIIIPYRLQVQVLIEQLNVTLEGIKQFDQAAESIASKHPDFPLFNALPGAGSSLAPRLLVAFGEQRDRYLNAADLQKYAGIAPVTERSGKKHWVHWRWQCPKFLRQTFTEWAAQTINKSFWAGQYYRQQRAKGCSYQAAVRSLAFKWIRILYRCWQTGKPYDESTYLKALEHRGSPLLKQA

SEQ ID NO: 263389 - protein, 412 aa, unidentified
MNTMDVVFPRCAGLDVHKKSVVACVAIRGGGTVSKEVRTFGTTTRQLHALRAWLQESGVTQVAMESTASYWKPVFNLLEAEFTPWVVNPAHIKQVPGRKTDVKDAEWIADLLQHGLLKPSFIPDRAQRELRELTRYRTSLLGERAREVNRIQKVLEGGNIKISSVLSDILGVSGTRMLQALADGESDPVRLAALADERVRATPEALQEALEGLMDTHQRFLLHQQWAHLAALDRTLAAVDAEVAERLRPFGELLRRLQTIPGVGRRTAEVILAEIGPTVRAFRTASALAAWIGVAPGNKESAGKRLSGQTRKGNKALRAALVEAAHAAGRTKATYLGAQYRRAVRTKGRKRAAVMVAHSMAVSLWHMMHNAEDYVDLGVDYFDRRDVDQAKRQAVQRLERLGFTVQLTEAAS

SEQ ID NO: 263390 - protein, 407 aa, unidentified
MDLLKTVFGIDVSSRKSNVCIMVNGQKVNDYAISNDMVGFNRLLGDLKQVTKPQIIFEATGVYSRRLQAFLDMHELRYVMMNPLEAKRKTKDDLHQNKTDKLDALYLAKLQSEHPQRLAYVQNKEYQELMANNRIYEQASHDLITNRNRLHKAIQLTFPEIEHLLANPRGKNYWSIVLRFPHPDIVLETKEADIIDFLKGLTGIGKKRANDIAQSLIRLAKVACPAVKKNSAHIRGLKMAINNILSAEEECQTALQEMAKLAPKRDLEILTSIPGIGENTALRIISELGDIRRFNNPSQLNAFVGVDPQVYESGNLTAHLSISKRGTAIGRKVLYLAINQIQSAKKAGNPCHIADYYEKRKRSSETASHKKAAIASIHKLLRTIFALIKNDQLYSYDVAKHNQRLLS

SEQ ID NO: 263391 - protein, 444 aa, unidentified
MACSGMILIREVADAPVIMGISKPAGLKSPCGEVKIVNPLFVGIDVSSKNNVAYLMNPDGSKHSSFSVQNNLGGAKLLSERIVSALGSMQLSDVVIGLEATSIYGDSLVYALREDGSLGRFQRKIHVLNPKQVKKFKEAYPDLPKNDWVDAFVIADHLRFGRIAKEVYMDDYRYKALQTLTRARFEVIQNLTREKQRFANYLFLKCSGMAQDKDIQNTSATTIALMEHFETVDDLANADLNELTTFVTEAGHGRFADPAAAAKAVRAAARGSYRLPKTVNDTVNQAMAVSIASMRALKEQVKVLDKAIEQQFEIIPNTLTSIPGIGKVYSAGIIAEIGDIHRFDSQASVAKFAGLVWTQHQSGGFEAEHSQMIKSGNRYLRYYLLEAANSVRRCDSEFRRYYDLKFKEVNKYQHKRALALTARKLVRLVFRLLKDNRLYIPPEG

SEQ ID NO: 263392 - protein, 335 aa, unidentified
MQVYGIDLSMEKFDVNYIDSNGKEKNKEVKNGIISISKFLLNVSKDGLLCAEHTGVYGDLLVYLCNQVNIPIALVPGYTIKHSLGMIKGKSDPVDARRIREYGERFTDKLIFSEYDEENIVELKQLYTLRSQLVKARKSLLTSKKGRCHLPMQSLSVHKHLGYVLSALDIEIIGVEEEIESLIKANEGLAENYELTKSVKGVGPVIATDLLIKTGNFKHIDTARKAASYAGVCPFPNTSGKMVGKSKTSPFADKKLKSLLYMGAKSAVKHNKEYRLYYQKKKLEGKPHYLIMNNVSNKMLRTIYSVIKNKTPYSQDHICLDPRENKINSSTKKVA

SEQ ID NO: 263393 - protein, 359 aa, unidentified
MKIIGCDLHSRQQTLAMLDTTTGEVVKATLKHEGNQVREFYSSLPRPVRVGIEATGSMQWFVNLMEELGIECLVGHPAEIRAAEPRKQKHDRRDADLLLSLLVDERFPAIWLPTKELLDLRALLRHRHQWVCLRVKIQNALQAIALANGLRRGPSLWTQAGQHAIASLPLSPHAAFRRDELQAMYVKFETEIETLNQRVAQQARERSGARLLMTHPGVGPITALATEVFLGDPARFAGSKELASYVGMIPGEHSSGKRQRLGGLTKQGNPLLRFLWSEAAIHAVRRDPQLKQFYRRKLIQKGLGKARAAVARKLGIRMWIMLRDRIEYHEFCRRGQMQQKSGDACAGMPAARYGAKVTG

SEQ ID NO: 263394 - protein, 341 aa, unidentified
MGDYIGLDVSLKETAISIRRDGRRIWRGKRPSDPTLLAEAIGKHAPHAQRVVFETGPLSVWFYHALTAQGVPAICIDARHAKAALDMAPNKTDANDADGLAHLAEVGFYREVRGKAYDSMPTRTLVAARTRLVRITTELSNQIRGLMKTFGLVVPPARGSRFAEPVKRLLGGQEALARILLPLLDAWLNMRRRAAELGRQLLANARQSEACHLLMSIPGVGAVTATSFMAAVEDPAHFKTSRSVGAWLGLTTRRHRSGEVDYGGHISRRGDPHLRGLLHEAAVVILTRSRVDSGLRTWGLKLREKIGFKRAAVAVARKLAVIMHARLRSGEPFNRQSAAMA

SEQ ID NO: 263395 - protein, 400 aa, unidentified
MNTEYDVWLGLDVGKTSHHGCGLDPAGEQVFDHELPQDEATLRGVITTLQDDSGRVLVVVDQPNTIGALPVAVPRDCGADIAYLPGLAMRQAADLYPGQAKTDARDAFIIADTARTMPHTLRSVDRESDVLANLKVLAGTDEDLAHDITRAINRLRSLLLQIHPALERVFKGTVLTRTIVLDLLVRYRGPAGLRAVGKSGVKRWASNHTRKDPSALIDAIFDALAKQTVTVPGSQASESVVPRHAARIKALKAERAEIEAEAEELADSLPLLQVLTSKPGVGVKTASQILLAAGDFSAFKTPGHLAAYAGIAPVTRRSGTSIRGEFLSRAGNKRLKNALFHSAWVVSCHESLSKAYYDRKRAEGKRHNAAVMCLARRRLNVLFAMVKAGAFYEAKTPAAA

SEQ ID NO: 263396 - protein, 355 aa, unidentified
MDTIYIGVDFHARQQTICSLKTCDGELVIDELKHHNKDEVRAFYSQFNGRVIVGLEASGYSPWFEQLLEELGHEVWLGHATEIRRRARWRQKNDRRDAELILDLLLHDEFPRLHRPTPESREILRMLRYRQKLVKIRTIGKNSLQTLALQSGLSLRTKLFTSAGKQQLGTTSMSPVMNQQRDQWLELLESLDQRIVATMVWLKQQAQADERVSRLRTHPGIGLLTALAVVHTLWPVSRFRNQRKVTAYVGLEPMERSSAERKRFLGISKAGSRLLRYLLVEAAHTAVKKDDELKRFYHRLEARRGRPKAKVAAARKVLVRSYIMLRDEIDYAEFQRRAVAARLARQSTRPTCLTS

SEQ ID NO: 263397 - protein, 348 aa, unidentified
MAVSIVEAGRVIVGGVDTHLDVHVAAALDPIGGVLGVESFVATPKGYTALLEWMTAFGTISKVGVEGTGAYGAGLGRFLARAGIEVVEVDRPNRQMRRTKGKSDPADAVEAARAVLSGRCIGAPKSRDGNVEAIRALLVAKRSAREGRLRAVHQMRQLSYTAPDQLRCRLKGLATTEFVAEAATLRVRAGGDAVVAATKMALASLGRRVHALEEEAGHLDERLGELVAATAPNLLELFGVGIDTAAVLLVAAGDNPERLRSEAAWAHLCGVAPIEASSGKVTRHRLNRGGDRSANAALWRIVMTRIAKDPRTRAYLERRTKEGRSKREVIRVLKRYVAREVFKHLPRA

SEQ ID NO: 263398 - protein, 320 aa, unidentified
MKMTEHSILTAGIDTAKDKLDAALHGRDRVVTFDNTKEGIAKLADYLKAEGAGRVGIEATGGYERAAVRYLQAQGLTVAVLQPQQVRAFAKMRLQRAKNDRIDARLIAACTHLLDATDKLPPEARFDALADHLTFIEQIEADVVRIQTRMEHVQEARQRKLYDGDIKRLRKRAAAERRRLEAEVRAHDDLARRLDLVYSIIGLGEPTALCIVVRMPELGQVSREQAAAIAGLAPFVHQSGKFAGQTHIGGGRARLRRALYMAAFAASARWNPALMALYKRLRARGRSHKAAVVACARKLLIYANTVVQRGTPWEDRTAAA

SEQ ID NO: 263399 - protein, 475 aa, unidentified
MSRLGPAARRRPRITYEVLDQVLSLSPRVSLDFGPAVDIRRPAEQQPFNPRTLRMKRNRFQPGKPVLAKGRAVVGIDVGKRKHAATALSPQGEVIAQLACFPNTRQGIDLLEKEVLRKAGGPGKVLVAMEATGHYWMCLYYELQRRGYECVVLNPLQTNAHSRSQIRKNYNDRIDSAGIARLVLAGEARATRVPDEKTAELRLWVRHRQRLLRAAGNMERFAHTLVDRVFPEFAEVLSKPFLPSAQELIRQLGLAPSQLASQEDNVRQVLRAASRKKITPETIDLLLQAAKQSIGTRQAENVANRQLVLAFDYLATLRQQIAAIEDELDQRVQEIRSPLFSLGITANLVAVFHAESDPIHDFHSADQYVAYAGLDPSSRRSGDTIDRHGKISKRGSPTLRRALYLAAFVATRKHACFRHLYQRHRRRGKGHTNALVIVARHLACVVWRLLTDGREFTKRPPNNNFPAGHRRRKPK

SEQ ID NO: 263400 - protein, 355 aa, unidentified
MTSTKYIGMDVHKESISIAVMNAAGKIGMECVIETKASMILQFIAGLRGDLQVTFEEGTSAAWLYDLLRPHVAKLVVCDPRKNASMREGSQNDKIDARRLAELLRLNHLSPVYHGEHGLRSLKELVRSYLTITKDLTRVMTRVKAIYRSWAIPCTGKQVYAPRHRAEWLGKITEPGVRRRAEFYYQQLDALRAVRQQVRRELLAEGQKHQAWKRLCQIPAIGPIRSAVLLGILQTPHRFRTKRQLWTYSGFGIETQSSADHRRVKGQLERAKKQSSIRGLNRNCNHDLKNLFKGAAIVAASKPGPFQEFYTALLSKGLRPEMARLTLARKIATIVLLVWKRGACFDAQHLKPQTA

SEQ ID NO: 263401 - protein, 361 aa, unidentified
MTGSGLTAAAARAMAVAPAAVQVKVGVEAAGHYHRPVLDHQWPDGWEVLELNPAQVAEQRRVQGRRRIKTDVIDLEAITELVLAGYGRPVTDRDVVIGEISAWAVHRSRRVATRTATKNQLLGQLDRAFPGLTLALPDVLATKIGRLVAAEFTDPARLAGLGVNRLIRFAATRDLQLRRPVAERLVAAAHDALPTRDAVIARRILAADLVLLGDLDDQIQSAETALGSLLPRSPYATLTSVPGWAVVRASNYAAALGDPKRWPGPQQIYRASGLSPMQYESAHKRRDGGISREGSVALRRALIDLGIGLWLNEPAAKNYAQGLKDRGKPGGIVACALAHRANRIAHALVRDHATYEAARWA

SEQ ID NO: 263402 - protein, 411 aa, unidentified
MREGPGLLHPGPCILVTVVKLAAAGVTDRLRPWSTRDREKAVGSSRPPSEKESPNSCLGLLATERRARIRKDGPKRKEGPSLDPTTIAQHVVHAGVDVSKERLDVSIRRNEAAEHTSFGVTNDEAGIEALVARLVAECPVLVVLEATGGFERSVIAALAAAGLPVAVVNPRQARDFARATGRLAKTDRIDAGVLAHFAEAVRPKPRSLPEEEEAQVFGAILARRRQIVGMLTAEKNRLGAAGVKHVRKRVEAHVRWLEKELGRTDHDLDGAIKESAVLRENDALLRSVPGVGAVLSRTLLAELPELGTLSRKRLAALVGVAPLNRDSSGAFRGKKRAVWGGRASVRATLYMMGALVAARHNPAIRRFYERLVATGKPKKVALVACMRKLLTILNAVLKHRTPWRSPHALTP

SEQ ID NO: 263403 - protein, 320 aa, unidentified
MACLIVFVGIDVSQDWLDVHLHPLREELRVANTAAGWRELADRLAVHPNAKVAAEASGGYEKGVLRHLCAAGFAVHCLNAGRVRQFAHAGGRRAKNDRIDARVIAHYLATFVLTPERFDAALERLAENVTYRRQLVDQRGVVANQARLLGDPLLARLSRRRLAQLDALIERQNQRLAALIAADRALSAKAAVLRSVKGVGPILAATLLALLPELGTVCRRAIAALVGVCPYDFDSGKFRGQRHIAGGRMHVRNALYMPTLTAIQHNPRLKAFYETCCEGRNDKKPAVIAAMRKLLTILNARMRDHIAERHDSLKTVKHAA

SEQ ID NO: 263404 - protein, 421 aa, unidentified
MQVLYERCAAVDVGKDVIAVAVRVPGDGPDGRQTVKRTFKAFYGVLGEAARWLTSLGVTHVAMEATGIYSMPVYHALIEHGHFTQVLVCNAGHVKNVPGRKTDLADADWLVHLLECGLLRGSFIPPAQIKAARDVIRYRTKIVQSRASEAQRLGNVLQDAGIKIDSVASSITTKSGRAMIEALIDGERRPRVLADLALGKMRAKIGDLELALEGRFGDHHALMCRLHLDHIGHLDEMICRLDAQIEAMMKPFRAERDLLTTAPGIGPLAAAAVISEIGASPAEFFPDAAHLASWTGICPGNHESAGKRRSGRRRHGNAHLQAVLVEAAWAAVRHDGYLKALYHRHVMKWGGYRSPTAKKKAIIVVAHALLVIIWHMLAGGASYHELGTDFFTRRLDPERETRRLIARLEALGHQVTLQPAA

SEQ ID NO: 263405 - protein, 411 aa, unidentified
MQVVHENCAGLDVHKKTVVACVITPKDKGGWEKEIRTFSTMTKDLLNLSDWLTSKGCTHVAMESTGEYWRPVFNILEGNLEVILVNARHIKAVPGRKTDIKDAQWIAELLQHGLLRASFIPPVEQRDLRDLTRHRSNFVRERVNLVNRVQKVLEGANIKLGCVASDVLGVSGRAMLGAIVDGNRSPEVMAELAQGTLRQKQDLLVEALEGRVRPHHKFILAQLLGIIDGIDETISQFDREIEDYCRPFAEAVELVDTIPGVARRTAEIIVSEIGTDMSRFPSAEHLAAWAGLAPGNYESGGKTLSASTRKGNRFLRTILVQSAHALARTKTYLAAQYRRLSARRGKKRAAVAVAHSILVIAYHLISRHEPYRDLGDDYFDQKRPESVKKRLVKRLEKLGYQVNLEPIPVVS

SEQ ID NO: 263406 - protein, 344 aa, unidentified
MNSVPFYIGIDISNDDFAASIFTDPEIPIKTRTQIPNEFSGYEKFESWLAENQVQTDNCIICLEATGVYGESLCYFLAAKGWKVAVEPPLKVKRAFPDKGHKNDKTDSKKISEYAYRYFDELQFWRPKANIIEQIKVLLMAREQLVGQRTASSNTLKALRKKVVQTPLANDIYQKNVERLSRQIHKIEKELEKLIDKHPDFKKTVKFLDSIPGVGMLLAANFLTATDGFENEMTFQYRKLAAYIGICPYEHSSGSSVYKRPRTPKYGPAKLRKLLHLAARSVVTHNEQFFLYYQQKIAQGKKPKLVLNNVSNKLLKIMCAVTRTQKPFVDNYVSIHPQFTHINP

SEQ ID NO: 263407 - protein, 343 aa, unidentified
MYYIGLDVHKKTISYCVKDAAGCVLQEGKIGSTRCELDVWVRTLAQPRMIAMEATIFTGWIYDHLLPHADKVKVAHPLMLRAIAAAKKKNDRIDAAKIADCLRCDFLPECHMASTAIRDRRRLLRYRRLVIRQAVQMKSCISGLLMETGVSYNKLRLHRMGHFEQLLNSSDELPDCIRPLLKMSREHIDRAIRLDRALLKSLEQDPLLVDRLQRLRTIPGVGPITALTWALEVGDTSRFRTIKQAISYCGLCGDEKSSADKVMRTPISKQRNKHIQQVLVEAARLAPRYSQELALLYERERQHGHGGRATLAVARKMVAHMLAVDRRNTAFIPAGEFKGTAAA

SEQ ID NO: 263408 - protein, 418 aa, unidentified
MSKKLFLGIDVASQENHFALADSEGNPVIKDFRLPNSLPGAEELVKRLLECHKQYAFDELVIGTEATSFYDWHLLEYIAESSLKEQFKLVFYRLNARQLHHFKKSYPYKGKDDRQDAYLIVERLRFGKLKEPYLPCNPYLPLQRLTRFRVHLVEVLVKETLVFLQNLFLKFSSFKRLKPFSRPLGRASVATILEFKSSEEITQTPISEIVSFLMKEGKNRFPDAEKVAKALKHVANESYRLRPGLGPTIDLILSTIWNNIQALQKSLKEIDQAIQKGFQAFPSTLSSIPGIGPVFSAGIAAEVQDIRRFPAHPQLAQFAGITWTRYESGNFKAEETRLTKHGNKYLRYYLIEAASSVCVHASEFRSFYQKKYQEVTKHRRKRALVLTARKLIRLVHALLREGRLYQPGQGVNHFSNAV

SEQ ID NO: 263409 - protein, 422 aa, unidentified
MEEFRLFVGIDWGSESHEICAVDQGGSKLLTHSVAHDGEAIAGLVDRVLALVDGKPEGLAVAMEAPHGTMVEAFLERGAAVFSINPKQVDRFRDRYSVAGAKDDRLDAYVIANSLRTDRNLYRRLSLDDAAIVELRTLVRAREDFQQDILRLGNRLREQLHRYYPQILELGDVYSDSWLWEVFEMASTPEQARHLKRAKVDAILGRHRIRRVDGTDVVRILRKKPVPAAPGVVEAARQHAQLLIPSLRLALQQRRDCDRRLQSLLDHLSSSETPSENTSGQQTHRDAEILLSLVGVGVVNGATMLAEAGRLLRDRDYQGLRVLSGTAPVRRQTGKQGKNGRSAPVFMRRACNTRLREAVHHWANVAAQRDPRTKQHYARLRAAGHSHGRALRGVADRLLAMLVAMLKNGELYDPGRRVALAA

SEQ ID NO: 263410 - protein, 431 aa, unidentified
MTNRLQVGVDFSLKRADFCLLFPNGQPLEPHIAFANSLPGYSLAKRLLLDALDTYSFQGIDLSGEATAYLWLPFFLQLSADPDLAPYDLNLFLLNPRWVKWFKKCFSQDDKSDQKDPFYIAERTRTRRPDAIWSPPTCLPLRFYTRLRFHLIQNLAREKCYFSTFLFLKASSYRRLKPFSDVFGVTSRLVLTQQPTLDELADLPVEDLASHLYELSGHHLPDPMDNARKLKRVAQESFPLDQTLALPVQRILDITLDHIRFLDAQVQQVNRWIATELEAYPVIAQLATIPGIGSVFSSGMGAEIGSVNRFLQTPKWDRKRKRYRPRNLRDAEDAVAKIAGLWWPRAGSGDFEAQDRRMAKTGNRYLRYYLIQAANLMRRYIPEYAAYYNRKFKEAVKHHHKRALVLTARKSVGLVVGLLHRDEPYRSREDG

SEQ ID NO: 263411 - protein, 410 aa, unidentified
MFYFGIDWSQDHHNLAIVNESGAQVSRLRFDHTPAGFARLDDERRKLGVPAQDCLVAIETAYNLVVDFLTERGYEVYIIPPQATDSYRNRTRSSRAHDDDSDATLLAGILRTDRDSHRRWRSNSPLTQEILAQVRLIEALRRSIHRQTMQLESVLLRAYPTAVDLFGKLNSPISLRFISAYPTAQAAQALSRQVFDEFCRAEGYNRTDKLAERYARLVEPAPAANPATVQAYQSHVQVLAELLLPQVRQREQLITQLNRLFAQHPDAFIFDSLPGAGKLLAPALLAKFGDDRARFPAPGDVQALAGTCPVTERSGKRTVIRFRHGCDKEFRRICQQFAKASVRYSGWAAAYWDDIRPNCDSDSHALRVVANRWLTIIWKIWQDRKPYDETYHLQQRAARRQPRSEPAQRH

SEQ ID NO: 263412 - protein, 393 aa, unidentified
MICVGIDVAKDKHDCFILSSEGEVLADVFTIPNNAEGFDTLLQTIRRCARPEDKIKVGLEATGHYSYNILGFLLNEGLDTYVINPLHTNLYRKSLSLRKTKTDRVDARTIAAMLMSDVDLKSYTDTAYHNEELKSLTRYRFDKVRERAKLKQSVSRLVTILFPELEKLVSTLHMASVYALLSEFPGAKQVSEAHLTHLKAVLYDASKGRYGSDMATTLRDAARCSVGSVMPAKSLELRHTIRLIHELDAEIEDIEAAIQSMMDEIQSPITTIPGMGVRTGAMILAEIGDFSRFDSPDKILAYAGMSPSTYQSGQLSLSGTYSHMEKRGSRYLRYALYNATKYVCLWNPTFAAYLAKKRAKGKHYNVALSHAIKKLVRLIYALEKSKRPYSTAA

SEQ ID NO: 263413 - protein, 365 aa, unidentified
MLYTGIDLHRRLIVVCTLNEQGAIIARSRMKTEANAVMAYFRQWGDPHRAVVECTSNWYWLCDLLRSHGIEVVLAHAKYLKAIAYAKVKTDAVDAHTLAQLLRMGFIPEAHQLPAQYRAMRDLLRQRMVMEHKRTTLMQHISSMLVKFNITELPMAASQPAFTDFLTDCPIPEEYRMTLLMYHQQCLQVSAHKKLLEQYFKRELRPTPMLQLLVSIPGIGDITGAIISTETGEITRFADDKHYASYCRLAPGARDSGGKHKHRSGSKDGNQYLKYAFTEAAIKAMQFYPEIKQFALRLEERSNASIARTVVAKKLSKIAYFVLRRHQQFLTFKGIEVRKARDWPRTCKPARITGVPLAVGASPPA

SEQ ID NO: 263414 - protein, 426 aa, unidentified
MAYRIAGIDVHKRILAVVVADMEVPGEYVFERRQCGTNPAQLKELATWLVQQKVQEVVMESTAQYWKPVWGALEQYWQPVCKQEGARPLSGSLHLAQAQSNRGPRGRKNDFADAERLVRRFVAGELTLSFVPDAEQRLWRTVMRSKYQLRCNQVRLQNRLEALLEEAHLKLSSLISDLLGLSGRRMLKAIAEGVTDPAAVAAQADYRLRATQEQLCDALGACRDLHPVYRRLVKTALEDWERIEAQITQLGQEMATLLGAHQEQVERLAEVPGLGGDSAQQIIAEVGAGAATFPSDKALASWAGQCPGEEETAGVNHDRRSPQGNRHLRRILNEAANAAVKLKGSIFALLYRRYVVRFGHVKTIAVIAHRLCCLIWKILHKGVRYEERGPEVSKQSQQRRTARMIRQLRSLGYHVRKLNASQPVAA

SEQ ID NO: 263415 - protein, 385 aa, unidentified
MGHQTFIPRDYDVFAGLDVDKRSISVTFTDHQGLLKSLRIPNNVEHLVNHVRKHFPNQRVAFAYEAGPTGYGLYDGLVAQEFRCLIASPSMIPKAPGQRVKTNRLDSVGLSENLRGGQLKGIHVPSPLYRELRHLTQLRDTFVNEMVGMKQRIKSLLLMEGVEFPPAPAGSQWSFMVKDKLRKLPCSSTVRFKLDQLLDSLEFNEKQVLKTTREIRRFCQNDPELSQCIKYMMSVSGIGWIVASQLLARIGDWRELRNIRQLGRFLGLVPTEHSTGERTDRGSITRTGDERLRSKMIQASWSAIRKDAELREFFRLICHRHPRREGPRVAIVAVARKLSVRISVVLMQQRPYVVREKVHSAPLTQEETSPQGTTRRQAEPGDKDS

SEQ ID NO: 263416 - protein, 423 aa, unidentified
MYSPTLSVGADVHLDEIVLRAVDKLGGHEVIERFRVTNNLPGAQSAAATVAEVATRLGYTRVEIGWEATGMLWIPFHRFLSTSPSLQPFQLELVCFNPKLVANFKNGIVLRGPKSDERDSYDVAARTRFGELPISYVPADFWQGLRRLTRYRFQLSRNLSREKMRFQSYAFLKCSDWKRVKPFSDIFGATSIALLTEFTAAELREMTHDQLVDLITHRGHGRFHDPTGTARAVRQALRTSYPIDPQMDEMVTATLATGWDHIRFINRSMKHLDKLIARYIDPVPNPIITVKGLGAVITAGILAEIVDISRFPEHKHLAQYIGLTWERRSTGNFVSQNTRMTKVGNVYARYYFIQGADKLRRFNLEYKAYYRRKYSEVSKYQHKRALVLTARKLVRLVHALLTKNVPYVRPRMPVDFQEDNELQ

SEQ ID NO: 263417 - protein, 326 aa, unidentified
MEHELHYIGIDTAKEKLDVDVLRPDGRHRTKKFAKTTKGHDELVSWLKGHKIDHAHICIEATGTYMEPVAECLYDAGYIVSVINPALGKAFSQSEGLRNKTDTVDARMLAEFCRQKRPAAWEAPHPLERALRALVVRHQALTDMHTQELNRTETAREVQRPSIDAHLLWLEAELKRLEKQIKDLTDDDPDMKHRRKLLESIPGIREKTSAVLLAYIGLKDRFAHARQFAAFAGLTPRRYESGSSVRGASRMSKAGHVSLRRALYMPAMVATSKTEWGRAFRDRLAANGKKGKVILGAMMRKLAQVAYGVLKSGVPFDASRHNPVAA

SEQ ID NO: 263418 - protein, 352 aa, unidentified
MARKRTLSTLDTSIAYEAVGLDLAKEDTAIAAFGPDHEGPYLIDRMPYDKLYELLADMAPTLVAMEPCSGAHQIAEQIQELGHEVMMISGRHVQAWVKDHCNGQKTDLNDAFAILNLAYDRWLTPIRGKTREECRLLALQSSYRQLKGQRTKTMVHVEATLHAWGFPIRTGSFNQKALHELIDANREAFGDEVVETLHLMINRVHDLDHDIATVLKLLTEATQRDPRASLLRSIPGFGVLTTSRWCAVVGDIARFDTPKQTMAFIGLVPNNRITGHHTETSSGREARGQGKMSKRGDKMLRSLCILGAGALCLMVRNDRLPDCPFVASIKGRLHRLDLGSKCLFMSQQSWCA

SEQ ID NO: 263419 - protein, 344 aa, unidentified
MDITTIGLDLAKSIFQVHGVDANGRVVIRKSLRRAQMLPFFARLPSCLVGMEACGTSHYWARELIKLGHEVRLMPPAYVKPYVKRSKTDAADAEAVCEAVTRPTMRFVPVKSPEQQAALSMHRARDLLVKQRTQLVNMIRGLLAEFGINIPKGLERALLMARRIVDDEAPDVPIEAARIVGTLSQQALDIHVRLRQIDRDLLVWQRGNDVARRLMTIPGIGPVGATALAASVTDPHQFRSGRQFAAWLGLTPLQKSSGGKERLGRITKMGDKYLRKLLIVGMTSLVRRAKDNPPTIDPRLANLLVRKAVRVATVAMANKTARIIWAIMTRGETYRASHQPALAA

SEQ ID NO: 263420 - protein, 350 aa, unidentified
MGEQDRLADRIEPEPSHEPPLASSNLLGWDSTMKRLYDRVIGVDVSKKRLQIDDSHELIRLSCANEADTITKKLVVQLTDPSTTLVVCEATGGYERTLVRCLHEAGIAVAVANPRQVRDFASGLGLLEKTDPIDAAVLVRFGEVAKVSLATPKSEDDERYRALVVRRKQLQNTITQEKNRLQQTADGQVRRYIEETLEHLKKQLKTVDEQLAKSVKQTPELSRRSEVLRSVPGVGPVTVSTILCELPEIGSLNRSEIAKLVGVAPLADQSGKRDSPRHILGGRGTVRRVLYMAALVATECNPTVQRFYQHLVIKGKPKKVALVACMRKLLTILNEMVRRDELWREPCTAQ

SEQ ID NO: 263421 - protein, 337 aa, unidentified
MRQIKFFIGTDVSKEWLDMCIISEGEVIHRQQIKNKEAAIRKWLKQTLKQYGYLMENSLFTMEFTGIYNHHLLEVLHQAGANIWLIPGLEINASRGLQRSKNDKDDAKLIAEYAMKNLKKVRLWKKPRTVLKQLAALLMMREKLMTSKHQYETTLKEYKSFSTKEEYLIIKDYSGSMLKTIRQELKTIEHQIKDIIKGDERLKELNEYITSVDGVGIITSANTIVETNEFLDIAEAKKFSNHSGVVPHKDDSGKKIKKPKVSHKANKKMKKLLHLAAMSVIRKKGELKDYYERKIAEGKNKMSVLNAIRNKLVLRIFACVNNKRKYEKNYVYSLANP

SEQ ID NO: 263422 - protein, 374 aa, unidentified
MKHTPKFVGLDVHKDTIAVGIAEAGRGDARYWGEIGHRPEAVRKLIKRLGRPEDLIVCYEAGPTGYGLYRQLRAMGITCIVVAPTLTPTRPGDRVKTDRRDAVRLAKLLRAGELTPVWVPNEADEALRDLMRAREDAKQDLTRARQRLSKFLLRHDLRGPEGVRRWGRKHREWLDGLRFQTTMEQLVFQEYLHAIDEIEARIKRLEEEIHRQATTSDHAPVIQALQALKGVAEVTATALVAEVQSFSRFSSPAQLMSYAGLVPKEHSSGGHRWQGGITKTGNAHLRRVLIEAAWSYRYRPSLRARLRKRQEGQPRAVRDIAWRAQHRLHHKYVRMVARGKPKPVAVTGVARELLGFIWEIACRVEADRSHPTAA

SEQ ID NO: 263423 - protein, 341 aa, unidentified
MGWTVAIGIDTHRDSHVAVALDRLGGGRGSLAVSADAKGYLLLWRWAQELGEPAFAIEGTGSYGAGLARFLVSAGAEVYECERPRRAERRHGKSDLIDATLAAGRLLKDSSLPRLRGGGAREDLRLLLLERRGAVRARTAALNQLQAVVVTAPEALRFRLRGLSGHQLARAACRMRVREGRDAVIAGVLGRLARRVQALGRELEELDLQLEAIVTRLVPELLEESGVGPVCAAQLVVSSGDPTRMASEASFAALAGTSPVQASSGLKQRHRLNRGGDRQLNRALHVISLNRTRWHAETAAYHQKLIASGKSPREARRCVKRMLARYFHRRLQMIPALDLTP

SEQ ID NO: 263424 - protein, 415 aa, unidentified
MKVVYPICCGVDVHKTFLVGTIVSTTGGAEPHYQKKRFSTYNSDLHKFCDWLHTNNCLDVCMESTGKYWVPVFNILEERGIHVTIANPKWVKAVKGNKDDTKDSKWIGDLFRLGLVPGSFIPSKEIRILREFTRYRYKLVSMKSSEKNRFQNAFTVCNVALDSVVSDMFGKSATAITDYLISGDTFNPEYCVSLLQRSLKKKADSVLDSIEGYSITPEQKFRMRIVRSHLDYIENAIAQVDSEIDMMVLKYESLISLLCTIPGVDRRSAITIISEIGTDMAQFGSSKRLCCWAGLTPGNNESAGKKKSVRITRAGVYLKPALVQVAHAAVKATDNSYYRLKYEQIAKRRGKKRAIIAIARMILTAIHQMMTTGEVWNPTDLFKLDMPDALKEKQLAKAVKQATRFLEKQGLTVAS

SEQ ID NO: 263425 - protein, 340 aa, unidentified
MRIIGCDLPASQQTIAMLDRDTGEVVERTLKHDGDTVRAFYAALPAPVVVGIEATGSMRWFEHLMEELGITLQVGHPAAIRKAETRRQKHDRRDAALMLQLLTEDRFPAVWRPSTELQDLRALLLHRHQWVRFRTRVPNALQAMALGHGVRRGHRLWSREGQAALTTLSLPAHARYRRDELLALYQQLDQQVDTLDDRVHRQARARARASLLMTHPGVGPVTALATDVFLGDPSRFADGKALASYVGMIPSEYSSGGRQRLGGLSKQGNPLLRFLWCEAALHAVRRDPGLTRFYRRKLIQKGVGKARVAAARKLGIRLWIMLRDQIDYAEFCRRGPERQS

SEQ ID NO: 263426 - protein, 417 aa, unidentified
MDETGFAALIGIDWGDRVHHVAVWDVGLGKRTECSIEQTPAALHGWITGLMKRFRGRPLAIAVEQSRGALIYALMNYPAIVLFPINPKSLARYRDAFRPGGAKDDPTDADLLADLLRTHRDRLRPWKPEEASVRTLRLLVEDRRSLVDQRTALTNRLQNRLKEYYPQALEWAGGLDTLQACDFLERWPELGAVKAVTLSQLRTFYRRHSSPLSSERIAERLAEIRAAVELTADAAIRAASMMFVRALAAQIRAVTTTIHEYDRRIAALFAEHDDARIFDSFPGAGGRLAPRLLTAFGSDRSRFEDALEVAQWSGIAPVLKRSGNTTIVQARRACPIFPKQTFHEYARLSIGQSAWARAYYEERIARGVDRQTIFRSLAYRWIRIMFACWKNHQPYDEQQYLEQLRRRGSPLAAKIEA

SEQ ID NO: 263427 - protein, 349 aa, unidentified
MVVGIDVHKGSHTAALLDERGALVETLTIANSAEGAGQLHSWLGEHGIEKAVIGIENAAGYGRLLASALAAAGHAVLNVPAWRTKRDRHAHGPGKSDAGDAVAVAEVVLRRRSELGPALEPELVRALGLLEGLRRQSIYDRTQAIQRLRAIWTQVDPQAEAQLAKCATQEALRKLKRIDFGSGLAAEAAARCVRELAREIERLNQRINELDGELEQLLREHDNPLADLPGAGPVVAVAVLAHSGDVRRFRNAAAYARFCGAAPIPCGSGKTANHHRLDRGGNRQLNAALHRIAIVQARVDPRARAFLARKTAEGKTKREARRALKRHLANVLYRRLHAWAENTLAAETA

SEQ ID NO: 263428 - protein, 435 aa, unidentified
MHSGARLIDFEEREFPQAPLTHKEGTEMEILYPRCAGLDVHKDSVFARVRCVSEPRHDEVRSFGTTTSALMELNEWLSSHDVTHVAMEATGVYWKPVWHLLEDGFELVLANAQHIRNVPGRKTDVNDATWIADLLAHGLIRSSFVPPVAIQELRDLTRSRKQLVRETAQHNLRIQKTLEDANLKLGSVLSDVLGKSGRAILGAIIAGETDPEKLADLAYGNAKRRRAELIEALRGRIRPHHQALLQLHLRLVEALQAAIAEIDDRVGKTLAPIQRCARLLTTMPGVSDVTAQVLVAEIGVDMQRFASAGHLISWAGLCPKNDESAGKRRSTRLRQGAPWLKTTLVTSAWGAVRQKDSYLQAQFHRLRARRGAKKAIVAVAASMLTAAYHMLKSGVEYQDLGADHFTRRDKSKAIQRLVRRLNDMGCEVQINAQAV

SEQ ID NO: 263429 - protein, 438 aa, unidentified
MSNKVFFNLDDLFISVGIDVGADFSWMSIALPNQQFVGKPYKILHNSIDSLTTAVSKIKEAEELYSLESRIFLESTGIYHYPLFCYLRDKGFNCSVINPIITKNSTNINIRKVHNDRFDSKKAALVGLKPDLKVSLMPSDLALNCRNLCREYYDLMDNRSAYVNKLQGELRMAFPQYLGIFSKVTINTSLTLLETYTSPSAFLEADKQEIIDIIKSTARFGLTYAQNKYNAIIQATTDANQFGYIIDSNIKRIRLYISFIRKYDEEINNILESLHELVDANEDADFVKQIHLIETFKGAGFLSAVSIIGEIGNFSAFSKPKQLFAYFGLDPAVKQSGKFEGTKVQMSKRGSAIARRVIHTLTLQSISISRNGEAKNPVLREYYLKKCDSKPKLVAMGAVSHKVCNMIFAILRDNKSFEIITPQEHIKQYNTSKCDMAA

SEQ ID NO: 263430 - protein, 325 aa, unidentified
MTRIICGVDIASSSLAARIGQQGDAASFPNNTEGINALATFCHAHQVELAAMEATGGYEQQAFAQLSEQGLGVAIANPRAVRQFAQSMGLLEKTDAIDAGVIAWYAQVKQLQPLCLAPQTQLELRARVTRLRQLTELRTMQLNQQRLVTNRAVQASFRKMLALVAKQIKELEKAIAALIQADPLWRELDQAFRVIKGVADRTVARLMAEMPEIGTLSNKTISKLAGVAPLANDSGKHQGKRAVRGGRASVREILFIVASVVGRYEPDFIAFRERLRAAGKPPKVVRIALAHKLLVRLNAKAREVRQRITAMQLQPVALPAGCEAY

SEQ ID NO: 263431 - protein, 363 aa, unidentified
MSVQYVGMDVDKQKIVLARLGAGRDTRAVEQVIANTPSAVKKYFASLLGAAEVHATYEAGCFGFGLYRQLSAMGVTVVLAAPGLIPRKPADRIKTDRRDAHSLALALRAGQLTGIYVPTEQDESVRDYLRMYESLRGDLRVCKQRVLQFLLRRGISYDGGSPWTVKHRHWLSALQFPQARDRQTLDMYLSQMQELQAKCEEAAAEVESIASQDCYRQQTKKLTAFKGIKTLIALSFVTDIGDFRRFCSARQFMAFLGLVPSERSSGNKRRQGGITKAGNSHLRRLLVEAAWHYRSYHPSSRDLTERRRGLDPAVLTYVNRAGRRLNRKYMRLLLRGKRSQVAVTAVSRELAGFLWGAMTDQVA

SEQ ID NO: 263432 - protein, 361 aa, unidentified
MANSMNFVGLDVHAHQTALVSLDRESGELRKARLRTSPLELVSHLQALAPMCCVYESGPTGLGLARAAQAQGLDVRICTSGSALRAPTDRVKTDMRDAERLARLLAAGELSFVRIPSIDEECFRDLIRAREDLRHDLMRARHRLSKLLLRRDLRYPRSGRAWTRDHLDWLRALRFSDPPSEAVMRDYLVAVEQLLQRRSVLDEAIARAWPQSPHAAVIARLRCFRGVDTLTAAGLCAELGDLRRFAKPKFLFGHLGIVPSEWTTGAQRRQGAITKAGSTHARRLLIEAAHHCRHRPGVSVGLERRQRGQDPRVVAIAWRAQRRLHERWMHLRLQRKKPAGIASVALARELAGFLWEAAVLD

SEQ ID NO: 263433 - protein, 308 aa, unidentified
MPQTIIGCDLARGWIDTHALPSGATARIGNAKRDLTRWIATLPEDGLIVFEATSGCDATLIATLAARGIAFARVNPRQAREFARALGVLAKTDKVDARVLAEMGRRLPLAVTAPPDPVRTRLADFLRRRKQLVEMRKAEKMRRHNAGQPEIRRGIEAMIALLDRRVTRLDREIASLIQACPELAEQARLLAAVPGIGPTVLATLLGELPELGTLCRRKIASLAGLAPHARESGTWRGTRRIWGGRRKVREALYIAALTASRMVPALAALRQRMLAAGKAPKTILIAVARQLLVILNAMIRDKHPIRIG

SEQ ID NO: 263434 - protein, 407 aa, unidentified
MNSQYPVVIGLDVGKTGHHACALDPDGSKLFDKPLPQHEAKLRELFMGLQKLGDVLMIVDQPNTIGALPIAVARDCGCAVAYVPGLTIRKAADLYPGRSKTDARDAFIIADTARTMPHTLRQVDRDSEVLSAVKVLAGFDEDLAHETTRALNRIRSLLTQIHPALERVFTGGSLSTALVLDLLEKFGGPTRLKTAGRGKVLRFARSHSRRDPEPLVDRIFTALGEQTVIVPATAAVELVIPRVAGQIKELKAQQATVARKVEGMLEDFPLAAVLRSMPGIGLKTAAQILLAIGDGSAFQTPGHLAAYAGITPVTRRSGTSIRSEFPARSGNKRLKNALFYSAWVASNHDPISKAYYDHKRTEGKRHNAAVICLARRRCNVIFAMLRDGTYYQPPASAPTPEPAALAA

SEQ ID NO: 263435 - protein, 439 aa, unidentified
MILIREVADAPVIMGISKPAGLKSPCGEVKIMNPLFVGIDVSSRNNVAYLMKPDGSKHSSFSVQNNLGGAKILSERIVSALESVPLSDLVIGLEATSIYGDSLVYALREDGSLGRFQRKIHVLNPKQVRKFKEAYPDLPKNDWVDAFVIADHLRFGRIAKEVYMDDYRYQALRTLTRSRFDIIQNLTREKQRFANYLFLKCSGIAQAKDIQNTSATTIALMERFETVDDLANADLDELTAFITETGRGRFADPDAAAKAVQAAARGSYRLPKTVNDTVNQAMAVSIASMRALKEQVKVLDKAIEQQFEIIPNTLTSIPGIGKVYSAGIIAEIGDIHRFDSQASVAKFAGLVWHRNQSGDFEAEHSQMIKSGNRYLRYYLLEAANSVRRCDSEFRRYYDLKFKEVNKYQHKRALALTARKLVRLVFRLLKDNRLYIPPEG

SEQ ID NO: 263436 - protein, 359 aa, unidentified
MKIVGCDFHPRWQQVSVFDAETGEIGEHKLLNGDGEAERFYRSLEAPALIGIEACGNSQWFIELVERLGHLVWVGDAAQIRASYVRRQKTDRRDAGHILRLLMENRFPRLWTPTAEQRDLRQLLIHRHKLVEIRTRVKNGLQHLALNCGLQKQRALWSVRGRACLEKLPLEGWTARRREDLLKLLAELDRHLNELDEAVSLAAEEHPQARLLMTQPGVGPITSLAFVLTIGDVSRFRHSNQVASYVGLIPREHSSGGKQRLGSISKQGNRFLRQLLVEAAQTVNRLDEGFRKQYQARCHHKPKGVAKVAAARRLTVRLYWMLRQNVGYPEIAHIESSSRVALTGNSQVVTLNERSRTRQ

SEQ ID NO: 263437 - protein, 348 aa, unidentified
MVLIGCDFHPSWQQVSWMNEATGETEDREIVHTSGEVEKFYRQFPAGAIIGMEATGNCQWFLELMASLGHEVRIGDAAKIRASDVRQQKHDKRDARLLLQLLAERRFPQIWTPSSEQKDLRQLLIHRHKLVRVRTQVKNALQHLAMNQGVLKKRKLWSAAGQKALCELPLRPWASRRREDLLKVMSMLEEKISVLDQAVAEAAAKDEKARLLMTQPGVGPITSLAFVLTMGDVRRFPRGRQVASYLGLIPREYSSGGHRRYGSISKQGNTFLRMLLVEAAQIAVRCDPGLRNEYLHRCHRKPKGVAKVAAARKLAIRLYWMLRTNTGYPEVVRVESSSRVALVVRHDG

SEQ ID NO: 263438 - protein, 339 aa, unidentified
MAIVTWYVGLDYHQAKLQVCVMDAKGKVRVNRYCANNWQAVAHVVAAKEGEQVVVAIEACCGAANLADELITHLGWEVQQAHAGYVSRIKQNPDKSDYTDARLLADLVRVGYLPKVWLAPEQIRDLRKLVRFRADVIKKFTASKLRIRALLRESRQYPPLGTRAWTRRWLMWLREVAQVAEHTRWVIEQELAMLEIYKRQKLEVEARMEALAGEDAIVQQLRAQKGIGLVTAVTLRAEIGRFDRFASGKQLSRFCGLTPRNASSGERESTGGIIKAGNTQLRMMIIQAGHRLMNYDARWQALGARLMQQGKPRSVAVVAVANRWMRWLYHQMQPAQLAA

SEQ ID NO: 263439 - protein, 347 aa, unidentified
MNDQNIHIIGIDLGKNWFHLVGMDEHGKPVYRKKLNRAQLGEWIVTLKPCIVAMEACPGSQFWGRRFQHAGHVVRVIPAQFVKPYLKSNKNDFNDAEAIAEAGSRGTMRCVALKSADQLELQALHRVRQRFIVERTAVVNQMRALLLEHGWVVPMGRELFARRLPTILGDVEHGLTVRMVQLIERLRRRWRALDDELASISNEIVQIAADSELCRRVRTVPGVGPIVSTALIAAVGNGAAFRRARDMSAWLGLVPKQYSTGGKSTLGGISKRGNAYLRMMVIQGARALLIHMKRDQSRIGLWLRELEQRSHPHVALIALANKIVRICWKVLTSGQNYRPFLEVSKLA

SEQ ID NO: 263440 - protein, 386 aa, unidentified
MPRIRTEHESTMFQRRILKKIEQSPVTPITIGLDVHKNSIHAAIFRDSAAIADWRTSANYDDLASQIRPFLPFTKTVAYEAGPTGFSLARILQRHGFNVVVCAPAHTPRASARQNKSDRLDAIKLAQFAAYGMLTAVTIPTEQEEQERLVLRHRNAIVDKIRRVKQQIKAEFLFFGTGEIASSWSRKEIKRISAIPCSENQRFALDSLLRELDMLDGELKATNARIDRIMRENHADAKAVLESHPGVGPVSAATFALELFRPKRFRNGRHVASFLGLAPGKDQTGETDKPQPLLKRGQGRLRAQLIEAAWRWIRLDPAARSVYGRIASKNKGNAKKAIAAMARRMAVRLWTMWTRGEMYDPEKANCCESQAKERRRGARERKLAAS

SEQ ID NO: 263441 - protein, 383 aa, unidentified
MLAWSSREGSAGGTSWSRKVSTTVLIWRPAGVFAVRNTNGRWGSTPVYNQVLGPDPSNMAEVGMDGKRVIGIDIGKCWLDVASEGAARVERHANERSVILALVATFDPARDVVVFERCGGYERELEGALAGAGVPWAVVHSARVKAFRQVQGIKAKTDAIDARLLREFGRDRLKAGQLRLGRAEDVVLNALMARFRQLKAALHAEQCRRETAAIEPVRASIARTIVQLEAELAIIMAELAGHEANDAQLALKEKVMCERKGVAQATARALAAELPELGRLDRREIASLGGLASRVEQSGRSERRRGLVRGRSAVKVILFNPARTAMRWDPEIKAFRDRLRARGKPGKVIMVAVMRKLLVRLNAAVRDALNQEEVSNQATLGAF

SEQ ID NO: 263442 - protein, 348 aa, unidentified
MHGKSITYENKRVFIGIDVHKKTYSVSSISDGALLASVTMRADKENLVSYLISKYKGADIYSVYEAGFAGFGLHRRLIKEGINNIVIHPAAIGVSSNDRVKTDKRDSKKLAMHLSGGLLSGIFVPSQNQELSRLLCRSRYQYLRSRTRLRNQIRMRLHQFNFIPPEMDQKLTKGFIQSTIGLLPKDLRFDIEQKMETWEFLDNRLGTYNKKILSSGNSSDLDARYLTLPGCGTLTARILATELGDMYHFSNEKALYRFTGLTPSEHSSGTKLRRGKISKQGNPVIRHTLIQLAWRAVGKDSFLAAKYKTLSLRIGRNKAIVAIARKLIGIARSMFINNTTYKAPVKMS

SEQ ID NO: 263443 - protein, 401 aa, unidentified
MNCVGVDASKGKSTVAVMRPGGEAVILPYDVSHTVSELSALAERLKSLDGETRVVIESTGNYHAPIAWWLHDSGFYVSVVNPMLTRNYGDNSIRYPKTDKLDARKLGNYGLAYWNELPRYIPEEDVRLMLKTTYRQYQQYSKVQTMLKNNLISLLDTAFPDANRLFSSPARADGSEKWVDFVATFWHCECVCKLTEKAFTAKYQKWCKKHKYNFSQDKALDIYASACGHFGVMPKTPTAKLLVEQAVSQLQATSAALAALRNEMQSLAALLPEYPVVMKMFGVGPVLGPQLMAEIGDVRRFHSKKALVAFAGIDAPPFQSGQMNVRSRSISKRGSSALRRTLFLVMSVILQNSPPDEPVYQFMDKKRAEGKPYRVYMMASANKFLRIYYATVKNYLDSLEA

SEQ ID NO: 263444 - protein, 364 aa, unidentified
MLIIGCDYHPSVQQIAFVDTDTGELSERRLAHREQAEQFYRELKRQSVSVRVGMESSGHSRWFERLLQELGFELWIGDPAEIRTKRVRKQKTDRQDAQLLLQLLLENRFPRIWVPDAENRDLRQLLWHRHRLVQMRTRVMNQLHVVPLNEGLRRKKALWRPTGRKELEAIALAPWASRRRQDLLDLLDQLTPKIQELTRALEEEVERRPVTRLLMTHPGVGPLTALAYELVIGTPERFQCGKQLASYVGLVPEEKSSGDRRRLGHISKQGNVLLRFLLVEAAQVTVRSQQEWRNKFFHLAMRRGRKIAKVAMARKLAVHLYWMWRQGCDYAQTQKLGSHAGEPGHPDGVQSITDVMIGHPAPSK

SEQ ID NO: 263445 - protein, 350 aa, unidentified
MIVLGADTHKRSHTVGAVAAATGELLGEQTVPVGLRGFAALLRWARSLDGERAWALEDCRHVSGSLERFLIERGERVLRIPTHLTANARRSARQRGKSDPIDALNVARAALREGLESFPAAHLDGPELDLRLLVDHRERLVRHRVELNSTLLWHLHDLWPELQLPGGALFSKKWSTRISRRLARAEQTMRVRIARDELRRLRELTQAVTGLEREITELVGQLAPQLLSEPGFGPRSPPSSSARSPAPSAFATPARLARAAGVAPIPASSGNTQRQRLDRGGNRQINAALHRVIVTRARCHPPTRDYIQRRRSEGKSTREAIRCLKRYLARRVWRLLQPTTPPRTSTRSIS

SEQ ID NO: 263446 - protein, 347 aa, unidentified
MRVYIGVDFHARKQTISYLTTEDGEIRQLELDHEKDDIRAFYGQFGGQAVVVGFESSGYAAWFEELLEELGHETWIGHAGAIRQYARRRQKNDRRDADLILELMVAGDFPRLHRYSRESREVLQQLRYRQRLVKMRTMVINSLRFMVTSRGVSLRSTLQSQRGQARLRQLALPGPLAQQRDELCRLLVELQQKIVTVEEWLQQKAEADPRVQRLRTHPGIGLLTGLCLVATLESIERFANPRKVTAYVGFDPVEDSSGERRRMGSISKQGSRLLRLLLVEAGQVAARRDQELGQVYRRVTLRRGHATAKVAVGRRLLVRAFIMLRDEIDYAEFQRRGVAARSSRGSA

SEQ ID NO: 263447 - protein, 349 aa, unidentified
MTLVGCGLHSRKQQVAVLDTTTGEVLEHELAHDGDAVEHFYRALRPPVTIGIETTGYTQWFHGLMHRLGHTVLVGEAAKIRAMVVRKTKTDRRDARHLLDLLKHGRFPTVWMPDPDTRDLRALVAHRVRLVRMRTMVKNGLQAIALNQRLAVGSKLWSQRGLSQLRALDLAPHTRRRRDDSLELLTWITSRIDQLDDQIADVVAHDARARLLLTHPGVGPLTALTTVLVLGPLARFPDAKHVVSYIGLAPSIRASADKQHLGKITKQGNALLRWVLGQAAPLAARADDDLRCRYFAVLHRRGRPKARVALARKLLVRLYVMLRDHVDYDEFRRRGRAAAHAPHVAMPNR

SEQ ID NO: 263448 - protein, 434 aa, unidentified
MEPQFAALIAIDWADQKHVWAMEIPGQTKPQMGSLSHTPEAVDAWAAELARRFGGQSIAVALEQSRGPLVFMLTKYPHLIIYPVHCSTLANYRKSFRPSGAKDDPIDAQLILDILARHRDKLRPLRTDTVETRTIQFLVEERRKLVDQKTACTNRLTAHLKMYFPQALEWFGELGSPIAVAFLERWPTLSDVQKSRPATIRKFYTSHNSRTGGDYLDKRIDEIQTAISATHDEAVIAGYSVAVLAWTGLLKQFLLAIKDYDQRIDLLASKHPDYALMKSFPGVGPVSAPRLIAALGSQRDRYESAYQIQCYSGIAPVVSSSGKKHHVHCRWACPAFLRQTFHEWAQHSMAGSQWAREYYEHQRKAGKGHNTAVRALAFKWIRILFRCWKNNVAYSEVVYTKSAANKKARNQVGQAVEIKWEKKMGMSKSISPFT

SEQ ID NO: 263449 - protein, 438 aa, unidentified
MSNKVIFNLDELFISVGIDVGADFSWMSIALPNQQFVGKPYKILHNSIDSLTTAVSKIKEAEELYSLESRIFLESTGIYHYPLFCYLRDKGFNCSVINPIITKNSTNINIRKVHNDRFDSKKAALVGLKPDLKVSLMPSDLALNCRNLCREYYDLMDNRSAYVNKLQGELRMAFPQYLGIFSKVTINTSLTLLETYTSPSAFLKADKQEIIDIIKPTARFGLTYAQNKYNAIIQAATDANQFGYILESNIKRIRLYISFIRKYDEEINNILESLHELVDANEDADFVKQIHLIETFKGAGFLSAVSIMGEIGDFSAFSKPKQLFAYFGLDPAVKQSGKFEGTKVQMSKRGSAIARRVIHTLTLQSISISRNREAKNPVLREYYLKKCDSKPKLVAMGAVSHKVCNMIFAILRDNKPFKIIAPQEHIKQYNSAKCDIAA

SEQ ID NO: 263450 - protein, 343 aa, unidentified
MKEGRIIGMDVGDKSHAVCVLDAEGKVELRERIANTKAALQKFLSGYTRCVVALEAGTHSPWISREITRLGHRALVAQPRQVHLISGDHQKCDERDAEHLARLARADPQLLHPIRHRGEQAQADLAVLKARDGLVRARSLLINLGRSLVKGLGARLPSCSAEAFAQKAADAVPELLKPAVEPLLTTVAQLTQQIQAYDRGVQTLLTRYPEAARMDVIPGVGPLTTMGYLLTIEDPQRFRKSRHVGPFLGLVPRRDQSGDTDKRLGIHKRGDAFVRRLLISCAHYILGPHGPDTDLRRFGLRLTEHGGRHGKRRAVVAVARKLAVLMHHLWSTGAPYEPLHQAA

SEQ ID NO: 263451 - protein, 343 aa, unidentified
MTEVITIGLDLAKNVFQVHGVDGLGKVAIRRQLRRSQMIPFFEKLPPCLIGVEACPTSHYWSRELQELGHEVRIMPAGYVKPYVKRNKNDAADAEAICEAVTRPTMRFVAVKTAEQQSLMMLHRTRSLLVRQRTMLVNAIRGHLAEFGIVAPIGLRGVKRLVAIVSDPTDERLPSLARTCLESLIASLTAVEWEASCNKRRILTWHRSSEASRRLETIPGIGPIIATALVASVSDPLIFKSGRELAAWIGLVPKQNSTGGKERMGRISKQGDKYLRWLLVAGAMSVIRHGRKTNFEKNPWLADLVHRKPTKVVAVALANKIARTAWAVLATGETYRQPAPVEA

SEQ ID NO: 263452 - protein, 401 aa, unidentified
MLFAGIDIAKHDHVIGAVDERGRSLSKPMAFKNSQAGFEKLAAYLAGLSDDKADVMVGMEATGHYWLACFCFLSEQGYEVAVINPLRTDAMRRFRNGGRVKTDAIDCAVIADTLRCGDFEPSRLADEKMMSLRQMTRLQQAMTESAADLKRQIIVALDQVFPEYGTLFSDMFGETSRAFLKRCPTPEECESIDIRTLANLLDRASHGKLGREKAASLKKAAKGSCGIRLANDAFSFQIKMLAKQIEFIEEQISEVDAKIKALLDEVEPLILTVPGISYKLGAQIVAEIGDVKRFKNAAAIVKYAGINPSKNQSGAFEGEVNHITKQGSPYLRRALYLAAMAQLKCRAPLYDYYLKKRGEGKAHREALIAVARKLVHVIYAVLSKQEPYDPAYSSASESNTL

SEQ ID NO: 263453 - protein, 386 aa, unidentified
MPHVDDLSRSLTAFDQDSTLVAVIEMSLKSWLVAGIVPGVSRAPLKKLGADENAVLRLLHRWREEATKAGRRITRVVVAFEAGRDGFWLARWLRARGIETYVIHAASVAVSREHRRAKTDRLDTEMLKRAVIGWLRGEPEHCQMAAVPTLPEEDARRPNRERDCLVRERTRIVNRMKSALVRLGIRGFNPKLRKAAERLEELVTPEGEALPLNTLAELRRDLARLALLREQIKAIETARLERLEHAPKEGLHAMVRLIARVVGVGVETADMLVHEILSRNLRDQRALARYAGLTGSPDESGSRRREKGLARSGNGRVRRGMIQLAWRFLRFQGDSALAKWYQARTETAKGTRKTMIVALARKLLIALWRFATTGTVPDGVALRPAA

SEQ ID NO: 263454 - protein, 400 aa, unidentified
MLSIGIDVSKGKSTVCGMKPGGEIVYAPFEVQHTREGMSELVSLLRSSGEEVRAVLESTGSYHCPVVAALLENGIFVSVVNSLRMKRFCSQSIRKVKTDRIDAMQIALYGLAYWQELQPARLPEDTYRELQLLARQYYQMTSMLIKAKVDFNAICDQVLPGMQELMNDHAGRHKLSDFVLRYRHTTHILEMGETRFRKDYCKWAEKKGYRNCERMAALIFATAQNGIPVLPNAPSTQIVITEAIRVLHTVEASRDAILTQMQALAKTLPEYSLVREMPCIGDTLAPRLIAEIGDVRRFHSKRALIAYAGIDAPPYQSGKFCANNRHISKRGNRYLRKTGYEVMQSYVMHKPANDPIFTFIEKKRSEGKCGKLAMVAGLNKFLRVYYGKVTELYRSLPAIE

SEQ ID NO: 263455 - protein, 330 aa, unidentified
MQFIGCDVSKTTLDLAWYNVQRGCWGTALKVHNNRAGWQDLMKWAKHHCQVDQSEICVVMEATGVYHLPTADHLSRVGFKVVVCNPGRSADYARSQNQLNKNDSLDARSLQRYGSRLEKIHWFQPYTPEISQLKSLLSLLDQLDKDVLRWQNRLEKITFQYPGWSASGGVKRQLRNLCTEQDRTQQAIDELIQGHEELRRNQQLMCTIKGVGSKTSQYLLPLLHGGRFVSARQLAAFLGLTPCHKSSGTSLRSPGQLSGRGDANLRAKLYMPALSAAHKNPELKVFYETLLARGKTPKQAITAVMRKLVHLCYGVVKNQTPYIENYASLS

SEQ ID NO: 263456 - protein, 664 aa, unidentified
MSRSCQNRRRAAARTATNQDAGCAVHTAAMPTEGPVPSTTDPRTSRSSAAPGDTPAATPVAIGIGIDTSRYGHHAIFLDADLQPAAPELKFVESAQGYQQLQSRLAALRHKHGPVHFHFRLDVAGSYADNLLAFLHGLPEPRTISCGDPQRNKNYRAAIFGHKKSDATEANATARYALTEKPKPMPVVAPAVQQLCQIASRLESQARHCTRVVNQLHNLLGRTFPELALLVKDLSAGWVLTLLDRYPTAAKLAAARSSSLEKIPYLPHEHIARLREQARTSIAALTGPVTEELVRELVGQLQDAHVRHQALEKLLVSAYRQLPEPNHLDSIIGFGEVTAAILTAKMVTTGRFVEPAKLTGYFGIYPVEASSGIDRDGQSRLPLRMVMSRRGNDLVRRYLWMAALSAAQHNPAVRPLYQRVRAKHPDQPGIAIGHAMRKLLHLALAVWQTGKPFDPEHYPWDQAAHLPGSQQPATAEPVAPSPTHEHTGPHAQAAGHKNPVTTPVRSVVTAACVPTSVTEAASAGNDSTRSVASEHPEATACDMPMSQDAQAEATALAWIDFAHLKTQLPLQRVLEHLNLLTDLRGRSSQRKGPCPVHAPSGKSRTFSVNLDKNLFQCFDPHCGSKGDVIDLWAALHKLSLRDAAADLIQTFNLEPASRTEKRHG

SEQ ID NO: 263457 - protein, 410 aa, unidentified
MYKICCGIDVHKTFVVACIASTNDKGITSYESHRFSTYTSGLKTLLQWLIDRNCKDVCMESTGKYWIPVYNILESDCSIILAHPKYVKAIRGKKTDKKDAKWIADLFKHDLVAGSFMPPSDIRQLRDLMRYRFKLTCFKSSEKNRLQNCLTVSNIQLGNVVSDTFGKSAQAILDKLLENPADTSFDLEPLVYKSLKKKLPELRDAIDGFITPEQAGKLKIIKDHYDNLESRKAELEELILALAAPYQQELTILQTAPGISSNFTAIGIISEIGTNMEAFPSAKHLCSWAGLTPTNNESAGKKKSVRVSKAGCYIKPLLVQCANAVVKSTKHPEMRNRYLRLKKRRGHKKAIITIARMLLTALYHMLKNGENYNAELYQKSDLLPVDREITVEQALMIARNQGYKIKSATA

SEQ ID NO: 263458 - protein, 404 aa, unidentified
MVFVGIDWAEKHHDVCIIDKEGTILAKGRVVDGVEGIARLHAMVADHIEEPEEAIVGIETDRGLLVGALLAAGYEVFAINPLSANRYRDRHSTSGAKSDPGDAKLLADIVRTDRHNHRQVAGDSELAEAIKLLARTHQSFVWQRQRYVNRLRSTLREFYPQALEAFGTDLSFMDAVAILSIAPTPDLGRRLSRSKIASALKKGGRQKNIQARAEKIQDALRSTQLQAAPKVTGAYGTVTSSLVRLIAGLHDQIEELEQELESSFEDHPDAKILRSLPGLGTVLGARVLAEFGDDRTRYADARSRRNYAGTSPITRASGTRRVVLARFARNERLFNACYLWAFASLTASPPARAYYDRQRSRGKTHNQALRALANRLVAILHGCLRHGQTYDESVAWPADVQKAA

SEQ ID NO: 263459 - protein, 336 aa, unidentified
METKTKFIGIDFSKATFDATIYEGEHCKFTNDDQGFKEFLAWVETHIDGLSLQDCLFCGENTGNYSVRLSNFLYVHHCTMWLESALRIKRTMGLVRGKDDKIDSAYIARYAARNAEDAVSYEPCCKNIGELRHLFARRQLLVSQRTALMNAGKEANVLGEKSKYDRALEKQNTKLVTMLAKEVLRIEKMMLEVIQADERLSRQYQHITSIKGMGPINAIALISVTEGFTKYASDAKKLACHAGVAPFKKESGTSVNGGTHVSHLSNHILKPLLTQAALSAILYNRQIIAYYERLISRGKKSQVALNNVKNKLLHIVIGLIRKDEDYDIQYQPAPKI

SEQ ID NO: 263460 - protein, 435 aa, unidentified
MCYVDDIRLEQFRQLKKEIRGSDEYLIIGIDVAKEKHRAFFGTAQGKTLLKNVVFDNTIEGFEKLDAYVDRIKVQYSLRKVVFGIEPTADYHKPLAEHLLKCGLMVVLVGGAAVKNNRQLLNGRWDKNDDKDSANIADLIAQGKCMFYEYPLMTLQNVRVLNAVKRRLKKREHGISAYIRNHILAQYFPELDTYYGSSETLAVVRECLDPSAIAGMEYDDFCRTVAPGKMTLARERRVGAIWRTAVNSVGCTMGEAAFHEAQIAVDSLNQVRQEIKAIEDKLENACLEFPEYTYLLSIPGFGPDVSAKVLGAIGDPHRFTSGKQVLRLAGLDLCAKRSGKTSNRATPIISKQGKADLRCALYQAAFIASIKSTDFMPYFTNKLVGRAKEKGIGTKMRVKLAAKLLIIAWTLMKKKECFDSKYLKLEKRVERKAAA

SEQ ID NO: 263461 - protein, 469 aa, unidentified
MPEGQQVEVEDHEQIVERVAAIDVAKASGMVCTRVPHQAKAGRRTTTVWQVGATTNAILELADQLVGQGIERVVVESTSDYWRPFLYLLEARGLVVWLVNARDVKHLPGRPKTDKLDAVWLCRLNERGMLRPSFVPPAQIRQLRDYTRLRADLTQERSRHKQRLEKLLEDALIKLSTVATDIFGVSGRAMLEALISGQRDPKVLAELARGRLRSKHARLVEALTGQFSDHHAFVARMLLDQVDALGGQIDQLTARIEQTITQIPAAQPTAQGSGPDATLQAGIQPTRSVPSPAAAVDPQTGELLAAPLPVVDRLDEVAGIGRVAAQVIIAEVGLDMGQFPTPGQLVSWARLSPRTAQSGATHRAGTTGKGNPYLKAVLGEAATAAAKTDTFLGERYRRLVRRIGKLKALVAVARSILVIVWHLLADPTARFHDLGADYHASRIDKGRKTRNLVHQLEALGHKVTLEPAA

SEQ ID NO: 263462 - protein, 345 aa, unidentified
MKNTMIGVDLAKEVIQVCTYTNKHVHSNKELTHKEFLLWLINTKPSTIVFEACATSNYWKQKAIEAGHEARLISAKLVATVRQNQKTDKNDALAIIQAAQLPEIRFINGKTEQQQQLQSVLRLRELAVKQKTALSNQLKALLLEFNIRISNKNGGLKGTIELLLEDADNGFSCEFRQALSSSWKQYSQLLESIRVYDECLESSVEEHKDCKRLMKLEGVGTLNAINLYIALGCAESGTFKKGKDASACIGLTPLQYSSGGKTKLGSIGSYVKNSTLRSQLITGAMSAIIQITKREAVTKKEAWIQGLVERRGKKCAAVALANKTVRTAYAMLTQGSEYKAELIAA

SEQ ID NO: 263463 - protein, 342 aa, unidentified
MHKRTHTFVAVDEAGRELGHKTFDADSAGHRKAVAWARERFGTELVWAIEDCRHLSARLERDLLTAGQQVVRVPSKMMAEQRRIARTRGKSDPIDALAVARAALREPDLPIASHDEQSRELKLLVDRRDDLVKHRTATINRLLWRVHELDPAWAPKAKSLDLAKHQQILADRLAGAPGIVAELARDELADIVDLTVRINQLERRIAGLVEQAAPTLLAMPGVGALTAAKLVGEAAGITRFKSEAAFARHAGIAPIPVWSGNTKGRVRLTRSGNRQLNAAIHRIAVTQIRLEGLGRAYYEKKKTEGMSTPEALRCLKRRLARVVFNHLTTDHAAARTALAQAA

SEQ ID NO: 263464 - protein, 347 aa, unidentified
MTILAERVDVVIGVDTHTDTHTAALLTAAGAVVADLTVGADEQGAAKLLAWVEAHADGLRREWIVDGARSHGIGLTRYLLAAGQIVRDAARIPGAARRRGGKSDLLDAVHVARIALTAEQVSKPRRDGDREALRILHTVRRHGTDTRTATVNLLKSLILTAEDALRAQLRGLSTDQQVRHLGTLQPGPGAETVDRVRHEQLRALALQISALDRMLADNLKQIRTLVAAICPALLDEPGIGPVSAAAALTAWSHPGRLRNEAAFACLAGVNPIPASSGRTQRHRLNRGGDRKLNAALHTIVISRRRNHQPTIDYAARRTAEGRTPKEINRSLKRYVARRIYRIMEASA

SEQ ID NO: 263465 - protein, 417 aa, unidentified
MARARTTRVIGGVDTHGATHHAAVILTSGRHLADREFPATASGYADLLAWLAGFGRLAAVGVEGTGSYGAALARHLRVAGVTVIEVDRPDRKDRRKRGKSDPLDAYRAAEAVLSGRAAVVPKAGDGIVEAIRALHTIRASAVKARRVAICQLRALLVTGPAALREQLTGLRAPALTAACARLQPGPDLASPDAATRCALAHLARRWQQLTAEITILDAQIKPLVTAAAPVLLALHGVGPETAAQLLITAGDKPERLRSEAAFAALCGVSPVPASSGRTRRHRLNRGGDRQANRALQVIAVARLRTDPETRAYHDRRAAEQLSDREITRCLKRYIARQIYRALTRPPQPGSQLPPAPAKAGVRGGRPRPPEVTAAAGTGLSAATKGRRAAQVSTSSSRSSQLRPEPETTPARSAARTS

SEQ ID NO: 263466 - protein, 398 aa, unidentified
MTRKNTLKSLPTDTEFRVVGLDLAKSDVSVAAIPVDDNTPSLVDRMTYADLLDWAGKISPTLFAMEPCNGYSLLCLQLENLGHEIKVISGSTVSMWINTHLSGQKTDLNDAIALARLAVSDAELTPIRHKSITEIRIQTVQAVRQQLMSQRSKSIVSFKALAQQWGIPCAAGHRNLKKLRESIEAKVDLITRPVANAMLFLLDAVKSLDRQIGQLNQTLQELVMSDERGRLLQSVLGVGTQISARVITVVGNIERFNSPRSLVAYVGVAPRNFITGHKNLTKKKHGNCPDLSHKGQGKISRRGDKLLRSLFIQGAACLYMQFCKDQLPECQLKRWILKQLASQKPYGKLIVSLAAKLIRIVWAVLTYGEKFNIQKASMTRSMWSEMALETPLNKEVPA

SEQ ID NO: 263467 - protein, 307 aa, unidentified
MYVGIDVAKDRLDVHFRPSGDAFAVARDGEGLAELTARLVAAAPRLIVMEATGGFEVTVAAAIGAVKLPLAVINPRQIRDFARATGKLAKTDALDAAAIAHFAEAIRPEPRAIPDEQARALGELVSRRRQVIEMMVAENHRRRQLTHRRLLKRIERHLAVLQEELSAIERDLDETIRGTPAWRENEDLLKTVPGVGNATARTLLAELPELGMLDRKQIAALVGVAPINRDSGKMRGKRAVWGGRASVRASLYMAALVASRHNPVIAAMYTRLRAAGKPAKLALTACMRKLLTILNAILRDKTPWQNA

SEQ ID NO: 263468 - protein, 340 aa, unidentified
MKQLYAGCDLHGNNNFIGIVDGEGKRVFKKKLSNDLSVVRETLKPFQEDLVGIAVESTYNWYWIVDGLMEKGYKVHLANPSAIQQYSGLKHSDDQHDAFWLAEMLRLGILPEGYIYPKEERPMRDLLRKRGHLVRLRTSLITSLQNILSRNLGINVIANELKALREDRITPLLEGNEDLALAGRVSKEAIDFLTRQILKIEGVVEKRVEVKESYRYLLTLCGVGKILALTIMLETGPIDRFATVGDYASYCRQVPSQWTSNGKRKGSGNKKSGNKYLAWAYAEASELARRFYPEPRAYYNRKIHKTNAPVAHSALAHQLARAAYYVMRDQVPFQPKKLFG

SEQ ID NO: 263469 - protein, 346 aa, unidentified
MDQIIRIGMDTSKRFFQLHGVDAAERVVLRRKLSRDQMLTFFRKLPPTLVVMEACGASHHWGRVLGAIGHDARLIAPQLAKPYVKRNKHDPADAEALCEAGARPHMRFVPVKTAEQQADLMLASTRARLIREHVRLANTIRGHAAEYGLVAPTGPGRIPDLLARIAKDETVPLLARELFAQFGEDYARLQAQITAIDARLLAWQKENPIARRLEAIPGIGPVSASLLVMKVPDPRAFRSGRDFAAWLGLTPKNHSTAGRQRLGVITRAGDESLRSLLVVGATSVVNQTMRRTARRPIAWLVALLTRKPAKLAAVALANRMARIAWKLMTSDEAYDPVRLHRLPAAA

SEQ ID NO: 263470 - protein, 370 aa, unidentified
MNKSSKSAQSMKATMDKPAMTMGIDVGDRHSHLCLVDDEGEIVKRDRVRSTEAAFRRHFEGAARLRIALECGTHSPWMSRLLKQLGHQVIVANARKIPTITQSESKNDWRDAEQLARMAAFNPKLLSPLEHRSLDRQQDLNLIQARAILVKARTMIANALRGLVKSAGGRLPACSTESLPHRAPGAVPPALAEVADPLIEQLARLNLQIHTMDEQIEKLAAKYPEIDTLRSTPGVGALVAATYVLTLDRPNAAPSNRSAGAFLGLRPAQSQSGASDPQKRITRTGNTYLRCLLVQSAQYILGRFGPDSALRSWGLKLAQSGGKRAKKRAIVAVARKLAVLLLSMWRSGQRFQPFPQPDQTKAPQPARAQA

SEQ ID NO: 263471 - protein, 520 aa, unidentified
MATSRTRPRSSPRRPSASVGKPRGVLHPRVQLVGPEHFGIVCFDCAKARSKFLLADFYGRVLIPPTTVGHNRPDLDAAVAQVRHAFASHQLQDGLVAIERTGRYHRLVQRTFAAAGFETRILHPFVTKQYRQPVDPGTKTDDTDLAAIHRATVTGCALLEATRDEAWTTLQLVIRHRRDLVGKGAALNCQIRDHLEAALPGYAACFDKLWESQIPWHLLRHFPTAEQLRTAGLTTLCHSLRQAGIRFQQRTVQAVLDWAEQAAPGDVAASQHRRIALALYDDRQRKTQEIHALERDIAGRLVQTPYVLLLSFPGINVVSAADYGGEAGPMEHYANPKSITGRAGLRPSRYQSDAVDKANGPLVRNCNRALRAAILGIADNLIVCNHHFQHLARQWARQGKDPRDIRVRVADRFCRISFQMVAGRQVFRHPCIQGRHYILDKLMAFHRAHDTPMPEVLQDLQAAIGHLSPREHAAEARPLHEELQRIQQGRRRGPQLLGDILPIVLARLGVGAVQSTESGE

SEQ ID NO: 263472 - protein, 338 aa, unidentified
MKITTIGLDIAKSIFHLYAVSKMGRLVKKKQLKRKQVLAYMANLEPCLIAMEACGGSNYWARELIALGHEVKLIAPQYVKPYVKGNKNDYNDAEAIAEAAQRPNMRFVPIKSVEQQDVQNFHRQRERIKKERTALVNQIRGLLAEYGVVINQGVAAVRKSLPEILEDAKNGLTARSRELFAQLLEELWAIDQRFEHCGQRLTSLSQENAVCRRLDEILGIGPITASATYAAAGDGKDFVNGRHFSAWLGLVPGQHSTGGKTVLLGISKRGNAYLRTLYIHGARAVLRHSTKKTDRFSLWAQALLARRGHNRACVAVANKMARMAWVIMAKGETYRVAI

SEQ ID NO: 263473 - protein, 342 aa, unidentified
MDEYDGRQFVGIDLHRRRSVIVRQSESGEQLSAVRIVNDPIALGLEIERAGPNPEVVLEATYGWYWAVDTLQAAGARVHLAHPLGVKGFRYRRVKNDVRDAADLADLLRMGRLPEAWIAPPATRELRELVRYRAKIVALRSGLKAQVHAVLAKAGVLITVSDLFGVGGRQRLAKVPLGGAYASRVRSLLELIDILDGHEARFAALIADRLDADRGYQAIQQVPGIGPTLAAVFVAEIGDAGRFADPAHLCSWAGLTPRHRESDTIVHRGHITKQGSKLVRWAAIEAVQRQQTTAKISVDKDRIEARRGKNIAKVAAARKLLTLVYYGLRDGHIRALDRARAA

SEQ ID NO: 263474 - protein, 340 aa, unidentified
MKKILFIGIDFSKSKFDASLLKSMSDEEVVSGSFENNRGGYVLFLKWVSDHTRIKKEDWLFCGEHTGLYSRDLAEFLSKKNLTVWLENPYQIKCSCGIKRAKTDKIDALEIARYAYRFQDKCTPYQPVDKAIESLSLLLSYRGRLIKEKVLLEVSAKETRRVISRDTTSRFVFENSMRNIERIKKEIKAVEEKMHQILMDSPLKENYLLTVSVKGIGLVTAVALIVYTNNFSTFNTARQLACYCGVVPFEKSSGTSLNRGKHISHLANRELKTLLTLCARCAIEHDKELNVYYHKKLSEGKEYKVIINNVRNKLIHRIYAVVTHKMPYLENYLNPFRKCA

SEQ ID NO: 263475 - protein, 357 aa, unidentified
MSCKLEAANATVIGIDIGKNSFHVVGQDRRGAIVLRQKWSRGQMEARLANLPACLIGMEACVGAHHLSRKLRMLGHDARLMPAKYVRPYSKGQKNDFRDAEAIAEAVQRPTMKFVATKTADQLDLQALHRVRERLVSQRTGVSNQIRAFLLERGIAVRQGLRFLRAELPGILATRSDVLSPRMSRVIEELAGDWRHLDARIEGLSSEIEALARQDRHCERLMTVPGIGPIISSAVVAAIGTGDAFSKGRDFGAWLGLVPKQISTGDRTILGSISRRGNRYLRALFVQAAWVVLVKLGPRQWEHYGLRSWLEAAKKRLHHNVLAVALANKLARIAWAILHNGRVFQCVKIDEIAPRSA

SEQ ID NO: 263476 - protein, 316 aa, unidentified
MTHHTVGVDISKCRLDVHRLPEGKTARFTNDAAGFEALIAFIGPSATAVAYEPTGPYHRHFEETLGKAKLPLVKVNPCQARRFAQATGERAKTDAVDARMLAVMAEALKLRPTPPASRRQRALRELQTAKNALIRQRTALLNRGAHLTDPLLKRQHHTQLNLVHRHRKAIDVRIQALIHKDPDLARKAEIIASIPALADNTAANLLAEMPELGTLTSKAAASLAGLAPLARDSGAFTGRRFIQGGRHAVRRLLYMPAVTAIRYNPDMKRTYQNLAQRGKPGKVALTAVMRKLLILANALIQQDRLWTPQAPLNTHA

SEQ ID NO: 263477 - protein, 355 aa, unidentified
MKTYYIGADVHSNSTELAIEHKGNIVSRHSVPTTIPAIKKVLSSIDGKKCLTMEEGPMAGWLYRNLNGVVDEIIVCDPRRNKLICSDGDADDKIDAAKLASLLRGGYLRAVYHSDDKTRAILKEWVCLYHDRVRDAVRMINKIRARCRMNGISILRTVIREPSKRKFWLAEIHNSGLAAQLNMLWLSFDSIVEQVKISRRQLAVLSRQHNIIKLWSDLAGIGTIRAITLFAFLDTPWRFKKKNKLWKYCGIGLQRSASGTDKNGKPKPTRFQLSWAVNRALKNVVLGAALSAINQNKNVFKCYYERMIHEGIIPSNARHAVARKMLAVMWGMWKQNGRFNKNMVMPVSRTTVSLA

SEQ ID NO: 263478 - protein, 366 aa, unidentified
MKVTYQTCCGVDVHKSFLVATSVKTTGGIEPSYQKKRFSTFNSSILEFKQWLLDNDCHDVCMESTDKYWVPVFNLLEDEINVVIANPKWVKAVKGNKDDTKDSKWIGDLFRLGLVKGSYIPCKIVRILREYTRYRYKLVSCRSSEKNRYQNTLTVCNVALDSVVSDIFGKSSMSIIDYLLEQSGTSINHEEIASKLLRSLKSKEDAVIESVEGYQMTDAQKYRVRLVRAHMDYITAEINDVDKMIEKYDFFANPDFENAVQFLCTIPGVKRDSAITIISEIGTDMSQFGGSKRLCCWAGLTPGSNESAGKKKSVRITRAGVYLKPALVQCAHAAVKSDKSPYYKKGNMNHLLNVVARKEPLSLLPV

SEQ ID NO: 263479 - protein, 399 aa, unidentified
MFAGWDWATGSHDVTVIDQAGARTDRWALAHTEAGIDSTLARLRRHGDPADLPVAIETTRGLVVDRLLTAGHPVIPIHPNAFNAVRPRWGAARAKSDPGDSFKLADYLRTDGHQLRTLSPTLAETLELQALTRQRADHVEARVAAVNQLAALLDEHWPGGKAVFASLDSDIALSFLDRYPTPESAATLTAGRLEAFCKRHGYSGKRPGSVLIERLRAAPVSASRLGQAIVARLVVVQVRLVRAIRANIRELDTAIAEATTSRPWAELIAELPRIGTVNLGQIIGEIGPMLERATSCAQLAAETGTAPVTKESGKHRSVTFRHAVNRRARQALTTWADNSRHGSDWAAAIYNNARSRGKRHPHAVRILARAWLRVIWACWRDKSCYDPITHHTTNKINKT

SEQ ID NO: 263480 - protein, 340 aa, unidentified
MENTSEIQRFSWILGVDVSKDSIDTCLIRSNDGQLFENKFHNNLSGFRHLKRWCKETGSECDENTLCCLEHTGLYTRQLVHYLLGRNVKVWLESSLQIKRSMGLLRGKSDKIDAQRIARYAAVHQQKAEIMKVGVLTLEKLKDLQANRRRLMKALQSLKTTTQELKEVDPAGGKEIERINREAVRGLEKSLDKVDEQILTHIGQDQELKQKYDLMLSIKGVGKVLAAMLLVYTHGFQRLNDSRKLACYSGVAPFVYQSGTSVRGKTGVSKFANSELKKVLHMAAVSSVQHNPDLHDYYQRKVAEGKNKMSIINAVRNKLLHRVVAVIKRGTPYQLKLENS

SEQ ID NO: 263481 - protein, 420 aa, unidentified
MKDVNTKKLKRVNEKTLLVTVDVSKMKHTGYCRCPDGTDIKPFEFFNNGRGFQEFWDRVCHMKKIHNLEEVVVGFESTGPYAEPLLHFLQKRNVRLVQVNPMHTKRLKELQGNSPGKTDRKDPKVIADIIELGHALTVIIPEGTVAELRRLTQARERSIQRRSILLNQLHDLVFLVFPEFLEVMKDMSIKSAQYLLKNYPKPQDITEAGVATLTQILKKISRGRLRKERAEALYHAAAGSMGIEDGQESISFEIKEIISTIESINRFTAELENHMSNHLKQVPYSKSILSLKGIGDITAAGLIGEMGDFRKFTTISEVIKHAGLDLFEISSGKHKGKRRISKRGRPLLRKLLFFASINVVRKGGILHEQYQLHLKKGMPKIKALVAISRKLLSIVFALVRNHSIYMDNYSKIKYQLKEAA

SEQ ID NO: 263482 - protein, 448 aa, unidentified
MKTLPIINPNAAAIDVGSEQLHVSIAGDEPVVFGTFTKEVYRLRDYFKAQGVTTVAMEASGVYWLYAYTVLEAAGLELVVVNGRHVRNLPGRKTDMADCQWLATLHAHGLLRGGFVPPAAIRRLQDYQRLRADHIVGAASQVQKMQQAMERMNIKFHDVISDLVSVSGLKIIRAILAGQRDPEALLGLCDAQIQKKKRDRVVESLQGTWAAEHLFGLGQALAAWEFYQKLLAECDQQIEAVLIKLAGPPPPQDPIRAAAGGGKKLGKNTPQIDQLHQLLVRLCGGRDVTAIAGIGDNLLLQLLAETGPDLKAWRTEKHFTAWLGLAPASRQSGKRKGSVKRQRNRAGRMFCAGARSLVQSVDKALGGFYRRLAARKGGLVALKATARKLAELYYRVLVYGLDYAEQGLRVYQEKYAQSQQRLLAKLAEKQGFRLVSVHLDALQPKINT

SEQ ID NO: 263483 - protein, 460 aa, unidentified
MNPKRSKSRNGGKMPMVHPNAAAIDVGATMHMAAVRADCAPEPVRSFGTFTVDLHRLVDWFTECGVETVVMESTSVYWIPIFELLDARGFTVFLVNARDAKHVPGRKTDVSDAQWLQRLHSFGLLRASFRPKGQIAELRAYVRQRERLLEYAASHIQHMQKALTEMNLQLHHVVADITGATGLRIIRAILAGERDPEALACLRHYSCHSSAETIAKALTGSYRAEHLFALEQALALYDAYQEKAFACDARIEAVLKKLSIHRGHGHGSAPRASRRRNRTDQANALAFDVREALFALLGKDITTIDGLGPYLSLKLIAECGDDLSSWPSAKHFTSWLGLAPSNKVSGGKMLSSRTRRSGGRAAALLRLAAVTVGRTDTALGAFYRRLSARIGKAKAVTATARKIAVLFYNAVRYGMDYVDPGASSYETRYRTRVVNNLHRRAKAFGFVLQPLEPKVGAAVS

SEQ ID NO: 263484 - protein, 345 aa, unidentified
MAGKVTETAVVGGVDAHKDLHVAAVVDQNNKVLGTQFFSTTRQGYRQMLAWMTSFGALKRIGVECTGTYGSGLLRYLQNAGLEVLEVTAPDRMERRKRGKSDTIDAECAAHAVFSGIRTVTPKTRNGMIESLRVLKTCRKTAISARRVALQIIHSNIISAPDELREQLRNMTRMQLIRTLGSWRPDASEYRNVTNVYRISLKSLARRYLELHDEIADLDVMIAAIVDELAPELIKRNAIGYESASQLLITAGDNPQRLRSESGFAALCGVSPVPVSSGKTNRYRLNRGGDRAANSALHVIAIGRLRTDDKTKEYVARRVAEGHTKMESIRCLKRYISREVYTLTA

SEQ ID NO: 263485 - protein, 385 aa, unidentified
MQKLNDLSRSPSPLDPDGTVIAVIELSLSSWLVAGIVPGVERQPLKKLAVDESALLKLLHRWREEAAKAGHRIKRIAVAFEAGRDGFWLARWLRASDIEAHVIHASSVAVSREHRRAKTDRLDTELLKRSFLGWLRGERDHCKMVAIPTIKDEDAKRPNREHESLVGEQSRIVNRMKAALIRLGIRGFNPKLKKAAERLDGLRTPEGEPIPSNTLAELRRDMVRRRLVGDQIRQIEDARLERLKQAPSDGPHAMVRLLARVIGVGVETADMLVQEVLSRSMRDRRAVARYAGLTGSPDESGRKRREKGLARSGNARVRRGMIQLAWRFLMFQKESTLAQWFRARTESARGTRKTMIVALARKLLIALWRLVREGVVPDGVVLRPA

SEQ ID NO: 263486 - protein, 462 aa, unidentified
MVKSKKRKDKKILELLDGEGKRKKGPVMGVDVHKDVLAACIVSESRVLLETEFKNTKEGINKLISTCKKRKVKSVGMESTAQYHFKLMYGLADANVPFLVANPQQTKTTQGKKTDAIDAKRIAVAHRDGRLKPSVISPKEIMSLRKGMRALLKIIQDQTKIKQRLNQVFHQKDVKLGPVLKTKWGLQVLRRLFQEELTDLLDELLPKRKKEREFEKQLELFTKFKKSLDEIEQYNFGIDISRLYLLSILAEKQRIVYTVIARKNKEFLRQMRILLSIPGVGPDTAAIILAELVDVSYFKTPGKLAKWTGLAPRVYQSGHRKNITGKLHKGGNKFLRRACVLACQNIFAKGSVDNPIHAFMKAKKEGKGTYWLSLCAGARKLLTIIWYLLKSGSQWAVRTATKKIIQKVKVIARRKQKLLEGRLQKFKSLNEKLTREENTIINEMVQSMSMPDQILKVLLESV

SEQ ID NO: 263487 - protein, 386 aa, unidentified
MTQHSHIAASHQLDYERTLILAVEVSGRSWVVAAQVPGLRQKGVKQQLAPRADALMAAVEGYKRRAAAAGMAVERVIVAYESGGSGFWLARWLQQRGVEVYVMQPSSVPVDRRMRRAKSDRIDADMLLRTLLAWLRGEPRVCSMVPVPDEATEDARRPIREREELIRARVALVNRIEAVLTVLGAGEYNPLRRDCRERLGQLRTALDQPLPPHARAQIERLLDRLDLIRQQVADLEAQRDRAVEGETVGQAERMIQHLARVRGIGVQTATVLVHEAFVRRFRNARALGSYAGLTGTPYSSGGTQREQGISKDGNRRLRATLVELAWMWLRYQPGCALSRWFHDRLGGSRGRLRKVMIVALARKLLIALWRYLQDGAVPQGMELKPA

SEQ ID NO: 263488 - protein, 343 aa, unidentified
MYYIGIDVSTKESALCILDGKGKIVRETKLPTDPEIIARFIAATGLAIERIGLESGCTAAWLFDGLQRYGWPVICIDARHAAAALRAGFRNKDDRNDARGIADLMRVNKYRPVWVKSPEAQRQGRLLTARATLQSQLVSLENTIRGLLRQEGIGLTDRRTAFEAAVREVIADDRLLQAAVLPLLETRTAVLHHRATLDRQILRIVRVDPVCRLLMTAPGVGAIVSLAFKVGVDDPRRFSRSRDVGAHFGLTPREYSSGEVSYRGHISKMGDREVRRLLYLAAARILRRDAALWCPLKVWAVRLAQRVGLSKARVALARKLAVVLHAMWSDGQVFQWRRSAASA

SEQ ID NO: 263489 - protein, 438 aa, unidentified
MKKIRTHAAGIDIGAKKVYVSIEDLPVKSFDTFTQDLEALGVYLVAHGIETVAMEATGVYWVILYDILVSQGLDVWLVDGAGTKQVPGRKTDVKDCQWIQQLHSYGLLNKCFVPDIRVQELRAYQRLREDHIRSGAMHISHMQKALILMNIRLKEVISQIHGTSGMRIVRAILSGERNAEKLALLCDQRILKTKKEWVIRSLKGHYSEAALFELGQAVACYDFYGEQIAMCDIKLEEVLKKMDLDGTPKPRSKGTRKAIRHNRPDIENMGGHLLGIFEGKDATVLPGITDYNWMQLLSEVGTDLGKWKSEKHFTSWLGLAPKQHNSGKMKRNYKPKGAPRAGLIFKQAAVGLLNSKHIALGAFGRKIRAKKGGLVAIKAVARKLAELYWKLFVKGLEYVENGIQKYQEKMLLNKQRAVTRMAQELGLGITPLKIQSAD

SEQ ID NO: 263490 - protein, 363 aa, unidentified
MVSGSRVVAADVHAASSWGAGLELAAGEVWSRRVRGAPSRVAEVVAQLGPDARLIYEAGPTGFGLARAGVELGVEVVVCAPGSVPRAVGDRVKTDRRDAERLLRLWRAGELSLVRVPSPAEESFRDLVRAREDARGDLMRHRHRLSKFLLRRELRPPAGTPGAWSVPWMNWVRRLRFEDAAARATHVDYLAAVEAALQRRSTLDLALEEAWPQSPFQTTIARLRCFRGLDTLSACGIAAEVGGFDRFERPARLAGFLGIVPSEHSSGSRRRQGAITKAGSGHARRLLVEAAHHYRHPPRVSYELGRRQRGQDPRVVNVAWRAQQRLHRRWRHLVLERRKPVGVSVVALARELACFCWEAALVD

SEQ ID NO: 263491 - protein, 409 aa, unidentified
MKAMHERCAGLDVHQKTVAVCVLTGVAGKGASSEKRTFGTSTRELLALSEWLRTREVTHAAMESSGVYWKPVWAILEDQMDLTLANAAHIKNVPGRKTDMKDAEWIAELLRHGLIAKSFVPPVAVQDLRELTRYRAQVTGERSAVGNRIRKLLEGANIKLGSVASDVMGASGQRMLDAMVAGESDPAKLTDLAIGQLRKKESQLKEALDGRMRDHHRRLLRVLLANWRFLDRLTEELDSEIELELGPLREAAALVETIPGISSLTARNVVAEIGGDMSQFPTAAHLSSWAGLCPGNNESAGKHYSGQTRSGNVWLKRSLCQAAWAASHTRNTYFAAQFRRLAAKRGKKRAIIAVAHSLLVAIYIMVKTGQSYVELGADYFEKLHADDFKRYLVRKLEALGHTVTLAPAA

SEQ ID NO: 263492 - protein, 489 aa, unidentified
MEVFLGLDWAEDHHDLCLLDPSGAVLATRRIPDGLEGVAMLHALVADHVEAPGEIIVGIETDHGLLPTSLIAAGYQVYAVNPMSVSRYRDRHHSSRAKSDKSDAKLLADLVRTDRHNHRRAAPDTELLEAIKVLARGHQNLVWTRQRLTNQLRSGLREYFPGALAAFEDLHHPDTLAVLGKAPTPTQARRLRTTQIQAALKRGGRRRNLERRAQEIHAALQLPQLRAADLVEDAYGAATAAQTRIIGDLNEQIAVLEAKLEHRFSQHPDAELLLRLPGLGVILAARVLAEFGDAPNRYVDAKARRNYAGTAPITKASGTSEVVLARLVRNKRLFDACYQWAFCALNASPGARVYYDAHDPGAQDRQDRTPQAGQQARRHPARHPDPPNRLRRSHCMAALAGHETRRCLTGWKPGVSSRSCRRSPWPAAPCGTSGRSSPRAPSSYDGSWVRAPCARRAASWVLPPCAPASAWRPLRPAPPRRPPRRSRGP

SEQ ID NO: 263493 - protein, 311 aa, unidentified
MNAQDCFIGLDVSKDNLEVAVRPTKERNTFANQEDGLSLMIDFIKPFSPRLIVLEATGGLEKAAVCACAVEGLPVVVVNPRQVRDFAKAKGILAKTDKIDAGVIAQFAEAIRPEVRPLKAEEAQKLDALLSRRRQILQMLTAEKNRLQAAPVWTRKDIQKHIAWLQKELDQFNQDLDRMVKESPIWRAKDEILQSVKGVGPVLSVTLISQLPELGTLKGKKIAALVGVAPLNRDSGKFRGRRTIWGGRADVRSVLLMATRIAIRFNPVIRAFFERLKKAGKIRKVAETACMRKLLTILNAMMKNNTRWQPA

SEQ ID NO: 263494 - protein, 358 aa, unidentified
MKIVGCDYHPGHQQVAVLDTLTGEVGEWKLGHGGGEAERFYRELEAPALIGMEAVGNTLWFERLVERLGHQLWIGDAAKIRACYVRKQKTDRRDAGHILRLLVEDRFPRLWVPGEQQRDQRQLLLHRHKLVGMRTRIKTELQRGSRQAVFACWGVEHLALNQGLQQKRHLWTRDGRAQLARLPLEGWTGRRRGDLLALLSMLESQIEQLDGAVGAAAWGDAQARLLMTQPGVGPVTALAFVLTLGEVSRFARSKQVASYLGLIPSERSSGSKRKLGAITKQGNPFLRTLLVEAAQSAVQHDQQFRKEYRHRCHGKPKGVAKVAAARRLAVRMYWMLRTQTPYPQVAHFEGSPSHFVVG

SEQ ID NO: 263495 - protein, 378 aa, unidentified
MGQVNATEPKVVWAGLDVHKETVAVAVADSAEGPRIVATVANDGRQLPRLLRRLGEQGELRCAYEAGPCGYEIYRVCERIGISCIVVAPSLVPRKPGDRVKTDRRDALKLCRCLRSGDLTPIWVPDPEHEGLRDLVRGREDAIVDRMRIRHRIKKMLLRQGIRHPDGMRTWSKRWRVWLGSMEFAYSSQQVVWREYLGTLDEVDARVGRYNEALHEQAQTSSKAYLIAALQILKGIAEVNAVTLVAELGDLMRFARPTQLFSYSGMVPAEYSSGGERYQGHITKTGNRHVRRAITEAAWAYRYPPSFKGRLALQRQGTPQWLVDLSWRAQERLHRRYRAMIKAHKPTPVGLTAVARELLSFVWELAHELEQRDLKVAS

SEQ ID NO: 263496 - protein, 350 aa, unidentified
MLIIGCDYHPGVQQIAFMDTETGEFGERRLEHGDREAEKFYRDLRQAGISVRVGMEATGHARWFERLLEELHFELWIGDPLEIRATRVRKQKTDRHDAQLLLKLLLEDRFPRIWVASWENRDLRQLLWHRHRLVQMRTRIMNQLQAVALNEGVRRKKRLWGQAGRAQLESFVLAPWASRRRQELLELLDRLNPSIRELNAAVEQEAARRPEVQRLMTHPGVGSLTALAFVLIVGTPQRFACGKQIASYVGLVPTEESSGGRRRLGHISKQGNSLLRFLLVEAAQATVRSDPDWRRKFLHLAMRRERRIAKVAMARKLAVRLYWMWRKEWDYEQVKRFGSHAGQLGNPLGV

SEQ ID NO: 263497 - protein, 412 aa, unidentified
MEKSYKIAGIDVHKSMLAVVVADAALEGEFRFERRKFGTMASELKALAEWLAAQQVREAVMESTAQYWKPVWRELEGQCRLQLAQAHSNRAPRGRKSDFKDAERLLRRLVAGELILSFVPNPEQRLWRTLTRTKHQLTRDRVRLHSQLESLLEDARIKLATCVSDLLGLSSRRMLQGLADGQTDAAALAGLAEPELRATPEQLADALSAAATLSPLHRQILRLFLERLELIERQIATLHHTIASALQQHQQAVLRLAAVPGFGPDSAQQVIAEVGPEAATFASAGEMASWVGVCPGREESAEESKSNRTPKGNRAMRRVLNQAANAARKAKGSVFHAMYGRLVPRLGHHKTIWAIAHRLCRLAWIILHNGVEYIEYGKQRDPKATERRTAKLIRALRGLGYQVIPPTANVVG

SEQ ID NO: 263498 - protein, 348 aa, unidentified
MIIIGVDFHPEFQQIASVDTDTGEFQEKRLAHREDAEMFYRALAGQKVRVGMEASGHARWFERLVAELQFELWIGDAAEIRTKRVRKQKTDRQDAQLILRLLLEDRFPQIWVPSWENRDLRQLLWHRHRMVQARTRIMNQLQAVALNEGLRCKKRLWGERGRQQLESFLLAPWASRRRRDLLELLDRLNPTIAELSQAVEQEVEKCPEAQRLRTHPGVGALTALAFVLIIGKAERFGSGKQVASYLGLVPLEDSSGNRRRLGHITKQGSSMLRFLLVEAAQVTVRCVPEWRSQYLHLMMRRGRKIAKVAMARKLAVRLYWMMRQGWDYEPVKKFGSHAGQPGNRHGVQ

SEQ ID NO: 263499 - protein, 427 aa, unidentified
MQFNTKINTIKAENKLAVAFDVGQQKLNCYSQWGDEIIHFFEDEFINRIHVIEAKLGSFYDYAVKNGFNGLHIVCEPTGGYEQKLMQTALRLGHKVSYVNGESVNKFQVVENNENDKSDPKDPRVIFKLYLNGKLVKYRQLDQEYAQLRALGRFYEQDSKCRTDVKNLIHDTLKVLFPDLSFANAFLFQTSGRALLKQFGANPYKIIKAGKTTFRRRMKKDSPRIRTKTLDRLWQDALCSVRMNMDDSIIDIYQQRIKKLWTDYLTLESNLNHIKQKMEQLYDQLLIGGEQVPVPVKSFVSKLNLARIVAQTGPFSDFASARQIKRFGGLHLKVRQSGKYKGKVKLSKKGRIDLRTIMAQSIFHLIKKQGLFGPFFHAKKENGMPGTKAMTVVMRKMVDILFALSKPAVVFDPNRLFTCENQHQNAA

SEQ ID NO: 263500 - protein, 379 aa, unidentified
MATTRTAPRSQLTTKPVDLYMSFELGDKRWHISIGDDRRSVSHYIVEAGHTEEVADCIAKATARSTANKARVHSCYEAGRDGWWLHRWLSERGVDNIVVDPASIEVNRRARRAKTDRLDADKLLAMLIRHHGGERVWSVLREPSPSDEDARRVHRELQRLMHERIAHTNRISSLLVLHNLRPRIVIGGRDWPAWWNSHREQLPPALRAELEREAARLKVVKEQVRVIEAERAKELAEGKQPLVAQLARLRAIGPKGAWVLVKEVFGWRHFANRRQLAGSLGLVPTPYASGDSQIEQGISKAGNRRVRALLVELAWSWLRLQPGSALTQWFNRRFASAGKRMRRVGIVALARRLAIALWRYLQDGQIPTGAQLKPAGLPA

SEQ ID NO: 263501 - protein, 315 aa, unidentified
MATSSGKYVGIDVSKDRLDIAVLGETKASQTGNDEKGIAGLIRDMKALEPERIVVEATGGYQRAVVAGLFRKGLAVAVVNPSRVRQFARACGLLAKTDKLDAQILAVFGERVKPRLYEGKDEKERELSGLLVRRRQLEEMIKAEKNRLRTIQPSLQASVERIIHCIQSEKKDVEDQIGVFIAGQEEWQVGRRILASAPGVGPVATATFLADLPELGKMDRKKIAALVGVAPMNHDSGRKRGYRKTKGGRADVRSVLYMATLVACRYNPTIKVQYENLLKRGKEKKVALTACMRKFLTILNAMMRDQVPFRQRVIV

SEQ ID NO: 263502 - protein, 391 aa, unidentified
MIYIGIDVAKDKHDCFITNSDSEVLFKAFTIFNNLDGFNDLYQKIESVMDDVTKVKVGLEATGHYSYNLLGYLIDKGLPTYVINPLHTNLYRKSLSLRQTKTDKVDARTIASMLMSDMNLKSYSDISYHNEELKSLTRYRFDKVKERAKLKTSVSRLVCILFPELEKLVPTLHMASVYALLSEFPSAKHVATAHLTRLTNLLSKSSKGRYGKDTAITFRDSARASIGSNMPAKSLELKHTIKLIQELDSEINEIENEIKIIMDEINSPILSISGINYRMGAMIIAEIGDFNRFDSPDKILAYAGFSPSTYQSGQLDGAYAHMEKRGSRYLRYALYNATKYVCHWDPTFAAYLAKKRAEGKHYNVAISHAVKKLVRVIYHLEKTKQQYIKAA

SEQ ID NO: 263503 - protein, 410 aa, unidentified
MVKENFIYVGIDLHKETHTAVMIDCYNQKLGEITFPNRPADFPKLVTKVKKCNTDAKEVVYGLENAYGYGRPLAVWLIDKGYFVKDVNTAISHRQAKHRGAMYRKSDSDDAEAIALATLNMLDKLPDACPNDAYWSLGQLVHRRDNIMKQRTRLVNQLHEQLCIAYPSYKQFFNDISRPTALYFWEHYPSRKYLKGKSVEDLRAELVPVSHNKCSTKTCEKILDAVASDKVKNNAYQDARDMVTLSIVSDLQHYDSQLAEVDKMLEQMYKMLGCTLTTIPGVNVITAVKILAEIGDIKRFSNANKLAQFAGIAPLHLSSSGKGKDLATKQGNRRLQATIYFLAIQMVQISSKGTPRNPVVRAYYEKRKAEGKTSQQALICISRRLISIIYGMLKSGTEYRMPVVENAGEK

SEQ ID NO: 263504 - protein, 418 aa, unidentified
MRISKTQIGRAVNKEELIVGIDVAKMKHFARILFPDGSESAAFGFLNVREGFEAFLSWLMTFRTKLNNPHVIVGMESTGHYWESLAFFLDSIADIALVQVNPLYVKRTKDLYDSSPGKTDSKDSGVIAMLIGMGKYQPMVLPRGPFANLRGFAKLREQKVVELGIQRNILHSIVDVIFPEYGSVFKKLEGKTSLHILKIFTTPEEIVKAGIQRITNELHKTSRGKLSKAVAQELMDAAIHTVGLTEGIEANTFAIQRAVESIERIQGDIVAIEKNLSETLNKVPYVVHLLSIPGIGPISMAVILGETGDMLRYRRAEEVIKLAGLNLFEISSGKHKGQKHITKRGRALLRKCLFFAALRMVKERGVFREDYCRLTQVNGMQKTKAFVALSRKLLRVIFALARDGVMYQQQGLTLALAA

SEQ ID NO: 263505 - protein, 391 aa, unidentified
MIYVGIDVAKDKHDCFITNSDGEVLFNVFTIANNLDGFNDLCQKIASVMEDVTKVKVGLEATGHYSYNLLGYLIDKGLPTYVINPLHTNLYRKSLSLRQTKTDKVDARTIASMLMSDVNLKSYSDTSYHNEELKSLTRYRFDKVKERAKLKTSVSRLVCILFPELEKLVPTLHMASVYTMLSEFPDAKQVANAHLTRLTNLLSESSKGRYGKETAITFRNAARTSIGSNMPAKSLELKHTIKLIQELSSEIDEIENEIKLIMDEINSPILSIPGINYRMGSMIIAEIGDFNRFDSPDKILAYAGFSPSTYQSGQLDGAYSHMEKRGSRYLRYALYNAAKYVCNWDPTFAEYLAKKRAEGKHYNVAISHAVKKLVRVIYHLEKTNQQYIKAV

SEQ ID NO: 263506 - protein, 356 aa, unidentified
MPSTFQRHPTPGVVTVGVDTHADVHVAAVVDGLGRLLGSLAIPTTVEGYAELLAWAEGFGQVGCFGVEGTGSWGAGLSRWLTTNGQAVVEVPRADRARRRRKGKSDTLDAEAAARAALAGLDVVIPKRQDGPVEMIRALRVARRSAMKARIQAGNQLLGLLTRAPEELRARLRKLRGRSLVEAALRLQPAAGVPASVTAATEVALWELAGRWHGLDGELTRLDELLGALVKKLAPDLLALHGVGTETAAALLEAAGDNPQRLTSEAAFAHLCGAAPLPASSGKTTRHRFNPGGHRDANEALWRIVLVRMKSHAPTRAYVARRTAEGLSKREIMRCLKRYVAREVYRYLKPTGQVHE

SEQ ID NO: 263507 - protein, 300 aa, unidentified
MNHFAGLDVSLEETTICVVDETGRIAREVRAASEPQALVTALQEVGVPLKRIGLEACSLTAWLHGELRSAGLPAICIETRQANAAMKTMPNKTDRNDARALAQIMRTGWYRQAHVKKRQSRLWRSLLVARRTVLNEMRSIENVVRAILREAVLKLGTPSRAAFAARVHSLADGDPLVTRMIEPLLAILATMLDQLAHLTQQVLDITRGEAVCRRLMSVPGVGPITALAFRATIDRPDRFRRSRDVGAHLGLTLRATNRARPTSRASSADVATNSPAQPSTKPPTHSWCAPASGRPCAPGA

SEQ ID NO: 263508 - protein, 443 aa, unidentified
MCGGSVTASLFPNGRRSSMGKTIPVCCGVDVHKKFLIATILTGDYLIPQCKQKHFGTSYRNLLAFRQWLLENDCKDVCMESTGKYWVPVWNVLEGFVRVVIANPKWVSAVKGNKDDKKDSKWIGNLFRMGLVPASYIPGKDIRILREFTRYRSKLVSMRSSEKCRFQNAFTVCNLTLDAVVSDMFGKSATDIENYLLTTDSVDPAHCVSLLQGSLKKKADAVVEAVEGFNMTLEQKERVRIIQGHFADIDKRIGQIDEIVNHLVDEYDSQISLLCSVPGIDHRLAITILSEIGTDMSEFGSSRKLCAWAGLAPGSNQSAGKKKSVKITRAGVYLKPALVEAAHAAVKSTEKQPYFRIKYERIMKRRGKKRAIIAIARMILTSIYAMLSSGEVFNPSDLLKYDMPDELKKKMTLASAKDALKLLVSLGVVAEGSISLDSLALAG

SEQ ID NO: 263509 - protein, 366 aa, unidentified
MKKIITVAKNRNEIFKQQQLTIGVDLGDRISHYGILDETGNVILEQSVPTTPKGIQQVFSKISRCRIALETGTHSPWLSRLLTQLGHEVIVAHARNVQLITESSRKDDRLDARTLARLARIDPELLGPVRHRSAKAQIHLTAIRARATLVSARTALVNAARGLTKSCGERLPKCGTEQMNREIAKGLSPELRDVLEPLLGEIESLNERIAEYDRRIEQIAKEVYPEVALLKQVKGVGTLIALTYVLTLDDPHRFRRSRDAGCFLGLRPGRRNSGMSEPQMHISKEGDFYLRTLMVQGAHYILGPFGQDSDLRRWGLKLAERGGKNAKKRAVVAVARKLAVLLHRLWVSGEVYEPLRNNHEVVSAVA

SEQ ID NO: 263510 - protein, 370 aa, unidentified
MANRSMFVGMDVHKEPIAVSLAEEGRDGEVRRYGVIPGDPEAVAKVVRALRAPNRRLRFVYEVGPCGFGIHRYLTGEGEDCVVVNPSSMPRRSGDRIKTDRRDGDALARLHRAGELTAIYIPTPDDEALRDLVRAREDAVGLSTQAKHRLKAFLLRQGRRYPGRAGWTRPYRRWLADLSFPLAPQHIALQEYRDTIDETERRVERLTEQLRQLTPAWRWAPVVDALQALRGVSFVTAVGLVTEAGDIRRFTHPRELMAYLGLVPSEYSSGPSVRRGGITKAGNPHARRLLAEAAWAYQSVPRIGRQMLYRQEALPKTVCDIAWKAQLRLTSRFRKLVARGKAKPKVATAVARELTGFIWAIAREVPPPPA

SEQ ID NO: 263511 - protein, 396 aa, unidentified
MFVTREGRDRFSRSLDWPVHTLGRGRAISATEFRENRMEGKEKVTRPVIAGVDTHKDLHVAAVVDQYNRVIGTQSFAATRQGYRQMLIWMRAFGDLQKVGIESTGTYGAGLLRFLQAASVDVLEVTAPDRQDRRRRGKNDDLDAQNAAHAAFSGRRTVTPRTRDGMVESLRILVACRKTAVSARRVALQMLHNTIVCAPDRLRDQLRQMTRMQLIRTLAASRPDLTAYRDVESAYRIGLKSLARRYVELHDEIADLDVMIKAIVAELAPELISRGSIGSNSAAQLLLTAGDNPERLKSEAGFAALCGVSPVPASSGKTVRHRLNRGGDRAANSALHIIAIGRLRTDEKTKAYVARRVSEGRSKLEAIRALKRYIAREVYGIITRRQREIHQTCIAA

SEQ ID NO: 263512 - protein, 429 aa, unidentified
MQNESTPGARGPVFCGVDTHADSHWLCVLDWRGRKVLSRRFPADAAGYEALAGAIAAAGEPGCIAMEGTSSYGAGLTRHLASLGMPVREALSPARMQRRRPGQGKCDESDAERAARAAMSGSRLGTPKSQDGWVDGVRCMLAARSGAVKARTSAINTARSLLTTAPEGLRSRFRGMAGPRLMEELPSVRSEGALGAALGALADLWAAARDAALDMERAIEASLEENCPALLAMYGCGPVSAAKLAVAAGDNPGRLRSEASFAAICGACPIPASSGKTVRHRLNRGGDRQANSALHEIARQRVMRDPETAEYAERARARGKSDREVMRCLKRYVAREAYRALMRPHEVRRPEDASGLVAARRAARVSQVRAASILGTSEKYISMLERGQRELKPIRRAYEAWVEAGLPLDWDRQAFEAERKMDSKKHLAK

SEQ ID NO: 263513 - protein, 352 aa, unidentified
MEFIALDAHKRYSQVCVQKKDGRFLCEKRINHGKGQILEFLSHWTAGSTVALETVGNWYWIVDEIEQSGMKPKLVHAHKAKLMLGSINKTDKLDARGLNKLQRADTLTTVWIPPGEIRDHRELPRTRMVFANLRTRLKNRIHSVFDKYGLHTDFEGISDIFGSRGREQMALTIKQLPSETRYTLRCLLRELDMVESQIQRIEKRIKKVFSKTEQVNRLMTLPGIGFILAVAIANEIGDISRFATPQRLASYAGTVPRVHSSGGHTRYGKLRSDVNHYLKWAYSEAGNSTAVNHKRFPFRHTSKLYGRIRKKKGHAKAVGAVGRHLAEASFWVLTRNEDYKEPERKSVSPMAV

SEQ ID NO: 263514 - protein, 370 aa, unidentified
MLDTTTFVGLDVHARSIKAVSLDVMTGEVRCATFGYDAGAVAEWVRSVDPKARCVYESGVTGFDLQKRLSGLGVDCVVGAVSKMIKPSADRRRKNDRNDAEFLARMLSVGNVVEVWVPDDECEAARDLTRALEDARDDLSRAKQRLSKFLLRHGLAFDERTPTGRRKGNWTRAHWSWIEPIRFAEGADNDVLAYYVDAVRRAAEEKARLEGLVEAEARKPRWRKRVDSLRCLKGVDTASAADLVFEAGEFSRFRNARSFAAWVGLTPSEHSSGESDRRGAITKAGNKHLRKALVEAAWHYLTCSGRPKDLAKGQAPDRVARRHAAKGVRRLVERREALLARGVHGNKANVATARELACWVWAVGLMAEEA

SEQ ID NO: 263515 - protein, 464 aa, unidentified
MTAGKQLWRNRKEKKEWARRLQSEDPGLEVVHPHAAGIDVGNSTHYVAVRPDRDPEPVRRFECFTADLHRLADWLQSCGVKTVAMQSTGVYWIPLYEILEEHGLEVYLVNARHTKNLPGRKSDVQESQWLLKLHTYGLLNNSFQPVSEIRVLRTYWRQRGEHVRGAATCIQRMQKALTQMNVQLANVISDISGLTGQAIIRAIVAGERDPLKLAMLSDPRVHASHEEIAKSLEGNWRPELLFVLHQEVDMYDTYQKRIAECDQRLQKHLASFTRPLPIQPPTQKLKTKKPAAKNAPRFDLSSELQRVTGVDLTRIDGIDVMVAQTLLSEVGLDMSRWITESHFASWLGLCPDNRISGDKVLSRGTRRVVNRAATALRQAANTLMRSRSYLGAQYRRLRTKLGAPKAITAMAHRLARLVYRMLKYGQTYVDKGTEYYEERFRQQQIQLLRKRAAKLGLQVAEIHA

SEQ ID NO: 263516 - protein, 346 aa, unidentified
MYDRKDIILAVDYHAENTEIRWLNCASGEERCLNIPTTRGGILRLVEKAVGEASLAGGKVVWIMESTTGWARVKELIGSRVHFIMANVLQMPLPPKAYRRKTDKIDTGRMLREFLNGSLPRSYQPTARWREVRRLVDSRQNLVKRQTAVKNWITHFLHHETWADRSGLWTQKGLRRLRGLRLSVSDRMVLDLKLQELEQLEGLREKVEAAMQKVYDQWPEAQWVDEVRGIGMITAVSILARIGPIERFGSAEDLISYAGLAPGHRRSDQTQHNGRIGGGGTDSHLRYLVIESMQWVCQIPRYRDAFERATAKHGKNIARIIVARMLLRSLFKMLKDKVRFNQVRAA

SEQ ID NO: 263517 - protein, 473 aa, unidentified
MGKGSGMTRGDRRRNARAERLRALLPRDGAVIGIDLGEDKQAIAVIDHDVRVLWRTTVRVKAHQLGAALDRAVAEARAKGYSRVTAACEPTGARWMQVQRLCGERGLAMVCIQPLVSHIAREQQDYTPHKRDESDCVLIGRLAVELHCYVPEVLDEAWAHLRHLGRRRAQLITAATASVLRVRDFLSVAWPAAPAACAQPFVSVTWLAGVQVAAARCGGRPEQLAAMGGEAFAGLVRSAVAGWGGMRADGRVTRAVFAALSDTGGAVGWSRRGLLRRVADELGDLQRTRAQLRAVEADMAAVLGELGLARLADIPGLTAVGAAAILAETGDPRRYETSSSLVKHAGLSPAGNASGAFEGQERISRRGRPGLRTAVWRAVWPLIIHNPVMAAKYQALTEAADAAARAERARPGTRSPQASAAQRAARARRARARVACAASLLRWVYFMTVHDAGWDPAAASGGRVPSPEQAEAA

SEQ ID NO: 263518 - protein, 331 aa, unidentified
MENFNLFIGIDVSKNSIDVCCLKNDIVLYSGKFENTKPGIRKFVGQLKKLKDYSCQDTLFCMENTGLYSLKTALFLLDFNIKHIWIETPIQIIYSQGMLRGKTDKIDAQRIATYAQRFYGKATTFQADPLLLKLKSLMNLRSIMLSCKHKLQVSKKEYDQVAFFVDIKLRNKLISQIFRQVEITIKKIEIAIQQTLNEDPVILKRYLQITSITGVGKMTAIEVILATANFTRINDPRKFACYSGVAPFVYDSGTIKTRARVSDQANKNVKKTLHMAAMSAIQVKGDLQTYYQRKVEEGKNKMSVLNAVRNKIIHRIFACVNQNKFYKVDLN

SEQ ID NO: 263519 - protein, 346 aa, unidentified
MTKIIRIGMDTSKHIFVLHGVDEAERPVLRKKLSRKQVLEFFAKLSPTVIGMEACGASQYWARELSRLGHEVKLMAPQLVKPYVARNKNDWRDAEGLCEAMSRPSMRFVPVKTAEQQAALMLTAIRDGLIARRTQLTNTIRGHAAEYGLIAPKGLDKIEPLLAQIAQNETLPALARELFVVLGREYAKLESELEAIEAKVMAWHRGHATGRRLAKIPTVGPIIATALVMKTPDPHAFPSGRHFAAWVGLTPKDHSTAGKTRLGKITRAGDEDLRRLLVIGATAVIQQARRGRGQHSRWLLALIARKPAKLAAVALANKVARIAWKLMVTGESYDAARLNAAAAVAA

SEQ ID NO: 263520 - protein, 347 aa, unidentified
MDIIGIDLHKRESQLCTLGTDGSVTEQRIVTSRERFTAVFGNRAPARILIEASTESEWVAQCLEALGHEVIVADPNYAPMYATRSRRVKTDRRDARTLAEALRLGAYRPAHRVSAARRHVRAELAVREALVRTRTRYIAIAKAFVRRDGLRVPSSESHLVAKRVATLPVPALLEAELTPLFAVLEPLNAQIVAADRRVAALEKTDPIVALLATAPSVGPLTASAVVSTIDDVTRFQSAHQFAAFLGLVPGERSSGEKRRVGRITKAGNSRARYLLVEAGWCILRSNSPETAMRRAWALKIAVRRGNRIAVVALARRLAGILYAMWRDNAPYAATKLRMPSPPVARAG

SEQ ID NO: 263521 - protein, 337 aa, unidentified
MYQHYLGVDLHRRRSYVVLMDKQGNIIDQRRFPNDAMPDYVAQLPKSTFAVLEATGIWSYMYDVLEEGADKVVLAHPKRVKAIAAARIKTDKIDATILAHLARADLLPTAYAPPVEIRELRDLVRHRSKLVRERTRHKNRIHTILSKYNLHSPSTDLFGKKGRAFLDKVKKQLSATHQLMLDNYLSMIDALNERINSVNQVIRAWAKDDSRIKLLTSMPGVGIYSAAVIMAEIGEISRFVGPKQLCSYAGLVPSTRSSDAHVRHGRITKEGSPWLRWIMVSAAQRATCASPRLARIYERTLKRHGKKTARVALARQMLTIVYYMLLRNAPYQERQQG

SEQ ID NO: 263522 - protein, 429 aa, unidentified
MTKTYILKTQTVPADRSAVETYLAPPPPSKGKIIGLDCHPDTFTAALFVGQTPHDARKIGIRENLSLDALLKWAAAELTPQDIILMEAGSNSFELCKRLGNLGLKACVLESCHVGKHAKTYADNDKMAAARIALVYLAGNAPCVWVPDEQSRERRELLHAYRKAVGDHTAATNSIKSYLNGRGIRLGKHSLEDKATTAWIFEQAEWSGLQKNILTEHLANITESKERRKRLYRLIAAEMAADPKMMRCMKVLGVGIVSAFALLAVIGDIGRFHSPEKLVAYIGLNPGQRQSGKGKDIRLGVGRRGRGDIRNLLIQGAHAIMRSGRNTPLGQWGWKLFTRKGNRNVAVAAIARKLLVQVWHLLHGNPPLALESDKSFRLKLQKLAVAIGTTLRAGIGLGKTLEDSIKTLLLRCQSHPEPSASPCETPQPA

SEQ ID NO: 263523 - protein, 356 aa, unidentified
MSRDLKYIGMDVHKEAVVIAVLNSSGKLVMESIVETKASSILQFIHGLRGELHVTWEEGTWAAWLYDLLQPQVAQVLVCDPRRNALLKEGNKSDKIDARKLADLLRTGMLRPVYHGEHGLRTLRELGRSYQTLSQDLNRVMNRIKALYRGWSIPCAGTQVYAPRYRQEWLQKIEHAGVRRRAELLYQQLDGLQGLRRTLRSELLAESRKHKAAKLLRQIPCIGPIRAARLIALMQTPHRFRSKRQLWTYSGLGIETRDSAQYRYVQGQLQRKKKPQQIRGLNRNHNHEMKEIFKGAATRASCGVGPLRDFYAALLAKGMKPEMARLTLARKIAAIALTLWKKEERFDAEQLKPQAA

SEQ ID NO: 263524 - protein, 334 aa, unidentified
MQNVTLIGIDLGKHSFHVHAQDKSGHALLRKKFSRTQLTAFLSTCSAATVVMESCAGAHFMARHISQLGHQVKLISPQFVRPFVKSNKNDFIDAEAICEAASRPSMRFVTPRTEDQQAMSALHRVRDTLVRERVKATNQMQAFLLEFGISMPRGIAVIRRLTAVLEEHQLPPYLTRLLLRLHQHYSYLSEQIEGLEQELKTHMADDDTAQRLLTIPGVGMITASLLATKLGDGKNYASSRDFAASTGLVPRQYSTGGKTTLMGISKRGDKNMRRLLVQCARVFMQRLEHNPGRLAEWVKVQQTRHHSNVVACGLANKLARIAWAVTAHRTAFSQ

SEQ ID NO: 263525 - protein, 419 aa, unidentified
MKIVYPVCCGVDVHKNVIVATIAITDKSNVTQYIVESFSTINSDLIRFRTWLLSYQCFNVCMESTGKYWIPVFNILEEANIKVLLTHPKYVRAIKGKKTDKKDSKWIADLFKFDMVRSSFIPPKDIRALRELGRYRYKLVCMRSSEKNRYQNCMTVSNIGLASVLSDPFGKSASDIMQYVLASTIFDEEHCKTLIQKTAKKKTELILESIRGCNIESDQRFKMKEASAHMAYLEQAILRTEAELYTRIQPYYHFVEHVSSQLPGISQLSAALILSEIGVDMSVFESAKHLNSWAGLAPANNESAGKKKSVRISKAGQFLKPLLVQCALAAVRSSKESYFASKYQKLKKRRGHKRAIIAIARMMLTCVYHMIQTGEIFNPSDYDVFDKPVIPNVEMTDESAIAFLAAQGYDVSSITIIAG

SEQ ID NO: 263526 - protein, 387 aa, unidentified
MHSQQSVDQVVQTTLAAVFFSMELSRSKWLVTYLAPGAGERMSKHVLVAGDVAGLFEQLDKVRKKAHQKTGQHFPTVSIQEAGLDGFWIHRLLEKEGIESHVVDPASIATSRRRRRAKTDRLDGETLLRTLLAFKRGDPRVCSMVVVPTMEEEDRRRISRERQALVRERVSLVNRIKGLLYSQGIGGFEPLKRDRRERFEALMTGDGHEIAPHMRATIARILDRIELILQQLKQVEKARDELASHSSTEVEDPVCPAMLKSLRGVGPDFAEIIWAEGLYRHFDNRRQLASYAGLAPTPWQSGSISNEQGISKAGNPRLRSIMVQLSWFWLLHQPESDLSRWFHERVKLDGGRRKKVTIIALARKLLVALWKFARHGVVIEGAVLKTA

SEQ ID NO: 263527 - protein, 475 aa, unidentified
MGKGSGTTRGDRRRNARRERLRAILPRDGAVIGIDLAEDKQAIAVADHDVRVLARKTVKVKAFRLGEALDWAVAQARVKGFSHVAVACEPTGPRWLQVQRLCAERGLPLVCIQPLVSHIAREQQDFTRHKTDEADCVMIARLATELHCYIPEELDETWAHLRHLGRRRVQLITAATASVQRVRDFLSVAWPTVTETCARPLESVTWLAALQAVTSRCGGDPGRLAGMGEEAFTALVRSAMAGWGARRACARICVRVFAALTDTEGVVASCRRGLLRRVADELGDLQRTRAQLRAAEADMVSALDELGLSRLGDIPGLTATGAAAILAETGDHRRYDSSSSLVKHAGLAPADNASGALSGQAHISRRGRPALRLAVWRAVWPMLRFNPVMAAKYQALTRAADAAARAAGVHHGARTRPATAAAAAARARHATARVACAASLLRWIYSMIVHGTSWDPAVAASTACQHPPASQPEAA

SEQ ID NO: 263528 - protein, 387 aa, unidentified
MMVRTVNDLPAATHGETVRCLIAIELSKRSWVVAFNTPLSEKISRRTLTGCKWKKLLELIEDVRVRVSRQMGRSVEVMSCYEAGYDGFWLHRQLEAHGVRNYVIDPASLQVDRRARRVKTDRMDTERLLRSLMAYLRGEPKVWSVVRVPSVAEEDARRLHRERDRLVSERVQHVNRIKGLCALHGIYDYDPLRRRAMAQLEQLRMTEGEALPPRLKSEIKRELQRLELVVEMIATLEAERDAIVEDEASPHVNAKKIQNLHKLKAIGPEFAAVLVGEIFHRDFNNRRQLASYVGLAPSPFQSGNVAHDQGISKSGNRKGRTTGIELAWLWLRYQPDSDLSAWFRARVGITKGRIRRIAIVALARKLLVALWRYLETGLVPRGAVFKG

SEQ ID NO: 263529 - protein, 427 aa, unidentified
MAYRIAGIDVHKAMVAVVIADVEVEGTWDFDRRSFGTTPSHLRLLTEWLTEHEVEEVVMESTAQYWRPVWDALERDWQPTQRARVDAGPTTGALHLAQAQSNQGRHGRKRDFPDAERLVKRLVAHELTLSFVPDATQRLWRTVTRRKYQLTRSRVQLQNRLEALLEEAHIKLSTLVSDLLGVSARRMLRAIADGATDPAAVAALGSARLHATPEQLRDALGAAPDLHPLYRRLLTMTLTELEVMDAHLWQLDEELAALLRVHQDAVQRLAAVPGLGVDSAQQIIAEVGSTAMTFPTAKHLASWVGACPGHDESAGINHSHRSPSGNRQMRRVLNQAANAAVKTKGSLFELLYRRFVVRLGHAQAIGVIAHRLCRLVWKILHDGVTYEERGPAVHKARAHRRAAKMLRELRSLGYHVELSPAPSESGL

SEQ ID NO: 263530 - protein, 432 aa, unidentified
MKHNPSSKQNQRISRISETTLVIGADIAKHQHVARAFNYRGIEFGRRCLFQNDENGLLNLLAWTEAIKQEHGFTDVLLGVEPTGHYWFPLFHFLKQRGIEVVLVNPHHVRKSKELDDNLPTKNDIKDAKVVAKLVIDGRYTQPKLPEGVYADLRVLMNQRDRLCGDLHRVKGRIHNWLDRFFPEYRQVFKDWEGKASLVTLKQFPLPQDIVAAGEAAIVATWKQHDVKRAVGAKRAELLCRKARKSIGLTEGAAAARYELAMYLEQYAMLCSQIEQLMELVAQLVEQIPGAAHMMSIPCIGLITVAGFLAEVGDLSSYDHSRQIVRHAGLSLRENSSGLHKGKTTISKRGRYRLRALLFRAALTMVARNPEFRALHLYFTTRQDNPLKKKQSIIAICNKLIRVLFELGRKQKNYDAGKVLGPHRAAQLQAAA

SEQ ID NO: 263531 - protein, 421 aa, unidentified
MSPIPQQPFTAWVGLDWADTKHDICVQAAAGDSRREFGCIPHKVAAIDAWANGLHQRFGGPIAVALELAKGPIVAALQKYDFLVLFPINPATLAKYREAFQPSGAKDDPRDAELALDLLLHHPDRFHPLRPQSAAMRSLVSLVEQRRQLIGDGNRLTNRLCDALKQYYPQALEWFDDRGTVLFCDFLERWPTLRSVRQARRTTLESFFHAHHCRNASRIKMRIESIRAAAALTDDAAIIGPCRLHVLALVAQLRAVLGAIAQFDREIAAVAATLPDYALFEDLPGAGAQLAPRLLVAFGEERERFGSAEELQKYSGIAPVTERSGKKIWVHWRWECPKFLRQTFVEWAAQTITRSFWAGAYYRQQRAKGSSHHMAVRALAFKWIRILYRCWQTRTPYNETVYLEALRKRGSPLLSSLGLPA

SEQ ID NO: 263532 - protein, 342 aa, unidentified
MQVTTIGLDIAKNVFQVHGIDAAEKVVVRKQLRRRQVLEFFKALPACLVGMEACATAHYWARELTKLGHRVRLMPAKDVKAYVKRNKNDAADAEAICEAARRPTVRFVQIKSTEQQGRLMLHRARDLLMRQRTQVINAMRAHLAELGIVAAQGRDGIKELLKIIASEADARLPVDAHTSLVVLAAELQAMQTLIGSIEKRIMVQHRLSEASKRLKSIPGIGLIGATAIAATVPDPKVFGSGRAFAAWIGLVPREDSTGGKQKLGPISKRGDRYLRRILVVGACAVLRYARHKPEKYPWLTKLLERKPFKVVAVALANKMARIAWALLAKGDTYRVPALAAAA

SEQ ID NO: 263533 - protein, 309 aa, unidentified
MHNICGVDVSKAWLDSWVAQHYCRFASTDEGVGQLLAFCRAHSVGLVVMEASGGIEQTAFLFLWSQGQPCAIANPRAVRSFADAMGHFEKTDRIDAQMIARYADAKKLVATPPPSQDQQRLTALAARLRQVSADLSIQKQRLHSTSDPDALASLKEAVAFFTRQAKALAARIATLVASDPIWAELDKTIRSVKGLADRTVAILLADLPELGTISNKAIAKLAGLAPLANDSGKRHGPRSVRGGRASVRSILFLVADVARKYDTSLADFRQRLLDQGKPKMVVRIALAHKLLVRLNAKARETRTNIAQTI

SEQ ID NO: 263534 - protein, 343 aa, unidentified
MICIRTSKRTSGATHEQGKTRTTDLINDPEIVREFYSSLPEPAIVGIEASARATWFENMLFETGHKLFVGNPVLIRKRATSRHKNDRRDAELILELLLRDEFPAIWRRPPESDQILEILRLRQTLVRQRTQVYNRLQALAHDVGLPKGRIRTNAFQKLVKAAEMNKVSSIRRTHLFSLIGKLSEQVADLDKWLRKKVDDDDAVQLLLSQKGVGYLTALVTVHTLGDVSRFPRLSKQIASFAGLDPVEKSSAGKTRFGSISKAGSSLLRYQLCLAAQIASRSDPKLKSFYKRLAKKKPKAVAKTAAARKLLVKLSIMLRDHITADEFDRRGRTVGNARETTGLQ

SEQ ID NO: 263535 - protein, 362 aa, unidentified
MDEDGVVFQSKFGVLTPELEQMAGVMVDYGVEEAAMESTSIYWMPVWRVLEPYVALRLVNPFFIKQLPGKKSDVKDAEWIATCLQKELIKGSYVPDELIQQLRQYDRRIFDLSKDIVYKLTKLDAALQRCNIRISNYVSTTRGKAYQEIVRLISEGKTDSEELVKHIHGRTVNRIGKDVLVSSLSGVITAADIDTIRQLREEVELAQRHKDECQAKMDAICEQYFPKQYANLQTIPGVQARSATAIIAEVGTNMDAFQTAAHLVSWAGLKPRNEESAGKIKSRRVTHGNKYLRKTLIECSWAASKTQNCFYNRFSYIQCTVRHKNKMKVQVAIARKMLTAVWYILHDNVPYRDFTPDIVPSE

SEQ ID NO: 263536 - protein, 408 aa, unidentified
MNPLFVGIDVSSRSNVAYLMKPDGSKHSSFSVQNNLGGAKMLSERIVSALSSMRLSDVVIGLEATSIYGNNLVYALREDGSLSRFQRKIHVLNPKQVKKFKEAYPDLPKNDFVDAFVIADHLRFGRIAKEVYMDDYRYQALRTLTRARFDVIQNLTREKQRFANYLFLKCSGIAQEKDIQNTSATTIALMEHFETVDDLANTDLDELTDFIAQAGRGRFVDPDATARAVRAAAKGSYRLPKTVNDTVNQAMSVSIASMRALKEQVKVLDKAIEQQFEIIPNTLTSIPGIGKVYSAGIIAEIGDIHRFDSQASVAKFAGLVWTQHQSGEFEAEHSRMIKSGNRYLRYYLLEAANSVRRCDSEFRRYYDLKFKEVNKYQHKRALALTARKLVRLVFRLLKDNRLYIPPEG

SEQ ID NO: 263537 - protein, 421 aa, unidentified
MTQPSHDTFAAFVGIDWADAQHAICLQAPGTATRESLPRTHTPEAIDAWGTTLRTRCNGQPVAICLALTKGPMVSALHTYDFLVLFPSNPLTLARYREAFTPSRATDDPTDAARQLALLLTHRDTLQPLQPQSPTMRALAQLVAHRRRVVGDTVRRTNRLTRTLKNSFPQVLHWFQEKDTAIFCDFLRRWPTLKAAQRARRATLETFFREHHVRDAEVIAQRLQAIKAAIPLTTDDGVIAPHALLVQALVAQLRVTLQALADCDTASAQRAQSHPDFPLFQALPGAGPVFASRLLVACGDQRARSAAAAARQKYAGIAPVTARSGKQAWVHWRLPCPQFLRHTCVAWAAEAIRHAFWAQVYSQQQRDTGKAHQAAVRALAFTWIRILSRCWQECTPYDEAVYLQALQHRGSSLMQNLAKAS

SEQ ID NO: 263538 - protein, 346 aa, unidentified
MDQIIRIGMDTSKHFFQLHGVDAAERPVLRRKLRRHEVLAFFAKQRPTIVGMEACGAGHYWAQELRKLGHQVKLIAPQHVKAYVKRNKNDGRDAEGLCEAMSRPTMQFVPVKTEEQQAALMLAGVRQQLITRRTQLSNAIRGYAAEFGLITAKGLVKVEPLLAQIVQDESLPMLAREMFTLQGRDYARLQVELKAVEARLMAWHRANADSWRLAKIPGIGPIGATTLVMKAPDPRLFPSGRHFAAWIGLTPKDHSTAGKTRLGKITRAGDEMLRSVLVAGATSVIQQAKKDRGRPSPWLVALLARKPPKLAAVALANKTARIAWKLLMTGENYDGARMPVASALAA

SEQ ID NO: 263539 - protein, 365 aa, unidentified
MVVRPDAHVRVYAREMEVLTMIGIGIDTHKATLAVSAVDELGRELDRTTVRNDRRGHAVLARWAARLGSERRIGIEGSGGFGAVLAQTLLAAGESVFEVPATLTARERRRLRGHGKSDPGDALAIARVAARETTLPIVQAWTSTDDLRLIVVARDELLAERTRVANRLHADLLVLEPGYGDRVPNLVAARHLGAVARLLGGKTDVRAQLAKTRLARLRTIDRQVALFESQLGVLVATSGSTLPSLPGIGVLVAAKLIGEVGDVRRLRSAAAFASYSGTAPVPASSGQTQRHRLNRGGNRQLNRALHTMALVQIRTHPLAQAFIARRTAEGKSWREATRCLKRHLADVVYRTMKSDLLTAEQGLTR

SEQ ID NO: 263540 - protein, 342 aa, unidentified
MTVIGIDAHKRSHTCVAVNDAGAKLAEKTVASTSAGHAQALRWALTRFGTDLSWGVEDLRSMTGLLERELLAAGQKVVRVPPHVMARNRGSARAWGKSDSLDALAVARAVLREPNLAAAFHDAISWELRLLVDRREDLVGQRVAVTNRLIGRLHQLSPDRPTPAHLERTKSQLALAEYLREQHGLLAELARQELADIGHFGRGISALTEDIVGRVRELDSTLLQLQGCAELTAAKLISETANMDRFRNEAAFARYVGVAPVPQSSGTEVGRVRASRSGNRQCNTAIHRIAIVQLRLKGPGREYYLRRRDEGDTAYTAIRCLKRRLCRIVYNRLHADYQHRNL

SEQ ID NO: 263541 - protein, 367 aa, unidentified
MKKVSTAAAKQSRNFPEQKLTIGLDLGDRSSWYCVLDEAGEVLLEQRLGTTPKAMKEVFGGMPRSRIALETGMHSPWVSRGLSELGHEVIVAHARNVRLIGESRKKDDRLDARTLARLARIDPQLLAPVKHRSAKAQADLTVIRARAGLVRSRTALINTARGLTKSYGERLQGCNPRNMNPEKAQGLSPELQTALEPLLAAIEALSERIYEYNQQIEKIARESYPQVARLEQVKGVGTLIALTYLLTLEDPHRFRKSRDVGCYVGLQPGRRNSGQSEPQLHISKEGDPYLRTLLVQGAHHILGPFGADSDLRRWGLKLAERGGKNGKKRAVIATARKLAVLLHRLWVSGEVYEPLRNSNHRAMPAAA

SEQ ID NO: 263542 - protein, 309 aa, unidentified
METIVGIDVSKNRLDVAVIPQGEAFAVGNDDAGIDELIGRLKAIGADAIALEATGGFETLAVAGLSSAGLTVLVVNPAQVRSYANAIGRRAKTDPIDAAVIAAFVLATKPEIRPLRDAQTQALSELVARRRQIVQMIVAEENRLRMVLAKQAQKSIKRLLTALRRELESLDADLDDHIRKSPIWRVRETLLVSVPGVGPTTARTLLAELPELGSLDRRQIASLAGLAPWTRQSGTWKGKSFIGGGRGKVRAVLFMAALVASRHNPSLKAFRDRLVAAGKPKIVAIVATMRKLLTILNAIIRDSKPWQNA

SEQ ID NO: 263543 - protein, 350 aa, unidentified
MTNTNISSVIIGVDTHKSIHVAVAIDNNGSRLMAFSAPATTKGYKTLEDWACALGTIIAFGIEGTGSYGAGLSRHLLAQGHKVIEVTRPNRQLRYQHGKSDSLDAEGAARSVLAGQAIAQPKTQTGSVEMIRHLKIARDTAVKCRSQAMVTLKTLIINAPAALRDTLDQISGKIALIRYIAAFRPGAMTSTIASAKTALRALAQRWLALHEEIQSHDKALEQLVAVRAPTLLASHGIATMTAAEMLILVGDDPTRIRSEAALACGVCPIPASSGKTNRFRLNRGGNRQANAALYRVAIVRMRNHPPTLAYVSKRKMEGKSNREIIRYLKRYIVREIFTHLCRPKASLTSA

SEQ ID NO: 263544 - protein, 343 aa, unidentified
MSVVILGIDLGKNVCSVVGVDAAGAVIVRRSMRRQTLIDYVAKLPACVVAMEACCGAHYLGRLFAAQGHEIRLMSPEYVRPYVKAQKNDDRDAEGIAEAASRPTMRFVELKSEEQLDIQTLHRVRSRLVNERKNLINQMRAILLERGTTFPVGRRKFEQGIDAMLAGEDTTLSPRLRQLMEQLRAEWRELDARIEALNGEFVELARNDAAARRLTSIPGVGVLNATALIAAVGNASSFAKARDLGAWLGLVPRQHTTGGKPRLLGISKRGNTYLRTLLIHGARAALPSLARSETPLGRWLPGMIERGVHRNAIVVALANKLARIAWAALRKEATFERGYPVAA

SEQ ID NO: 263545 - protein, 354 aa, unidentified
MNIKYIGMDIHKDTISIAVMNGDGKLVMESIIETKAITILQFIQGLRGDLHVTLEEGTWAAWLYDLLKPHVTELVVCDPRKNALMKQGNKSDKIDARKLADLLRGGYLCSVYHGENGLRTVKELARSYLTISKDLSRVMNRVKALYRSWGILCGGQQVYAPRHRSEWLNKIGEAGVRRRAEFFYQQLDALRALRQTVRRDLLAESRKHSATKLLRQIPYIGPIRAALLIALIQTPYRFRTKRQLWTYSGLAIETRDSAQHRYVAGQLRRSKKPQQVRGLNQNHNHDMKAIFKSAATMASSREGPFNDFYQGLLTKGMKPAMARLTLARKIAAITLIVWKKGAHFDAEQLKPQAA

SEQ ID NO: 263546 - protein, 371 aa, unidentified
MSASVIYVGMDVHKDSIVLAFAREGREQAETWQTIPYDGVKLRKVLKSLIKNGEVLRVCYEAGPTGFGLCRSLRKAGIDCIVVAPSLVPSKSGDQVKTDRRDARKLAHFHRSGDLTEVHVPEEAVEAIRDLERARDDARCAERVARHQLSKFLLRNERRWEGNAWTKKHLDWIRKQTFAYPAQQRVLEDYVKTVEDLAERVERLTKSMAALVQETTLAPLVQALQAFRGVAMVSAVTIAAEVGDLRRFQTPQQFMSYVGLVPSEDSTGKRRKQGAITRCGNSHLRRIVVEAAWHYRHVPVMSKELRRRNQGVAEGVRRIAWKAQKRLNERMYHLIHAGKCIHKTVVALARELTGFIWAVGQEETLLEAKSK

SEQ ID NO: 263547 - protein, 376 aa, unidentified
MKNDIRFVAMDAHADTLAVSLSEGPGEVRRLGIIPNRPESVRRLIRKLGPVEKLRVCYEAGPTGYALYWQLTQMGVPCDVVAPTLVPCKPGDRVKTDRRDADKLAVLYRGGQLTSVWVPDKEHEALRDLVRAREAAKSDQLRAGHRLHKFLLRHGWRAPQGIKPWTQKHLEWVRRQVHFERPAQEAVLLDYLTEVQHARDRIARLEMAIDAAVAAAPPPMRAVIEALQALRGIAQVAAATVVAEVGALSRFARPRQLMGYSGAVPRERSSGGSTWRGSITKTGNAHLRRIVGQWSYRHRPAVTGALRRRQEGLSEEVKAIAWKAQHRLHSRYRRLIGKGKPKQQVVTAIGRELLGFIWAIGVHVEKSLGASARRAA

SEQ ID NO: 263548 - protein, 364 aa, unidentified
MFTIQNTRDGFNFLLQKIQDCTTPQDKIKVGLEATGHYSYNLLGFLLDNGLPTYVLNPLRTNLYRKSLSLRKTKTDRVDARTIATMLLSDAGLKPYTDTAYHNEELKSLTRYRFDKVKERAKLKSSVSRLVCILFPELEKLTPTLHMPSVYALLDEFPGAKQIAEANLTHLKAILHNASKGRYNRDKAIDIRESARASIGAVMSAKSLELRHTIRLIRELDAEIEDIEAAIQSIMNEMHSPITTIPGIGTRMGAMILAEVGDFSRFDSPDKLLAYAGMSPSTYQSGQLKNCYPHMEKRGSRYLRYALYNATKYVCLWAPTFAAYLAKKRAEGKHYNIALSHAAKKLVRLIFAMEKSRQPYCSAT

SEQ ID NO: 263549 - protein, 348 aa, unidentified
MKNIIIGIDFSKETFDATVLDLSKTNGVLSASIDGMHQKFQNGKLGFRQLLRWVKTSTRQRPSKDWMFCGEQTGKYSHGLCDFLSSNGLDMWCEAPLRIKRCMGITRSKNDSLDSLRIAEYAYRYQDKMSAYKPVSKAIAQLKELFLARLKFVEQRKALYVRNNTCTEYSKGSDAEKMVAELSQKLIEQFDESIKKLDKEMQAIIDSDEEILETFENISSIKGISLINASAFIIYTNNFKDFGADPRRIASYWGVAVFAQDSGTSVHHPARTSPMCSKMLKSLLSEAAVAAKTYNPGIKQYYDRLIAKGKHKGVALNNVKNKLVHIITALAVNKTKYMEGYESFRKAS

SEQ ID NO: 263550 - protein, 343 aa, unidentified
MQSISTIGLDIAKSVFQVHGVDAAGQVVIRRQLKRRFVLSFFEKLPPCLVGIEACASSHYWSRELRALGHTVQLMPPAYVKPYVKRQKNDSTDAEAICEAVTRPNMRFVPIKTIEQQSCLMLHRVRHLFIRQQTAVINSIRAYLAEFGVVAPVGRRGVEQLLEVVADPAECRLPEVARACLAALGSQLRALKAQILDFDRRIIAWHRSNATSKRLDAIPGVGPALATALVASVADANAFRSGRDFSAWVGLVPKQNSSAGKDRLGSISKQGDRYLRSLFTAGALAVIRYAKIHGARHRPWLTALLARRPTKVAAIALANKLARMAWAMMARNECYREPAALTA

SEQ ID NO: 263551 - protein, 335 aa, unidentified
MQIKHFIGIDVSKDTLDLSVVVNGKVLTHYCIGNNSKEIKSIVNKIMKTLGGSFEDTVFCMEHTGLYNRPIVKWLHNNQGKMWLESGAHIRKSLGLVRGKNDKIDSSRIAMFAYTNQHKIKLWTLPRQVIEKIAALLSQRARLVKVKKQLTTANKEQKKFLEKDVMHSLNIYTDRTVSVIDKQIEAIEREISSLIKEDEKLNRMYQIITSVNGIGFVTASYILVTTNEFININDPKKFACYSGVVPFGHTSGTSIRGKNRVSHIANKTVKALLHLSALSTLNSPGEIQDYYKRKIAEGKNKMSIINAIRNKLILRIFACIKQNREYEKNYCYKLV

SEQ ID NO: 263552 - protein, 343 aa, unidentified
MKIYAVGIDLGKTVFHLVGLDASGQVVVRKRCSRKQLLAFSANLQVQLIGMEACSGAHFLGRALRAQGHEVRLMPAQYVKPYVKTNKSDYIDAEAIAEAVQRPRMRFVPIKTEEQLDLQALHRVRERWVMRRTAVVNQIRSLLLERGLTLPKGRSHLDKQLPRILEDAELNLSGSFRVLLSQLKLELEQLAGRIEQIDTVIQKTAKENEACQRLTEIPGVGPVTATALIGAIGNASAFGKGRALSAWMGIVPGEYSTGGKQKLLGISKRGNKYLRRLFVQGARSVMQQRHKQAPGLRDWLARLLGRTHQNVVVVALANKLVRMAWAVLCKNERYRAPILAMTN

SEQ ID NO: 263553 - protein, 310 aa, unidentified
MDMITVGIDVSKDRLDVVVRPSGEVFAVDRNAAGLELLAARLREVSPHLVALEATGGFETVAAAALASASLPVVVVNPAQVRAFAKALGQRAKTDPIDAAVIAHFAEATKPEVRPLLDEATRLLSDLVARRRQIIEMIGAERQREKRITLARVKKSIGRLIATLEKELASVDGEIDDAMQGSPVWRAKEDLLASVPAVGPTIARTLMAELPELGQLSRRQIAALVGLAPFTRQSGQWRGKSFIGGGRTAVRTVLFMGAMVARRHNPVLRAFFERLVAAGKPKMVALIAVARKLLVILNAIIRDNRPWQTA

SEQ ID NO: 263554 - protein, 337 aa, unidentified
MKSWSVTVLSETSVLKKFSQHPSPEALYGFLTRSYPGAEYHSVYEAGFCGFWIHERLTALGIDNIVVNPADVPTKSSEKLRKTDTVDSGKLARSLRANELKGIYTPDSISLEMRSLIRLKNSITKDTTRQKNRLKSQLRYLGIEIPQEFLTPFSNWSKRFFAWLKEIETLTPSGRQALDIHIRHLEELRRQKLEMTRALRTLAKTDRFREPLRLIMSVPGFGQATGMAFLSEICDITRFRNAEQLAAYIGMIPMCHSSGEKDGTGDITIRKHAVMRCNLIEAAWVAVRQDPAMNLFYTEQCKRMPKSKAIVKVARKLVNRLFFVLKHQTEYVNSIVS

SEQ ID NO: 263555 - protein, 381 aa, unidentified
MMVNSTATSNEQSICAALELSKNSWLLAIQVPGRDNPSLHPLLGGDAEGLMAKLDAARDRVAKATGQPPAVTLCYEAGYDGFWLARFLEQRGITCQVMEPASLRVNRRARRVKTDRIDVENILHTLIAWCRGERHVCSMLVIPSVEEEDLRRCHRERDRLIRERTAHTNRIKGLLFGQGIRGINVKSRYKTLKPSELVTGDGRPLPDRLGREITREIERLAQVQAQIVSVERERDHPVTSCAATEIKRHDLLRLKGLGPALSSTLTREVYYRRFTNRRQVASYIGIAPSAYDSGDGHRSQGISKAGNRLARVAMVEAAWLWLRHQPDSALSQWFHDRTQGQKGRIRRIMIVALARKLAIALWRYLETGLIPEGAILKSRVR

SEQ ID NO: 263556 - protein, 351 aa, unidentified
MWIIGCDYHPRMQEVALMETETGEYDERQLSHDCGEAEKFYRDLKQRGVNVRVGMEATGHARWFERLMAELGFELWIGDPAEIKATRVRKQKRDREDARLLLKLLRENRFPRVWVPPPENRDLRQLLWHRHRLVQMRTRIMNQLQAIAMGEGVRLRKSLWSRSGRAKLESLQLAPWAAKRRKDLLELLDHLTPKIEELNVAFEQEAWNRPEVRHLMTHPGVGPVTALAFVLIIGTPWRFACGKQIGSYLGLIPCEDSSGGRQRLGHISKQGSSLLRFLLVEAAQQAVRFDADWKRQYLHLAMRREKRIAKVAMARRLGVRLYWMWRTGWDGKQALQVGSHAGQLVRSHGLT

SEQ ID NO: 263557 - protein, 402 aa, unidentified
MIYAGIDVAKSSHVIGAVDERGKDAAKPMQFANSAGGFGKCAAYLEGLGAPAEEVLVGMEATGHYWLPLFSFLHAQGYDVVVINPIRTDAMRRFKGSSRVKTDLVDCILIADTLRLGEFRPSKLGDESMVELRQLTRLHQGLKESVADLKRQVIVALDQVFPEYDSIFSDTFGESSKAFLRKCPTPEECRGVRVDALGNTLSRASRGKLGREKAEEIKGIAKESCGIDRGTRTLSFQIKLLVEQIDFIEGQIEEVEARIEEGIETTEPLILTIPGIGHVLGAQIASEIGDIHRFRNASAVVSYAGINPSVSQSGKFSSSENHITKQGSPYLRRALYLAATAQLRLSTPFRDYYDKKRADGKSHREALIAVARKLVHVIYAVLSKQEPYRPDAVNANPVSRSE

SEQ ID NO: 263558 - protein, 345 aa, unidentified
MKIVGCDLHTRYQQIAMLDEETGELVERRLEHGNGEAKQFYGQLSGPVRVGIEATGHTRWFERLLAELGYELWVGDAAQIRAAMVRKQKTDARDAAHLLQLLLEERFPRIWRPTAEQRDLRHLLWHRQKLVWMRNAVGNQLHALAMGEGICRKKQLFTKKGRVELQALKLDAWASRRRQELLQMLDQLDASLQQLDEAVNQQAAANPAAVRLRTHPGVGPVTSLAFVLLVGPVARFQRSKQLVSYLGLNPCEHSSGGKQRLGAISKQGNPMLRGLLVEAGHSAARLDPELRQDYQRLRLRRGGSVAKVAIARKLAVRMYWMLRRQVNYTQLVRMQGSSRATLVQH

SEQ ID NO: 263559 - protein, 403 aa, unidentified
MIFVGDDWAEDHHDIHLMDEAGARLAWRRLPEGLVGIRGFHELVATHADQPGEVVVGIETDRGLWVEALTAAGYQVYAVNPLAVARYRDRHHLSGAKSDAGDAKLLADLVRTDRHNHRLVAGDSPHAEAVKVLARGHQNLIWARNRQTNALRSTLREYYPAALEALGDLHERDALAVLGRAPAPADGARLPISAIRSALKRAGRQRGLDTRAHEIAAALRTEQLAAPEPVAAAFAATTRAAVGIIGELNRQIADLETQLADHFEQHPDADIYLSQPGLGDVLGARVLGEFGDDPDRYTCAKSRKNYAGTSPLTVASGKKRAVLARHIRNRRLYAAIDQWAFCSLSVSPGSRAFYDQRRAAGDLHHQALRALGNRLVGILHGCLRHHTTYDEHTAWPTLHDAAA

SEQ ID NO: 263560 - protein, 338 aa, unidentified
MKKYIGIDLHSNNSVVLVSDEEDRVIFQKRMANDLKLIEAALAPHRDEAVGVVIESTYNWYWLVDGLMDAGYRVHLANASGIRKYEGLKYSGDVADAAYLAHLLRLGLLAEGYIYPREQRGARDLSRKRQQLVRYRTAQILSIEGMLMRQTGARINSTAVKGLTSEQVEAFGFAPDVTLAVEVNRAVSQTLEQQIDAVEKRLRERVSLRGEFTLLRTVPGIGETLATTIMLETGTIARFAQVGNYSSYCRCVDSLRESNGKKKGKGNAKNGNKYLAWAFVEAANFAVRYCPQAKSFYERKKRKTNGIVAIKALAHKLARACYHMLREHRPFDVNRCFA

SEQ ID NO: 263561 - protein, 389 aa, unidentified
MKLYVGIDVSSRDLANCIMDHEGNTCARFKVDNHLLGATFLRDQILLWANKRKPTEILIGMEATSVYSWHPAMFFHQQEALQAWNVKVFTINPKLIRKFKEAYVGLEKTDDIDAWIIADRLRFGRLKMTVVLKEQFLALQRLTRMRYHLVHQLTHEKQYFLQHLFYKCSSFTQEVDSSIFGHAVLKLLFESWSLDDICQMDVMQLADFLRQKGRNRFSDPECIAKSIQKAARSSYRLSKCVEDSIDLLLGLSIQSIRSLQSQLKELDKAITRHLEGIPNTLQTIPGNGPVYTAGILAEIGQIERFHNQATLAKYAILTWSKHLSGRFQAEDTSLIRSSNRYLRYYLVEDANSVQRHDATFRAYYRKKYEEVPKHQHKRALVLTARNSCV

SEQ ID NO: 263562 - protein, 339 aa, unidentified
MQVTTVGIDLAKHVFQVHGITEDGEVVFNRAIRRAQLMQFFTNLEPCLIGMEACGSSHYWARELSKLGHDVRLIPANYVKPYVKRGKSDANDAEAICEAVTRPTMRFVAPKSEEQQAVLFLHRARDLIVRQRTQLSNMLRSLLAEFGVIIPQGTGAAVKYAKGVLEGGNPALPQIAIDVLRQLSHQLVAMHLRFRWYEMRMRLHSKLDKRVMLLRTIPGVGPVTASAIVATVGDAKQFKNGRQFAAWLGLTPLNLSSGGKERLGRITKMGDRYIRRLLVTGMTARLRQMKVNPDRVDPWAIGLLERKPARLATVAMANKTARIVWAVLTKNEYYRPHTA

SEQ ID NO: 263563 - protein, 438 aa, unidentified
MKVLHERVAGIDVHKDMIKVAIRSPGDKPWTRKTEVFEFRTFYGVLQEMACELRRRGVTHVVMEASGVYTEPVYHALCEQDFTEVIVVNPAHVKALKGHKTDAKDCARLAELLECGLLHGSFIPSAEQKEVRDLTRYRMKTVQARTSEIQRLHKALESAGIKLGSVMSDITGVSGRLMVDALIDGERRAQVLADLAKGTLRSAGKQADLSMALTARFTDHHAMLCRLHRDQIKLHDHAIAGLDEQIAGGASRWLRELGLLKSVPGFGEVVSAAWLAEIGPEPHRWFPSHDKLASWATLCPGNNISARKRKSGRTGDAGTYIKPVLVQAAWAAIQVRGRLQARYRRLVRRFGGDKNPGAKKKAIIAIAHTLLKIAYQVLKTGQPYTDLGADFYTRRESPEQQQAYLERRLQKLHPGCTVTITISPPPGSPSPDAPAEAA

SEQ ID NO: 263564 - protein, 326 aa, unidentified
MQGKDLPEDAKPKVYVGADVCKARLDVHLHPSGVTLAVPNDSQGLKALVRALKGCDVGLVVMEATGKHHRLAARHLSQAGLPVAVVNPLRARLFAEAAGALGKTDGVDAHMLAVMGAALGPQGRLKAAAPAPEALEALAELVRARNAAVAERTALMNRLGASQTRFLKAELKRRVTALEGHIGRLAAEIDRRIKADPGLARRFEILVSIPGVGAAVAAALLVELAELGTLDRHAAAALAGLAPHPDDSGERTGLRRIMGGRPGPRRALYMAALSAARCNPGLKAFHARLREAGKKPKVALVAVMRKLVILANTLLKEDREWRPDHA

SEQ ID NO: 263565 - protein, 406 aa, unidentified
MQGPVITVDVSKGSCHYQPYVSNGHPMRKPKVLHDTVEGFQSLSDLIDTMKDRYECEAIPVIFEATGVYHHCLQKYLDDHQIPYYIISPLMSASYRKTTPNSNKTDDLDCSHIAKAYYGECNLFPYDKPSKSFHNLRGLNRYYECELNHLRMRKNTFRKYLDIVYPRLDKCFKGHSSLYDEIPMEVIKQYPHPSLLLKHKEETIVKKIEKKTSHNASFIQNIVHEMYECSMHCYSGADVTDVESMILPELVDDLQSQEERCDEILKQLVSEAQKTPYFTSIVSIVGIGDNLAARIIAELGDMNRFSCRRAITAYAGLNPKIRQSGDMDGIHLAISKKGNKHLRCLMYLAVSCNYRLKKGDVLYEFNQKKRQQSFSPLKPKAATIATAHKLLLIIYALCTNGTVYHS

SEQ ID NO: 263566 - protein, 429 aa, unidentified
MKIIYPRVCGIDVHKKFIVAVICISESVEPIYLKKRFSTFHNDLIRFRDWLIQNDCQNVCMESTGKYYIPVYNVLESHISNIVVANPKWVRAVKGEKDDDKDAKWIADLFKLGIVKSSFIPQKDFRILRELTRYEYKLVNMRSSEKNRYQNALTSGNCKLDMVFTDVFGKSASNIIDLILSDNPYTDEDILSKVHKNCKASPDMILNSINGTDLTSVQKSRIELVNDHIKQLSSNIQRLDKLIDLMIEPYEDYISFLCQIPGVSRNSAIIILSEIGVDMNQFTSTRRLTSWAGLTPSSNQSAGKKKSVRISRAGVYLKPCLVEVAHAAVKDKNHPYYANKFNKISKRRGKKRAYIAIARKILVAAYHMLLTGEIWNPADLAEVETPVEQRIKYVKNNLKSDIKQLLDIGLTVEELTLMIQQNANTMTAQ

SEQ ID NO: 263567 - protein, 399 aa, unidentified
MPANLRLHFNGCLVTSGQPVLYLSLELGWDSWKLAFTAGPGPASRRRDLTARDLAQLSAEIAEAKRRLRLPADCPVVSCYEAGRDGFWLHRWLLSQGIQNVVVDSSSIEVNRRQRRAKSDSLDAAKLLSMLLRYAGGEVGLWSVVQVPTVEQEDARQLHRELLSLQEEATQHTNRIKGLLATCGLSIQIDRHFPKQLKQLRQWDGSPLPEALHQRLLREFERLQVANRQARQLEQQRAKEVRQREDSPAVAQVRKLLGLKGIGIRSSWLYVQEFFGWRKFKNRKEVGSLSGLAPAPYSSGQTEHDQGISKAGNKRMRWMAVEIAWGWLHFQPDSELTRWFYARFGRGGRRQKRIGIVALARKLLVQLWRYLETGVPPAGAILTDWKSKAALTTKNMQSP

SEQ ID NO: 263568 - protein, 331 aa, unidentified
MSNNENNTAQRRSNENHFVGIDVAKDELVVHVLPTNQQLTVSHSKEGIKELVKLFKENEPKQIVLEATGGLERALLTNLIANGFVAIAVNPRQARDLAKGLGELAKTDAVDARILARFAQLECLSVRPVPSMETQEMSDLVTRKEQLIQMRTMETNRLQRTTQKAIQKSIEKIIAAFEKEIETIDARIEQMIVDNPDWSEKDKILQSVPGVGAKTSQVLISALPELGTLNRQEIAALVGVAPFCDDSGKRSGKRHIKGGRANVRSALYMATFNAIRRNKTIKDFFDRLIESGKKYKVALVAAMRKLITVLNVMLKTKTPWKENHLLKQKEE

SEQ ID NO: 263569 - protein, 379 aa, unidentified
MEISSSTLPAVAAERATMFVALELSKSSWLVALHSPVADKVSMHRFVGGDVAGLLALIARKQTQAEARLGRTIRVLSCYEAGYDGFWLHRLLCARGIDNRILDAASILVDRRSRRAKTDRLDAAGLLRTLMALDRGESRVCGVVRVPSVAQEDARRRSRERTRLVVERGQHSNRIKGLLMTLGVRDFEPTRRDWQERLGGLRTADGRELPACLKAEITRECRRLHQVIVMIAEVEAEQAAALDAEESQAARLIRLRGIGLVSATVLADEVFFRDFRNRREVAGYLGLASSPWASGRVQRDQGITKSGNPRARRTAIELAWLWLRHQPGSLLTQWFRQRVGTTRGRMRRIMLVALARKLIVALWRYLSDGLVPDGAELKA

SEQ ID NO: 263570 - protein, 341 aa, unidentified
MSDYSYFCGIDLAKNHFSLHAVDQNGKVILHKSVTRSKLLTTIANMPLMRIGVEACGGAHYWARTLNKLCHDARIMAVKYVVPYRTKGKNDLNDAVAICEAVQRPSTRFVPVKSPEQQAILSVHRMREHWVRERTALMNRMRALLSEFGLIIPVGRSSLMKHVPLMLEDAENELPHLARTVIADAYHHLDELNQRIADTEQVFDSFAKVSTNVQRVMKVRGIGLQTATAILASIGNGSQFDKSRDFSAWLGLVPKQYSTGGKPRLGRITKHGDKYLRTLLVHGARTVIANLSDKQDKLSQWCRGVLERRGMNRAIVALAAKNARIIWSLLHNQTEYENYAA

SEQ ID NO: 263571 - protein, 264 aa, unidentified
MKLYVGLDVGLEETSLCIVDSEGVTVREVKVSTEPEAIRSALEGSADRLDRVGVEASSLGIWLYRELQPAGVSIIVAEARHMRVSLSTMRNKTDRNDARGIAQMMRLGWYRAVHVKNIDMQKMRTLLSNGKLLKRKLIDIENHIRGALRAYGLLVGAVARGAYEARIRELLERSDPIFAMTVEAMLDVRRAIFEGYERLHRVLLQVVQHDPVCRRLMTVPGVGPVAALSFKVGVDDPRRFARSRTVRAHFGLTPRRHQSGTSIA

SEQ ID NO: 263572 - protein, 370 aa, unidentified
MLDTTTFIGLDVHARSIKAVSLDVMTGEVRAATFGYDAGAVAGWVRSVDPRARCVYESGVTGFDLQKRLSGLGVDCVVGAVSKMIKPSADRRRKNDRNDAEFLARMLSVGNVVEVWVPDDECEAARDLTRALEDARDDLSRSKQRLSKFLLRHGLVFDERTPTGRRKGNWTRAHWSWIESIRFAERADNDVLAYYVDAVRRAAEEKARLEGLVGAEARKPRWRKRVDSLRCLKGVDTATAADLVFEAGEFSRFRNARSFAAWVGLTPSEHSSGESDRRGAITKAGNKHLRKTLVEAAWHYLTCSGRPKDLAKGQAPDRGARRHAAKGVRRLVERREALLARGVHGNKANVATARELACWVWAVGLMAEEA

SEQ ID NO: 263573 - protein, 385 aa, unidentified
MQKLNDLSRSLAPLNPDSTLIAVIEMSQSSWLVAGIVPGIERHPLKKLEPNEGELLRLLMRWRAEATKMDCTITRIAVAYEAGRDGFWLARWLRARDIETYVIHPTSVAVSREHRRAKTDRLDTGLLKRVFTGWLRGEPDHCHMAAIPTLAEEDAKRPNREREGIVRERTRIVNRMKSCLARFGVRNFKPTLRKTPERLATLVTPEGGHLPPNTLLELRRDMARLRFVTDQIKEVEQARAQRLERTPQDKTHAMVRLVARVIGVGIETADMLVHEILSRSLRDRRAVARYAGLTGAPDESGSKRREKGLAKAGNARVRRGMIQLAWRFLLFQKDSQLAQWYRTRTERGGKKRKTMIVALARKLLIALWRLVTTGEVPAGVVLRAA

SEQ ID NO: 263574 - protein, 391 aa, unidentified
MQTPNDLSQSRIVLKQDSTLIAVIEMSLSSWLVAGMVPSVERQPLKKLPIDENALLKLLHRWREEAEKAGRKIERIAVAFEAGRDGFWLARWLRARGIEAHVIHASSVAVSREHRRAKTDRLDTELLKRAFLGWLRGERDHCKMVAIPTIEDEDAKRPNREREGLVGEQTRIINRMKAALSRLGIRGFNPKMKKAAQRLEDLRTPADEPIPPNTLAELRRDMERRRLISEQIRQIENARLELIEHAPRHGPHAMVRVLARVIGVGIETADMLVQEALSRNMRDRRAVARYAGLTGSPDESGTRRREKGLARSGNARVRRGMIQLAWRFLMFQKDSALARWFRARTENARGARKTMIVALARKLLIALWRLVREGVVPDGVVLRPGVMNGGR

SEQ ID NO: 263575 - protein, 412 aa, unidentified
MSNTLFVGIDISSQTIAVYFMDQTGKGPKNSIELNNDLMDATLLVEHILTYADTIKADSVKIGMESTSDYALHLHHFLASVPDLEPLSPQIYVLNPAIVNGFKKTLTFRQKTDDLDAKLIADCVRFGRVEPTKIPDPRYPALQRLTRYRFQLVQSLTNEKNRALHLVYLKFSSYRSDKLFSDTFGKASTSILESFSVEEISAMPMEDLVKFICENGNNRLKDPEAIASKLQVLARRAYRLNPDISDSIELTLSMSLENIRFMESQVTRIDKEIARQLRAFRQTLDTIPGIGPTLSACIVSEIGDISRFHNDAALAKFAGLVWTRYQSGSFDAQNTSLAKCGNAYLRYYLVEAANSLRVHNVEFNAFYQKKYNEVTKHQHKRALVLTARKFVRLVYAMLSKGQIYNGGGAGLK

SEQ ID NO: 263576 - protein, 461 aa, unidentified
MKEEKIEMSVVNPKAAGIDIGSRSHFVGIGQGKEHVREFGVYSEDLMELVQWLLDNNIETVAMESTGDYWQNLYAELIKNNIDVYLVNGKFTKTMNRKKTDVIDCQWIQKLHSLGLLHRCFLPDESTEKLRTLCRQRGNIIAAKADASRKMQKYLKFLNYRLDVVVKDITGQTGIAIIDAITKGEHDPYKLAKHRHYNCRKSEEEIAKALHGNNREDYLIGLQLEYERHLFCVSQLEKCDIHIAELLKIHIASMADVIDELPSDKKHKRLNKNSIKTIDLNIIAFQYFGGVDLLEIPGVSYGTLLSIMSEVGPNGLDNFPTAKHFTSWLRLAPNNKISGGRRISSKVPRGSHRLKVALRNAAYSIARLKDSPLNKFYKKIAFKKGGIKAVTATGRKVAVIIWNMLTKKILYRAKEEYLFLDQKRKQIAMMRKKMAKFGIDPNDLGIFTRPEYKLAHDKKTQ

SEQ ID NO: 263577 - protein, 432 aa, unidentified
MSNRLQVGIDFSQKSADFGLFFPNGQPLEPHQAFDNSLIGYSLAKHLLLDALDTYAFDGLDVSGEATGYYWLPFFLQLAADPDLAPHDLNLFLLNPRWVHWFKKCFAQDDKTDAKDPFYIAERTRTHRPSATWAPHLDTLPLRFYTRLRFHLIENLAREKCYLSAFLFLKASSYRRLKPFADVFGITSRVVLGEWPTLDELAALPVADLAQQLHELSGHHLPEPLDNAGKLHQIAQESFRLPTALVLPVQRVLDLTLAHITFLEGQVNTVDAWITTEAQPQRDVSTLSTTPGIGPVFSSGLVAEIGGLERFLQGRKWDKPRKRFRPKNLRDAEDAVAKTAGLWWPRADSGDFEAEDRRLAKTGNRYLRYYFIQAANRMRQCIPEYADFYARKYREASKHKHKRALVLTARKSVGLVVGLLHRHEAYRPRRAN

SEQ ID NO: 263578 - protein, 421 aa, unidentified
MHVLYQRCAAVDIGKDVIAVAVRLPGDGPEHRQTIKRTFKTFYGVLKHAAGWLTAQQVTHVAMEATGIYSMPVYHALIEHGQFEKVLVCNAGHVRNVPGRKTDLSDAEWLVHLLECGLLRGSFIPPAQIKAARDVIRYRTKLTESRTSELQRLGNVLQDAGIKVDSVASTIATRSVRAMVEALIDGERRPVLLAELAKGRMRARIPDLQRALEGRFDDHHALMCRLHLDHLDHLEEMIARLDTQIQDMMQPFRAQRELLTTIAGIGPFAAAAIISEAGADIGETFPSAGHFASWIGVCPGNHESAGKRHSGKPRKGNQHLQHVLVECAWAASRTPGYLQSLYRWHVRKFGGSRNPTAKNKAIVAVAHKLAIIIWHVLATGKPYTDLGADYLDRRIDPANETRRLIARLQALGHTVTIEPAA

SEQ ID NO: 263579 - protein, 342 aa, unidentified
MYYIGLDVHKKTISYCVKDASGQVHREGKIGATRRELDGWIKTLPQPWNVAMEATIFTGWIYDHLLPHAAQVKVAHPLMLRAIAAAKKKNDRIDAGKIADCLRCDFLPECHMAPTAIRDRRRTLRYRHLLVRQVVQMKNRISGLLMETGVEYNKRRLHKVGYFRELLSTNEEVNESIRPMLKLSRETIVRLQKTEYALVSSLQRDPLLAERIKRLRTVPGVGPITALTWALEMGDVSRFRSIRQAISYCGLCGDEKSSADKVIRTPLSKQRNKHIQRVLVEAAKLAPREDHKLALVYETEKQKGNANRATLGVARKMVAYLLAVDRGGRNFVPAEEHSQTAA

SEQ ID NO: 263580 - protein, 365 aa, unidentified
MQKSSTLRTFGKNLFRGTLTVGLDLGDRYSSYCVLDEAGQIVLEQRLQTTPEAMKQTFARMPRSRVAMETGTHSPWVSRLLTSLGHEVIVAHAQKVRLIVKSRRKDDRLDARTLARLARIDPELLSPVQHRSAQAQLHLTEIRARAALVSTRTTLVNAARGLVKSYGERLRKCDTQQIGRESTSGLSAELRQALEPLLREVESLSERIQEYDRRIARMAKDTYPETTLLKQVKGVGDLIATAYVLTIEDPHRFRKSRDAGCFVGLQPARRNSGESEPQMHISKEGDEYLRTLLVQAAHYILGPFGKDSDLRRWGQKLAERGGKNAKKRAVVAVARKLAVLLHRLWVSGEVYEPLRNSQKEVGVAA

SEQ ID NO: 263581 - protein, 348 aa, unidentified
MVVIGVDSHKRTHTVVAVDEAGRKLAERTAATTADGHLELLIWSRTWPERTWALEDCRNLTRRLEADLLRGGEAVRRVPTKLMAGARRSAREPGKSDPIDALSVARAALREPNLPVARLDGVEREVRLLVDYRDVLISDRTGHQSRLRWFLVELGIPEPPSRRLTVVTVLAGVDLQLVGRAEPCARVARDLVARISELTVAIDDLARQIGELAETLAPSLLALFGCGSLTAAKLVAETAGIGRFRSRAAYASHTGTAPIPVWSGNVVRHRLNRGGNRQLNAALHRIAITQLRCPSLGQAYVAKRIAAGDTKTEAIRALRRRLSDEVYRRLQADEVARVGLDGLTRAAA

SEQ ID NO: 263582 - protein, 269 aa, unidentified
MTASPVFVGIDVSKARLDIAVRPAGTSSSVPHDEAGMATVVEQLRHMQPTVVVLEATGGLEVVLSGALAAAGVRVVVVNPRQVRDVAKATGRLAKTDALDAQVLAQFADAVRPAVRPLPEASTQELAALLARRRQLVEMLTAEKNRLGRAPRRIDRDIRTHIAWLERQVAQLETDLTRAIHASPMWRETDEWRQSMPGGGPVLATTLLASLPERGTLNRRQIAALVGVAPFNRESGRWRGKRIVWGGRTAVRAVLYRRAVYGGVGGRAS

SEQ ID NO: 263583 - protein, 417 aa, unidentified
MSCNKCGWTATKYTQEVVMISVGIDVSKGKSTACAIKPCGEIVVSPFEFQHKETDLKSLCDMFRRMNDEIRIVMEATGIYHLPVATYLIEHGVFVSVVNPYEMKQYRTRGLRKVKTDRADSMMIAGYGIDYWYSLKAFQVSQDVYAELRVLSRQYRHHMQLRISALLGLTHLLDYTMPGIKRELKGWNEDNGKDKLGDFVDKYWHYDNITKMSEFKFIDHYCKWAEKKGYHQNQSKAAKIYSMAKEGIPTLPANQTTKMLVHEAVEVLRRVNQTLNTILARMKELAKSLPEYPVVREMGGVGEKLAPRLIADIGDVRRFHNSKALVAFAGIDAPPYQSGQFVGTERHISKRGSSAIRKTGYEVMRSLKSHKEPEDSAVYHFILKKEAEGKPKKVAKIAGLNKFLRIYYARVQEVYSE

SEQ ID NO: 263584 - protein, 429 aa, unidentified
MPKKAKNAAVDTAHTANKKDMAALDIVYQRCCGVDVHKDIVVVCCVSIGGRKQVRSFGTMTSDLLDLCAWLKVEQVEMVAMESTACYWKPIFNLLEVEEIPAILVNAQHVKNLPGRKTDVKDSEWLAMLLRVGLLKPSFVAKRDQRELRELVRYRKSIVEERSREYCRMDKVLQGANIKLSSVMSGLETLSGMEMIRAIARGENSEAVIAALAKGSLRNKQEELLRALRGYIQPHQRMILSSMLMHIESLDTQIETLDTEIQSRLAQCEEVLERLTKIPGVGKHSAQVMVSEIGTEMSQFPDAKHLVSWAGLCPGNNESAGKKKRGRARKGNKTLRTALVQCARSAARTKDTYLQSMYSRIASRRGANVAAVAVARTILETYFYMLRDNVGYNELGFTYYDERNKEHIQKRAVKRLEGLGFKVMLEAAV

SEQ ID NO: 263585 - protein, 380 aa, unidentified
MNVAKCRLSEGELNLINMQVAQGLVPVGVDLAARVFQVCYYDLDKKVVKNFQLTREKFFDFLRNPPFEQKMLVGFEACGACNYCAREIKALGHQYKIMPTKAIKAFLQLAKTDKIDALGIFKGTFTPSINTISARDEQNQTLLNLLGIREQLSKQLVQTGNNQRAMLYELGVVCNEKKTGVDYVIKASEELLEKLKQENSPAYSSVQVGLEALRSNVRNIEAQIKNIEQYLLDYAKSNEDCKNLMSIPGIGALSAVILHAVMGDVNSYPSSRHFAAFAGFAPRVSGSGGKVTVGEIVKTGNRHLKKVLYMCAVARLAQNKRQDHNSSSRISELLGDETTPKKKIICSIANRLARVAWTVVKNKEPFNQDKCRLLSLPTDN

SEQ ID NO: 263586 - protein, 411 aa, unidentified
MGLTCGIDWAEGHHDVAVVDEAGNVLAERRIGVGAAGFADLLGVLAECGDSPDQSIPVGIESSSLLLVSALLAGGRKVYAINPLAVSRYRDRHRASRAKSDARDAIVLANILRTDAHAHRPIPSDSDAVKALRVLTRAQQDAVWDRVGLTNRIRGVLRRYFPAAVAAFERGGKHRLDSPACRVILRAAPTPSAADKLSLARLQALLRRAGRTRGIDAEARRLQTYLRRTELRQPLAVEGAMGIQLQALVDQLDAICRAVDVLTAAAEQLFLSHRSAVIVTSMPGAGSVIGARLLAEIGDDSKRFADARALKAYAGAAPVTRASGKSHRVGYRRAKNDRIAAAGYVWVRAALVHDLACRSYYQARRRTGDRHVGAQRNLFNKLLGKLYHCLQTNQRYDSATAFPNHHLPTAA

SEQ ID NO: 263587 - protein, 405 aa, unidentified
MEILHQRVAGIDVHRMKHVVTTLIEDEAGQISKQTREFGGFKRDLKALAEWLRALGIQLVILESTGIYWKSVFAHLENADLTVWVVNAHHVKHVPGRKTDVADSEWLAQLGRYGLVRGSFIPPKDLRELRLVSRYRRKVSNQLAAEKNRLHKLLDDAGIKLGGLVADINGKTAQAIVDGLIDGLPPEQLILLAGRLRAPRDALLASLDGDLSPRHILLLTELRAHVRHLEERLAKLDAYLIEAMAPYAWAFKLLQTLPGLDEIGAAMILVEIGDDLARFGSADRFASWAALCPGNNESAGKRKSGKTRKGNTTVRYLLCEAANGAVRTLSVFRDKYRALVVRRGHKKAIVAIAHKLIRTIYFMLTRRQAYRDSGFDYAAANVKKNASRWLKALKRFGYWPETRTA

SEQ ID NO: 263588 - protein, 423 aa, unidentified
MGQWGVHGGRFIDRPNLDRRELQVDKAQTAWAGIDVGKTHHWVCVLDAEGNKLSSMKVANDQTEITATIATVGALADRIVWAIDIVGAPSAMLLALLIQAGQSVRYASGRVVAAMSSAYSGEGKTDAKDAYVIAETARIRRDLTVIDPSTNLVRNLELLTAHRADLIADRVRMINRLRDVMTSVFPSLEREFDYSSCKGALILLTGYTSPERLRRAGETRLAGWLQRRRVRNYAAVAARAITAARAQTVTLPGQEIAAEIITELATSTLALDQRLTELDAQIASTFDEHPQAEIIQSMPGFGPILGATLLVAAGDLAAFPGAGHLAAAAGLVPVPNDSGRRTGNLHKPRRYSRSLRHVFYLSAQTSMMRDGPNRDYYLKKRHHGRTHTQAVIALARRRIDVLWALLRDERTYTATPPALAQAA

SEQ ID NO: 263589 - protein, 385 aa, unidentified
MQTPIDLNQSRIVLKQDSTLIAVIEMSLSSWLVAGIVPGVERQPLKKLAIDESAMLMLLNRWREEAEKAGRKVERIAVAFEAGRDGFWLARWLGARGIEAHVIHASSVAVSREHRRAKTDRLDTELLKRAFLGWLRGERDHCKMVAIPTIEEEDAKRPNRERESLVGEQTRIINRMKATLSRLGIRGFNPKLKKAAERLQDLRTPEGELIPSNTLAELRRDIERRRLVSDQIRQIEDARLERLERMPNEGPHAMVRLLARVIGVGIETADMLVQEVLSRTMRDRRAVARYAGLTGAPDESGAKRREKGLARSGNARVRRGMIQLAWRFLMFQKDSKLAQWFRARTENARGTRKTMIVALARKLLITLWRLVTTGEIPAGVVLRTA

SEQ ID NO: 263590 - protein, 321 aa, unidentified
MKESCVVGIEVSQAELVVACQPDRAPLALPYDGPGIERLIAELKQLEPNWVVMESSGGLEAALAAELHGAGLRVAVVNPRQVRKFAHSMGYLAKTDRIDARAIAQFGDSAAQHGRLYQARIPDAAEAELKALVARRHQLVELLKGESQRRLRAPSKAVRKSIVQTIKGLKKQLGEIEQQLEQAVESSPIFRGKAQQLVAVPSIGAQVSRVLIADLPELGSLTRRKISTLVGLAPLADDSGKRHGRRAIYGGRAWVRSMVYMATLSAVRHNPVLRAYYQRLLANGKAKKLALIACARKLLVILNAMLRDGTPWNPQPAPGSA

SEQ ID NO: 263591 - protein, 388 aa, unidentified
MYRIIKIGMDVHSKNYTLCAMEPTIGAEDRIFGEVQVAPDYKEVICFIESLKMKLGFYDEYSIECGYEAGCLGYTLYHQLTGAGIKCVILAPTTMLTQQGNRIKTDKRDARLIAQCLSYGGYHPVYIPTGEDDAVKEYLRMRDDHKLALKKLKQQIHAFVLRHGYQYSGTKWTIKHVTWLKKLELDPMYRETLNEYLASYEEQEAKIERYDKRIEEIASERRYQENVKKLGCFLGIRTHTALSLIVETGDFKRFAKGNTYAAFLGLAPGERSSSDNVNRLGISKAGNTHLRCLLIEAAKGICKGAIGHKSKELRARQSGQPAEVIAYADKANTRLRSKYYKMLRHGKKTNVAVAAVARELACFVWGMMTGNISIRPTAGTSMPAVRQG

SEQ ID NO: 263592 - protein, 411 aa, unidentified
MSETRFAARIGLDWADEKHDYCLQEAMAQTVEYGTFKHNPAAIDEWVSALQLRFDSQPVAICLELKSGPIVSCLSKHNFISLYFIPPQALANYRKVFTHSGAKDDPTDAFLQLDYLTKHSASLRKVSFDTNNTRILETLTTHRKSFIKEKVKLTNRITGALKAYYPLVLELFNDLDTFIFCDFIERWPNLSKLKIVRHDTLDNFFKTHRCGREHLIKQRIELIKVANHLTKDEAIINPYQRYTLALISLLRPMLNTIKQYDTEIFTLFEQHEDKELFNSFPGAGKTLAPSLLVAFGTDRSAFSSADEVNRYVGIAPVVVRSGKSTWTHWRYKCSKLLRQTFIDWANQTIRYSFWAREFYDKKRKSGMSHQATIRALAFKWIRVMFRCWINRTAYNEAKYLFTLSKRNKKMA

SEQ ID NO: 263593 - protein, 412 aa, unidentified
MKDLLEISCGLDVHKEKIVACILTGPLGKPTRSEIREFTTLIPDMIALRDWIVSQNCHHVAMESTGIYWMPIYEILEDAFSGDITLLVVNARHMKNVPGKKTDMRDSEWISTLLRAGLLNGSFIPEKRIREFRDLNRYRKSVIRDITSQKNRIEKFLQSSGFRLSSFISDIFGASGRNIILHLMEHGQIDKTALDSCLKTKTRNRIDEILMSVNGTLSEHQKAFLRILMTHYDSLKKHLAEIETSLEEDMAPFALQVGQLNSIYGISTTASCAIIAEIGIDMEPFKTAEHICSWAGLCPGNNESAGKRKSTSVTKGNPYIKSMLCEIAWVIAGKRNTYLSAWYWRIKQKKGAKKAIVALARKLLVIIYTMLKQGTLFDESCFETRRKHCEQKQLSRYIRELEKHGYHVEAQS

SEQ ID NO: 263594 - protein, 428 aa, unidentified
MKNRNDQKLKAITPGTLIVGVDIAKETQWARFVDYRGLELRKAFKFKNHKNGFDSILASIKEICKKRRLDNIIIGMEPTGHYWKPLANYLLIHEVNVVMVNPYHTKRAKELDDNSQTKSDKKDALTIARLVRDGRYYEVYMPQDIFAELRVLSNSRISLMKRSNALKNTITAVMDEYFPEIVTVFKYPLKGKAAMQILKSCPFPSLILELGIEGVLTEIKKAVKKTVGRKKAQQLVETAKSSIGVGYGLVSAKLRLGLMIEELELLTKQLEQLEKAMEKALADTGYGELILSIPGIGVVTAASLLGEIGDPMRFDHPRQICKMAGYNLIEDSSGKNKSKTKISKRGRKNLRSVLYQMARTMVAVNHEMKELYQYLKTRPNNPLKKKQALVVISKKIVTVIYNLIKKQTEYQAELVFNKFRKNQMKQIA

SEQ ID NO: 263595 - protein, 407 aa, unidentified
MRVYLGIDWSQSKHDLCLLNEAGAVVAELTIPHQPEGFEQLDDLRRTAGVAASECWVGLETAHNLAIDFLWARGYHQVFVIPPNAVKSARGRYRQTNAHTDRSDAYVIADMLRTDQARLQPWHPDGDVTQQLRAKVSLVLHLTHTIRRLDNRLQAVLGRYYPVARHVFHDTLTLVGLRFLQAFPTPQAATALTRAAFSDFVRAQHYTRSEQMLLAAYARLTQPYPQAAPVIVAAYQAEAVLLAELLERLLNHKMTQLKTMQLLFHQHPDATVFASLPGVGDFLAPALLAKFGDDRERFPDAASVQCLAGTCPVTEASGKRKVIRFRRACDHEFRWLVQQWALQSLNDSVWAVAYWEQVRARGGSRSHAYRCLANRWLAIAWKCWHMRQPYDEAYHLHQRARRSQPRS

SEQ ID NO: 263596 - protein, 350 aa, unidentified
MTTMTETRRQITGGVDTHRDIHVVAALDERGGLLDTNTFPATAAGYHDLLVWLSWFGPIDKVGVEGTGTYGAGLTRHLMDNDVEVIEVDRPNRQRRRRAGKSDTTDAISAARAALSGEASTTAKTRDGNVEKLRVLRVARRSIRQDRIRALNQLRSLVVTAPDELRTQLSDLTSIGVSQAVAKFRVTDPTTTLGALKYAMRSLGRRAEALRWEAKEIDKIMRSIIEDTAPALIDQGGIGVDAAGALLVAGGDNPQRLHSEAAFVRLCGAAPLEASSGMVTRHRLSRAGNREANAALYRIIINRMANDDRTRTYVKRRRAEGKSNLEIIRALKRYVAREVYPLLGNNPLTT

SEQ ID NO: 263597 - protein, 389 aa, unidentified
MKIFVGIDIAKLNHFAAAISSDGEILIEPFKFTNDADGFQLLVSKLESFDKNSIIIGLESTAHYGDNLVRYLVAEFYQVCVLNPIKTCQMRKNNVRKTKTDKVDTFVIAKTLMMQDDLRFITFFDLDMMDLKALGRFRQKTIKQRTRLKIQLTTYVDQVFPEIQYFFKSGLHQHAVYALLKEAPSPKEIASMHMTHLANLLKVNSHGHFTKEQAKELRVLAQKSVGANDSAISIQITQTIQQIELLDSQLEKIEVEMTDIMKFNDSVIMTIPGIGYINGGMILGEIGDIHRFSNPNKLLAFAGLDPSVYQSGNFQAKTTRMSKRGSRVLRYALVNAAWNVVRNNATFKAYYDAKRAEGRSHYNALGHCAGKLVRVIWKMLTDEVEFNLE

SEQ ID NO: 263598 - protein, 422 aa, unidentified
MNKPDKAMQGQIRHWVGIDWGRACHAVSVVDDQRALLTQFVAPATLEGLEGLCKRLKPYGAIAGIAIEATADPIMGFLAVRGFTLYLINPKLSKNWRESNSVAGVKSDARDGRVLAEELARRHESLRTFVQDDPAVARSAGLCEGERVLIGRRTALVQQLQSVLRQYYPGVLPFFSDWTSPAAWRFIVKFSTPKTLARTRKNTLIAFLKANQIGLKPIWLERIDGRGNVTAWPEPPNSEGLQMLALATAKELLSLQPCIEQCERRIEECAQELPQVELMRSLPGAGPRLAPALAAIMMMAQARGNDLEMVRGVSGVAPVEDSSGKRRKTRMRRRCNKHWRNTLHLFARCSMMCCTWAKAFYDLRRERGDSYATALRKLADKWLKIIHRMLLTNEPYDEQRYLEALRKNGSPVYQRLCGKTCA

SEQ ID NO: 263599 - protein, 412 aa, unidentified
MLKIVYPICCGIDVHKGFIVACIASTNGQGVTTYQSKRFSTFTNDLRRCAAWLAQNHCKDVCMESTGKYWIPVYNILEASCTIVLAHPKYVKAIRGKKTDKKDAKWIADIFKHDLVSGSFIPPADIRQLRDLMRYHWKLTNFTTGEKNRAQNCLTVSNIKLDDVFSDIFGKAASAITARLLENNEPFDVTPYLTKNIKAPVEKIQAAVDGEMCVQQAEKLRIIRSHMDALELCKLNLQSLILTTAEKYLPQINIVATAPGIQAFSAIAIISEIGVDMSVFPTSKHLCSWAGLTPQNNESAGKKKTTRISRAGAYIKPLLVQCALNAARAKQFPEVRRRYLALKKRRGHKKAIIAIARMLLTAIYNMLKKNEPYNPDLYRIADRPPTHHEVSVEEAIYILQRQGYLVAAPSLP

SEQ ID NO: 263600 - protein, 342 aa, unidentified
MHATTLIGMDISKYSFELCGVDDHGKHTLHKRIHRDQLSLFFSNFPRCTIAMESCAGSQHWARELKNLGHQAMLIPAQHVVAFRQGSKNDRNDARAIAEAAQRPQMRTVPVKTAEQQDIQALHRIRERLVNNRTSLVSELRGLLMEYGIVCAKGYQKFRLWLKNQFIVCLETLSLMAQQTFNMLRDELYALETRIAELEKRILEVFKSNPVCQRLATVPGVGPLIATALVASVADPQRFKNGRQFAAYLGLVPRQHSTGGKPKLLGITKAGNNYLRKLLIHGARSIIYHHRKKVDQRSKWVKELVERCGINKTNVALANKNARVVWKLLTTPEEIFKEKLAA

SEQ ID NO: 263601 - protein, 312 aa, unidentified
MAMLSFCGVDVSKDRLDVVVLPEGWFFSVSNDTAGWAELVARLRPLTVSAIGLEPSGGYERGIIRALLAAGLSVRRINPNKLRQFARARGVLAKNDRLDARLIAEYVAIMPTRVVQRDAAVERLAEIVTMRRQLCDEHVAAENQAAHLEDAMLRRLSKRRQMRLEADIRLLDKRLAEMVAANVALAQRYELLTSMPGVGPVLAFTLIALLPELGKMSRKQIAALVGLAPYDFDSGKLKGHRSIYGGRMPVRNVLYMAALSASRYSPALKTFHNRLVAADKKSKVIIVAVMRKMLTTLNAMLRDSAAWQPRSA

SEQ ID NO: 263602 - protein, 421 aa, unidentified
MQVLYSRCAGFDVHKDSVMVCLLIDRAEPIIRQFATTTQELLRLRDWLIEHGIKHIAMESTGVYWKPIWNILEDGFELMLVNAQHIKQVPGRKTDVSDCQWIADLLRHGLIRASFVPPSPQRDLRELTRQRSQLIAERARVANRIQKTLEDANIKLGSVASDILGKSSRDMLETLIEDPNADPLKLAQLARSAMRPKIPQLALALNGKLRDHHRFMLKQLLDQADYLGKQIQTFEDRIDQIMIQAGREADAEAKGEEGPFAKAVRRLDPIPGINRRAAQSILAEIGHDMSRFKTAAHLASWAGLCPGNDESAGKRRSGHTRFGNRWLKQMLVQCAWAASRTKRSYFHGMYHRIKARRGHKRALIAIAHAMLTTMWYLLSRTTQYADMGAIQQHPQNPQRLTRHLVQRLEQLGYSVTLAPAA

SEQ ID NO: 263603 - protein, 424 aa, unidentified
MNTTNMPHTPPATTPSSLVFAAYVGLDWGDEKHAVSLAAAGSDKIERRTLEQTPEALVAWASELRQRFPGGKIAVCLEQARGPLIYGLQCYEHLVLYPINPKSLARLREALHPSHTKDDPLDADVALELVRKHREHFRPWQPDTVPTRQLALLTEGRRGFVDHHTAGTNELQTHLKSIFPQALELIGQDLGSPLATDFLKKWPTLQHVQKVKPAVLRKFYYGHNSRSEELIQQRLELVQKAQPLTRDPALLAAHSLAIQSLAAQLAVLRQTITQYDRQIAAVFASHPDAPIFQSLPGAGEALAPRLLAALGTDRSRYPDALAVNCASGIAPVTEKSGKTQYWVHLRWSCPKFQRQSWHEFAGCSIKLCPWARCCYDQLRKRMGHHEALRKLAYKWQRIVWRMWQERQVYDEGRYLKSLQRDGVA

SEQ ID NO: 263604 - protein, 345 aa, unidentified
MNITRVGVDIAKSVFHVHAVDRHEKTQWQAKLKRNQWLDALCERLAPGAEVGMEACASAHYWGRELQKRGYRVKLIAAQFVKPYVKSNKNDRADAEAICEAMSRPGMRFVAVKSVEQQDTQAAHRIREELVGQRTAKANQIRGLVGEYGIVAPVGIQKLRLALPQWLEDAENGLTDEFRVLLADLAEDMRHLDRRISSLDGRIEQCVKNDPVARRLLELRGVGPLTASALAGALGDGKGFRKGREFAASLGLTPRQHSTGGKDRLLGISKRGDSYLRKLLVHGARAVLRYSKNRDDGLSQWLNELAARKHVNVATVALANKTARIAWAIVHNETAYDPLLAASRQ

SEQ ID NO: 263605 - protein, 339 aa, unidentified
MAWTVAIGVDTHKEAHVAVACDRLGRQLDACELPAGAGGYARLLEWAEGLGSPAFAIEGCGSYGAGLARFLQASGAAVFECERPRRRERRRGKSDLIDAALAARRLVAGEGLARPRGGGRREELRLLLLERRGLVQARTAALNQLQAVLVSAPERLRVRLGSLRGSRLARAAQALRAGSDEERVLVGVLRRLARRVQQLEAELAELEAELEAIVSELVPELLAECGVGPVCAAQLVASSGDPARMRSEAAFAALAGTSPVDASSGRQRRHRLNRGGDRQLNRTLHVIALARVRHDRETAAYQERLLGSGKTDREARRCIKRALARHFYHRLSANSALTT

SEQ ID NO: 263606 - protein, 345 aa, unidentified
MKVTKVAERLGIDIGKNVFYLFGVDAQGTPVLRKKLRRGALLEFLAQQPPCLIGMEACGGAHYWAREIRELGDEVRLMAGQFVKPYVKGNKNDYNDAEGICEAVGRSTMRFVAIKTVAQQDVQGFHRMRQAAIRARTALVNQMRGLLAEYGIVFATGVAQTRRRVPEILEDAENGLTDRFRRWLNGLYEQLREWDRCIDEYDQEIDVLFRADERCGRIAEIPGLGPVGATALVGAYGDARQFESARQFSAALGLVPRQHTTGGKPRLLGISKRGDRYLRTLLIHGARSVVCRAMNKTDARSRWIQRLVTERGKNRAAVALANKNARIIWAMLTRGEAYRPAAPAI

SEQ ID NO: 263607 - protein, 355 aa, unidentified
MNSIKYVGLDVHRDTISVAVLNAEGKRVMQCVLATQAKAIVEFFAGLRGTLHVSFEEGTHAAWLYDLLVQRVARLVVCNPRQNALLKAGNKSDPIDAQKLAALLRAGLLSPVYHGQKSTAAVRQLGRSYSALTEDTTRTMGRLKALYRSQAIACAGEKPYSARHREAYLAQMLEPGLRRRAQRLYQQLDLLQQLRREARHDLLLECRKHRESTLLRSVPWLGPIRVALLLARVQTPHRFRTKRQFWAYCGLALETRSSADYQMVNGELQRRKKPVFIRGLNLNHNHDLKDLFKGAATSAGAGSGVFAGFYQNLLLKGMKPELARLTLARKIAAITLHIWKKGEPFDAAFLTPHAA

SEQ ID NO: 263608 - protein, 384 aa, unidentified
MRTDHLAGADAENVILAASLELAGAQWKIALHDGRRQSPAVHTVRGAQAALRVQALLEVIERYKQKWSLPQDVRVVVSYEAGQDGFWIYRALRSRGMDCYVIDAASIPVERHRRRAKTDRLDAIKLVTNLRVWLHGERDRMRVVRVPSLQDEASRQLIRDRGQLHKEVLQYRERMRKLLITMGCWDGFNHRTFVKRLASGKLVCHDGTPLPSELHERLLRETARLALAEEQLAALERALQERLPAPVRERITYLRHLKGVGQLGASRLMLELFWREFGNRRQLGACVGLVPQPYDSGQSRIDQGISKQGNRRVRTQLIEMAWCWLRYQPSSALAQWFNKRTQGTGANRRARRIAIVALARRLVIALWRYLKDGVIPQNAQFKGA

SEQ ID NO: 263609 - protein, 422 aa, unidentified
MASVSEVVNARCCGLDVHKDTVVACVRVTSPNGRVEHEVRTFGTTTKALLELGDWLSASGVNLVAMESTGVYWKPVWNLLEGRATVEGELIGLMLVNARHIKNVPGRKTDVKDCQWIAQLLAAGLLSPSFVPERPQRELRDLTRQRAQLIGDKAKVANRLQKFLEDANIKLASVASDVLGASGRDMLRALIEGKRTPAQMAELARMKLRVKIPQLTQALTGGVNDHHRFMLRTVLDQVEYLEQQIGQFDQRIEQVMSPLELAAVAKLDEIPGFDKRAAQNVLAEIGIDMNRFPTEHHLASWAGLCPGNNQSAAKRKSGRVTEGNKWLKRTLNQTAWAGSRTKASYFRAQFQRLSKRRGAKRAAMAVAHSQLCVAWQLLKHDKAFVDLGVDYFEKKNSEGLKQRLIDKLKRLGCKVTIENAAA

SEQ ID NO: 263610 - protein, 425 aa, unidentified
MGFIAPQHLDDSHPYHWFVGIDWGSQTHQVCVLDHTRRCVAEREVHHDGLSLAQFATWLSELSAGEPTQVAVAIETPHGAMVEMLVERGFAVFAINPKQLARFRERYSVAGAKDDRRDARVLADSLRTDRPSFRAVRLSAPELLLLRELSRAEESLLQEFRRTANRLRDHLHRFFPQMLQLCPAADEVWLWDLLELAPTPAHTQLLSEKQVHQVLKAHRLRRLQAPEVLTCLQATALPVAPGVAEAAQVHCALMVPCLRVLAEQLRSCAQQVNTLLNTLRHPPVETGPSDVAIVQSLPGVGRKITTWLFAEAAVPLVERDYEALRTQSGVAPVTRQSGKRRQVVMRRACNNRLRHALYHMARVAMQCDAEFSSVYQALRAKGQRHGQALRNIADRILRILMAMLRDRTLYNPAQRLFRTSAQMSR

SEQ ID NO: 263611 - protein, 341 aa, unidentified
MEQVNTIGLDIAKHVFQVHGADAAGHALFRKRVTRAKLLGFLAAQPACVVAMEACAGAHYWGREIGKLGHRVRLIAPAYVKPFVKRQKNDAADAEAICEAAQRPSMRFVPVKTEEQQANGIVFRARDLLVRQRTQCVNALRGHLFEYGYVFPQGITHVATLVALVEDPQSSLPESARVVLKLLVNTFTALDGQIAALDAEINQRSKTDPTARRLMTIPGVGPIVSTAITALVPIAEDFRAGRDFAARLGLTPLQKSTGGKQKLGAVSKRGERTIRRLLIIGASAVVQQASRRGAPKGSWLAQMLARKPKMLVTVALANKMARIVWALLVKGGVHRAPVAAA

SEQ ID NO: 263612 - protein, 348 aa, unidentified
MLADQLDYVVGVDPHRDSHALAVVHAVSGAVLFEAAVAASSDGYANALKLVDQHAPGRRAFAVEGAGSFGAGLTRFLSGRGERVLEVSRLRRERRCGGKTDALDAVRAARSVLAQERPATPRAGGERQALQALVAAREGAVNARRAGLCQLRDLLITTPEPLRGQLRPLTRARLLQHLATTRPASGRDPELRGSMLALRSIARRVLQLTAEERELARQIETITRRLAPQLLAQPGVGPHAAAQLVLSWSHQGRISSEAAFARLAGAAPIPASSGQTIRYRLDRSGDRKLNRALHMILVTRKRSHPATIAYIERRLQEGKTRREATRCLKRYLARSLYRLLEHGPPIAT

SEQ ID NO: 263613 - protein, 434 aa, unidentified
MNTPHPYDLVIGLDRSDKKADLCFIDTHTGQRRTEIIATTPEALWEWLLALRQQHPQARVGLCLEQPAVHLISFLEAYNWITLHPINPITLQKYREAFVTSRAKDDTKDADYLADLLLTHHAKLPVWSPEDSATRAVQQLVFHRRAVVDERTGLSNRLIALLKSYFPQALVLCGEDLWRPLATAFLLKWPSLQAAQKTRPATVSQFYYLHGSRSAKLLAQRLALLEKAVPVTDETAVIESFVLRVQLVCRQLQLVQRSVTEFDRQIAAAYAAHPDRLIFASLPGAGAVLGTRLLATMGSQRERFADSATQLQRYTGIAPVTKRSGGSCYIHRRYLCPKFHRQSFHEYAKESILWSRWAAAYYLQQRNKGNPHHTAVRALAFKWQRIIWRCWQDHKPYDEPKYEAALRQHGSPLVPLFDRVELGKSPFKNPAKKN

SEQ ID NO: 263614 - protein, 339 aa, unidentified
MNEVTLIGIDLGKHSFHLHAQDATGRMVFRKKLSRQQLLRTLANVPSCRVVMEACAGSHWLARQLAGMGHEPRLISPQFVRPFVAGNKNDFGDAQAICEAACRPSMRFVSPRNEEQQTVSALHRLRERLVRERTATVNQMHGFLLEFGISLPRGAALMSRLPTVLDHETLPPRLVALVVRLRAHVHYLEEQIRQVEQDLKAALREDDKSRRLLEIPGIGPITASALAVELGDARQFANARQFSASIGLVPRQYSTGGKPTLLGISKRGDRNLRRLLVQCARAVMQHTDSRTDALSLWVKTLSTRRHSNVVACALANKLARIAWAVLARGTHYKARALTT

SEQ ID NO: 263615 - protein, 353 aa, unidentified
MKEVSTIGLDLAKNVFQVHGIDKEGAVVVHRALRRAQVVTWFAKLAPCLVGLEACASAHYWARELGKLGHDVRLIPPAYAKAYVRRNKNDSADAAAICEAVSRPSMRFVAVKTEQQQAAAGIHKVRQLLTKQRTMLINQMRGLMAEFGIVAAKGPQHVGELLAVLADRKDQRIANPLHEGLEAIARSLRFLDDELERIDRQIVTAGRNDATCRHLITIPGYGPILSSAMAAMAVDPGAYRRADDFSASLGLVPRQEGTGGRVKLGPISKRGNGYLRRLLVNGAMSVLRSKRAKEDPWLVKLLATKPRKVAAVALANKMARIGWAVMTRQEDFQKDFQKDFRGRKELESVAATA

SEQ ID NO: 263616 - protein, 386 aa, unidentified
MIVVGVDVHKYSLTAVDEVGRSIAELTVGSARDLVAWSSSLDPERLWAVEDCRQLSGALERALLSAGESLVRVPPKLMAPQRRTGRARGKSDPIDALAVARAALREPRLNHPRRGEQATPELKLLVDHRDDLVDERRRAQQRLRWLLHDLDPELTVPQGGLDRTVWLDRVARGLRRGEQTVQVRIARELVGRCRNLTRTILALDRELNARIESFAPALLALPGCGALSAAKLLGEIGPIERFDTDAQLARHAGVAPLESSGKHQRHRLDRGGNRQLNCALHRIAITQARVHPPARAYLERKQAEGKNRREALRCLKRQLARTVYTTLKNDIDIGATVSLRALRTGFRMSRHWLAALSFDSEYFRIIPAMAWGIRAERRGELCGVGF

SEQ ID NO: 263617 - protein, 350 aa, unidentified
MKIVGCDFHPSYQQVAIFNTETGEVEDKKLIHATGEAEKFYRELETPALVGMEATGNSRWFELMVEKLGHQLWIGDAAKIRASYVRKQKTDKRDAGHILKLLVEKRFPRLWVPDVRQRDMRQLLTHRHKLVRVRTRLKTELQHLALNQGIQKKRQLWNEKGRALLASLPLQGWAQQRRKDLLQLLGMVEPQIEQLDKAVQQAAKADPQAVLLMSQPGVGPITALAFSVTIGDVSRFERSKQVSSYLGLIPTEHSSGSKRRLGSISKQGNVFLRALLVEAAQSVVRHDPGFRKEYQHRCHHKEKGIAKVAAARKLAVRLYWMLKSNKSYTELVLNGGSPRHPVAAKAKPLS

SEQ ID NO: 263618 - protein, 312 aa, unidentified
MTHDGLFVGIDVSKARLDIALGAGEVWSVGNDRAGWTELVGRLASLGPSAIGLEPSGGYERGVISALLKAGLPVRRVEAARVRRFAEALGLKAKTDAIDARLIARFVQTLPGREVEIDARAQALVELVDARRALCDEHVRIRNQAEQLRDPMLRRMAQRRANRLKADVVLLEKRLAEMVAADPDLAARDRLMRSVPGVGPVLSWTLAAHLPELGRLTHRQIAALVGVAPYDRQSGTLKGRSMIRGGRAVVRNVAYMAALIGARRNPILRAMKQRLADKGKPGKVILVALINKLMTLLNAIVRDRTEWRSATA

SEQ ID NO: 263619 - protein, 404 aa, unidentified
MDARPSSGPRHAGVDWSWDRQAMCVLGDDGAVLDRFDVEHRSRSLRQMCDRLHRWGVRRVAIERPDGPVVRALLEADLEVVVISPRQVRAFRLRHGTAGNKDDRFDAYVLADALRTDGHRIASLTADRDETRALRALVRARKDLIGHRIALANQLLANLQQAFPGAVGLFAQLDTQISLTFLGRFPTAEKASWLSERRLGAWLRSVGYSGRQTPAELMKHLSEAAVGLTGEAGRGCGIVTTQLVGSLREVRARIEELDRRIAEALALHPDGEIFRSLPRAGVNRAALLLAEIGDCRSRYPDESSLAAAAGVAPSMRASGKRRSVSFRRGCDKQLRAALTDFAQDSVLASPWARDIYDRARARGCRHPHAVRVLARAWVRVIWRCWTDGVPYDPALHGGLNRLAA

SEQ ID NO: 263620 - protein, 440 aa, unidentified
MRRSNFAGVDWASEKHDVLIADEAGEELLAATFAHDEAGLRALCRTLVRYEVALVAIERPDGLLVERLLDAGLRVLALHPNQVAAARPRFRASGGKSDRFDSFVLCELARTDSHRFRVLEPDSDLTKALRALCRGREDLVQTRVALANQLRGELERFWSGPIGLFKELDSPISLAFLKRYPSPIEARTLGEKRIAAFLASQHYSGRKQPCQLLTKLRSAPEGRAGSAELATRRALVLALVAALEPLVTQIKALERQIATAVREHPDGEIFLSLFRDPKSVITAAELLGEIGDCRGRYPTADALAGDAGQAAVAIESGKRKVACFRWACNKRLRDAFCTLADSTRHWHPWAADHYARALARGHDHQRAIRTLGRAWCRVVWRCWQDRTPYDPARHHGLQQHVLVTIPTSSGSLPDTAATQRMLGAAVTRQGGPQGPSATRL

SEQ ID NO: 263621 - protein, 347 aa, unidentified
MSYTVAGVDVHKKLLVVVAADVSQPEWTFECRRFGTGAGELHDLALWLCDRGTAEVVMESTAQYWKPVWLELEPHMRLHLAQAQSNRAPHGRKSDFGDAKRLLRRFVAGELCLSFVPDAEQRGWRTVTRARLQLVCERVQLQNQMESLLEEGRIKLSSVISDLLGASGRRILRELAKGQTNPQQLAELGDERLRCGRAVLADALTGSMSAIHRKLLAQHLDRVELIDRQIEELSRMSAQQMQLHQQAILRLIELPGIGAEAAHQIIAEIGPTAGAFPSGRRLASWIGVCPGSNESAAENHSGRCAKGNRFMRRLLCQAAQAGVHKKGSHLQSLFRRLIVRLGYVKAI

SEQ ID NO: 263622 - protein, 410 aa, unidentified
MRYYLGVDWADQTHAVWVVDESGIKITAGAVSHTAEGLGAWGRELDEWRAQGIELWAAIERPDGRVVDLLLDHGVVVYPVNPKALDRARDRFRQSGAKSDPFDARVLADFLRTDHGHLRPLQPSSEAAQELKLLAEDCQRHIRLQTRLVNQLTATLKAYYPRALEVAELTSALAREFLPAYPTPAALTPLTERQWQRWARAHRLTEARTGELWAVLRQPQLPVPAHVVRAKARLMRALMEQLVPVMAAVAQYRKAIDDFFASMPAAQWARTLPIGKHGITAPTLWARLGDAPGRWESFRHLQAHAGTVPVTKRSGKQQRVVHFRFACDKALRYVVDQVAFLSLLSSAWARTYYDQQRARGHSHRQALRALGAKWLKIIFVMWERRVPYDEQYHLATMTRQQLRPRQKHIA

SEQ ID NO: 263623 - protein, 343 aa, unidentified
MDHFGGLDVSVKETSICIVDDTGRIVREVKVASEPEALLKVLGNPAYRFKRIGLEAGPLSQWLFGALAEAGLPVVCVETRHMQAVLKAQINKTDRNDARGIAQMMRAGLYRPVHVKTLRSQKLRMLLTHRKLLQSKAIAIENDLRGTLRNFGLKVGMVGKVRFEARIQELVENIPDMAVLVESLLIVRRALREQIVILHRRLLAIVRDDEVCRRLMTIPGVGPVVALTYRATIDVPARFRKSKSVGAVFGLTCSRYQSGEIDWSGRISRCGDEMMRVMLYEAAQSMMHSKKWSWLKAWAMQIARRRGMKKAIVALARRLAVIMHRIWVDGTEFRWTQEQAAAA

SEQ ID NO: 263624 - protein, 346 aa, unidentified
MDKLDFSGVEVGAEELVVSLERGGQRKALKTFANQPPGHQAIVRHLRCPGRNVRVCLESTGVYGLDLALALARAGFQVMVANPRAVRHFATALMLRSKNDRLDALVLLEFAMRMPFQAWVPPRPAALQLHAVGRRLEALTQMQAAEKSRWHAAQATDTTPPALRRDLERSLRSIRRALVRLSGEAVKIIERDPALKLRFDLLVSVHGSIAATSAIQILAELAVVSPGLDARQHVAYAGLDPRECSSGTSVHKKVRISKAGNAHLRRALYMPALVAIRRQPHLRAYYQHLRDRGKLKMVALIAVMRKLLHAIYGMFKHQQPFDGSKVYRLPGPHTSPPLNSAPEVAA

SEQ ID NO: 263625 - protein, 407 aa, unidentified
MIFVGVDWAEAHHDVHVEDGDGKRLGRARLPEGVEGIARFHDLIAPFADDPTEVVIGIETDRGLFVAALVAAGYDVYAVNPMSTSRYRDRHSASGAKSDAGDAKVLADMVRTDRHNHRLIAGDTEGVEALKVLARAHQRMVWSRGRQTNLLRSTLREFYPAALVAFDDLSSPDALEVLRIAPTPTLGANLSQSKIAAALRRGGRQRRIDESAVKIQTALRSEQLQAPAVVATAMGASVAATVAVIAEMCNQIAQLAAELEANFEQHPDAEVVRSLPGLGTVLGARVLGEFGDEPNRYATAKSRKNYAGTSPITRASGTKRTVLARHVRNQRLADALYLWAFASITASPGARIYYDQRRAAGDSHHQALRALGNRLVGILHGCLAHHVAYDEEIAWGHRAESNLQEAA

SEQ ID NO: 263626 - protein, 343 aa, unidentified
MYYIGLDVHKKTISYCVKDGAGLVHREGKIGSTRLELDAWIKILPEPRMIAMEATIFTGWIYDHLLPHAEKVKVAHPLMLRAIAVAKRKSDRIDASKIADCLRCDFLPECYMAPTAIRDRRRMLRYRNLLVKQMVQMKNRVSGLLMETGVSYSKRRLHKVGYFADLMASNEEISDCVRPLLRLSREHIERAQKLEYALVSSLERDPLLKERLRRLRTVPGVGPITALTWALEIGDVTRFRSIKEAISYCGLCGDENSSADKVMRMPLSKQRNKHMQRVLVEAAKLAPRECHELAVVRQRELERGNPNRATLAVARKMVCYLLAVERGQRDFLPAEKFTRTAAV

SEQ ID NO: 263627 - protein, 384 aa, unidentified
MSKDTLIFIGLDTHKEFTEVATVTDERGSSVEHYGKILTTKPALIKLARQLVSQHPKATLHFVYEAGPCGYWVYRLLTSLGHCCYVVAPSLIAKKPGDRVKTDKRDAMMLAERLKLCDLTPIYVPEPEDEAIRDLSRARETAMMDLNDGRYQFKAFLLRNNIRYEGPANWSLKHLRWLTELVLPHPCQQIVLQEHLQTIMERQKRLERLDNELEHQVKSWRYYPVIKAIQAMRGVRLRVAVGVIAELGDLTRFDHPRKLMSYLGLVPSEHSSGPHRRQGPITKCGNGRARRLLVEGAHSYRYSAKIATELQKRQEGVPKAIVDIAWQAQLRLCRRYARLMHRGKHRSVVVTAIAREMIAYIWAISREIVLIKVDPKQRISRVPA

SEQ ID NO: 263628 - protein, 429 aa, unidentified
MVPYLSVGIDVGSVFSFLSIVNPQGVAVGKPFKIHHHDVSSLEKAVDRIKKAEELYSMESRTFLESTGCYHFPLFCYLIESGFRVFVINPLTTHSIKNMGIRKVKNDKVDSLAIARLGLTPGLKLSVMPVGLVMELRCLTRKYYELVDQRTVHTNQLRSSLSQAFPQFLPLFSNIAGKTAMMVLREYPTPKHLLRAHRKVLIAKLARTSRKGEKRCEVLYDQLMAAARAALVFGVSLDSLFFNVREELDSIEHFSGRMDRVVARMEQLVQENESVRFIQQVRLLESIPGVGFLSALTIMCEIGDFDVFQKPKQLVAYFGLDPAVKESGLFKATQVHISKRGSRVARRAVFSVALSSVSRKNNGEARNPVLREYYLKKIQSKPKMTALGAIMHKLCNVIFAVLRDHKPFELKTPEEHSLDYQASQLAISA

SEQ ID NO: 263629 - protein, 355 aa, unidentified
MSQEKYIGMDVHQATISVAVMDGRGKLTMECLLETKAATILEFLQGQQGTLSLTFEEGTSAAWLHDLLKPHVNRLVVCDPRKNALLKDGSKSDRIDARKLAELLRTNQLKPVYHGEHGVRTLKELGRSYLTLTKDVTRVMNRIKALYRSWAIPCSGTTVYAPRHRAEWLAKIVEPGVRVRAQRLYQQLDGLQPVRLQARRELLRESHQHAAVKLLRQIPAIGPIRAALLVALLQTPHRFRTKRQLWAYSGFAVETHDSGEYRCVRGKLQRNRERITVRGLSDNYNKDLKNLFKGAAISASTHPGPLHDFYVALVAKGMRPAMARLTLARKIVAITLTIWKKGVGFDPQQLHRHAA

SEQ ID NO: 263630 - protein, 349 aa, unidentified
MIIIGCDYHPSFQQIAWVDSETGECGDQRLAHSDGEAEKYYRGLNGHGVRVGIEATGHARWFERLLAELKYELWVGDPAQIWAMRVRKQKTDRQDAQHLLKLLVEDRFPRVWVPSAENRDLRQLLWHRHRLVQMRTRIMNQLQAIAMNEGVRRKKGLWSKQGRKQLDSFPLAPWATRRRQDLLELLDRLNPSIQELSTAIEQEAVQRPEVKRLMTHPGVGPLTALAFVLIIGSPERFRCGKQIGSYLGLVPCEDSSADHQRLGHISKQGNALLRFLLVEAAQATVRSDPEWRRQFLHLAMRRERAIAKVAMARKLAVRLYWMWHKGWDYQQMVQFGSHVGQPVVSHGVK

SEQ ID NO: 263631 - protein, 357 aa, unidentified
MRFYTKQHPFYCGIDLHARTMYVCILSQDGEVVLHRNMPASPDALLKAIAPYREDMVIAVECIFTWYWLADLCAQERLSFVLGHALYMKAIHGGKAKNDKIDSQKIAVLLRGGMLPQAYVYPAPMRATRDLLRRRMHLMRKRAELLAHIQKTNSQYNLPEIGKKLAYKGNRDGVAERFLDPAVQKSVEVDLALIDHYDRLLSDVELTIVQTAKQHNAQALYRRQSVPGIGKILRLVLLYEIHDITRFPRVQDFVSYCRLVKCAKESAGKRYGTSGKKIGNAYLKWAFSEAAVLFLRNNAQGQKFLARLEKKHGKGKALTILAHKLARAVYYMLTRDTVFEMDIFLNGYGSRAGEPAA

SEQ ID NO: 263632 - protein, 443 aa, unidentified
MKELPVLDSRAAFCDVGSEHMHVSIAGGLPKVFGTFTSQLHELRDWVLGEGVHSIAMEATGVYWLSLYGVLEAAGLEVVMVNGRQTRNLPGRKTDMKDCQWGATLHAHGLLKAGFVPPSNIRKLQDYQRLRTDHIASAASQVQHMQKALERMNVKLHNVISSLMGVSGLAIVHAILDGERDPAKLLELCHSMIRNKKAKAVIEALRGTWEPEHLFALRQALQSWEHYQRQIAECDQQIELLLQRTTYNDTQGDGIGEKPKAKGGKHPSANAPQISGLHSMLIDLCQGKDLSILPGHTDYSVLQIISEVGTDLSKWPTEKHFTAWLGLAPGTSQSGKRKSNVKHRRNRVGRNFCMMARSLARSKDMALGGFYRRLAARRGGLIANIALARKLAVLFWRVMVKGTEFVEEGLAAYEAKFLEGKKRSLRRLARELGQTVSPIPVTV

SEQ ID NO: 263633 - protein, 337 aa, unidentified
MNNIEGCGVEVSARELVVARKGKAGVQLTRFANTAAGHRQLLRALTRGGQRVRVVLEATGLYALDLALLLSAQEQVQLMVANPRAVRHFAQAMMQRSKNDQLDAVVLLEFAERMPFTPWVRPAENTLALWAIARRLQALTKLCTAEKNRAHAMGLSEAIPAMVRRDIARSLQFHQRAMKKLRQQALRCIAADAQLQQRYQLLRSVPGLGEISAVQTLAELLLLPADRDVRQWVAYAGLDPREYSSGTSVRKYTRISKVGNAHLRRALYMPALVASRVEPHMRGFYEHLLARGKSKRQALVAVARKLLHAIYGMFRSQRPYDGTRVYLAAAAQAEKFS

SEQ ID NO: 263634 - protein, 343 aa, unidentified
MQTITTIGLDIAKSVFQVHGVDAGGQVVIRRQLKRRHVLTFFEKLPPCLVGIEACASSHHWSRELQALGHTVRLMPPAYVKPYVKRQKNDMADAEAICEAVTRANMRFVPTKTPDQQSGLMLHRTRHMFVRQQTAVINSIRAHLAEFGIVAPVGRKGVTELLHVVADPNDKRVPEVARACLTALGTQLLALKEQILEFDRMILAWHRSNQTSKRLHYIPGVGPMLATALVASVADPRTFRSGRNFSAWIGLVPKQHSSGGKERLGSISKQGDRYLRSLFVAGALAVIRYAKIHGTGHRPWLTALLGRRPTKVAAIALANKIARMAWAMMAKGERYKQPAALAR

SEQ ID NO: 263635 - protein, 389 aa, unidentified
MLLADRIADTEPTAIRTHLGAIFVSLELSRSTWLITSLSPGNGEKMSKHGVAAGDLGALLAKFAELQRKAFARTGKNYPIITIQEAGLDGFSLHRVLQQEGIESHVVDAASVAVPRRRRRAKTDKIDGEALLRVLLAYKRGEPRVCSMVVAPCAEEEDRRRIGREREVLLDERIRHVNRIKGLLLAQGISGYAPLRRDRRARLEALRTADGRELPQQLRAQIGRELDRLELLLVQIKAVEAERDAMLARLSQSVDENTREHPLAMLLGVKGIGEEFAAALWFECFYRSFANRRQIAAYAGLAATPWQSGSVAHEQGVSKAGNARLRKKLVQLAWLWLRHQPGSALARWFHAQAHRKVAIVALARKLLVALWKYVTAGVVIEGAALKGAA

SEQ ID NO: 263636 - protein, 336 aa, unidentified
MEKQQYFLGVDVSKATLDIAVVNEGEVVMERKIANEKRAISKFISEAKKSLSMNSDQMTVCLEHTGIYGLVLLHLLDQMKVRICVEPALQIKQSQGMTRGKNDKVDARRIAQYAFKNRLELRYWKPQRAVLQKLQALLSLRDRLIKVKVQLEVPLEEITGYLDEEIAKSLASSSKATIKGVDKDLDRVEKEIDELVRKDDTLNTLFKRTTSVPGIGKITGLHMIIASGEFERINKAKQFACYAGVAPFEHQSGTSLRGRARVSRMANMTMKKLLHLAAMSAIQWCEEIRAYYLRKVAEGKNKMAIINAVRNKLITRVYACIKHQKLYTKSAEISLA

SEQ ID NO: 263637 - protein, 429 aa, unidentified
MEEVDDAELVVERVAALDLGKAGLEACVRVPHPQRPGRRMQELRGYGTTTAQLLEMVAWLRQWRVQRVVMESTSTYWKGVYYLLEAEEFDCWLVNAREVKNVPGRAKTDRADAVWLAKVAERGMCRPSLVQPPEIRRLRDLTRYRRALVQDRTREQQRVEKLLEDAQIKISAVLSNLHGVSGRAMMDALIVGERDPRTLAQLAKGQARKKTGALEEALRGFFTDHHATILQMMLDNTDRISAQIAALDARIEEAIDPFSGQAARLAEIPGVDAVAAAELIAEIGVDMTRFPSAAHLVSWAKFCPQTHQSAGKSKAKGRGKGNPWLAGALGRIAFANSRSDTFLGTRYRRLARRRGGQKAIVATGNSILTVVYHLLSDPDASFTDLGPGYYESRINKHRRARDLAIQLQALTDQHIVIRDGKAVITDTAA

SEQ ID NO: 263638 - protein, 430 aa, unidentified
MEIVYPRSCGVDVHKSFIVAVICISESVKPKYIKKRFSTFNNQLIQFRDWLVENNCQNVCMESTGKYYIPVYNALEGHISNVVVANPKWVKAIKGEKDDNKDAKWIADLFKFGIVRSSYIPEKDIRVLREFTRYQYKLVNMRSSEKNRFQNALTTGNCKLDIVFSDIFGKSASAIVDTILSNDPYTSEDILSKVHAGCKASHEDILSAVEGIQLNQFQKARIKIVQKHMEYLDSLLDEIQHHIDLMVANYEEYIQLLCTIPGINRKSAITIISEIGTDMSQWSSHRKLAAWAGLAPGCNESAGKKKSVKISKAGVYLKPCLVQVAHAAVKDKECEYYADKFNKISKRRGKKRAIIAIARKILIAVYHLLKTGEVFNPTDMADVETTKKQRIEYVKNNLRNAFNQLSHTGLSEAEILQLIRKESTNSPQIE

SEQ ID NO: 263639 - protein, 379 aa, unidentified
MTKTMTRSPEFTVAEPCLLLAFELSARSWKLGFTTGHEQRPRLRDVPAGAVDRVLEEVRRAKARFGLPADARVISCYEAGRESFWIHRWAVAQGWTNYVVDSSSIEVNRRARRAKTDRLDLAGLLRSLTRYLHGEDHVWHVVRVPSETEEDARHLHRWRETLQQERTRMINRLRGLLTTQGVDLPVRADFLERVATVQRWDGTPLPPGLTQRLRAVWAQLTSLTRQLAEVDAARAALPAEPATTTGRWVIRLATLRGIGSIGAWSLTTEIFGWRQIRNGRELGALVGLVPAPYQSGETSHDQGITRAGNRHVRRLVVQLAWSWLRYQPTSALSRWYRTRFDRGKRLRRIGIVALARKLVIAWWRYGDTGIVPEGAVLKA

SEQ ID NO: 263640 - protein, 334 aa, unidentified
MSSVIVFVGLDYHQAFVQVCVMDATGNVLLNRRCENSARLLVNSVKPYGERVVAAIEACCGAASLADELLDAGWQVSLAHAAYVNKLKQSPDKTDWSDARLLADLLRVGYLPHVWLPPAKLRQLRHTVRYRQQLAEARRNAKLRVTALLRTHRVEYGVRRWTKRWIAAVRSCEALGTEGIWVVGQLLDEVDRLQQQLNEVEARLAALTADDPFVQKLLSYTGIGLVTAVLLRAELGDISRFRSGKQLSRFVGLSPRNASSGLKQADAGLIRAGNPQLRAVLIEAAHRLQRLDPRWATLGRQLRGRGKPGSLVAAAVANRWVRWVYHQLQDVQVS

SEQ ID NO: 263641 - protein, 405 aa, unidentified
MFCGIDWASERHAVCVLDAAGTTITAFEVAHSADGFDQLVIRLRRLSDPAQLPVAIERPDGRLVDRLLEAGHPVVPVQPGAIKAWRDAEVLSGAKSDAADAAVIAEYLRLRQHRLRVLQPFSPQTRALRAVTRTRDDLVAARVAATNQLSACLDAFWPGAKTVFADVCSPIALDFLTRYPTPESAQRLGEARMRAFLTKHGYSGRRPTAQLLARLHAAPPGLCGTVEVEARRDAVLAYVRVLRALHQSIKDLDRSVAAHLGEHPDAEIFTSLPRSGRISAAQVLAEWGDCRQAYDGPEAVAALSGIAPVTKASGKHRTVSFRWACNKRFRAAITLWADNSRHASPWAAKVYADAIARGCDHPHAIRVLARAWVRVIWRCWQDGVPYNPAKHGAARRLTETAASAA

SEQ ID NO: 263642 - protein, 354 aa, unidentified
MIIIGADYHPGFQQIAFVDTDTGEFQERRLQHREEAEKFYRDLAAQGMQVHVGMEASGQARWFERLLSEVHFELWIGDAAEIRAKRVRKQKTDRQDAQLILQLMLEDRFPKIWVPSWENRDLRQLLWHRHRMVQARTRIMNQLQAVALNEGLRCKKRLWRKHGRQQLESFRLAPWASRRRRDLLELLDGLNPTIAELSRAIEQEAEKFPEARCLMTHPGVGALTALAFVLIIGRADRFQCGKQIASYLGLVPLEDSSGNRRRLGHITKQGSSMLRFLLVEAAQVTARSIPEWRSKYFHLAMRRGRKIAKVAMARRLAIALYWMWRKGWDYERVKKFGSHAGQLETGRGVQSNTE

SEQ ID NO: 263643 - protein, 329 aa, unidentified
MSSSNNLTVVIGADVSQRELVLAWAGAQPRCQRIANAAKAIVAWLRTLPAACIIGMEATGRLHHLLADLAAAQGHSVYVLNPKHVAHYAKGLGQRGKTDPLDAAVIARYVERERDRLHPYTPPSALQRTLQDLKSQRAGLVKHCTALKQSIGASASHPDGALKRAYRASFKSLGALIAEIEKALLRAVATDPRLETKRKQLQTITGIGPINSVAMTHRFDRTPFANSDAVVAAYGMDPRPKQSGTQIGKRRLTKQGNAEDRRLIYLAAQSACKTKLFAPLYRALRDKGFTSTEAIVIIARKLLRIAFAVWTTGQPFDPSKVGKNACTKP

SEQ ID NO: 263644 - protein, 427 aa, unidentified
MQSETERLTAYRQLRTEIRSSERHLIVGLDIAKEKHYAFFGTATGQVLCKQFTFPNSKDGFELLLSRTEQLRLQHHLDTVVFGMEPTANYHKPLADYLVRQEQQVVQVSGVAVKQNRELLDGRWDKHDRKDAANVADLIAQGKCQFYEYPSLEIRQLRELLSLKHKFKKEEHGIKTRIRNNLLAKFFPEMDQFINTCQQDTFAVIGTCCAPELISELDYASFFSKVVPVYKGKRQEAHLMRIWQAAQHSIGCLSGELANYEGQLLMQQLQSVRQLIQEIEEHIAVLCSGFPEYACLLSIPGVGPDISSKLLAYIGDPNRFETVSQVIKLAGLDLSASRSGKTAMKATPLISKRGNADLRYALYQAAVVASSKNNYFRFWFARQLKGREREQGIVGILRVKLAAKLLVIAWTLMKNKEMFAYEKLNYS

SEQ ID NO: 263645 - protein, 344 aa, unidentified
MSTFAALDVSQEATAVCVVDENGRILAERKIPTCPAALSSFLARHAPGLERAGIETGPLAVWLWNELHDRGLPIICIDARHANAALKLRPNKTDRNDAAGLAQIVRTGWFKQVRIKSRISYELRSLLTAREVLVRSRVKIENEIRGLLRTFGVLFGKASKGFASRVDQIVASELDASPMMRTIIGSLAKARAALLDNIKELDRQVLHTARGDATARLFMSVPGVGPITALSVASVFDDASRFKRSSSAGAYLGLTPRRYESGEMSLSGRISKQGNKMTRKHLYEAATTMLTRTTSFCTLKAWGLRLAKRVGLKKARVGLARKLAVVLHAMWKTNTTFRWGTVAA

SEQ ID NO: 263646 - protein, 347 aa, unidentified
MVTLGADPHKQSHSLVAVDDTGRQLGAHTVPATSAGHLDVLRWAQCWPERRWAVEDCRHVTRGLERDLLNAGEVVVRVPPHVAAEGRRSVRERGKSDAIDALAVARAALREPNLPKAQLEQHAREVRLLLDHREDLVGERTRIQNRLQWLLHELEPGFQVANGALSRRPAIRRVEGLLEGRPGIVAELARELTARTAQLSTRIGELEQQLAGMMPALSPSLLELAGCGILTAAKLVGETADVRRFRSRAAFAMHNGTAPIPASSGNQQRHRLNRGGNRQINAAIHRIAVSQIRRSGRSRDYFQGRLAAGNTKREAYRALRRQLSDEVFKLMLADQRTHASSAQSAAA

SEQ ID NO: 263647 - protein, 422 aa, unidentified
MSYCPVAGIDVSKRFSDMCILSPDNKIFAQEKIYHDETSINRANALLQKAERLFFRKPVIVMESTSHYHLILFQFFSEHGYDVIVVNPLQSNSMKDFSIRKRKTDRVDSFKLAMMYRTKTLRPSQIPQTATRALRQLCRHRAELLNDVSSYKNRLTALLDQTFPGYDKVFSDVGGVTSCAVLVRFPTPTILLVEEESELVEVIAAASKSGYSFAKKKAGLLISAAQKAQTLGVHSCADETLIVCTIQMLRTLSESVLQIETAIDNLLAQIKEMRNNVSLLQSIPGVGSHSAALLLGEIGDISLFKKPKQLAAYFGLDPTERQSGSFRGTKNKLSKRGSPYARAALHMGVVNSICKRGKDSAANPVLLSYYEKKCKNKPAKVAQAASMHKLVFIVFAVLRDQKPFELKTPEQHAVEQGFVKAA

SEQ ID NO: 263648 - protein, 415 aa, unidentified
MKVVYPICCGVDVHKSFLVGTIVSTTSGVEPHYQKKRFSTYNNDLHRFCDWLLSNGCKNVCMESTGKYWVPVFNILEERGITTTIANPKWVKAVKGNKDDTKDSKWIGDLFRLGLVPGSFIPSKEIRVLREFTRYRYKLVSMKSSEKNRFQNAFTVCNVALDSVVSDMFGKSATAITDYLISADSFDAEYCTSLLQRSLKKKADSVIESIEGYSITDEQKLRMRIVRSHLDYIQSAIAEVDSAIDAMVTQHEGLIALLQTIPGVDRNSAITIISEIGTDMEQFGSSKRLCCWAGLTPGNNESAGKKKSVRITRAGVYLKPALVQVAHAAVKATDNSYYRLKFEQISKRRGKKRAIIAIARMILTAVFQMMSTGEVWNPTDLFKVDMPQALKEKQLEKAIKQATRFLEKQGVFTPA

SEQ ID NO: 263649 - protein, 377 aa, unidentified
MTTTDAATEARETVYVAIELSKKTWVLGIAHPDRDRPSIHRVSGGNIAELVSRLRVAARNNRRILVCYEAGYDGFWLARALAKMGIECRVLDPASIQVNRRARRVKTDRIDVLALLRALIATDRGERHVCAIVRVPSVEEEDARRSHRERQRLVRERTGHINRIKGLLFAQGIRDIKPKLRRTRIDFAALETAEGHPLPDRLRRELEREYARLSLIATQLREVEKERDTADAQDPVVEQKRQLLVALHGVGATSAAILAREVFARSFASRRQLGSYLGLTPSAYDSGSSTRCQGISKAGNSWARRILIEVAWLWQKYQPASPLSHWYIQRTAGQSSRIRRIMLIALARKLAISLWRYVETGLVPEGVAIAKAKLRPA

SEQ ID NO: 263650 - protein, 417 aa, unidentified
MKSAPTILHVGLDVHKETIAVALASGDGSVVHYGDIPGHLQAVHTLLKKLQKPGQELRFCYEAGPCGFVLCRHLRRKGLVCQVVAPSLIPQKAGDRIKTNARDAAQLARLFRAGELTAVRVPDETDEAIRDLIRGRLSAVFDQRRARQRLKGFLLRLGFRYPGKTSWTPAHMNYLSKLKMPHPAQQIVLEEYIGAIQSAGERLERLTTQVHGQLRDWKWEPVVRALMCLRGISVINAMTLVAEIGDIDRFNTPRQLMSFLGLVPSEHSSGNQRHQGAITKTGNGAARRALVEAAHQYRIPPRISPTIRQRQHGQPEAIRQIAWKAQQRLYARHRRLSARKKRAGVVVTALARELCGFVWAICRTHKTPTSHPPRTTRSPRTYVLKPHLKFKSGVGRQPEDRLAPPAHAEKGPTSLTS

SEQ ID NO: 263651 - protein, 411 aa, unidentified
MRRVIGIDVHRTFGEVVVWEDGRLRHAGRIDMTRTALEGFGKTLLASDEVVVEATANSMAVSRVLAPFVARVIIANPLQVKAIAQAHVKTDKIDAGTLASLQAAGYLPQIWTPDAETERKRRLVARRYQLVRHRTRLKNEVHSILHAHLIPKCPHADLFNGRGRAWLAAQPLPDDERAAIDRHVRELDRLAEDLALLDREIAQDAIDDSAVNRLMTITGVNLAVAAGIVAATGDISRFNSPQKLVSYFGLNPRVRQSGLGAAHHGRISKIGRSHARAMLVEAAWAAAKAPGPLHAFFLRIRARRGHQIAAVAVARKLTVLCWHLLTKGEDYLWARPALVAIKTRAMQLQAGHPQQKGSRRGPAYAYNIKALRDREMLIAAQAEQSYERLVTQWKPRRPKTGARAPQLGRTK

SEQ ID NO: 263652 - protein, 350 aa, unidentified
MTMVGGFDVHRKQITFDFVDDDGLVRFGQIRPATRKTLRGWLVEHCPAGDAEFALEGCTGWRYVSEELAAAGVGVHVGDPAEIAALRGPKKRAKTDRADARLLRTLVLEGRFPESWIPPAHVLEVRTLGRLYCTLMGERRAWQQRIHAQLFHHGCPPIRALLSEPGRAALAHAELSPAGRQYVDTELRRIDELSAEIEPLRTQLVNFARHQRGCQVLQRHYGIGWLCAAIIWAEIGDARRFSSSDQLVRFAGLDVTVYSSAGKRSPGHLSRQGSPELRWAAFEAAKCAARRGSPDHAYYHTLAAKHDGHNGKNPTLAVERKILRRCYHTLRELGDAAVALPDTGPQEVAA

SEQ ID NO: 263653 - protein, 336 aa, unidentified
MLYAGLDIHKNFSQAVVCRENGNVLKEGRVPTTKESISEFFSEFKEELKIAIEAGINSEYIFDFLEEQGHKVTLAHPLKTRMIAESRVKTDKIDANILAYLLRTNLLPTSYMPPKDIREIRQLVRQRIFLGRFSAKLKNRIHAELIRKGIRYERKGLIFTSDGKNWLHSLNIPFMESYLIMLGSIEDQIKKHNKKINQRGRKYEEVKLLTSIPGIGVYSALVIFSEIGNIERFNTEEKLFSYSGLIPSVNQSGNHRYYGRITKQGSKNLRWILTENVRVHLNWARANDVETKLLKYYLRLCKKGKPKNKAVIATARKLLQVIYWMLKNKTEYCVKG

SEQ ID NO: 263654 - protein, 351 aa, unidentified
MIVLGADTHKRSHTIAGVGATTGELVGERTVQVGRAGFAALLAWARELDGERVWAIEDCRHVSGSLERFLIARGERVLRIPTNLMAETRKSARQRGKSDGIDAINVARAALREGLATFPAAHLDGPELDLRLLVDHRERLVNHRVELNNTLQWHLHDLWPELELPGGALFSRKWSTRIARRLTRAEQTMRVRIARDELRRLRELTDTIKKLAREITQLVEQIAPQLLAEPGFGPLIAAKLIGEIAGAQRFATDAKLARAAGAAPIPASSGNTRRQRLDRGGNRQINAALHRVIVTRARCHQPTRDYIERRRQEGKTTREAIRCLKRYLARQVWNLLRAPTPAMALTTPSIS

SEQ ID NO: 263655 - protein, 419 aa, unidentified
MNYVGFDWASRAHDVTVLDEAGGVLDRWAFPHSETGWVTTLDRLARHGSAAEVPVIIERTCGLIVDRLLAAGHPVVPVHPTAFYAARPRWGASGAKSDPGDSYKLADYLRTDGHRLRRLTPTDPGLHELQALVRLRDDQVRARTAATNQLTAILDNYWPGPKQLFMSLASQIALAFLTDYPTPTSAAHLGEARMAAFCRRHAYRGGKSPAELLSRLRAAPVAPVGLPPATLAAMVTAQVTVLKTPQTVISDVERLIAVRVVAHPRSNLFENLPGVGMINLAQLLAEVGPILDRVDSAEQAATECGAAPVTRSSGQTRGVYFRWAANTRARKAITSFAHNARMQDDWAAALYADARARGKRNPHATRIVARAWLRVIWACWTSGQPYNPDRHHSSRFLHRCHPAGAQARSRWSPPPEERS

SEQ ID NO: 263656 - protein, 338 aa, unidentified
MSVSLPLFVGLDYHQDTIQVCVMNRQGRVLRNRACVNDWQALRRIVAARGRPVRAAIEACCGAAHLAQELAEKAGWSVSLAHPGYVARIKQSPDKSDFSDAQLLADLIRVGYLPTVWLAPEEIRELRRLVRFRGQLVDERRRVKLRLRGLLRDSRVAAPEARAWTRAWLQWVGQEAEFSPGSQWIVRRHLARLEQLGGEIREVEKELDQWAEGDAVCRKLRQLAGIGLITAVTLRAEIGRFDRFSSGKKLSRFCGLSPRNASSGSRQSDSGLIKAGNPQLRSILIEAAQRLMRHEPRWQQLARAMGRRGKPWNVIVAAVANRWVRWLHHEMQPSRLAG

SEQ ID NO: 263657 - protein, 417 aa, unidentified
MERFAAYISIDWSDQKHDVCLVDAVTGKKECLVLKHSPETLDEWAISLRTRFAGQQIAVCLEQSRGPLIYALLKYDFLILYPINPTTLARYREAFSPSRAKDDPRDAEYLVELLIHHRDRLKAWLPDDEKTRTRQLLVEHRRRLVNDRTRISNRMTALLKGYFPQVLQWFDDIRTILVCDFLLCWPTLDSVKKVKPTTLEKFFREHNSVRRETNENRIAAIKDAVALTTDRAVINSSVVMIKALASQMKATIEAIGEFDQQITALCQTHQDFFIFDSLPGSGTVYSSRLLAALGTDRERWACVDELLCFSGGAPVVERSGKSERIRWRYFCPKFFRQSFIEYAGESIKHSFWAKAYYSSQRAKGKSHQAAVRALAFKWIRIIWRCWQTNTPYNEVTYLESLRKKGSPLLTFAANDLS

SEQ ID NO: 263658 - protein, 451 aa, unidentified
MANSKTRADRIISRQLSHCTVEAAHLSAVGIDVHHDQLICCFQKLDPIAGELTSEHRSFGTTIPQLLEFAAWCRVRESSVILMESTGVLWFSPYRSLEDVGFDNDTLALVNARDVKAAVGRKTDAQDAKRLAEYARLGKFHKSFVPSRPFRDMRMVSRDIIRLSDDISRQKNRYNKNLNSVGCRATSVFSDVHGKAAGKILDAYIRGDRDFEEIVRSARKQLRATQQEILEAINFAMSDALRELLRSSYEHLQYLIARRDSQIALLERMQAPYQEYIDRLMTIPGVKELSARLLFCEFTNEQQSFPDAAHFASWLGLCPGNNKSAGKSSSGKTPKGNRWARKTLTEVAHGIGLMKRGALKALFQAFKERRGARRAVVAIAHKVAMIMFAMIWDGSEYVETTCSALRDTRVKRLLQTSKNLREQRTVITLSRQIVDKDTGELIGQLSVDAAT

SEQ ID NO: 263659 - protein, 352 aa, unidentified
MDASRFPATMQSPTKEGSMTLGLLAIDLGKRSFHLYGIDTDGVVLSRKVSRAKLPEVVASLAPTTIAMEACASAHYWGRNWLAAGREVHLINPRFVKPFVKGSKNDAADAEAIFEAAMRPTMRFVPVKSTDQQDLQSLHRARDRLICQRTALINHTRGLLAEYGIVLAQGPWRFTAQAPAAIAGADLSDLTRMILGELLDQLHDLERRIEKLGSTMVTHCRTNAACRRLAKLPGVGPVIATAIVAAVHDGRQFRSGREMAAWIGLVPRQYTTGGKPRLGGIGRRANHYLRRQLIHGARAVISRLSKHDDRQSTWLKALVARRGFNRTIVALANKTARIAWVLLSRKEEYAAT

SEQ ID NO: 263660 - protein, 343 aa, unidentified
MQTIATIGLDIAKSVFQVHGVDAGGQVVIRRQLKRRSVLAFFQKLPPCLVGIEACASSHHWSRELQALGHTVRLMPPAYVKPYVKRQKNDMADAEAICEAVTRANMRFVPTKTPEQQSCLMLHRTRHLFIRQQTAVINSIRAHLAEFGIVAPVGRRGVTELLHVVADPSDKRVPEIARACLAALGTQLLRLKEQILEFDRMILAWHRSNQTSKRLHYIPGVGPMLATALVASVADPKTFRSGRNFSAWIGLVPKQHSSGGKDRLGSISKQGDRYLRSLFVAGALAVIRYAKIHGTGHRPWLTALLMRKPTKVAAIALANKIARMAWAMMARGERYKEPVALAR

SEQ ID NO: 263661 - protein, 379 aa, unidentified
MTKTMTRSPEFTVAEPCLLLAFELSARSWKLGFTTGHEQRPRLRDVPAGAVDRVLEEVRRAKARFGLPADARVISCYEAGRASFWIHRWAVAQGWTNYVVDSSSIEVNRRARRAKTDRLDLAGLLRSLTRYLHGEDHVWHVVRVPSETEEDARHLHRWRETLQQERTRMINRLRGLLTTQGVDLPVRADFLERVATVQRWDGTPLPPGLTQRLRAVWAQLTSLTRQLAEVDAARAALPADPATTTGRWVIRLATLRGIGSIGAWSLTTEIFGWRQIRNGRELGALVGLVPAPYQSGETSHDQGITRAGNRHVRRLVVQLAWSWLRYQPTSALSRWYRTRFDRGKRLRRIGIVALARKLVIAWWRYGDTGIVPEGAVLKA

SEQ ID NO: 263662 - protein, 392 aa, unidentified
MDSPPPRHHSATVVFEEANGSEGETMKKHSSKHDSLSSTDVELCTTICVDLAKQVFQLAGEDATGRVIYEDRIKSRQAFHDFLLRLPTTVAVLMECGPGAQAWARLLQAKGNPVRILPAQRVAEHRSGAKNDRNDCYAILRAGRDTSIASIPIKSTTALAIQALHRIRRGNIKRHTALGNQIRGLLLEHGVCMPQGDAAINKHVPQALEDASLPLPDLLRELLDELLMDWLSLGERIVALSRRLEATAQEDKVAQRLITIRGVGPIIATAIVAKQTDPSRFASGRMYSAFFGIVPDQHSSGNKIRLGKMSKRGDGYIRSLMIQGAHAVLSQLRPDSDQPDDRRLLRWLSRLGRKEAAIRLANRNLRIIWALLQSDQVYQRKPNEKPEAAMSL

SEQ ID NO: 263663 - protein, 427 aa, unidentified
MRSIALDVHRDFCEVAIKDESGLRLVGRVKSSVSELELFAQSLAPDDEVALEATGGALQIARILEGHVARVVIANTRKLSAIAESKVKTDKLDAKTLCELLAAGFLPAVWSPDEFTRALRRRLQRRSKLVRSRTRAKNECHAVLARNLKGRPPMTDVFGKAGRRWLAALELPADERETVDCCLREVDFLDNEVGLIERKLARQAMSSQEIRRLMSVPGVSLVSAAAFVAAAGEIHRFSTPKKLVSYVGLDPRVRQSGEGPARHGHISKQGSSEARHMLCEAAWVAVRTPGPLRAFYERVRARRGAQIALVATARKLGVLFWHLLTREEDYAFGRPSLTRRKLRALELKTEEGWRRGRYSGPRVHETKAEREHEREFSDQVETAYRRLVADWQPKPGKSGAGATRGRASSKPTSGKQRGRASVPNSAL

SEQ ID NO: 263664 - protein, 317 aa, unidentified
MNPPPIFVGIDISKSYLDLATRPTSKVWRVEHTEAGRQQVVTDLQALQPELIVLEATGGLELPLAAALAAAGLKLAVVNPRQVRNFAKALGILAKTDALDAQVLAHFADAVRPAVQPLSDEATQVLAALLARRRQLVEMLTAEKNRHASALPAVRDHVQRHLTWLEHELADLNTDLDQRLRQSPVWVAKQKLLRGVPGVGPVLTLTLLADLPELGSLDRKKIAALVGVAPLNDDSGQSRGRRLIWGGRAEVRNALYMASLSALRFNPIIRTFYQRLRQAGKKFKVAITACMRKLLTILNAIIRTNTPWQEKPTGVAA

SEQ ID NO: 263665 - protein, 362 aa, unidentified
MEYFCGLDIATETTALCVVDVDGTVVCQASVPTDPEAIYRHLKPYLAKLKRLGHEAGSLSPWLHPELLARGLPAVCLETHHVRNALKAQRNKTDATDALGLAHIVRTGWYKSAHIKSENGYRLKLLLTQRRNLKRKFLDIENSIRHSLKAFGIRLGAVGRVRFDTAVRQAVAGDDLTANLMDAMLTARAALWTQYTKLHALVVRFVATDEVCSRFMEIPGVGPVAAMTFMTAIDDPSRFKRSRDVAAYFGLTSKRWQSGTSIDVQGRISKAGDGDVRRALYEAASAMLTRFKGKDKVKTWGQEIAKRGCHNKAAVAVARKLAVIMHAMWTDGTCYVGDPSASASQRALKTNDKRKRLLGALA

SEQ ID NO: 263666 - protein, 366 aa, unidentified
MIVIGADTHKATHALVAVDAGTGRIRGGREIKAEEPGHLAAVRWARELDDDRAWAIEDCRHVSRRFEQALLAAGERVVRVPPHRMGASRKGEREPGKSDEIDALAVARAVVKDGVECFPVAYLNDQSMEIRLLFDHRADLVAERTRIVNRLRWHLLELSPELERSCKRGSLSRSRPLGRVERGLRKLPAGARVRVAREQVRELRRLSREIDALHCELGALVRAHRPQLLAELGCGALTAAILIGRTAGNERFRSEASFALQSGTAPIPCSSGQRIQHRLNRGGDRHLNHALHIIAITRAQRDPATKEYLDRKEAEGKTPKGALRALKRHLARHFHRLLAEPAADQQRAAVDPNSTGVAPSPMVCIS

SEQ ID NO: 263667 - protein, 375 aa, unidentified
MSKVRWIGLDVHAETIAVAVAESDGDTRALGVIPNRGDSLRRLVKKLGPVESLRACYEAGPTGYGVYWQLRQLGVACEVVAPTLVPVKAGDRVKTDRRDAVRLARSYRAGDLTPVWVPDVAHEALRDLVRAREAAKKDQLRARHRLGKLLLRHGRRPPAGVRPWTDRFFLWVHRDVRFEQAAQEATLWDYLHEVEHVAERIGRLERAIEDVAKAAPPPMRAVIEALQALRGVAQLSAVTLVAELGQFGRFGTARQLMGYSGAVPSEDSSGERTRRGSITKTGNAHVRRVVVEAAWAYRHRPAVGPTLRKRQAALSEEVKAITWKAQHRLYSRYRLLSARGKCPQRVVTALARELLGFIWAVGVTVEEGAAGHRAA

SEQ ID NO: 263668 - protein, 422 aa, unidentified
MLHPKMRYTYVGIDSHKDTHTAVFLDCFFEKLGEITFGNLPSNFSVFLEESEKYRLDGTALLFGLEDVSLYGRGLTQFLMTNNHSVKHVNANLVAGERKNQNYEKSDSADAECAARVLISKFSKLPGAEEDGRYHVLRTLVVRRDFIAKGKVALKTYLHSLLTIDFPNYHKFFSEIDGKTSLAFFLKYPSPDTLKDVSAEELSLFLAEHSNNKLGLKKAIQILLAIDETPPVHEIRNKTVRATIQQLQSNLQELENIEFDLATFYNEFGTTLTSMSGLDLASASKLLSCIGDIKKFPTPAKLARYAGVAPASSSSGKNNVQYASRRGDRELNNQFYGLATRLISTYDAKREEGAECRARNPFFYDYYHRKRAEGKTKSQALKCVQRRLVNIIWTMLSSNEAYVNPPMIAVEKKETKKSKPNK

SEQ ID NO: 263669 - protein, 406 aa, unidentified
MGYHTEAFIGVDTAKLRNAVAVAESGLNGQVYFYGEIDNTEAAMRKLIRKLESKYKKLTFCYEAGPTGYGLFRLIKELGHNCSVVAPSLVPRKPGDRVKTNRRDALNLAKLLRAGQLIAVWVPDERHEAMRDLVRAREAAHIAYTRNRQQVSAFLLRLGRYYPGKKTWGKAHLKWLAAQKLDNYEQRIAFEELLLAVRQSRERIERLEQAIRDSLPEWSLAPVVEALQALRGIDLISAVVFMSEIGDLSRFASPRQLMAFLGLVPSEWSTGESVIRGPITKAGNRRARRILVEADGAIDIRLGWGKKSRKKSRLCRGPSVRLPGRHRHDCAAVSASSPGKASGQTTVTTAVARELSAFIWAINRELARKPCSEQKSQPRPHQACRRAQLSQAQALRVAAERAASLE

SEQ ID NO: 263670 - protein, 489 aa, unidentified
MSTASQQPAGRKARKIHAKALKRKARGSQRQQGEGNQPRSELRITNPDAAGIDIGSQVHYVAVPEGRAERSVRSFGAYTAQLDELVQWLKECGVKTVAMESTGNYWIGLYQKLEAAGFEVLLVDARQAKHVPGRKSDVQDCQWLQQLHTYGLLRAAFRPEDSICRLRTLERHRKNLVEAAGMFVQHMQKALNEMNLHLHHVLSDISGYSGLAILDAILAGERDPRKLASLADYRVKKSQAQIEAALTGDYRPELLFVLNQSLEGYRQIQQQLAQCDLAVEKQLAQIADCTNPSQDSAPKQPSPDWASSKRGKTKAKDALEVSLAGHLKRILGVDLTTIPGLNVVAILTLVSEIGTNMAKWRNEKAFVSWLGLNPNNKISGQRVLSSRTRKVVNRAATTLRLAAMVLGHTNTPLGSFYRRKRAQLGAPKAITATARKLGCLIYRLIKNGQGYQETDLQVYELKYKQQILNSLRKRANSFGFDLVEVPKAA

SEQ ID NO: 263671 - protein, 480 aa, unidentified
MQRRLVGIDLGIASAHTVRVRDEAGREVCRRRCMPTVDSLTVIEQAALAGAVPGTRLEVVMEPTGPAWLPIAVFFTARGHLVFRVSSAKAADLRRFLKRHAKSNGIDADTLARLPLIDPDGLRPLELPDAAAAALDRRVRACDRLTMAASEHKVRIKDLVRQVMPCTPLTGDLGKTDLAVLEQYADPRALLRLGRDGLTALIVTESKNHQGQARAEQWLAAARAAVELYGDHPAVAFTDLADEIATEVRLLRAIDAELAAHAAERESCYRWVDPMQLARSLPGLAEVGGPAMTAVIGDAARFPTAAHFKSYLGLAPRASETGDTDRKGQPMSKAGSRLARATLIRAADWARKQDPQLAQVYHQQMVERGAEHLKASCVVAGRLAERLWTVMRRRMPYVICDVDGTPVTGQQAKQLIAEQWTVTEQIRRRRRSNKNSRAGKAPQQALTGHDRKDAQGVRTRRPSPHESSTAQSRTVKPTHA

SEQ ID NO: 263672 - protein, 317 aa, unidentified
MNSEIGWVGIDVSKSTLDVYVSFPEQAFSVAHDPDGIRRLIETLQPQQPRLIVLEATGGLERTLVAELLVAPLPVAVVNPRQVRHFAQALGYLAKSDRLDARVLARFAQAIEPTPRALPAADALALADLLARRRQLVEMLTMEKNRLHAAHNAAVRLDIQTHIDWLHQRLKATEQGLREAVEASPAWQAKAELLGEVKGLGDVTVLTLIACLPELGQLNRKQIAALVGVAPLNRDSGTLHGRRCVWGGRASVRHVLYLATLSAVRYNPILKAFYTRLREAGKVAKVALVACMRKLLTILNAMLRDQAHWDEHHGEIA

SEQ ID NO: 263673 - protein, 349 aa, unidentified
MTVCVIDKATGETFHRTLPTSRPDDIRDFFRGLVKFQAVVEATATYEWLWELLEPLAERLVLAHPKKVKVISESMQKSDKRDAYFLAWLLSQDAVPEAHRPTPRQRAYQQLVRHRVFLVRERTKVLVKVQNYFAARNINHGRLFQTVDPRKLATKLPPAERLCVQELSELFEELEERLGRAGKELAKFREAAPPAEKKAHEIVCSVPGVGDVTADVVLSTIGPVARFRSVRKIASYSGLIPGLRASDKTRKELPITKEGPRLLRWALVEAAWRCIRSSRYWEDQFERIARRRGRKKAIVAVARRLIGVIFALLKKGESYRERGFDLRRLTHLYLCRRKVRAAEAVSGAG

SEQ ID NO: 263674 - protein, 375 aa, unidentified
MSDHSEAFVGLDTSKLRNAVAIADGDRGGEIRFYGEIENTPAATAKLVRKLAAKHQRLTFCYEAGPTGYGLYRQITSLGFECVVAAPSLIPKRPGDRVKTNRRDAMSLAKLLRANDLTAVWVPDGGHEAIRDLTRARETAMLDLRTKRQHVSAFLLRLERPYPDGKKTWTKAHMGWIAGQKLDYPQHRIVLEEAMLAVRQAQERQERLEQAIAAAVQDWSLAPVVTAFMAMRGIDLIAATTLLAEIGDLSRFQTPRELMAYLGFVPSEHSTGDEIRRGPITKTGNRRARRMLVECSWSYLHPPRVGRAKQPKVDAAPPAVREIAWKAQHRLYRRYRALIRKGKRSTVAIVAIARELAGFIWAVARAATTARAVVA

SEQ ID NO: 263675 - protein, 423 aa, unidentified
MMKLKYSICCGLDVHKNVIVATIVITNKDGISEYLQKSFSTINSDIQRFHNWLIENNCYHVCMESTGKYWIPIFNYLENDIDVCLTHPKYVKAIKGKKTDKKDSKWIADLYKFDLVRCSFIPPKDFRQLRELSRYRFKLVCMKSSEKNRIQNCMTISNVGIASVLSDPFGKTATEIISYLLEHTADSMDEKAVRKLIKKGAKSKSDEIIEAIKGYTIETDQAKKLELARGHLEYLDDMITQTEVELYVRIKPYYEFVEFVSTMPGMTELSSTIVLAETGVDMDIFDDAKHLCSWCGLSPANNESAGKKKSVRIAKAGDYLKPMMVQCALAAIKSKKQPYFAIKYGRIKKRRGHKKAIIAIARMMMVCIYHMVSEKKPFTPTDYEELMDPQNHVESVVLNENNVFAYLESLGYDSSKLVKRNDN

SEQ ID NO: 263676 - protein, 408 aa, unidentified
MTVVGIDVSKGKSMVAAMKPGGELVTTPYEVKHSDIELSRFALDVLCMEPDTRVVMEATGRYHEPVAALLHSEGIFVSVLNPLLIKQSGAGSLRKVKSDPKDALKIAKYGLDNWSTLREYTPMEAIRQQLKLCARQCDLYSKNIVMLTNNLISLSDKTFPGVNELFSSPEKENGHLKWVDLYRTFWHCDCINRMSPDAFEERYKKWCKRKGYHFSADAADALYAASCGLYTTLPRDNNAKLLVTVATDQLIALRENQSKLETEMLNLCKQLPEYETVMDMYGVGKSTGPHLMAELGDIRRFPHRSSIVAFAGVDPGVVGSGKMQLSSVATSKRGSPQLRKALFQVVSAYVKRKPENEAVYQFYAKKRDEGKPYYVCTTAAANKFLRIYYARVKECLNAAESATQAEEG

SEQ ID NO: 263677 - protein, 357 aa, unidentified
MSTRKMQNYIVKGKKISIGLEDSKTTWKISVRCEGREVHYTSMDARKDVLISHLKTKYPECDITLIYEAGFKGFGLYDFLMEEGIKCIVTPPNKVTQEKHTSVKTDKVDARRLATVLEKNDYKSCAVPDKERRDDRTISRALTQTQQEITRVKNRIRKFFDANGYAENFPAGAWSEKQYSEARKTVLPTALQMTVDAYWTLVDTLKQIRKDLLKQVMVLSKKERYGESVRIISSMAGVGKLTAIRLILEWGDDIGTRFKTGQSLACFAGLTQSEFSTGNTVRKGRITGQGRGCIRAWLVQCAWICIKRDPAMLEAFNRIAKNTASKKKAIIAIARKLVVRMWTCLHEKTEYVVGVVE

SEQ ID NO: 263678 - protein, 425 aa, unidentified
MNLLILKGVPMSLKIVYKICCGIDVHKTFVVACIASTNDIGVTSYESHRFSTYTSGLKTLLQWLLNRNCKDVCMESTGKYWIPVYNILENDCSIVLAHPKYVKAIRGKKTDKKDAKWIADLFKHDLVAGSFMPPADIRQLRDLMRYRFKLTCFQSSEKNRLQNCLTVSNIQLGNVVSDTFGKSAQAILDKLLENPADTSFDLEPLVYKSLKKKLPQLRDAIDGYITPEQAGKLKVIKSHYENLESRKAELEELILALAAPYQQELAILQTAPGIRSDFTAIGIISEIGTNMEAFPSAKHLCSWAGLTPTNNESAGKKKSVRVSKAGCYIKPLLVQCANAVVTSKKHPEIRNRYLRLKKRRGHKKAIIAIARMLLTALYHMLKNGENYNAELYRKSYLPPVDREITVEQAIIIARNQGYKIKSATA

SEQ ID NO: 263679 - protein, 314 aa, unidentified
MAMHATRPVIGIDTAKEELVIQHDDEKRHLAVDNTPAAIRQWLAGLPKGCDIAIEATSTYHMEITERAHAKGHHVYVVDGYRLKNYREGVGGRAKTDLTDAQLLARYLRKEKDELRRWMPPPKAYRTLQSLLRRRAALVKARTALRQSLSAEPLLKTALATLLKQIDRIDHLIQKRLREAAHAAGLRDQVQRCQAIDGIGELTATALVMAFLRGDFRNSDAFVAFLGLDVRVRDSGKLKGKRRLTKQGDTEVRRLLHCSAMSGARHPTWKAFYQRYRDRGLKTTQALVILARKLARVAFALMKHQENYCAPRLS

SEQ ID NO: 263680 - protein, 411 aa, unidentified
MEILTQCACGLDVHQATVVACLLSILNNGKVKKQMRTLGTKTRELVELRNWLQSEGCTHVAMESTGVYWKPVYAILEEGPFELTVANAQHIKHVPGRKTDVKDAEWIADLQLHGLLKPSFVPPKPIRQLRDLTRYRRKLVEARSAERNRLLKVLETANIKLSSVASDVFGVSGLLMLEKLAEGKAEPAEMAQLAKGRLREKIAELEPALEGRMEEHHRYLLQLQLRRLRDLDQDLKELDARIQDKLQPYRQEMDLLMGIPGVDWGGAAVIIAELGPDMKGFPSAAQVSCWAGLAPGNHQSAGKRRQARVTKGNIHLKTALVEAAHAASRAKGTYLRDKFYRVKARRGAKRAAVTVAHKILVAVYHMLSKKVPYKDLGEVYLDKLNQHQLTRNLVRRLERLGYCVTVQPQAA

SEQ ID NO: 263681 - protein, 426 aa, unidentified
MSERDYNKRVAKRQRIRSTTLVVGVDVGKAYNAVGFMNKEGKVLGSCAKVYNSCEGFEEFMKRVEDLKERYGFRDVLIGMEPTGHYGRKLAYFAKEHGYEVRFIRTTALKHHRELDESASAKSDQRDALTIANITREGKYIDTVIEDGVLRQLRTLAKARERLLRYSVSAKNSLHAALDDYFPELHELFWSMGSRSLWAVLDRYPFPEDVRSIKVSTLEGLIVQSSRNRAGSLKKATALYQAATRSIGLRSIGRADRYRVQMCLEEVKRTVLALKSMDQQMKGMLKEIPAAPYLLSIPGIGALSAAVFLGELGDPAHFHHARQIVKYAGYDPQESDSGSWVSRKFISKKGRWLMRKYLFFMSMRVVVLTHYFKTYYERKLETKNRVGQLPRRKEILCAVAIKLIKVIFALLRDKRNFEDTITCSVE

SEQ ID NO: 263682 - protein, 354 aa, unidentified
MTNYTIGCDAHKNYSIFAVMNEAGQVVKHKRIDHHPGAIQAFLGRFPIGTPVALESIGNWYWIVEEIEIAGCLPLLTHPAKAKLMMGNVNKTDKLDAAGLATLLRLGSLPTVWIPPRKTRDERELPRTRMALVRMRTALKNRIQSTLAKYNRSISEASDVYLPKWRPDLEAAIAALPPETARCVLDELTILDRLIQQIKQMEKRIKATIQVTPSTQLLKTLPGVGDTLAIVIEREIGSIKRFSSAECFASYAGTVPTVHSSGGHTRYGHLRKQSNQYLKWAFIEAANTIVRHHRSPSWHDKHVVRLYRRIRSRKGHFIAVGALARHLSEAAFWVLTKNEVYREPARKKVSPKQG

SEQ ID NO: 263683 - protein, 490 aa, unidentified
MSRRKQQSTFERLTSGKLNRKQRKELIRRIEAEDPCLEIVYRNVAGIDVGNESHMVSVPADRDAKPIREFGSGTKELQEMADWLQACGIEWVVMQSTGVYWIALHDVLEKRGFRVCLTNARDTKNLPGRKSDVAEAQWLRRLYSYGLLRNSFRPPEQIRSLRMLWRLRDRHVKEAGEEIQHMQKALTPMNVQLANAISDISGTSGQAIIRAMLPGERDPYQLADLRDYRVRATREEIARSLEGTWNEDLLFELQQAADRYDFCQRQMAECDRRLQRLLAALPDAPPRGPEPDGDPAAPSGHHLSGNSASRPHQEKKVRKNQPAGLDLQAELTRICGVDLTRIDGVKVMTVQTFVSEVGVDMSPFRTEDHLVSWLNLSPKRKVSGGKLLKHERVPNQNRAAAALRMAASTLRESDSYLGARFRSLRARLGQQSATKAMAAYLARLIYRLLTKGHQWVDRGAQEFEKRRQTRQQHTLQRLAAAMGYQLLPAD

SEQ ID NO: 263684 - protein, 359 aa, unidentified
MREKISQNSFKGQAIYIGIDVHLKNWKVSVMSENVHYKTFSSPPEPARLSKYLFEHFPGATYHAAYEAGFSGFWLHKELTNLGINSIIVNPADIPTTDKERKQKEDKRDSRKIVKTLQAGQLRGIHVPSERIQQDRMLLRTRDIIVRDITRNKNRIKGRLYFMGIQYPDRFATTSSHWSKPFVQWLESIKLEHESGRAGLNSILEMVNHQRRSLLKVTRAMQVLSKTAFYEENVKLLISIPGIARLTAMKLLTELDNIDRFENFKHLCSYVGLVPSTNSSGENEVVNGITPRKLSSIRVALVESAWTAIRNDPALLSSFQRHCKRMNANRAIIRIAKKLLNRIVYVLRKKEKYEKGVVR

SEQ ID NO: 263685 - protein, 368 aa, unidentified
MLYLGIDLHSKQLTISLRGEEGEVLLRRQVSTRGEEPRKFLEDVARRAGEAGYVAILEVCGFHDWLAELLPACGCREVVLIQAEKRDRRKTDRRDAQTLSEILWVNRDRLPAGRKVQGVRRVVPPTPEDRDDRRLTQLRRNSGADLTRVINAVRHILRRLNFEQHCPTKGIQTVAARHWLEQVVKLPDLDRLEMDQLLARWKLLDEQQKQLDRRIRERSAVHEQVAVLKTVPGAKGYTALALASRIGDINRFPTPRSLANYWGLTPSCKNSGESKRRLGSITKEGSALARFLLGQLVLHVLRRDAGMRAWYQRIKKRRGSKIARVAVMRRLAVIFWHMLKKRQPYVLCADLKKPPPRRRTAAAQASPP

SEQ ID NO: 263686 - protein, 411 aa, unidentified
MQVVHARCAGLDVHKRTVVACVLLTQPEGTVERDVRTFGTMTADLLALADWLAARKITHVAMESTGVFWRPVFNLLEEGRTVVLVNPQHMKAVPGRKTDVKDAEWLADLLRHGLLTSSFIPPQPIRDLRELTRYRTTLVQERAQEVQRLHKVLESANLKLAAVATDVLGTSGRAMLEALLGGEQDPAVLAELARGRLRAKLPALRQALEGRVRPVHLVQARVLLAHIEFLEGALAELRGEIERLLSPFAEAVALAQTLPGVGQTAASTLIAELGTDMSRFPTHKHLASWAGVCPGNKQSGGKRMGGKTTQGNPWLRAILGEIAWSIAHTRDNYLAAQFHRLARRRGIQKAVVAVAHSVLVILYHMLRDHRPYSDLGADYFAQLDTERLQLHHVRRLEQLGYTVTLTPAPAA

SEQ ID NO: 263687 - protein, 415 aa, unidentified
MKVVFPTCCGVDVHKTFLVATIITTPTDSLQPHYQKKRFSTFNSDLNRFADWLLEHNCLDVCMESTGKYWVPVFNILEKRGIRVVIANPKWVKAVKGNKDDTKDSKWIGDLFRIGLVKSSFIPDLHIRILREFTRYRYKLVSMKSSEKNRFQNAFTVCNVALDSVVSDMFGKSATAITDYLTSDESFDTEHCVSLLQRSLKKKAEQVLESIEGFSIADEQKARIKIIREHYDFIEEMIAKVDTCVNEMVAKYEGNINLLCTIPGIDRRSAITIISEIGTDMSQFGSSKRLCCWAGLTPGNNESAGKKKSVRISRAGVYLKPALVQVAHAAVNDNDHPYYKLKYERIAKRRGKKRAIIAIARMILTAVYSMFCTGEVWNPVDLYKVDMPEHLKEQQLAKAIKQATRFLEKQGLSVV

SEQ ID NO: 263688 - protein, 314 aa, unidentified
MTQSGPVVGIDVAKAELVVAVRPGDDRWCVPNDARGLARLRARLRQLAPALVVLEATGGYERAAVAAIAATQLPVVVVNPRQVRDFARATGQLAKTDRIDADILALFAERVRPTPRPLPDAVSADLDALLLRRRQLVGMLGAERNRLEHAAGPVRQDIRQHIRWLERRLSTVDQDLDDMIQRSPIWRAKDNLLRSVPGVGPIVSRTLLGELPELGLLNRKRIAALVGVAPLARDSGTLRGKRIVWGGRAPVRAALYMSALVAAHHNPVIRAFYRRLLAAGKPKKVALTACMRKLLTILNAMLRTNTAWSPCEIT

SEQ ID NO: 263689 - protein, 404 aa, unidentified
MIAGWDWSGETHDVSVIDADGRLLEHRRFVHTEAGLTDSLRFLRRFAVPEELPVAVELTTGLVIDRLFAAGHPVYPVHPRSFNAARPRWGSAKSKSDRADSYQLADYVRTDMARLNRLVPMSLAARELRALSRARDDQVEARKRALRQLKAVLETYWPGPLQLFSRLDTQIAMQFLDDYPTPEAAARLGAGRMALFLSRNRYPGSKTAGELVERLRSAPVAAAGLDPAVLAGIVHAHVRVVRTLAAGVADLSRAVEAALTKHPKTPLLATLPRVGRVNLGQIMGEVGPILERAKSVDQLAAEAGAVPVTRESGKVRGVSFRWTVNSRARKALDRWADNSRKDSPWAQEVYLRALQRGKRHPHAIRILTRAWLRVVWACWHTDTPYDPARHGAIQRRAEVIADAA

SEQ ID NO: 263690 - protein, 387 aa, unidentified
MIYVGIDIAKQKHFAAAMTADGEVLIQPFGFTNDSEGFSLLVSKLKILDQENFLIGLESTSHYGENLICYLYNMGYHIAVINPIQTATLRKSNIRKTKTDKVDTILIIKSMILNNHRIFTQDDIDSIRLKSLCRFREKTKKSKARLKIQLVSYVDIIFPELQYFFKSGLHINTCYELLKKHSNPNDIAALHLTYLGNLLKKASHSRFDKEEAIALKGLAKSSVGTGDAHLSIQITQTISQIELLEKQINELDESIKSIMLEMDSVILTVPGIGFLNGAMILGEIGNISRFSNPSKLLAYAGLDPTVNQSGQFNAKTTRMSKRGSKLLRYALINAAWNVSLNNKTFNDYFMLKKFQGNSHYAALGHVAHKLVRVIFKILKDNVAFNLE

SEQ ID NO: 263691 - protein, 346 aa, unidentified
MKITTIGIDLAKEVFQIHGVDEHGKAVLRKQLRRSEMAKFFTHLEPCLIGMEACGSAHHWARKLTGFGHAVKLMAPQFVKPYVKTNKNDVADAEAICEAVGRPNMRFVTVKNVEQQAILSVHRARQGFVKARTAQGNQIRGLLSEFGFVIPQGIQSIIRRIPEILEDADNGLPCTMRRLVARLTDNLKEMNRHVTELEAQIMLWHRQSESSRKLAEIPGLGPITASAIVATVGDAKEFRNGRQLAAWLGLVPRQNSSGGKQILLGISKRGDSYLRTLLIHGARAVIQFAEKNRPSENWLRKLMARRNKNVAAVALANKNARIIWALLAKDRMFRPDYASTALAVSA

SEQ ID NO: 263692 - protein, 383 aa, unidentified
MTGTEPHAWETGLMDTMTYVGLDVHKATVAVAVAEGGRGGEVRQLGVFENRSEILTKLAARLSKPGRCLSFCYEAGPCGYGLHRLLTGGGHDCVVVAPSLIPVKAGDRVKTDRRDALMLAKLHRAGELTPIWIPDAAHEAMRDLVRARATAGRVLSKARQHLQSFLLRHDQIYRGARAWTLAYRRWLTTVRFAHPAQQIVLQDYIHAVQDAEARLDRLTRQIEELLPSWAMAPVVAALQAMRGVALVVAVTVVAEVGDFRRFANARQLMAYLGLVPSEHSSGTSVRRGGITKAGNVLARRVLIEGAWTYRMPARVSRKLHDRNEKLSPAIRDIAWKGQVRLCARYRRLAAAGKPRVVVTTAIAREMVGFIWAIARIAQPTLQG

SEQ ID NO: 263693 - protein, 396 aa, unidentified
MAGPLKVVGGVDPHADTIHVAVITLTGKAVADREFATTADGYRSATAFLTATGAVVRVGVEGAASYGAGFTRALKAAGIDVVDVDRPARFDRRRAGKSDRLDAYHAARAVLAERSNPVKGPAIEGVRALHLARRSAMKAQTAAMNQMIAILVMAPDTVRARYRRLHGDRLAIALTRSRGALDPVSTDTLFALKALADRYRQLAVQVDALTTRLDHAVRQASPALRAAFGVGPDTAAQLLITAGSNPERLYSECSFAALCGSAPVQASSGKTHRHRLSRGGDRAANSALHRIALVRMANHPPTRAYVARQTANGHSKREIIRMLKRAIAREIYRLLTHPADVPNYADLRAVRQAKNITVTLAARHFDVWPAVISRLERGLRRDDDLARQYRTWLAAA

SEQ ID NO: 263694 - protein, 402 aa, unidentified
MYNAVGIDVSKGKSTVAVLQPAGVIIRKPFNVNHTSSELDELAKYIGSLEGETRVVLECTGRYHEPVVKTLSEAGLFVSAVNPHLIKNFGNNSIRKVKSDPADAKKIARYTLDNWIELRQYSSMDNTRTQLKTLNSQFSFFMKQKVAAKANLIALLDNTYPGVNKLFDSPVRDDGSEKWVDYAYSFWHVDCVRKIGLKTFTERYQAFCKKHHYNFQPAKPAELFLASKDLIAVFPKEASYKLLIQQSIQQLNLASSHVEELRSKMNELASTLPEYATVMGMYGVGKTFGPQLIAEIGDISNFSHREALTAFAGVDPGVDQSGTHKSKSNKASKCGSNRLRKTLFQIMSTLLQTAPEDDKVYQFLVKKRAEGKPYYVYMTAGANKFLRIYYGKVKECIRNLEQ

SEQ ID NO: 263695 - protein, 351 aa, unidentified
MIVLGADTHKRSHTIAAVVGATGEPLGQQTVPVGRRGFGALLQWARGLDEDRVWALEDCRHVSGSLERFLIERGERVLRIPTHLTAKARTSARQRGKSDPIDALNVARAALQEGLGAFPAAHLDGPELDLRLLVDHRERLVRHRVELNSTLLWHLHDLWPELRLPGGALFSKKWTTRISRRLVRAEQTMRVRIARDELRRLRELTLAINRLEREITELVEQIAPQLLTEPGFGPLIAAKLVGEIAGAQRFATQAKLARAAGVAPIPASSGNTQRHRLDQGGNRQINAALHRVIVTRARCHPETRAYIERRRSEGKSTREAIRCLKRYLARHVWRLPQPPTTTENAASPSIP

SEQ ID NO: 263696 - protein, 355 aa, unidentified
MKDQAIHYLGLDVHQATVVATSRNESGAIVLKATVPTEAKAIVGLVRGQGPRVQVAFEEGTQAQWLHDLLQPVAERVIVCNVRGKKELVNKNDQIDSDLLSERLRLGSLRGVYHGATSVLALKEMVRSYGNLVEDTTRVMQRIKAMFRARAIPTPGTGVYGTRQRAKWMSKLKGTGVRLRAESLFAQLDALLPLRRKAKAAMIAEARRHPAWKILRTIPFLGPVRVAQIIAIVGTPFRFRGKRRFWPYVGLGVVTHSSADKEIVAGTIRRRRRPPLTRGLNRNHNRVLKDVFKGAATAAAHKDGPLKDLYEQTLAHGVDADMALLTLARKISSVALRLWKKGELWDPAKLTTQAT

SEQ ID NO: 263697 - protein, 479 aa, unidentified
MDRVMERCAGLDVHKKTIAACIRVPGNGKRRRRETRTFTTTTRGLLQLRDWLAEVGVTVVGMESTGSYWKPVYCLLEDEFECWLLNARHLKNVPGRKTDVKDAEWIAELVEHGLVRPSFVPPRPIRELRDLTRYRKTVIQERSREVQRLEKILEDAGIKLSSVASDILGVSGRAMLAALVAGERDPQVLADLAKRRLRSKIPQLQEALEGRFRDHHALLVSQMLTRIDHCDEIVERLCEEIDRRMEPFRDLIELLITIPGVHLRTAEVLIAETGGDMARFPSAEHLASWAGMCPGNNESAGKHRAGTTRKGSKWLRGALTESAHAASQTKDTYLAAQFWRLTGRRGKKRAAVAVGHSILVAAYHILNRHQPYHDLGGDWFVQRYNNQAHVRRLIRQLERLGHHVTLEHRHRRLTSPPHLQPAPRPANPARPDEPPPPGILDSDATFPQAWSDPGVRATNGSRFSGTISNLRPAVPTMSR

SEQ ID NO: 263698 - protein, 314 aa, unidentified
MQSILDLGADVDSRSVMVACVAGSFKPHRIGNDRKAIVAWLRTVPRGSRLGMESTGSYHELLADLAHRAGLQVFIVNARDLRHYSQGVGRRGKTDRIDAEVIARYIAREHGELHAYVAPTRAQRTFARLVRRRTTLVDTRNSITQSLRGLPQLKSDARRLIDHIDQVIEKVDLLMQRALEQMPEAAASARYVVTTPGIGVLTSRCLGYRFTRLPYATSDAVVAATGLDPRPHDSGDTQGPRRLSKCGSADERRLLFNCARAAIRTKVWRPYYDAQLAKGLSKTAATVVLARKMLRVAFALHKRQQPFNQLLIGG

SEQ ID NO: 263699 - protein, 434 aa, unidentified
MRYIGLDLALATVHKAVVIDEQGRDITQVLSVETSAHSLEQLFHRAREGARSDEPLVVVMEPTGMAWFPIAVFCQRQGVKVYLVNSQQVADLRRYYQKHAKSDRIDSRVLAKLPIVSPEKLHPLQLIGASQLACQRGCKELDRLMDMNIAIQNRLRSIDRFAWPGLEHVLPDNIAPITRWFREHWYDPHTVLALGEEGLLANWLENGQISDEMLESGQWAAALVHLAEQVLALYGPETAFLDYAYLQAEVTREQSLLSMLEAEYKQLQLETVRPLYRQLHPSRNLESLYGVGQDGAAVYSSFIGDPKRFPDHASFRGWSGMIPRSSQSGTSEAKGLPISQAGPDLIKKFSFLGAETARQWDPQIAAIYYDQIVHHGKHHTQAVCACATHLLDRIWIILKEDRAYELRDVDGTPVSVEQARKIIATRYNVPKEVR

SEQ ID NO: 263700 - protein, 344 aa, unidentified
MLHVGMDLSRRRIDVCVLDERGDLVEQAVAAPDADGLRVLADRYRGDDIRAVVESMTGARFVHDTLEGYGWEVEMADAARVKALAPLTAKTDRIDARVLAELSYRDLIPAIWLPPPKIRGMRELGRFRLHLVKHRVGLKNRIHSTLITWGLSVPVSDLFGVAGRHHLEELDLPDAWKTTTTATLEVIDHLTTQIAACETTLRQAALDHPDVELLQTAPGIGPILGYVIATEIGDIERFATPTKLVGYTGLCPRVMQSGNTDRRGPLTLHGPRWLRWAYIEAAVRASQHPTYQDRHQRTRRRLGPQRGPKVARVDTARRLATATWWMLTKHEPFAPASPPPPLAA

SEQ ID NO: 263701 - protein, 379 aa, unidentified
MSSENAIHIAIELSVSSWLVAVKTVPGAAKSRLHRFEGGDASGLLKLIAELQTRALTQPGDVADVSCCFEAGRDGFWLYRLLTAHGIAAYVLEPTSILVNRRARRAKTDRLDAEGMLRVLAAWLNGDRQICSMVHVPTPDEEDAKRTHREREHLVQERLRIENRIEALLFTQGIRGRPSLRSWERDVAALRTGDGRELPPFLRAELDRLRRRLLLALELIRELETERAKTLDAAAMDDRVTQKIVSLKQIRGIGENFAAVLVREVFYRRFDNRRQLASYVGITHMPYQSGGMDRDRSISRAGNPRARTAMIQLAWLWLRYQPASGLATWFRERVGTLKGRTRRIAIVAMVRKLLIALWRYVETRSIPDGLAFGKGPAAG

SEQ ID NO: 263702 - protein, 373 aa, unidentified
MPKYSTAFGMDVHLRSTTVCALDADTGEAVTRRFPGNPWGEIAGWMDGFPGPSLAAYESGYLGFAPQRELAGLGVECVVAAVSKIPRSAADSASKNDRNDAARMAKAILAHDISPVWVPSPEVEGIRDLAGAYDGATARLATAKQRLLAFLAKRGFVYGGTTPAGNPRKYWTYDFLRWLDKARPEDDGGVRTLAALRNEVEAAAEARADLLSEYRAAVDASPIAAEVAALQSIKGCAFALAAAFSAEVGDFTRFRSGRQVTAYFGLAPSQRSSGDSVRLGGISGAGNALVRKLAVEGSWCYAAARHQPKLMPRDTGVPLEIRMHGRKGSERLLRRREEMLARGMPAAKANAATAAELVRWLWALGMMCREGAE

SEQ ID NO: 263703 - protein, 355 aa, unidentified
MKSKKPEDLGKVTVIGVDIGKDTFHLVGFDHAGHRVLRKNIKRLALKPMFETLPRCVVGMEACMSAHFVSRMLRELGFEPRIIPAIYVKPFNKGQKNDYNDAEAIAEAAMRPNLRTVTEKSQDQLDLQAMHRVRSRLVARRTATINQIRAFLIEQGITVRAGRHRLQSSFEAILENRRDEISPRMRNTLLGLYGDWLWVDERIKSISSEIEAISKTEESCANVMTIPGIGPLISTAIVAAIGQGEVFDRGRDFAAWLGLVPRQFSTGGRTILGRISKRGNSYLRMLLVQAANVILMRPHRWDAIGLGPWLRGVVSRMPHNKAAVALANKLARTAWSVLRHGKTYTVVGDETLGAI

SEQ ID NO: 263704 - protein, 384 aa, unidentified
MKNNTIIFVGLDTHKEFTEVAYCEDQRGSEVKHLGRVSSAKVSLTKMARQFESKYPQATLHFVYEAGPCGYWIYRLLTSLGHCCYVVAPSLIPKKPGQRVKTDKRDAQDLARLVRNGDLDPIYVPEPADEAIRDLSRARERAMHDLNNARFQLKALLLRNHINYSGKSNWSLKHLRWLTEIILPHPSQQFVLQEMIQTISERNARLERLDNELAHHVKQWRYYPVVKAIQALRGVRLLTATGVIVELGDLTRFDSPRKLMSYIGTTPSEHSSGGKRHLGAITKCGNGRARRLLVEAAHSYRYPAKISKELQLRQEGLPKEVIDQAWQAQQRLCRRYQRLIHKGKHRSVVVTAIARELIAYIRSISKEVTLPRIDPKTRISRVPA

SEQ ID NO: 263705 - protein, 376 aa, unidentified
MQNDITLFVGLDVHKDSITVAYALGSGEVELLGKIGTSARDIDRLCKKLQSKAGHVKIVYEAGPLGYDLQRRLAAKGFDCMVCAPSLIPRKAGDRVKTDRRDAVKLVRSLRADDLSAVHVPTVEDEAFRDLARVWAAARDALKRARQALKSFLLAHAVRYTGTANWGPSHRRWISSFSFGNRWQDLAFGELRRAIEDRFAQCERLESALREAVTQWRFYPAVLALQTMRGIRFTTAVGLLSEIVDVTRFAHPRQLMAWLGVTPSEYSSGGSRRQGSITKTGNSLARKLLIEAAWSYRHTAKVSPEIQQRHEGVPKVIVDRAWDAQLRLCGRYRRMVAKGKNKNVAVVAIARELAGFIWDIGRLGIEQAINTPKPAV

SEQ ID NO: 263706 - protein, 372 aa, unidentified
MNIIGIDLGKTIFHLVTMDQDGKIIGRKKLSRPQLLKHMVTAPASLVGMEASCGAHHLGRLFRDQGHEVRLIPAQFVRPFVKSQKNDYVDAEAIAEAVQRPTMRFVPIKTEDQLDLQAIHRVRDRLVLRRTSLINQLRAFFLERGIALRTGRPRLRRMLPALLADAEQHLSPRIYRLLCLVAEEWRSVEKEIEQLDLEIETIASQDSACQRLITVPGIGVLIATAIVAAVGNGAAFSRGREFAAWLGLIPKQCSTGGKPKLLGISKNGNEYLRRLLIHGGRSIQHRVARDRHAFGPWLTELEARANTNVVAVAMANKLARIAWVVLNRQQDYRHTKLAVENAGSGLSVLDTPVSAAGQGSSINSLRSALTGL

SEQ ID NO: 263707 - protein, 343 aa, unidentified
MNEITTIGLDTAKSVFQVHGIDCDHQPVLRRQLKRRQVLPFFAKLPPCLVGIEACSASHHWSRELMKLSHTVRLIPPRYVKPYVKSQKNDATDAEAICEAVTRPSMRFVATKSRDQQAMLMLHRTRHLLIRQRTATINALRAHLVEFGIAAGIGRNGVEALLKVIADENDDRVPDMARDCLMVLGAHLETIKGHIRVLDSKIMAAHRASELSQRLEAIPGVGPRIATALVASIADPKAFRSGRQMAAWIGLVPKQNSSGGREKLGGVTKAGDRYLRSMLMIGALSVIKRVKQLGYTNRPWLAELIARRPIKVAAIALANKIIRMVWAMMVRGERYREPVALAA

SEQ ID NO: 263708 - protein, 425 aa, unidentified
MTDLYISVGIDVGADFSFMSIALPNQTFVGKPFKITHSNLDSVETAVKKIKEAEESNSLKARIFLESTGIYHYPLFCYLCDKGFDVSIINPIITNNSTNLNIRKVHNDKFDSKKLALIALKPDLKTSVMPSDFVLNIRNLVREYYRFTDQRSAYVNKLTALLKVSFPEYIGIFSKITVNTSLALLDKYPSPDAVLNAQKSSITGLIRKTSRFGTAYAEEKYEMLISAAKKAKSFGHSLPSHTELIRLYISMIRTFDSAAKQLIRSVKDIVESYPDELFCRQIKLLETIKGCGFLSAVTLMCEIGNFSVFSAPKKLYAYLGLDPSVKQSGKFNGTNVKLSKRGSRLARRVLHMMAINSIGLTKNGKSKNPILRDFYDKKCLSKPKMIALSAVMHKLCNIIFAVLRDNKPFEFISPEQHNLVYRNVS

SEQ ID NO: 263709 - protein, 339 aa, unidentified
MTVNTVGLDLAKDVFQVHGISANGRVIFNKTVKRAKLLQFFEALPPCVVGMEACGSAHHWGRELGKLGHDVRLMPAGYVKPYVKRGKTDAVDAEAICEAVRRPTMRFVELKTEDQQAILAIHRTRDLVVRQQTQIVNMIRSILREFGHILPTGVGAILTFAKRHLGGDHPDMPELANGILGTLCHQLVGLNTRVAGYTRMIEQHAMMTADARRLMRIPGIGPITASAIIATIGDAKQFRTGRDLAAWLGLTPLNKSSGGKERLGKITKKGDRYIRKLLIVGMTSRALMARKHPERADLWTAKMLAQKPFRLATVAMANKAARIVWAMLTKQQDYRQPGT

SEQ ID NO: 263710 - protein, 377 aa, unidentified
MKTYDNEPALYIALDVGSTTWVLAMTDGLRKKPRVRRVDTGDLVALEREVAEGRAKLKLAADVPVRFCYEAGRDGFWLHRALCERGYSCLLIDPGSIPRTAKKKSAKTDRIDAQKLAGCLVRYWRGDESVFSVVRVPPREVEDVRTLERERKQLGDDVRRLRSRYWSVLATFGIRRPKGGKLRDPDELLDGSGQPLPGWTRERLHRTLTSIDLVERQLEELEEQSKVAVSRVPMLFLVYQMLMSMKGIGHISAFALTVEGLGWRTFANTREVGASAGLAPTPHCSDQTHREQGINKAARSSLRSLMVQLAWLWTKHQPNSALTRWFQRRWGDAGKRARKVGIVALARKLYIALWKYGTHGEVPEGAIEKSRPALNAA

SEQ ID NO: 263711 - protein, 363 aa, unidentified
MVNHIFVGIDLGDKNSVARIALNRDKTERWGFVNDRRGRGRLFEEVKRRGEKTGEAKIVMAYEASSCGFILYEEAEAQGIQCWVVAPTKMEKSVEQRKHKNDDRDAEDLVEKLRGHVLAGNRLPKVWIPDRQMRDDRELIRTRTELVEKQTRLKTQIQMWVKRHGLEKPSGCGAGWTMRYRQWLEALSESEALGGGTRTGLMSLLRQLSFMEAEIERIEKPIQQLAQQPRHQPIIEELTQEHGVGLMTAMVYRTEIGYAGRFGRGRHVGKFVGLTPTSHESGQQQDHKGHISRQGPPRLRKMLCQASWVHVQHDPKAKRFYQQLVSRNPKKKKIAIVAVMRRLAVRLWHRMRQAELRMAGLAQ

SEQ ID NO: 263712 - protein, 433 aa, unidentified
MQDAQDEPLFVQRVAGPGIARAGVEVTIRVPSDTSPGRRQQETRAFGTTRRELESLADWLGSWGVTTAGMEATGDYWKPVFFLIESRGFDCELYNAAQVKALPGRPKTDRADSIWRAKITERGMIASSFVPPEPIRRLRTHTRYRRHLTRARTAEKQRAGKLLEDGHLKLSSVISDIHGVSGRDMLNAIAAGQRDPRALAQLARGSMRGKIRRLEEALDCSFFTGQHAAVLAMMLAAIDYYSAQIEVLTATIEELAGPYLHQVEQLDEVPGIGTICARDIIAEIGVNMAVFPTAAHLVSRARFSPRARQSAGKRKGSNSTGRGNPYLGAALGEAGISTGRTQTFPGARYRRLTRRMPRKKALVATGNSILTAAYALLSDPDARYIDLGPDYYEQRMHTRRQARNHIKSLERLGCKVTIQALSPDTGELLAPAS

SEQ ID NO: 263713 - protein, 348 aa, unidentified
MKKVQYFIGIDLHKTVLQVCVLNEAGEIDEEFRQRLDETDAETKVLQRLRRWKANGQYVVEAQGLNRWFVNACQAVGMHIIVANPTTLNLKRSGKKTDRRDAYELARRLWLGDIEKHARPYYPVDEEYGKRKVLRVRHKCGALRQQVINQLRGLLGAYRIPAPQTVLYTTPSIAKLERVEMPTPELTFCVQTLVTVLKALQQAIIPLTRQITQCAEAPRVATLQEQLPSVGPQTALTLDVELGDLTRFGSAKQLCSYAGLVPRVTDSADRQNHGRLTKRGNAEVRWIVGQWALRLLASNPQVQAWATARARRLHKNKVRVALARRLLVGIFVSRHKGEPFSLQRCLAT

SEQ ID NO: 263714 - protein, 371 aa, unidentified
MEDTRFIGLDIHKERISVAVAQSGRSGTVEYLGEIINEPGAISKLCDRLRRPGKPLAFCYEAGPCGYGVHRQLTSLGHRCDVVAPSLIPTKAGDRVKTNRRDATMLARLHRAGELTPVWVPDADHEAMRDLIRLRSVIRQIVTRARQHLQGFLLRHGRKHGGGTAWRMAYRRWLSTLAFEHPAQQIAFQDYVDAVTDAERRLKRVEEQIFSLLPDWTLRPVVDGLQAMRGIALINAVVLVTEVGDFTRFSNPRQLMAYFGLVPGERSSGETVRRGAITKTGNAHARRALVEGAWAYRMKARIGRHKVDRIEALPKVVRDIGWKAQVRLCARYRRLSARGKTANVVNVAIAREMVGFIWSIACTIQSAPKAA

SEQ ID NO: 263715 - protein, 418 aa, unidentified
MKKHSKSSQRSEPSLKRTKARGPVQRDAKEVLAEVLGKLTGKLDTPAVSTSAKGNRRGNTVDPNRDRLTVGVDLGDRWSQYCILGLEGETLAEGQLRTTQEDVREFFQALTVARVVIEVGTHSAWVQDVITEWGHEVLVANPRLMEGSKRRKRKSDRIDANKLARLGRVDPQSLYPIRHRSREVRQDLVVLRARDALVSVRTELINTARGLVKSMGTRLPRCSSPSFAEKVKDAIPVEVREALLPLVQLVETVSDCIARYDQKIEQLGREKYGHTTLLRQVKGVGPITSLAYVLTLEDPQRFSSSREVGPYLGLVPKQEDSGDSQPQLGISKAGDRMLRRLLVGSSQYMLGAFGPDTDLRRYGLRLCERGGKNAKKRAVVAVARKLAVLLHHLWVTGDEYEPLHHTGAETRTAQATAA

SEQ ID NO: 263716 - protein, 313 aa, unidentified
MNQPKSNVFVGVDVSKERLDVAVRPSGEHKSFTHDEAGIAQMTDCLGRLSPEMILFEATGGWQMNAVNALAARRLPVVVINPRQVRDFAKATGQLAKTDAIDAGILAHFAEAVRPEIRELKPLEARKLEALNTRRRQIVEMLTAERNRLTTAPEWTRPDIEDLIAFLKKRLATINRDINKLIRQSPLWREKDKILKSFPGVGPVTASTMLSDLPELGSLNPKAIAALVGVAPLNCDSGKHQGKRKIWGGRACVRSLLFMCAKTAVRCNPVIRGFYERLLGAGKLRKVALTACMHKILIILNAMIRDQVCWKTA

SEQ ID NO: 263717 - protein, 413 aa, unidentified
MIRTNHHRSNQVLIAIDIAKKHHDVLISWPSGKTKAIKITNSLAGYQKIIELADTAPNHIQVAFEPTADYHRNIAYWLQAYGTQCYLVSSLASARAREMLFKSWDKHDRKDAQVILYLMQQGMMQRFYDPLVENTLDIQELSNTYHQVCLARTRCQHSLRNHFLTLYFPEMERYFHSSRAEWFCRFLLRYPTVKSITKYKKETFVKRAWNVVGRKVTKQRFLEELYETAALSIGLPIDINSLAVTTFRLQLNRYLALTLQRNELEHTAEEFLNDREDYKHLRTLPGIGPIIALMIIAESGDLRRFHHYRQYLNFCGFNLSASQSGQQKGRYKLSKRGNARLRYAFWLAAVSAIRQCENSFRYKFERYIKKDPENADLKRKGRVAVASKMARVAHALVKTNTDYRGYYEFGHGT

SEQ ID NO: 263718 - protein, 344 aa, unidentified
MKHYAGLDVSVKETSICIVDEAGRICREMKMVSHPEDLLAVLCDPAWRLERVGLEAGPLSQWLFSGLAEAGVPAICIETRHAKAFLKAQVNKSDRNDARGIAQMMRVGLFRPVHVKTLASQKRRALLAARKILQEKALAIENDIRGLLRNFGLKVGIVGVVSFEQRIHDLVEGVPELADIMEPLLAARRVLREKFAKLHRKVLLLARDNEVCQRLMTIPGVGPVVSLAFISTVDVPARFRNSKAVGPSLGLTPVLNQSGESHRVGRISLCGDEAMRALLYEAAQVMLARVQKWSWLKAWAMNIAKRRGQKKATVALARRLAVIMHRMWSDGTEFRWTREMAPTI

SEQ ID NO: 263719 - protein, 346 aa, unidentified
MMLIGCDYHPSWQQICWLDTVTGETGEKKLEHASGEAEKFYRGLPGPALIGMESTGNCQWFVEMATTAGHDVWIGDAAKIRASDVRQQKHDRRNAALILKLLMEGRFPRIWTPSGPEKDLRQLLIHRYKLVRIRAQVKNELQHLAMNQGVKKKKKLWSKAGEKVLRELPLKPWASRRREDLFRVREMLNGQVDLLDQAVVEAAEKNEKARLLMTQPGVGPITSMAFVLTMGDVNRFQRGKQVASYLGLIPREYSSGGHQRFGPISKQGNRFLRMLLVEAAQGAVRCDPGFRNEYLHRCRRKAKGVAKVAAARKLAIRLYWMLRTNTGYPGVVRVESSSRVPLVGES

SEQ ID NO: 263720 - protein, 314 aa, unidentified
MAKRFVGIDIGKTSLDVAIWKGAEGLQFGNDAEGIAKLGKFLEKIQPSLVVVEATGGYEKRIVEKLSFLGILVCIINPTRVRAFAVAEGILAKTDKIDGKMIAMFAAKIQPEPTNLRSEAESHLVALITRRQQVTQMCSAEKNRLYTVRDNVKERVQKLINWFEDELDNIDKEISQLLEENINWKVKANRLSTVPGVGLLTAVTLIAHMPELGLVNRQEISALAGLAPYNRDSGKKRGKRRIFGGRVAVRRVLYMAVLSGINHNPVINSFYKRLCKRGKPKKVAITACMRKLLTIVNAMSCKEENWVLQKSGNV

SEQ ID NO: 263721 - protein, 408 aa, unidentified
MEAIIERCCGLDVHKDTVVACVLIGPADGRARKEIRTYGTTTTQLEQMRDWLSQVGCSHVGMESTGVYWMPVYAVLEEHFELIVGNAAHMKNVPGRKTDTKDSQWIADLIRHGLVQKSFVPPKWQRALRDLTRYRRKLVEAQASERNRLQRLLETCNVKLASVASDVFGKSGREILRALIQGETSAEQMASLARGRLRQKLNDLELALRGNVEAHHRFMLEMQLGRVEDIEANIALVDGKIDEAIQPHRAIFERLRTIPGVDRVAAVTLIAELGVDMTVFPTVAHAAAWAGVCPGNNESAGKRMPQQKRRGNVHLASMLVQAAFAVSRTKDNFLKSRFWKVAARAGRKRAAVAVAHSILKSAYHMLKGGVDYKDLGGDYLDRFLNRRVEQRLVHRLRSMGYDVRRQTA

SEQ ID NO: 263722 - protein, 320 aa, unidentified
MSTNERFVGIDVSKDHLDVAVRPDGTHRQVPNTDEGLDQLVALLGPLGPTLVVLEATGGYQRRAVAALAVAGLPVAVVNPARAREFARAAGRLAKTDAVDAAVLAEFADRIRPPVRPLPGADAQTMQALLARRGQLVGMRTMERNRLGSATDRAVRRSLEAHVAWLDGQIDATEEELGAAIEASAVWKAKDELLQSINGIGPGVARTLLFELPELGRLSRAQIGALAGLAPMNRDSGRRTGKRFIAGGRAVVRTAVYMATHAARKWNPALKAFADRLTAAGKPPKVVLIAVARKLLVIANAILRDQKPWRDVTEKVAVVA

SEQ ID NO: 263723 - protein, 400 aa, unidentified
MRTVFGIDVSKASSEVAILVNGERVHGYTMPNDIIGFSHLLKDLKTVSNPEIIFEATGVYSRRLQAFLEENSYDYTRLNPLEAKKQLDGLRVRKTDKIDAEKLASSQFVLNRMPTYVQEKVYQNLHDLSRFYQNLTEDIVRTKNRLHKVLQVAFPEIENLLSTPTGEQYWNLVSIFPTNHWVLELSEVELKETIRQSTSKRISENRVGNLAEKLVGLAKQSYSAISKTSPMIEEVKYNAQELIRLTNRREQVLEQLIELAKPLPEYVILLSIPGIAETTGTSVIGELGDIRRFTSANQINAFIGIDLKHYESGDFLGQEHITKRGNPYARKILYKCIHNIASASHTNPCHIADFYEKRKRQSQTTSTKPHTIASIHRLIRTMYYLIMHNKLYDYTLAQSH

SEQ ID NO: 263724 - protein, 342 aa, unidentified
MKITTIGIDLAKSVFQVHGVDDHGKAVLRKKLDRSRMFEFFIKLQPCLIGMEACGSAHYWARKLVEMGHTVKLMAPQFVKPYVKTNKNDAADAEAICEAVARPNMRFVPVKTGEQQAVLSLHRVRQGFVKSRTAQANQIRGLLSEFGVIIPPGIANIAKRLPGIMEKSDLPGSFRELLQRLYDFLKELDKQIDELDAKIQQWHRTSETSRKLAEIPGIGPITATALVASIGDAKSFKNGRQLAAWLGLVPRQHSSGGKSVLLGISKRGDTYLRMLLIHGARAVIRFAENKPATTWLNRLLERRSKNVAAVALANKNARIVWALLTHEEQRFRADYAPAVAGA

SEQ ID NO: 263725 - protein, 342 aa, unidentified
MSVIIGVDPHKATHTAVAIDRTEAELARARVRATRKQVPQLLRWAEPLGERTWAVESAGGLGYLLSQQLVASGETVLDVPSTLAARIRVLGSGRSDKNDPNDALSVAIAALRTPALREVVVADHSEVLRLLAKRNIDIGNHRTRVVCRLHNLLMELAPGGIAKELNASDAIAFLERIETANPAGAARRDQATELLADVQRLDEQLKASHRRIRTAVAASETSLTELFGVGPIIACYLIGFTGDIGRFASRDAYAAYNGTAPVERSSGGRVVHRVSQRGNRRLNHALHLAAICQIRQPHSDGRAYFERKLAEGKTKKDAIRSLKRHITNAVYRQLLIDTDAHR

SEQ ID NO: 263726 - protein, 360 aa, unidentified
MRYCTNIGIDAHSKKNSVCAIAAETGEMREATLSEDPRELVAWIRGGGFAEPLRCCYESGPTGFGLARALSEAGIECVVAATSKLPRRTDRQKNDRADAEWLARMLAAGSVRPVRVPSPEEEALCHLSRLRGEVSADLRAARQRVASFLLLTGTAYTLTRRRWTKTFRRWAESYEFAQPADTFVFREKLAAVYRLEERLEAVEAEIMRIIGESPELAARMARFECIHGIGRVTAFSLVCEVGDFSRFRNGSAFASYIGLVPSESSTGSKVSRGAIAKTGNSHLRRVIVEAASCYARPFKLVRSEDPRVPELVRAKAEKCSARLRRRRQALVGRGVAKNKAKIAVARELCEWIYWIAVMPA

SEQ ID NO: 263727 - protein, 419 aa, unidentified
MTDLSIAHSEPILAAIDISKARHEVLIAVPGKKRRRRLTVLNQLDEFNRLTATLTGYDRPVRVAFEATGNYHRALAFHLGAAGFEIKLVSSVALARTREALHNSWDKNDPKDAQVILHMMQIGNEQFYHDPLMQGTNDIQELSKTHDIISKSKTELWHRVLTHYLPLYFPEADRFHRSSRSDWFLAFLERYPSPHFIASMGKEAFIADAWETVGRRVSKERLLADVYETASVSVGLPVEPDSDAIRMFRMILGEGRSLIAQRNKIEDRAVELLKDNPDYQLLTTIPGIGPINALTILAEAGNLRRFNHHRQFLKFCGMDLATIQSGTFRGQTKLSKYGNARLRRTLWLAGQVAILQRANSFRDKFERYISKDRQNTHLRRKAYTAIAAKMARTAHAVVKSGEPYRPFFEGASHGRRTFL

SEQ ID NO: 263728 - protein, 379 aa, unidentified
MEVFIKNCAGLDVHSETIVACVLKGRHENEVYQETETFPTLTKDLFRLLKWLESHEVTHIAMESTGVYWKPVFNILEDFFDITLANAQRIKNVPGRKTDVSDAEWIAKLLRHGLIEKSFVPPVEIRELRDLTRLRKKWIGHLTSEKNRIQKVLESSNVKLSTVISDVFGVSGRKLLNRLIEQGYVDEADVEKNIHGRLAPKKQLITDSLFGTLNEHQIFLIRQSWRHIEYLESLVLEIEKRINQLLQNYHEELQLLITILGIKKDTAAVIIAEIGVNMNQFPTSQHLASWAGVSPGNHESAGKRKSTRSIKGNPCIKSAMCEAARAVSRSRNRWLANKYWSLAARRGKKKALVAISHRMLRIIYSMLLNKEPYKEPQLV

SEQ ID NO: 263729 - protein, 388 aa, unidentified
MPQQRKPNDLGRSLISLAMDTTLIAVVELSLSSWLVAGIVPGVERQPLKKLKTDENALLALLNRWRDEAVRSGHKISRIAVAFEAGRDGFWLARWLKARDIEAHVIHASSIAVSREHRRAKTDRLDTELMKRAFVGWLRGERDHCKTASVPSLWEEDAKRPSRERESLVGEQSRLINRMKATLIRLGIRGFNPKLRHAEQRLETLRTPEGEPIPPNTLAELKRDMQRRRFVCDQIRSIEQDRLERLERTPHTEPHAMVRLLARITGIGIETADLLVHELLLRNMRDRRAVARYGGLTGSPDRSGGTNREKGMARSGNARVRRGMIQLAWRFLLFQKNSALAQWYRRRTEHAPKARKTMIVALARKLLIALWRLVREGVVPEGVAMRPA

SEQ ID NO: 263730 - protein, 355 aa, unidentified
MKYYVMKYYTSTTEFNCGIDLHSRQMYVCLMDRQGKKLVHTNIRNNDFDYFLKRIEPYRQDLTVCCECMFGWYWLSDACQKAGLTFVLAHALYLKAIHGGKNKNDRIDSEKLAHLLRTNLIPPAYVYPARLRPLRALWRQRLCYVWRRSELLARIQSQQLAHNRPVIKQNNRDRWQAELMEQEADPLRQLALQNDLAMVRHYDAQIRTLEEQVQKLTKKTAGRDYALVQSAPGIGESLGATILYEVGDIERFPTVKDFLSYCRLVKGTVASAGKIKGLRGAKLGNPYLRWAFGEAAVIAKRDHATIGPLAQRLEAKLGNKFKANTVLAIKLARAVYFMLKNKTVFDPDRLISALN

SEQ ID NO: 263731 - protein, 308 aa, unidentified
MAKPVEKSTLGIDVSKDKHDIYNWQTDKLTTLVNERSAIKTFLKAFHGPVQIAIEPTSHYHLVMIEEAHALGYEVYLINPRQLVHYRQAVNVRNKTDPLDAWLLARYLEREGSQLRPFKPQDPRAQRLWCLILRRATLVKSRQQIRQSMSGIQLPIKDLLTGFQKVLARIDRQVIALIKELNWWSDYLYCHSIPGIGDGNASALVAAYHRGSFAGSDAFISYLGLDVRIRESGYFKGKRKLTKRGEPELRRLLFCASQGARSYRLFADYHQRQLDKGLSKIAARVILSRKLARIAFTLMRKEEMFIKH

SEQ ID NO: 263732 - protein, 346 aa, unidentified
MKHVGLDVHQTQTTVVWIDAQTGEVSRACKVPTAEVSQQLLALGEVLRVVMESGLHSKFLARQLTSCGFETWVLDARKVAALMPAYKTGKTDRLDARALAKMSFENAIDQLRVWVADEHTEELRSLTRTREKLVELTTALRNEWRSQLAVFGLICPANDVLSAKTERWLAEHLTAVPQWGQFCLQRVRDSLLSLREQIKLLDREIERHAAADPDCQKVRSLPGCGALLAVTIVAELGDVARFASLGRACSYAGLTPTIKQSGERSYTGRIARRGNPHLRRALVLLAQHFAWQKDLGETALKRRYYRTLHNHGPNAAKVALARGLCRVIVAMLRTAQVFAPPQKLAA

SEQ ID NO: 263733 - protein, 324 aa, unidentified
MTRGVFVGVDVSKDRLDVAFRPSGEKLIVPNDRRGVTRLVRTISRLKPECVALEPSGGFERKLLERLSEEGAPVSMVNARNVREFARASGRLAKTDAIDAAVLAHFAEVMKPELRRLPDPETRKLRALITRRTQLVRMMTAEQNRRLQALESVRAGLSVIVRCLKKQIGVLDKQLAALIRATPAFRQKEELLRSAPGVGQVVSATLIAHLSELGTLNRKKIAALVGVAPFNRDSGKLKGKRAIWGGRSDVRSMLYMSTLVAVRLNPSLRVFHDRLRRAGKSPKVALTACMRKLVVMLNAMLKSGNRCVEERSRPLEMIAEPPPT

SEQ ID NO: 263734 - protein, 321 aa, unidentified
MEHVIIGVDPHKLSATIEVVDEHEKVLGSGRFTTDQAGYTAMRTYAKTWPDRVWAVEGANGAGRPLAQRLLEDGERVVDVPAKLAARVRLFDTGHNRKTDARDAHSIAIVAVRTEGLRVLRVDGELEALRILTDRREALTRGRVQTVNRLQALLAELLPGQAKKDITPLQAKAMLAGVRPRDIAGRTRRRVAAEELAELIAVDAKIKKATAELKAMVVARGSRLMDLHGVGPVVAARILADVGDVHRFVDRNRFASWTGTAPLDASSGEQNRHRLSRAGNRRVNHMIHIAAVTQLRHDPTGQAYYRRKRSENKKPMEPCGA

SEQ ID NO: 263735 - protein, 290 aa, unidentified
MQQDSEIYVGLDTSKLKISVALATAGRDGEVRFFGDIDSTPEAVARLVAKLEKRHGRLTFCYEAGPTGYGLHRQITTLGHECTVVAPSLIPRRPGDRVKTNRRDAVTLAKLHRAGELTAVWAPDPGREAMRELVRAREAAMAELRRARQQLQSFLLRQGRIYTGRAAWTKAHARWLSELAFTQPALYLVLQEHRQAIADAEKRLERLTGQVAEAAQTWSMAPVVAAYQALRGVAFLTAVTFVAEIGDVRRFDSPRQLMAYLGLVPSESSTGEQIHRGRITKAGNTGPAAC

SEQ ID NO: 263736 - protein, 459 aa, unidentified
MTKKSSKKAKSQRSRERALLKKVHLNAAGIDVGADTHWVAVPEDRDERPVRNFGVFTSDLIALCEWLKACQIQTVAMESTGVYWIPLFQMLERNGFEVRLVNASHAKNVPGRKTDVKDCQWLQQLDTFGMLRGSFRPQAQMCVVRSYLRLRDTLSKDCNSLVQRMQKALTEMNIQIHRVISDITGLTGMSILRAILAGERDCIKLAQLKHPQIKSSTQQIAKALEGDYCQEHLFALQTALELYDSYQLKIIECDQRVEEALETFEAKVEVSAPDLSRLRSAQKRQEALRRHHLEQMTGADLTKLPGLDLLAVERILSEIGLDMNCWPSEKHFCAWLNVAPNNRISGGKILASKPRKNANRAAAALRLAAQSAMQSKTAVGAFIRRIKVRLGAPTAINAGAHKLARLLYRMLKFGKAYVETGQETYERLFKERMLRNLQRKARQLGFQVTPITTPAVPVS

SEQ ID NO: 263737 - protein, 383 aa, unidentified
MMQTMTRGNESSAATGYLLVAFELSERWWKVGFTTGMGHRVRTRRIAAGALASVTEAIADTKKMFGLAADARVISCYEAGREGFWLHRYLTGRGATNYVVDSASIEVDRRARRTKTDAVDLRGLLALLARYVVGDRRCWRVVRVPSVAEEDARQLHRTWETLQGDRTRVINRLKAVLATHGVRLAITADFLEHVAATRVWDGSEIPSGARERLGHDWAQLQSIEEQLAAVKAARACLGIDPATPTGRAVQALQGVRAIGAGGAWVLATEIFGWREIRNGRQLGALAGLVPALYQSGATQRDRGITRAGNAHVRRMMVQLAWGWLRWQSDSALAQWYQRRFATGGSRQRRIGIVALARKLLIALWRYVDQAIVPEGARLKVTVA

SEQ ID NO: 263738 - protein, 341 aa, unidentified
MTTALPRHYVGIDLHRWRSVVATMNEEGEQLGCERIDNSPLELVRAVTAYGGEIEVALESAYGYYWAADVLAAEGLKVHLVHPLGLHWESRRVKNDERDAAELANRLRRGDLPESWIAPPEVRELRELSRYRLKLTAYRTSAKAQIHAVMAKEGILPELSDMFTPAGQRLIDKMPLDGAYAIRVESLRDLLELVDREITMVEKELARRLKDDKGYQAIQALHGVGPILGAIFVAEIGDVTRFASARHLCSWAGLTPVHRESDTKVHRGHITKQGSTYVRWAAVEAVARYHGGSPIAPTYERIVKRRGAMIARVAAARKLLSLVYYGLRDGEIRCLADKEAG

SEQ ID NO: 263739 - protein, 343 aa, unidentified
MVHYVGLDVSLKQTSICVVNQLGLIVREGVVDSEPEAIAAFVRLNAPGAVRIGLETGPTATWLWTELKRLGLPVICIDARHAKAVLKMQINKSDRNDAAGIARIMQTGWFKEVRVKDLDSHSVRALLASRALLVKIKRDLENQIRGLLKNVGLVIGRAKFNVFTVRTEELIEDRPELIAVVGPLLKPRKAIEQQTDDLDRKVLKLARYDAQVRSFMTVPGVGPITALCFKATIDDPTRFKRSRSVGAYVGLTTRRHASGEVDWTGRISKCGDAMLRSYLFEAAGVLLTRVPKWSALKAWGIRLAKRNGLRKAKVAVARKLAVILHRMWIDETEFNWSKKEVAA

SEQ ID NO: 263740 - protein, 395 aa, unidentified
MSAEGEAIRSNDYRKDTTVKAPSTRPAAVLGLDVGKSSHWACLIDRDGEVLASAPVRNREAELDALFASAPAGTLVVVDQFRNIGSLAVRRARAAGLGVAYLPGLAASRAAGLFAGEAKTDERDAAVIARTALGVPDSLSGIPGRGEALEAARALSSQRDHVVACATRDKNRLRAVLLESCPALEAAVDLSDRRWLELLAGFGGAWGIARSGAGGPRAEAAGEAAAASTAPPPALVEAENRQVRFLAARISEALDEAGALEAETAALLEGDETYACLLTVPGIGPRTAAQLAVSVDIGRFPDHDHLASYCGIAPRVRSSGTSVRSVRASRRGDARLKSLLIFSCNSLVRSSGRYGEYYRACRARGMGHGRALKAVARKRLRAIYAVMRDRVPYRE

SEQ ID NO: 263741 - protein, 320 aa, unidentified
MMAQNDRVVVGIDVAKDKVDSCIRALASRQTFPNTVQGHRKLVGWLRKHQVNNAVMEASGGYERVWTKLLREAGIEVRIVDPKRVRSFALSAGRLAKNDSIDAEMIAWFAETFSEAPSQKHDAALEELQTLVKARLSLIDARIRLVSQSEHAAPGLVQKAHAHILKSLGSELAKLEAAICAKIKSMPDFAERAEIIESVPGFAETSSANLVAGMPELGQVSDEIAAALIGAAPYDDDSGKRRGERHIKGGRRWVRNAIYMPCVGAATQNNPVLKAYYHRLIAKGKEPKVAIIACMRKLIIILNTMIARRQKWDPSRYARS

SEQ ID NO: 263742 - protein, 325 aa, unidentified
MNNTPRLGIDIALLGFVAVLRWDEKRQVRAQFSNNSSGFRKLSRWLRQHFAGQVIAGVESTNTYAEALLHWLYAAGHVVYLLNAEQVAHYARCRGVRNKTDNSDAAVVAAFLVEHEGTPWVPPAPEQKTLRELTRARSQLIATQTALRCQIKTAGPAGASHLKTVLRAVVAQVASIMQEIESHLRAHSSLDQQVRRLMTMDGVGLVTAAILIAELPPVGPKTDPRSIAGWVGLTPRRYQSGNFELPARLSRKGNSYVRDALYMPALVAKRYNPLLRAFALRLTAKAKRPGAILGAIAHKMLRILVGMLKSNTDFDPNWSFQKNQP

SEQ ID NO: 263743 - protein, 357 aa, unidentified
MKSQEIKYVGIDCGKKTLEVIRIGDNSLHQRQQFSTTEIGISKLINWLNPNDVVGLEAGSQSFRIAKSILNKGVQVIVLNPGNLATIYQSLKKTDKEDSLKIARLIQRHPIEELPTVPIPNDEEEDNRRLCSEHENWTKQLTQGKNRLHSLFTQAGLTQITKKHLRTKANREISVALLPSRYQKEAERILKVLDLVEQNLKLIEEEIKEALKKNKAYAQTIMSMPGVGTITSLAIMSYMGNCKRFSSAKQAAYYVGLVPRVDISGDSAYYGRIVNRGCHSIRRVIVQAAWSLVRCQYGGKIKEFYQRLYPKKGAKKSIIATSRKMIEILYTMIKTGELFDSMPEKVLNRKLTQYGLM

SEQ ID NO: 263744 - protein, 345 aa, unidentified
MKPVVRIGMDTSKSVFQLHGVDDAEEPVIRRQLRRREMIKFFETTPPTSIAIEACGSSHHWGRLLTSFGHEVRLIPPQYVKPYVKRGKNDAADAEALCEAVSRPSMRFVPIKSREQQAACMLMSVRERLVGVKSQLSNAIRSYAAEFGIIGPPGRQNVAALIKRTLEDDTLPQLAKELFGLQAKEYQAVESRLEEIEAKLMKWHRNDDVSRRIATIPGIGPIGSTMLSVKAPPAGNFASGRHFAAWLGLTPKDHSTGGRVRLGGITKAGDPSIRSTLIVGATALLRHVRKGRTKPSRWLAAMLERKPPKLVAVALANKFARIAWRLMISGGVYNRPGGPELSAAA

SEQ ID NO: 263745 - protein, 397 aa, unidentified
MIAVGIDISKAKSTVAVIDSDGTVLASPFTMAHTQPEMEAFVTYLKGLGEPTTILMEYTGHYHYPVLKKLQDEGFPVCIVNPYQMKKYGDVEIHKAKTDKKDALRIAAYALEKSYKLVPYSSMEQKYEDLKFLSRQYNQRISYVAKLKVQLIALLDQTMPGITRILPLNSRNPEKCALLLFIKRFKSFDEIHRIGKARFLASYDILAKKASERSASSKGLSIYELAVDSITTRGEDPYIWLSQNQCVDLLSTTQNAADEIISQMRNIAETIPEYKVLRAMRGVGDRLGPIILAEIGDIRRFHSGKALNSYAGNDAPPYQSGQFESRNRHISKRGSSALRKACYEVMQALKLTKPQDDPVYLFMLKKEQEGKPFNVAKMAGVNKFLRIYYARAMELYK

SEQ ID NO: 263746 - protein, 343 aa, unidentified
MKISRVGIDLAKNVFQLHGVDQHDKAVWHRRLKRDSWLTVLLKTVNPGCEIGMEACAGAHHWARTLMDKGFTVKLIAPQFVKPYVKSNKNDAKDAEAICEAMSRPSMRFVSVKTVEQQDIQAAHRIRTELVGQRTAKANQIRGLVAEYGLVAPQQLERLRKAIPIWLEDGENGLTYLFRHLLYGLWCDLKTLDERVAELNCEINKIAENNPVAKRLQQLRGVGPMVATALIAAVGDAQQYVNGRQMSASLGLTPRQHSSGNKDRILGISKRGDSHLRCLLIHGARSALYAAKGKDDRLSQWITNLAERRHPNVAAVALANKTVRIAWAMLRRDTDYNPELMAV

SEQ ID NO: 263747 - protein, 341 aa, unidentified
MGQVGTIGLDIAKHVFQAHGADGSGAVLFRKKLRRAQVLAFFAAQPPCVVAMEACGGAHHWGREISRLGHTVQLIPPRYVKPFVKRQKNDAADAEAICEAAQRPTMRFVTVKSEDEQAEALVFRTRDLLVHQRTQVINAIRGHLCEFGIVVAKGAQNTGLLAAQVEEPASGLPKSVRSMLGILIAELRRLDERIKDLDREVMHRAKTNATARRLMTIPGIGPITAVALVALAPAAATFKRGRDFAAWLGLTPKQRSSGGKERLGRITKQGERTLRRLLIIGASAVARWATRHGAISGSWLRRMLSRKPPMLVRVALANKMARTVWALLAHGGVYQAPAAAA

SEQ ID NO: 263748 - protein, 387 aa, unidentified
MAQVNDLSRSLTAFDLISTLVVVVEMSKASWLVSGAVPGVERQPLKKLEPDATALLRLIERWRNEAVRAGRPISRIALAYEAGRDGFWLARWLIARGIEAHVIHSASVAVSRERKRAKTDRLDAAMLMRVFLGWLRGERGHCGMVAIPTMEEEDARRPSRERESLINERSRITNRMKSALARLGVRGFKPHLRKAPERLAGLRTAEGTGLPANIIEEFRRDMARLALVREQINSIEKTRAERLKRAPDTGPHAMVRLLARVIGIGIETADMLVREILSRKLRDRRAVARYAGLTGSPDESGLKRREKGLPKAGNARVRRGLIQLAWRFLTFQKDSALARWYRARTEGPSGARKTTMIVALARKLLIALWRLVTTGEVPDGVELRPAG

SEQ ID NO: 263749 - protein, 347 aa, unidentified
MLHLGLDLSRKRLDVCVLNEAGTKLAVTQAPPDLDGLRHLAKEVAALGGPVSAAIESMNGARFVHDSLELMGWDIEIADAQKVKGLAPLACKTDKIDAWVLAELSRRDLVPAIWLPDPEIRAERERARFRLHLVRHRVMLKNRIHSSLLAFGKPCPVSDLFGRSGRELLGRLELPDPWTKNIATALSMIDDLDSEIDACEKELRSLGADHPYVSLLQPAPGIAWVLGFTIASEIGDISRFSSPKKLMGYTGLCPRVYQSGGKDFRGPISKNGPKYLRWSLIEAAVHASSHPVYRDHYDRTKARLGRQRGAKIARIEVARKLAEAIWHMLQTGSMFAPARSPAAPLVA

SEQ ID NO: 263750 - protein, 424 aa, unidentified
MGKFTKTLCISERKEYSIMEGPIITVDVSKGSCHYQPFIENGHPMRKPKQLSATIDGFQKLGQTIKDLEAKTEREDIPVIFEATGVYHRSLQKYLEDHKIRYYIISPLLSAAYRKTDLHSNKTDALDCSHIAKAYYCEKGLRQYQAQPQEYKRLYQLSRLYESELVHLRKRKVSLRSMLDIIYPRIDRTFKGNQNLYDPIPMEILKRYPHPSLLLSHREDTIVKTVGHRTGHLKGYTERIVHKIYEKAKECYSGCDIDDIEVVKLPSLIENVQEQKKKCDSLLKEMIEIARICPYFASVVSIVGIGENLAARIIAELGDVNRFDNRAAIVAYAGLNPKIQQSGDIDGLHLKISKKGNKHLRCLLYLGAQCNYRLRKEDPLYEFTKKKRQQTQCPLSSKAAYTASAHKLLVIIYSLCKNGTLYHS

SEQ ID NO: 263751 - protein, 371 aa, unidentified
MFTLTALEPKEAEMRIIGVDLHTRQQTVAMWDTETKELIERTLTHDGDEVREFYSALPGQVLVGIEATGSMHWFLELLEKLGIDRQVGHPSEIRKAETRKQKHDRRDAALLLKLQIENRFPSIWMPSSELRDLRTLLMHRHQWVRMRTRVQNTLQAMAISRGLRRGKALWSQTGQQAIASLPLPPHTAYRRTELQDLYQKLHAQIDELDKRVGDQALQRPGAKLLMSHPGVGPVTALATDVFLGDPARFADGKAVVSYVGMIPSEYSSGGQQRLGGLSKQGNPFLRFLWCEAAVHAARRDPELQRFYRRKLAQKGLGKARVAAARKLGIRLWIMLRDQIDYQEFCRRGQMRQKNGGACAGMPEVGHSPAKQ

SEQ ID NO: 263752 - protein, 328 aa, unidentified
MVCETVCKEGITKMESIIQIAGIDVSKDKLDVHILASNLDFTVSRDRRGLGELRRRLRKAGVSDVALEASGDYERIVMEALEAAGFVVHQLNPARVRHFGKAMGILAKTDPIDARLTALYCRHFPEAGLARRPEQARKIGEFLSVRAMVLSAIGEARNRLEHLREASLRALVEEDLAMAKARLKTVDAGIAKVIAEDEAMQRKADLVRSMIGAGPVLAANLLARVPELGSVDRQQAARLCGVAPADRRSGKSRRQARIDGGRDQLRPILYMVALTAIRGNPTIAAFAKRLTANGKSKRLVIAACSRKIITILNAMLRDQTPWQNPKFA

SEQ ID NO: 263753 - protein, 369 aa, unidentified
MSEITRVGADLAKRVIQVHAVDGVGQRVTGRALARDKFISWCAQLPPGCLIAMEASSSAHHWARRLRALGLDARIIAAHLVAPYRLQGKGGKNDANDAAAICEAASRPQMHFVPIKSVDQQSMLCIHRLREGFKAERTGCVNRIRGLLAEFGLVFAQKPAVLRQALPDAIEDASNELGTLARLALQRAWAQWQELDAHLAWCDERIAAHLKGNAQVAQAQQLLGVGPVTASAVVATVGDFKQFRNAAQFGAWLGLTPRQNSSGGKNNLGTITKRGDAYLRTLLIQGAKSAVMTAHKRADPISKWAHQLRERSGWQKAAVALANKNARILWAVFVRGKPFDARHVSVKPGGMKPGAPQSAMPVAVVAALT

SEQ ID NO: 263754 - protein, 400 aa, unidentified
MLSIGIDVSKGKSTVCGMKPGGEIVYTPFEVQHTREGLSELVSLLRGSGEEVRVVLESTGSYHCPVVAALLENGIFVSVINSLRMKRFCSQSIRKVKTDRIDAMQIALYGLAYWQELQPTKLPEDTYRELQLLARQYYQMTSLLIKAKVDFNALCDQVLPGMQELMNDHAGRHKLSDFVLRYHHTTHILEMGETRFRKDYCKWAEKKGYRNCERMAVLIFATAQNGIPVLPDAPSTQIVITEAIRVLHTVEASRDAILTQMQALAKTLLEYSLVREMPCIGDTLAPRLIAEIGDVRRFHSKRALIAYAGIDAPPYQSGKFCANNRHISKRGNRYLRKTGYEVMQSYVMHKPANDPIFTFIEKKRGEGKSGKLAMVAGLNKFLRVYYGKVTELYRSLPTIE

SEQ ID NO: 263755 - protein, 337 aa, unidentified
MEYFAGLDVSMEETHICVLDREGVVVHEAKAASRPEAIADELARAPSCRRVVFETGRMAPMLFHGLSHLGLPIVCVESRQAYQALKSLATHKTDRNDARGLAHLALTGFFKPVHVKSLPAHAIRSLIIARKKLVGLRVTLENQIRGLAVVFGVRLPRALTAAFIEQALGASEGIAGLSAAMQGLAAARAAVLAAVVAIDADMKRMVRASEACRRLMTIPGVGQLTALAFTAAIDDPERFKRSRDIGAYLGLVPRRYQSGEVDYTGSISKCGDRRMRTLLYEAANVMLTRYRGQLKLKDWAFAIAKRSTMRKARIALARRLAIIMHAMLRDGTEFKPA

SEQ ID NO: 263756 - protein, 358 aa, unidentified
MYIIGIDIGKNHHEASIVSPEGKQIGRSLRFATTHKGADSLMRFIFKNIGNSPCVFGMEATGHYWYPIYSFLKAKRYTIYVINPIQSDSLRKMYIRQTKNDSIDSFLIAEVIRFGQFGTTSMADENILAMRQLCRYRDSVISSRTEIKLRIGTIMEQIFPEYEKQFSSLWVSTSMGILEKYLTPENIENTPIDELFEIIKDKSHNRLTKAKAISIKEAAADTFGIKIAQDAFSFQLKQLIDRMNFLDKQIEALDIEIMKYYEQFDCYLHTIPGIGIIGAATILAEIGDISRFKNSSALVAFAGIDPTVRQSGEFNSTHNHMSKRGSPYLRHAIFLAATTCSFHNSPLNAYYKIGRAHV

SEQ ID NO: 263757 - protein, 354 aa, unidentified
MENPTTIAVDLSKDVFEIAVERQGRICQRRRLHRRQMVAFFSTCPPATVVMEACGSAHHWGRKLRGFGHTVKLLPAQHVAKSRIGSKTDRRDCQAILAARDREDVVPVPVKSVEQQTIASLHRLRAAFLKTRTARLNTLRGLLREFGVTIGAGPSKVKPGLVEALSDPEGAVPEALHAVLVSVMKEVRGLDERITEVERQLKALAPSMPLVERLDAIPGVGLMNATAFPSMVGDFSRFRTGRKFAGSLGLTPSERSSGKRRWLGAISKAGDTYLRTLLIGGAQSVLNAAHRTKRPHRLQAWALQVERRRGRKRAAVALANKLARIVWAVATRGVPFRALPLDVSKPENPANSPA

SEQ ID NO: 263758 - protein, 418 aa, unidentified
MNKRMLSRPLGRCVGLDVHLDFIEIAICEEGKVFSAGRVPSTPEGIATLADSLLPTDRVALEVTGSSWEIVRLLEPHVSKVVVVSPGDTGISQARAKTDRLDARTLARLLWTGELEAVWVPPEWISRMRRRLHRREQLVRARSRVKNELHAVLMRRLKGRPPMSDLVGVKGRKWLRGLQLPLEEAETVQAGLRHIEFLDTEIEQVERLICQEALKSPQVRRLLTVPGVNVICAAIFLAAVGDIRRFKGSRPVVAYLGLDPRVYQSGSGPARGGRISKQGSPQARWALVEAARSVAQQPGPLHAFYERIRARKGHNAAVVAVARKLAVLFWCMLTREEDYAHQQPSLTAQKLRRLEVRAGAPTLEGKPTGVWATRERMRQAEKQLAAQAEASYKRSVADWQATKSNKEKAGASVTAERA

SEQ ID NO: 263759 - protein, 393 aa, unidentified
MAVINEHGKPLADREFLAVGSGYRKIVDFITSYGIVTAVGVEGTGSYGAELARTLRAAGLTVLEVNRPNRAARRLRGKSDPLDAYEAAKSVLDGRTTSIPKAKDGPVECLRILRAGRASALKARTAAINQIKGLLVSAPDKLRAKYRAMATSALIPALQRTRPSGHTADPEYVTLLTLKALATRCQSLAAEIAAADAALQEIIDAYAPMLCDLPGVGTDVASQLLVTVGDNPDRLGNEAQFASLVGVAPVPASSGKTTRHRLSRGGDRHANHALYQVVLVRMASCQRTKDYVAKRTAEGKSKREIMRCLKRYAAREIYRQITNPQPAPDNSDLRQTRTTLGITISTAARELGQWPSKISLLERGLLRNDILATNYRRWLREQQPESAIQNAIL

SEQ ID NO: 263760 - protein, 321 aa, unidentified
MAKHITICAGIDTGKRKLDVAIDGTSLQLQVENTAEGHKMLLEWLRRHKVKRIGIEASGGYEQAVVIELRRKRFVVVVFQPAQVRAYAKFHLQRAKNDRIDAALIGACTAAVKKIHPAPDPRLQPFAEHLTLIEQVGEDIKLYKNRLETCRDPRIQKLWKEEIARLAKRARVELKALVAAIREHRDLAQRLDLIYSVSGAGMPTAVEILVRMPEIGQLSREQAAALAGLAPYDDDSGEQVGARHIDGGRKRLRRALYTAALPASFRWNPQLIALYQRLKAAGKEHKRCLIACARKLLIFVNTIVARGTPWQDQPPPAAATG

SEQ ID NO: 263761 - protein, 370 aa, unidentified
MLDTTTFVGLDVHARSIKAVSLDVMTGEARCATFGYDAGAVAEWVRSVDPRARCVYESGVTGFDLQKRLSGLGVGCVVGAVSKMIKPSADRRRKNDRNDAEFLARMLSVGNVVEVWVPDDECEAARDLTRALEDARDDLSRSKQRLSKFLLRHGLVFDERTPTGRRKGNWTRAHWSWIESIRFAEGADNDVLAYYVDAVRRAAEEKARLEGLVEAEARRPRWRRRVDSLRCLKGVDTASAADLVFEAGEFSRFGNARSFAAWVGLTPSEHSSGESDRRGAITKAGNKHLRKALVEAAWHYLTCSARPKEHVRGQAPDPGARRHAAKGVRRLVERREALLARGVHNNKANVATARELACWVWAVGLMAEEA

SEQ ID NO: 263762 - protein, 389 aa, unidentified
MLLDHPSDEPTAIRTYIAAIFVSLELSRSTWLVTSLSPGKGERMSKHSIAAGDIAGLLALFAELRRKAEVRTGQSYPIITIQEAGLDGFWLHRVLQQEGIESHVVDPASIATPRRRRRAKTDRLDGEALLRALLAYKRGEPRVCAMVVAPSPEEEDRRRLCRERRTLIDERITHVNRIKGLLFAQGICDYGPLRRDRRARLEALRTGDGRELPSHLKAQIGRELDRIELLLDQIKAVEAAQDALLATARKPASEQAAPDPVTMLLALRGVGANFAAVLWSEAFYRQFANRRQVAAYAGLAATPWQSGGIRHEQGVSKAGNPRLRTTMIQLAWLWIRHQPQSALTRWFKLRSPQGRKRAIVALARKLLVALWKYVTQGVVIEGAAMKPAA

SEQ ID NO: 263763 - protein, 260 aa, unidentified
MSYIGIDISKAWFDAFCLVRKTGKRFSNDEQGWVELTHWIAADAVLVMEASGPYYLFGACWAHERGYTVSVLNPLIIRRYSQMRLSRAKTDAKDAQLIAEYARDHTPHTWTPPSKVNQAMQQLMSLRDGLLRQQTMLLGQQEAFTHAVVTEQVVHQVLEDQKRGIKESLTQIDQRLEQLVEAHYKECYQAVQTIPGVGPKTALLLICMTDGFARFEDARSLASYVGICPRVYSSGSSIRGRGAICKLGSAKLRKLLYMCS

SEQ ID NO: 263764 - protein, 350 aa, unidentified
MYPFYLGIDLHLKRTYVVLMDSTGQVLDERRLPNEEVKGYLERRVPKETYAVVEATRNWAFMYDMLVEHVERVELAHPKELKAISAAAVKTDKVDARTLANLARINYLPIAYAAPQSVRDLRTEVRHRDQLVRQRTQVKNRIQAVLASYNLVSPTADLFGVRGRQFLEETLENRLRPAAVRVIRSDLVLIDHLTQQIAAVEDSTQLSTEQEQQVRLLCTMPGVGRVGAITLLSEVGTIQRFNSPKALCNWAGLTPKVKSSDLQVHHGRISKQGPALVRAAMTRAATIACRCSKRWYRVHENLIPRCGRQAAKVAVARHLLTVIYYMLKRQEPYQENYSAKTGEPAAMQGA

SEQ ID NO: 263765 - protein, 327 aa, unidentified
MKSIYVGIDVSKRTLDVCVKGAEQEQFFKIENKSNSIKKLFKELRKVDSCVVIAMENTGHYNHQLYKVLPNFNFTVYVVDPKHIKRSIGLVRGKNDKVDAKRIATFIERNNEDLNPWEPLSESVYSLKVLLTERKAEVARIRSLKQRIESLNQQKSVSSVPKLITRNKKEIQRIQKRVKEIEKMIREEIAKEISLKREIDRIKTVPGIGDITAWMIAAKTHGFKRLLDPRKLACFAGVVPFEQQSGSSLKTKPRVSKMADRSLKTVLQMAAMRSVRMNNELQSYYQRKVEEGKNKMSVLNAVRNKLIHIAMALIKNKTYYQNRLELS

SEQ ID NO: 263766 - protein, 337 aa, unidentified
MKTFIRIGIDLAKNFFQVHAIEREGAPPVRRKLSRGKVLGFFAQAAPCRVGMEACGSSHYWAREIRALGHEVVLIPPAYTKPYVKRGKNDANDAAAICEAMSRPDMRFVPIKSADQQAVLMLHKTRELLVKQRTMTVNALRGHLSEFGLIAPKGIQRVKDLLALALSDETLPEEARQAAAMLASHSDGLDEKIDDLEKTIARASGRNQTSRLLDEIPAFGPLIASAMVAFNPDPGVFRSGSDFSASLGITPSQHSSGGKDKLGGITKKGNRYLRKMLVVGCTSVLRVAHKYKGALAEWIVAMRARKPERVVALALANKLARIAWAMMSTGESFRTGL

SEQ ID NO: 263767 - protein, 410 aa, unidentified
MAGAATGVIIGVDPHKGSHTAVALDGQENVLGQLRVRAAPGQVDQLRRWAAPWPQRTWAVEGARGLGHLLTQQLVGAGESVVDVQPKLAARVRLLDTGQINKNDPNDARSVAVAALRATAPPAVAIEGGTAVLKLWARRYRDLGRLRTQVMCRLHAVLCDLVPGGFSREISAGQAIDVLHLLTVHGPVADARLELAHDLVTDLRRIDVQRREVKRRLTRQVAASTTTVTEIYGVGPIIAATVLGYVGDIARFPSRDHFAAYNGTAPIEASSGNRKIHRLSRRGNRQLNHALHMAAVTQIRNRGTAGRAYYDRKRAEGMTGKCALRALKRKISDAIYHRLVRDTRQQMRSKTKDPGGQPGNDSASSAAGSHPEPPALRKSHSRVAANPTTRRPAPQPAKPARPTKIVPHAS

SEQ ID NO: 263768 - protein, 312 aa, unidentified
MDTIAVGIDVAKDRLDVCVRPSGESFVVDRSGAGIEVLVERLKGLQPRIVAVEATGGFETVVAAGLAAAKLPIVVVNPAQVRAFAQALGKRAKTDPIDAAVIAHFVEATKAEPRALPDEMTRLLADLVARRRQIVEMMAAEGQRERRLTDKRLKRSIARLRKAMEKELAELDGEIDDHVRGSPVWAEKEDLLASVPGVGPIIARTLIAELPELGTLDRRQIAALAGLAPWTRQSGQWRGKSFIGGGRKSVRSALFLAAMVASRHNPTLKLFRDRLVAAGKPKLVALVAVARKLLTILNAILRDQRPWQPQNP

SEQ ID NO: 263769 - protein, 362 aa, unidentified
MEFFCGLDVGMDETAICVVDATGKVVLEVTVVTDPEAIRTALAPYLGRLRRLGHEAGSLSPWLHPELLRLGLPAVCLETLHVRAALKAQRNKTDRADALGIAHIMRTGWFRRAHIKSEACYRLRLLLTHRRNLKRKFLDLENAIRHSLKVFGIRLNRVGRGGFAQAVREAVAHDALVSELIDAMLNARAALWKEYCRLHDLVVRLVAGHELCRRFMQIPGVGPIAALSFMTAVDDPSRFRRSRDVAAYFGLTSRRWQSGSSIDVRGRISKAGDGDVRRALYEAASALLTRYKKKDKVKAWGLALAKRSSHRKATVAVARKLAVIMHAMWTSGTFYCGDPDASGAEMRAETTAKQRRLLGAYA

SEQ ID NO: 263770 - protein, 356 aa, unidentified
MQLQDALIKPKIFIGLDIHKKSWTVSIQTDLFFHRTYSMPSVAEDLFQYVEQTFPNHEVDLVYEAGCCGFSPARYFLNLGWNVLVVNPSDVKTGDKQRYQKTDALDSKNLSNQLKAGVLKGVYIPTEEHEQFTTLARHRTQITKKLRQSKLHIKSMLLFHGIKVPDEFDTPNWNKDFIVWLEKIKFSSNCGELALQGKLRMYKFIRSEYLEIANQMRAHCRKTYKNDYNLLKSIPGIGGYLASVILAECGDLRRFNNEGQFSSYIGLVPGIHKSGDSEKCLGITPRSRSQLRSYLVEAAWVAIRKDIEMQQYYRKHQGKNVKSVIIKIAHKMARRILSVIKTETPYQINRNLVLEK

SEQ ID NO: 263771 - protein, 350 aa, unidentified
MNVNQYIGFDVHKKTVSYCMKAADGRIVEEGKLRATREALRQWARERQAPWCGAMEATLFSGWIYDALKPYAAELQMGHPAMMKAIGASKKKNDKLDARKIADLVRCDLLPACYVAPPEIRELRGMLRYRNLVVGQATRMKNKMSGLLMEAGAEYNKQRLHGKKYFTKLLDTVEEVPESVKDMLRLSRGAMEMFETTQQQLLAKLRKDPLLAKRVALLTSIRGVGEVTALTWALEVGDPRRLTSVAHAVSYCGLTSALVSSAGKEQRGPISKQRNAHLQTMLIEAAKLAPRWNPQLAAVHARELERGNRNRATLAVARKLVAYLLAVDKSGQAFQIRNQPAAAMAEEKVA

SEQ ID NO: 263772 - protein, 339 aa, unidentified
MTVKTVGLDLAKDVFQVHGISENGRVIFNKAIKRAKLLRFFETLPPCRVGMEACGSSHHWGRQLRKLGHDVKLMPAGYVKPYVKRGKNDAVDAEAICEAVRRPTMRFVEIKTEDQQAILSIHRTRDLAVRQRTQLANMIRSLLREFGHILPIGIEAITAFAKRHLDGDQPEMPEIANGMLGIQCYQLIGLNARIDGCSKMIEQHALLNADARRLMRMPGIGPVTASAIVATIGDAHQFRTGRDLAAWLGLTPLNKSSGGKERLGKITKQGDRYIRKLLVVGMTSRAVMAKRSPEKVDLWTAKIIADKPFRLATVAMANKAARAIWAMLTKKQEYRRPAF

SEQ ID NO: 263773 - protein, 313 aa, unidentified
MTPPIFIGIDVAKESLDVCVLPSEDTLHWGSSAKEIQALRSRLRRLSPRLIVLEATGGYGTTLAAELQEAGLAVAVVNPRQVRAFARAVGVLAKTDTLDARVLALFAQKIEPPARPLGDADARQIKALVARRRQLVGLRTAERNRLTRADIADVRASIQDVLETIEQQLQDTERRIHQAIVGSPLWLEKATLLESVPGLGRVTASALLAELPELGQLTRRQIAALVGVAPMNRDSGTLRGRRLISGGRTPVRNALYMATLVATRWNPVIHAHYNHLCTSGKKKIVALVACMRKLIIILNAMVRKNQPWNPRLS

SEQ ID NO: 263774 - protein, 323 aa, unidentified
MTKDIKYFGIDISKDVFDVCDNNAKYYQFKNSVSGFKKLVKLLDLNSVCVMEATGYYHSRLAYFLLESGFGVSVVNPLKIKRYIQMDLSKIKTDKSDAKMIQLYGKDREPKLWTGQSKTQQESLQLSRTLSIYSKQSTQLKNKIHGEDVLGNPSKIVVSSLKRSLKYLKKEMDALEKALDKNVKKEYQESLTLLKSIPGIGDKTALMLLVFTDGFQRFESSKELCSYAGITPIIRQSGSSVKGRPRISKMGNPKLRNLLFMCSFNACKYNRACKALFDRIVAKGKSKKLALIAVCNKLLKQAFSIVKNGVPYNDEYRSTLVKN

SEQ ID NO: 263775 - protein, 407 aa, unidentified
MDSLKTVFGIDVSSRKSNVCIMVNGQKVNDYAISNDMVGFNQLLDDLKQVTNPQIIFEATGVYSRRLQAFLDMHDLRYVMMNPLEAKRKTKDDLHQNKTDKLDAMYLAKMQSEHPQRLAYVQSEEYQELMANNRIYEQASHDLITNKNRLHKAIQLTFPEIEHLLANPRGKNYWSIVLKFPHPNIVLETKEADIIDFLKSLSGIGEKRANDLAQRLIRLAKLACPAVKKSSAHIRGLEMAINNILSAEETCQTALKEMAKLAPKRDLEILKSIPGIAENTALRIISELGDIRRFNNPNQLNAFVGVDPQVYESGNLTAHLSISKRGTAIGRKVLYLAINQIQSAKKAGNPCHIADYYEKRKRSSKTASHKKAAIASIHKLLRTIFALITNDQLYSYDIAKHNQRLLS

SEQ ID NO: 263776 - protein, 410 aa, unidentified
MELLHRRCCGLDVHKETVVACQRLVSDGKVTTEVRTFQTTTADLLHLSEWLASNGCTHVAMEATGVYWKPVWHILDDGEFGLVLANAAHVKNVPGRKTDVNDAMWLAELLAHGLIRASFVPDTQTQEMRNLLRTRKQLVREQSSHVLRVQKTLEDANIKLDSVLTDLMGKSGRAMIEALIAGETNPTKLASLADRRAKASNEEFREALRGRVTKHHRFLLRLHLNQIDALNAAMATLDAQVEENLGPFRTAVDLIISIPGIKNLGAHVIVSEIGIDMSRFPSDAHLISWAGICPRNDESAGKRRSNRLRKGAPWLKTTLVQCAWAAVKKKDSYLQAQFYRIKARRGAKKAIMAVAASILTAIYHMLKDGTIYKDLGHDHFDRRSTDQQKQRLVKRLAELGYVVEIKPLAA

SEQ ID NO: 263777 - protein, 398 aa, unidentified
MHVGWDWASEAHDVTVIDDAGGVIDRWALTHDEAGIAGTLRRLAALGDPGGLPVAIEATHSLVIDRLLGAGHPVVPIHPNAFHATRPRWGASKAKSDPGDSFKLADYLRTDGHRLRRLEPLSTETAELQALVRLRDDHVAAKVAATNQLRVLLERHWPGATAIFAHLDSDIALAFLDDYPTPASAAHLGVSRLAMFCRRHSYSGRRTPEQLLARLRSAPEPTEALRAETLTELVRAQARQLRTLLGTIADLDRAIGAALLDHPKAGLLAPMPRIGEINLAQIIAEVGPILDRAADVHHACAEVGAAPVTKESGKGRAVNFRWAVNTRARFALMTFADNSRHASPWAAELYAAARARGKRHPHAIRIVARAWVRVMWACWHTNTAYNPALHRAEQKLAA

SEQ ID NO: 263778 - protein, 447 aa, unidentified
MEIVHERCAGLDVHKKKVKACFSSPGVDGHRSKETRTYLTMTGNLLEMRDWLKGQGCTHIAMEATGVYWKPINNLLEGDFEILVVNAHHIKTVPGRKTDVKDAEWIADLLAHGLLSASFIPSAPQRELRELTRYRTSLVEERAREVNRLQKTLEDTNLKLGDVVSDVMGKASGLILAAIVGGETDAVRLASLAAGRVHASQQDLERALTGKVTAHHRFMLGQHLALIEHLDEAIRHVSEELARRFTPPEPPTEEEQPTQPADAPTPECSEAAPSEAESAQLSWQEAAEIIDQVTGISQRVAQGLLAEIGVKMEQFPSAKHLASWVGICPGNHESAGKRLSGKTRKGNPYARRLLIQAAHAAAHSKNTYLAAQYRRIAARRGPKRAAVAVGHSILVIVYHLLRDRGTYQDLGGNYFDEHDRQMVQKHLVRRLERLGYQVDLQPRSEAG

SEQ ID NO: 263779 - protein, 354 aa, unidentified
MRDEQNPVCEAAVWIGVDVSKSTFDAALAEGGQGGCPPLGKLPARCFSRSPEGVAELLSWLRASGFAPASARVVMEATGRYSVELAAWMAQARPPLSPAIESPCQTAAFIKSLGMRNKTDRMDARALALYGVERRPRAYQPPPASEGELRELVRHRDFLVQQKVAAENRAGEMRDSKYVQREMRRLILQLERDIAKTEKEMARVKKASPELENDIELMTSIYGVAFLTAATIRAELGDLRRFEKARQLTAFAGLNPSVRQSGSSVRGRTHISKAGNPRVRRALYMSAMVAVRGDNDFRNDYERLMAQGLSKMAALCAIMRKILVLMRALLISGKPYVPLWKNRPQPQEKMCLEA

SEQ ID NO: 263780 - protein, 350 aa, unidentified
MMIIGCDYHPGFQQIAFVDTETGELQERRLEHREEAEKFYRDLGAQGGKVRVGMEASGHARWFERLLAELHFELWIGDAAAIHAKRVRKQKTDRQDAQLILRLMWKDDFPEIWVPSWENRDLRQLLWHRHRMVQARTRIMNQLQAVALNEGLRCKKRLWRDAGREQLESFRLAPWASRRRRDLLELLDRLTPTIAELTAAIEQEVEKCPEAQRLQTHPGVGALTALAFVLIIGRADRFQCGKQIAAYLGLVPLEDSSGQRRRLGHITKQGNSLLRFLLVEAAQVTVRSDPQWRSKYCHMALRRGRKIAKVAMARKLAVRLYWMMRKEWNYAELRKFGSYAGKPGNRDGVK

SEQ ID NO: 263781 - protein, 411 aa, unidentified
MVIGIDIGSQKHWARAFDNRGIELSKKAFGFSNTSAGFASFEVWYEGQRCAAGLKRIMVGLEPTGHYWFNVNQFLTENGIQVVLVAPQHVKHSKELDDNTQRKDDLKDPRVIAKLVTEGRYFLPYRPTGVYADLRNGFNRRCGLVESMTRVKNRLHRWFCINFPEYLEAYGSITAKTGLMVLKKAPLPKDIVELDVEGIEKIWRDAKVHGAGKKRATTLVALAEQSIGDKTASEAARLELRQLLEDYEHYAHQYDVIEEMLERKVHEVPCADKLLQIPGIGYITVIGFFAEVGSIDRFDNPKQIQKLAGLSVVENSSGKRKGLPGISKRGRDRLRWVLFQAALNSVKNNQEFRNIHLYFTTRKDNPLKKMQSLMAVAAKIIRVFYGMARTGSGYDPDRLMRDIRRPEKSVA

SEQ ID NO: 263782 - protein, 368 aa, unidentified
MKQVTTYVGMDAHKKDLFIAMLVGNRTVPVTWQVANEPQAVRRLVRKLEREAPGPVRVCYEAGPCGYALQRQMTTPRVECQVIAPALIPRKPGERIKTNRRDARKLVELHRAGLLTEVRPPTPEDEAVRDLCRARDDAREDLQRSRHRLGKLLLRRGLHFSGRNWTKAHRRWIESLEWTHAPERVVVDDYLLAIDHVEARLIELDARLTDLAQTDPYREPVGWLRCFRGIDTLTAILILAELHDFRRFQSPRALMAFLGLVPGEDSTGEKHRRGRITRTGNALVRRLLVETAWHYQHRPSVGVALTRRRKGQPTRVIAIADKAQQRLCRRFRRLAEQHKPAPKIAVAIARELAGFLWAALQPAASPAT

SEQ ID NO: 263783 - protein, 331 aa, unidentified
MPTYYLGLDVHKVRTQYCVMDPAGGILKEGSVPTEEAAAVVPDDDTAVVLEATGSWRFAYDALVATGALVKLAHPARVKAIASARVKTDRIDARILAHLLRTDLIPEAWAPPQTTRELRDLVRLRWRFVSQRTTAKNRISNLLARECLRFAGSGMFGKSGRAWLATLGLAPHTRGMIDLLPVSIGEAGHHVEALTARLHERLDGDADMYLLMSIPGAGSITAATLVAELGDWRRFSRATQVSACFGIVPSVRASASAAHYGHITRQGSSHARRALIEAAHAAKRLPGPVGHRCLSLVKRRGKKVAVAAAARVLLELSWTLLRKGEVYRAAA

SEQ ID NO: 263784 - protein, 369 aa, unidentified
MQENTNVATLVDLRKRKNIGRMTIGIDLGDRRSHFCVLNEQAQVIARGFLPTTITAFRREFESLPPSLVAIEAGAHSLWANQVLKVCGHDVLVGNPRKIRLITESDRKSDRVDAESLARLARADRLLLAPIQHRTQEKQVQLSVIRARHVLVRSRTALINCARGLVKPMGLRLPACSPEAFPKRTATTSLPEILRVALAPLLKQVEAVNQAIRDYDRQIEQIAATQYPETCLLKQIKGVGTLIALTYVLTLEDPHRFSKSRDVGAFLGFLPREKQSGERAPRLGISRAGNEYLRTLLVQGAHYILGPLGPDTDLRRWGLQLAARGGGGAKKRAVTAVARKLSVLLHHFWKTGEVYEPIRKTPLAEIPAA

SEQ ID NO: 263785 - protein, 429 aa, unidentified
MRTESTPGARGPVFCGVDTHADSHWLCVLDWRGRKVLSRQFPADAAGYEALAGAIAAAGEPACVAMEGTSSYGAGLTRHLVSLGMPVREALSPARMQRRRPGQGKCDEADAERAARAAMSGSKLGTPKSQDGWVDGVRCMLAARSGAVKARTSAINTARSLLTTASEGLRSRFRGMGGPRLMEELPSVRAEGALGAALGALADLWAAARDAALDMERAIEASLEENCPALLAMYGCGPVSAAKLAVAAGDNPGRLRSEASFAAICGACPIPASSGKTVRHRLNRGGDRQANSALHEIARQRVMRDPETAEYAERARGRGKSDREVMRCLKRYVAREAYRALMHPHEIRRPEDASGLVAARRAAKVSQVRAASILGTSEKYISMLERGQRELKPIRRAYEAWVEAGLPLDWDRRAFEAERKMDSKKHLAK

SEQ ID NO: 263786 - protein, 338 aa, unidentified
MTNDITTIGVDIAKHTFHLVFANQQGKPIQRKQLNRSKFKELIQTLEITTFALEACGTSHYWARTIQQAGHKVKLINPAFVKPFVMSNKNDFNDATAIVVAATQPTMRYVSPKSTEQQDILMLHRIRERLVHQKTALINQIRGLLAEFGIVIKGGAKNLINELPFTLEDAENGLSPLGREQFYLLYQDLKQMDQRLNEQSLKIEMLAKQNPVASKLQKLPGVGFLTASAITASVGDPLEFKNGRQFSAWLGLVPRQNSTGGKNILLGISKRGDSYLRRLLVQGALTAIARTKGNDSQVTWAKKLRQAKCTQVAAVALANKTARIMWSLMAHDKEYQVM

SEQ ID NO: 263787 - protein, 314 aa, unidentified
MNTPVCVGIDVSQSQLDVAVRPGTGFSTSNDEGGWATVVAHLQPLKLARIVLEATGGLEVPLVGALATAQLPVIVVNPRQVRDFARATGQLAKTDALDAQILAHFAEVIRPPLRPLPDTQTQTLAALSARRRHLIEMLTAEKNRLRTATPAIRQSLRRHLVWLQRERTYLDTELAEAIQASPVWRDKDDLLRSVPGVGPVLTTTVLANLPELGTLTNKQIAALVGVAPLNRDSGTLHGKRLVWGGRAHVRAALYMAAIVATRYNPVIKIFYQRLCQAGKAKKLALTACMRKLLTILNAMLKSGTPWRVAVSQSA

SEQ ID NO: 263788 - protein, 343 aa, unidentified
MKLSYVGVDLAKNVYQLHGVDRHGKAVWKRRLRRGQWLQALLDNVEPGCEIGMEACTGAHHWARVLQSRGYVVRLIAPQFVKPYVKSNKNDANDAEAICEAMSRPHMRFVTVKSVEQQDIQATHRVRSELKAHRNAKANQIRGLVAEYGLVAPKTLLALRRAIPEWLEEAQNGLTIYFRSLLHGLWEDLLTLEDRLKELDKEIEKLARSNEVAKRLQQLRGVGPIVATALVATVGDGAQYKKGRQMAAALGLTPRQYSSGDKHRLLGISKRGDVYLRTQMIHGARAVVSQAKHRDDPLSRWVTDIAKRRHPNVAAVALANKTARMAWAMLRNDTDYDPGLGAC

SEQ ID NO: 263789 - protein, 438 aa, unidentified
MSNKVIFNLDELFISVGIDVGADFSWMSIALPNQQFVGKPYKILHNSIDSLTTAVSKIKEAEELYSLESRIFLESTGIYHYPLFCYLRDKGFNCSVINPIITKNSTNINIRKVHNDRFDSKKAALVGLKPDLKVSLMPSDLVLNCRNLSREYYDLMDNRSAYVNKLQGELRMAFPQYLGIFSKVTTHTSLTLLETYTSPSAFIAADKQEIIDTIKSTARFGLAYAQNKYNAIIKAANEAKEFGYIIDSNIKRIRLYISFIRKYDEEINSILQAMHELVNANEDTDFVKQIHLIETFKGAGFLSAVSLMGEIGDFSAFSKPKQLFAYFGLDPAVKQSGKFEGSKIQMSKRGSAIARRVIHTLTLQSISTSRTGEAKNPVLRDYYLKKCESKPKLVAMGAVSHKVCNMIFAILRDNKPFEIVTPQEHIKQYNAAKCDIAA

SEQ ID NO: 263790 - protein, 346 aa, unidentified
MVIVEGRRAVTGGVDTHLDVHVAAALDEIGGLLGVESFEASRAGNDKLLGWVGSFGPVTRAGVEGTGSYGAGLARLLRTAGVEVVEVDRPNRQARRRQGKSDPADAVEAARAAQSGRAFGAAKTRDGNVEAMRALVVAKRSARSTKNTTRNQIRHLGFTAPDELRERLKGLSRHQLAGEAAALRPRPGGDPVIVATKTALRTLGRRVLALDEEKAALDELLADLVAATAPGLLGLHGVGVDTAATLLVTAGDNPQRLRSEAAWAHLCGVAPIEASSGKVTRYRLNRGGDRQANSALWAIVITRMRSDPRTRAYVARRLEEGRSKPEIIRVLKRYVAREVYRHLPRG

SEQ ID NO: 263791 - protein, 428 aa, unidentified
MAGPGNPTTPCNLVAIDVARYWNAVLIETLGGKRHRFKMANTAADFDRLLGFLRKLQGRCCVALEPTGDYHRPLAHRLLVEGFDVVGINSVAQARYREAMFNSWDKNDPKDAAVILEMLRRGAVQRYVDPMLAGNHDLQELAKTYYQVSRARTKVQHSLINHCLPLYFPEMHRYWATTRNEWFIRFLLQFPTPAHVRSLTRDQFVEAAWEVVGRKVDKRAKLEEMWEMAGATAALPHAPDSLAVETFRVTLRRYQELNTLRADLEARAELALSANADFAHLKTLPGIGSVLAMTILAEGGNLRRFGHHRQFLKYCGFDLAKTQSGTQRGREQLSKRGNARLRLAFWLAAVAAVHMRENSFRAKYERYIHAAPDDADLRRKALTAVAAKMARVAYGMIKKNQPYRQFFEQSLPSGSIPLSVAVGALATP

SEQ ID NO: 263792 - protein, 341 aa, unidentified
MDKELYFGVDVSKKTLDLAYYDGETIDWKNAHIKVSNDDAGFKKIGSWVAKVGKDFDTFLFCMEYTGLYNQNFRLWLESKEYIYGMVEPRKMHRFEPDLDDDQRSLDRIKTDELDAFRIAIYCEQNHKKILRNPSKLPSPVYFKLKRLLAERKQNTKQSTLYKQQLHDICAYDTDLSVERKKLLLKNMQENLKAIDKEIDSYMQEDANISKNYNLLTSIPGIGRIIALETIVLTENFTAISNPRKYACYIGIAPFKKESGTSVRKKTGVSKKGFSEAKADLSIAVLSAIKNNPSIRDYWIRKRKEKCGGIVLNAVKFKLVLRMFAVIKRGTPYVETDAYKN

SEQ ID NO: 263793 - protein, 360 aa, unidentified
MTGTMTFVGLDVHARSTHAAAIDVLTGELARARFGGGSEEVVAWLQALPQPVYACYEAGPTGFALYRDAVAAGVRIEVIAPSKTPRAPGDRIKSDRKDAELLARLLLAGQLKAVTVPGREVEAARHLCRAREQVRSDLMRCRHRVSKLLLLHGRVYPEPTAWNTRHRQWLAGQRFDEVATELAFLDTLAAVDGLVARKAALDERLSRLAVEGEWRPTVARLRCFRGIDTLTAFVLCLEIGDFHRFQRPAQLASWLGLVPSLDQSGESRRQGSITKTGSGYARRLLVESAWHYLRQPRLGATVANRQQGQPAHVLQIAWRAQHRLYRLHARLRARGKPGNVSTVAVARELACFLWAAATAD

SEQ ID NO: 263794 - protein, 402 aa, unidentified
MSNRLSQAWCGIDAGKGHHWAAVVDETGTTLWSKKIDNDETAILMALGEILDLADEVRWAVDISGTASALLIALLASHGQQAVYVPGRTVNRMAGAYRGEAKTDARDAYVIAETARHRQDFATIDVPAQLATDLALLTGHRSDLVADRVRMINRLRDVLSGIFPALERAFDYSAHKGALVLLTGYQTPASIRRRGRSRLTAWLAKRGVRGAHAVATTALEASQAQQILLPGEAVAAQIVADLAAQILSLDDRLKGVDRQIRERFRTHPQAEIIESLPGMGPILGAEFVVAAGDLWAYADAGHLASAAGLVPVPRDSGRRIGNLHRPKRYSRRLRRVFYLSAQTSIIREGPNRDFYLKKRGEGCKHVQAVIALARRRASVLWALLRDNRTFTPVAPITRYKDL

SEQ ID NO: 263795 - protein, 388 aa, unidentified
MQQVANRPEQAAIRTDLGAIFVSMELSRSSWLITSLSPGGREKMSKHSLRGGDVAGLLELFATLQEKARARTGERFRIIVIQEAGLDGFWIHRVLQGEAIESHVVDAASILVSRRRRRAKTDKIDGETLVRTLLAYKRGEPRVCSMVKPPSPEEEDRRRICRERKTLIAERVEHVNRIKGLLFAQGVGDYEPLRRDRRARLEDLQTGDGRALPFHLKAQVVRELDRLELIVEQLQKVEAARDDLLLDRAAANDPAPMVRLLQLKGVGAEFANVLWSEGLYRHFDNRRQLAAYAGLAPTPWQSGSVDHEQGVSKAGNPRLRGTMVQMAWLWLRHQPNSALSQWFKQRVERNGGRLRKPLIVALARKLLVALWQYATAGVVMEGAIIKPA

SEQ ID NO: 263796 - protein, 403 aa, unidentified
MNSVGIDISKGRSTIAVMRPFGEVVISPFEIRHTGSELSKLAKQLKSLNGETRVVMEATGNYHAPVAKLLHDAGLYVSVVNAKLVHDYGNNELRRVKTDRKDAVKLANYGLDRWLTLPRYIPEEDTRLLLKNCYRQYRQYSKVQTVLKNNLISLLDTVFPNANRLFSSPIRGDGSEKWVDFVAEFWHCRCVSEKSERAFTSKYLRWCRKHGYNFREAKAHTIYAEASGHIGVMPKSETTKLLVEQAVAQLRATSTALAALKHEMQSLASMLPEYPVVMDLFGVGPTLGPQLIAEIGDVRRFYSKKALVAYAGLDAPPNDSGDVTGRHKSMSKIGASSLRRTLFLVMSVYLQTAPLDEPVYQFMDRKRAEGKPYRVYMMASANKFLRIYYATVKAYLESLEHTA

SEQ ID NO: 263797 - protein, 348 aa, unidentified
MIEYEHFIGIDLHKSILQVCVLDKDGEIIKERRFREGSLSGGLAVVDWLMQWKQGGRLCVEAVGMNRWFVNACLDQELQVVVVDPTKMNLRMLGKKTDRRDAYELARRLRLGDVDRNAATYFPDEVEFSGRKLIRIRHRLTQVRQQIVNQIRALFASYRVDAPSGHLYAKGSLEKLRKMALSNEDQTLCLQALVSSLDALQRSIESLSKRIATRARDEQSAEALALLPSVGPLTAMTLAVELGDLSRFRNSKAVASYAGLVPRVANSADKSHHGRITKRGNRELRWILSQWSVRLLSFNSIAKEWAKPLLLRMHRNKVRMALARRLLIGIYIMLTRGEVFSLERCLAR

SEQ ID NO: 263798 - protein, 458 aa, unidentified
MSARKHRVPAGPVPTAALLPAARGMGYVGLDVSQAEVVACVLLPDGREAARRWRVANTQPGAEGLAQRLAALAQEHQLSGLRIGLEATNLYWWHLACLLKDTPLLAGVPHDVFALNPKLVAGLKGAYSDGGKTDRRDAFFIAERLRIGRLPAPFQVDVLYAPLQRLTRFRAHLAHTLVREKNYFLSMLFLKFSAFSASEAFGDPFGATSVAVLEGFSTEELIQLPLEELARFIAEHGHGRFADPEEVAATLARAARDSYRLDRVLDEPVTLVLGTAMATIRTLQAQLKALDQTIERELAAIPPARRTIRSIPGLGPVWTAGLIAEIGDIHRFADDAALARFGGLVWHPRESGTFQAEDTALSKAGNAYLRYYLVEAANSVRLHCAEYRDFYAAKLAQSPKHAHKRALVLTARKLVRLVDALLRAGALYAPQDRKEGQTRPHTARPRPQQRVRLAASAS

SEQ ID NO: 263799 - protein, 352 aa, unidentified
MIAVGVDVHKRQCTLAIQLENGELESFGPLANTREEWLRLLAVLPPEAEIALEVSTSGYFAMSVLEEAGWQGRAHWVHTAGIDSLRKQKTDRLEARRLARKLSVAERDPLPEAWFPPRDIRELRLRARQRCWLAVLRAQGKNRLQSLLQMHGLRPPLTDVFGVQGRAWLAKQALPGATRESVEQILRLHDFLRQELGISEGYLRQVEPQFPEVRRLRTIPGVGEILAPLLWSERGRLERFRAADAWVNYTGLVPSLYQSGEVSVRGGIPHQGSAWLRWALIAAANGAIQGRNTFAHRYRRLRRRKPANVAKTAVARSLARCVYGVVKSGGDYQEARWGQRPNGVRSGEQEQA

SEQ ID NO: 263800 - protein, 406 aa, unidentified
MLFIGDDWAEDHHDVEVQDEHGRVLRRGRLPEGIAGISGFGQLVGRFVTDDMEPSDVLVCIETDRGPWVKALIAAGYTVFGVDPKQAARHREILSSSGAKSDKSDAHALADMVRTRRHQLRQVAADSDIAAGVKVVARTHQTMIWERTRHMLRLRVALREYFPAALEAYAGFELTSRAVLALLAKAPTPAAAAKLTPRQIAVALKGCRDIDAKAAAIQQVLRSEHLGQPEPVTAAYAATVRSLVAVLTTLNTEIASLEKEVKAHFGQHPDAEILLSQPGLGVVLAARVLAEFGDAPDRYASAKARKNYAGTSPITRQSGKMRVVAARFVHNDRLVDALHMQASCALLHDEQARAYYDQIRGRDVSHNAALRQLGNRLVGILHGCLKTHTTYDKATAWSHRQHTAAA

SEQ ID NO: 263801 - protein, 358 aa, unidentified
MIAINKDIIATIGVDLGKNTFHICAMNDKGTILLRERLTRAALPKRLANIPPCRIGMEACAGSHHIGRQLTALGHDVRLMPAKYVKPFLKSHKNDYRDAEAIAEAVQRPTMRFVPFKSDEQLDLQALHRVRSRLVGQRTAVINQIRAFLLEHGVAVRQGPGALRLALPSILAQRTDVLSPRIIHLIEGLTGDWRRFDERIADVTREIEQLAKQDQYCKGLMGVPGVGPMTASAMVAAIGDGAAFSRGRDFAAWLGLVPKQISTGDRTILGGISRRGNRYLRTLFIQGARSVLQRSDGWEKKSFGRWLIAASKRLHKNVLAAALANNESPGRCSTMHANTIPRLRLRPHNSRHCQTKGN

SEQ ID NO: 263802 - protein, 345 aa, unidentified
MKKVMAGIDLHSNNLVIGIMDMDGKRVASQKLSCGLKEVVGFLSPFKKRLEQVAVESTYNWYWLVDGLQRLRYPVVLANPAGMEQYSGIKHADDTNDAFFLAELLRLKILPTGHIYDEQLRPVRDLLRRRLTLVHHRTALMLSFKSLYTRTTGKEMTLSELKELEIKQAQDLYDHPANQLIAGMQIKHIEQLTESIERIEKVVLDCARELPLYTKLTTLPGVGTILGMTITMEVGDIKRFAEAGHFASYCRTVEAKRTSNGKKKAENNSKCGNKYLAWAFVEAANFARRYDEQCRKWYERKAAKRGKVIGTKALACKLAKAAWYLMALGTDYNAKRMFGQPATTQ

SEQ ID NO: 263803 - protein, 352 aa, unidentified
MRFYTKQHPYYCGIDLHTKNMYVCILNQGGNILIHKNISSSPQPLYRIIKPYLPDMVLAVECMFTWYWIADFCLQHKIHFVLGHALYMKAIHGSKTKNDKIDSRKIATLLRGGMIPMAYVYPQEMRSTRDLLRRRMHFMYKRSELLSHIQNTRSQYNLPEFNKCISRKRNRAGISEQFEDVSVRKSIELNLSLLKQYDILLNDVELYLTRHAKEHDPNNLYLLHTIPGVGKILALVLMYEIHDINRFERVQNFSSYSRLIKPQKESAGKVTGSGNRKIGNAYLKWAFSEATLLLIREKQEIKDFHLKLKNKYGKARALAIISHKIGRAVYYMLKNKQAFDMQHFLKIKDRAA

SEQ ID NO: 263804 - protein, 310 aa, unidentified
MGQIFVGIDVAKAAVEVCVRPTGEAFAVPRDEVGLARLVERLRAWGPALVVLEATGGYEASVAAALAEGGLAVVVVNPRHARDFARSTGTLAKTDRVDARLLAHFADAVRPPVRPLPTAAADELGALVARRRQLVDMIRAEKTRVQQARSREVQRRITAHLQWLERELAGIDDDTRRLIRSTPVWRETDEVVRSAPGIGEVTASTLIADLPELGHLDRRRIAALVGVAPMNRDSGAWRGHRMITGGRPQIRQHLYMATLTAITHNAAIRVFYHRLVAGGRPKKVALVAAMRKLLTILNAMVRDRRQWQNA

SEQ ID NO: 263805 - protein, 345 aa, unidentified
MLYIGIDHHKFHSVFTCVDKNGTIIKSKKISNNKDDIEKFLSEIPIDDKFEAVLEAGRNWGPMFDTLEEFDSIEKVFLANPYKTRAIADARIKTDVIDSKVLADLLRANLIPSLWIPPKDIREIKNIARFRIYLVRLKVKLKNRIHNIIDRTHLEKPQISDLFGRYGRNWLENVEMPEKERGLLNYHLELYDYVVEKIKEIERWLENLMEDDEDIKLLRSIPGIGKVFAIIIKLEIGDINRFSCPEKLHSYSGIVPTTYQSGKRVYHGRLIKQSNKYLKWAFIEGSVSAIKNSVYFKKHYERVSSKKGVQAGIISTARKMATVVFTILKEKREYSEIRGCARPSS

SEQ ID NO: 263806 - protein, 394 aa, unidentified
MKLIGIDIGKNKHFFCIMDQQTGEIISQPVSFSNDKEGFDFLVQKIKSYPKDSILIGMEDTGHYHFALLKYLLDLQYTVALINPKTTDFNRKMQGGITKNDKLDTINICDVLDTPERKKQYRITKVNSFDLYEQKQLTRHHHNLKEEENVYKNRLQKCIDIVFPEFNNLFNSKYGTVYMNILKMFGSAENIANTDIRTIRKCFEIEGRGNRISLTPERLKECAGSSIGISSSAEVIQIKHLTAQIELIEEQLTEIDKKIEEFSIQNNSPILSIPGISHFSGTSILAELGDISNYSKPSQIIKFAGVAPLHYESSQFNAQHTSITKKGSKYLRKTLYQIILPVIRHNPVFTKYYQLKISQGKGHRCAQGHCVRKLIRIIYHLLKTNQQFDPQLLR

SEQ ID NO: 263807 - protein, 335 aa, unidentified
MYYVGLDVHYRTSTYCILDGHGREVKCETIRGHWPKLLERLAMIPRSWTICFEATCGYGYLYRELSRVAHRVVVAHPGQLRLIFRAKRKNDRIDARKLAKLLFLDEVPQAYVPGQDVQNWRELIEYRRRTVDRQTTCKNAIRSLLRSHGIIAPKGLWTKKGLAWLGQMEMPTSAASLKRDLLLEELAEAKRRVRTVTKGLDQIGERHPAVLLLRTIPGVGIRTGETVAAYIDHARRFVRSSQVAAYFGLIPCQDASAGANRLGHITRQGPGTARKYLVEAAWQGVYRSPTIRAYFQRVLHGRKERRKIALVATAHYLVRCMYAMLISGRPWREAA

SEQ ID NO: 263808 - protein, 338 aa, unidentified
MTTIKYFVGIDIASSTFTASVGGTPWKVVLKPQTFENTENGYLVFLEWLASYQVPAKQSVVCMEATGVYSEGLAYFLFAKGYQVAVQSPLEVKRTFKPNGPKTDAVDSLQIAEYACRHMDKLSFWHPRNEILEQIKALLATREQFVSQNVAHKNALQAIQRKMVRTPVAEQAHSQMMEQFKKQIDAIDHEIRRLIESDPTFKEMLLLLLSIPGVGLLLSAHMILLTQLSLQHKELASYLGIAPHEHSSGSSVFKHATSRHFGPAAVRKLLYLASCSVRTHQPQFQSYFARKTKEGKPAKVALNNIANKLIKIICAVLLTKKAFIKNYHSVQPLALTGS

SEQ ID NO: 263809 - protein, 344 aa, unidentified
MEYYAGLDVSLRSCALCIVDSKGTVLFERELPCEVSDIAEWLAGFPHPIERVGFEAGAMSQHLFFGLTAEGFDVVCMEARQVSAALSAMRNKTDKTDARGIAQILRTGWFSPVHMKSREAHGLRALLSTRKALLKKTMDLANEVRGLLKIFGVRLPKTVKHGSFDSVVRPMIEIDDVLAHALVPLLDARVVLYQHYLELDRRVKRAASHDDVCMKLMTIPGVGPIAALSFKSAVDDPTRFKSSRTVGAYFGLTPRRYQSGEHDNPGRISKAGDRDVRAVLYAAANALLMRTMASSQIKSWGMRLMRTKGRRRAVVAVARKLAILMHRMWIDGSEFRQDQVGGMA

SEQ ID NO: 263810 - protein, 353 aa, unidentified
MMIIGCDFHPSFQQIAYVEQETGEYEERRLIHRGEAEAFYRSLAGRSVRIGMEATGNDRWFHKLMSELGHELLVGDASAIHASAPREQRTDKRDARHILRLLVENRFPSIWQPSVGNEEQRQLLLHRCRLVRMRTRIKNQLDSIAKSEGLTGSRAWKAKRRQQIEALPLTGWYAERRKDLLALLDEMDKRIEPLDKAVKAAAEQNAEAQLLMTHPGVGPVVSLAYVLIMGDWRRFPRGKQVGSYLGLIPAEASSGKHQQQMGHITKQGNTLLRWLLVEAAIKAQSKDPSWHRQYVRLSMNKHHGVAKVAIAHKLAVRLYWMLRSGQNYTQIVERGSHAGQSELAGGRGLRPIN

SEQ ID NO: 263811 - protein, 340 aa, unidentified
MFHVGLDIHTQRISICALDEKGQVIHRSQVRSIEEMVRTLRGLPDRFEVCYEASCGYGTFHDLLRPLAERVLVAHPGRLRLIFRSKDKNDRKDAERLAKLLYLGEAPTVHVPALDVRTWRELINCRSQVIAKRTRAKNTVRALLRSAVVIAPRRPGLWTKKGLNWLRQLELPTVSQQLRRDLLLEEIETLTRQLQRIEQQLNRRALHTSAVAQLRSIPGVGVRTAEAVAAFVDDPQRFPHAKAVGRYFGLVPCQDQSGDKNRLGHITREGAPVVRQLVAEAAWQALRRSPTVRAYFERAQRGDPQRKKIALVATAHYLVRVMWAMLKRGTIWEENLMLAK

SEQ ID NO: 263812 - protein, 411 aa, unidentified
MDIIYDKCCGIDVHKKLIVACFRCGKKQDVRNFGATTRELLELADWLKEGGCEMVAMESTASYWKPLYNILESSDLNAMVVNARHMKAVPGRKTDVKDAEWIADLLQHGLLQPSYIPDKDQRELRELVSYRKSLVGERTRELNRLQKMLEGANIKLSGTVSDINGKSARSILEYLLTGEFIDEAKYDEMYKKKIIAHNLKANKEQIIDDLNGVMSPLQRRMMKELLVHLDELNKHIKNLNDEIDNFMKPEEKQASQAIQDITGIGNTSAQTIISVIGTDMTRFPTDKHISSWAGLCPGNNESAGKRKSGKTRKGNSLLRTTLVTCAHSAVRNKKSYFYAQFMRISAHRNPKRAYVAVAHSMLIAIYHILNEGVVFKDLGTDYYNQFNKERKINAYLKKLKALGWKAPVVAA

SEQ ID NO: 263813 - protein, 386 aa, unidentified
MQSFDANKSLVVLDQDSTLVAVIELSLSGWLVAGLVPGLKRQPRKKLDPDPDALLALLQRWRSEAIKAGRTIARIALAYEAGRDGFWLARWLKGRAVEAYVIHPSSIPVPREHRRRKTDRLDTELLMRAFLGWLRGEVKHCTMAAIATLEEEDAKRPNREHQTLTGERTRLINRLKSCLIRLGIRNFKPTLGKAAERLAELRTPEGVPLPDNTLAELYRDMARLDLVKEQIKAIERQRLQRIAKAPNHRPNVMVRLIAQVIGIGIETADMLVSELLSRNLRDRRAVARYGGLTGSPDESGSRRREKGLPRAGNARVRRGMIEFAWRFLKFQKDSPLAEWYRNQTASGRKDVRKRTIAALARKLLIALWRLATQGVVPAGIALRKAG

SEQ ID NO: 263814 - protein, 318 aa, unidentified
MDNETIDFEQVVAKGCGLDVHKETVVATVSGTGIKRETRTFSTFTRSLKELKEWILSLGITHVAMESTGIYWKPVFNILEGSGLTILIVNARHIKYVPGHKTDKKDSAWIAKLLLAGLLKGSFVPPVEIRQLRDMTRYRRKLEGAITAEKNRMIRMLEDSNMKLSTVLSKVHGASGTRIVDALLEGQTNPVYLASLCHGKVKAEQEDIILALEGNLTEHHKFMIRIIRQDIRQTESLIKELDVEIEKQLLPYAQEIALLSQIPGVGEQTAGELISEIGVDMEVFATDKHLSSWAGVSPGNNESAGKKKAEEPHTEISK

SEQ ID NO: 263815 - protein, 465 aa, unidentified
MQLRLGIDIACRAAHQASLADEQGNFVWTGRRFRTSARELERLWAMLPTGERDVTVIMEPTRNAWVPLAAWFRRNGARVVLVPPERSSDLRAYYSKHTKTDRLDSRLLARLPLLHPEGLHEEQGLGPGDPLRRATRLHQTLTKRRSQSLARLDALLEILGPAWVGVFGADLSNKTPLRFLAACYACPNTVRRLGKARLARFLYRHSRGRWGQEQAEALLEAAAETLELWGDELDYGELAEDIAIEARLALHLGEELKDLDERIAIFFAEADPGGILISVPGVGSILGAQILGRLGDPNRFRSLAGVRSFSGLVPSLEASGTTGRHGGPTKRGDACLREAIYMAADQARRIDPGLAARYHRLMVEAGKHHNSALCHVASTLLTRIVACWRAGEPYVIRDTEGTAVSVAEGRRIVAERYTVPAELRAQRRTTTRVVGPKGTDRRSKESLRAPSTGPSPDHATVVAMA

SEQ ID NO: 263816 - protein, 347 aa, unidentified
MRFYRGVHQFYCGIDLHARTMYLCLMDQHGTILVHEGIACQPQAFLRLIQPYRDNLVVCAECIFCWYWLADLCAQHNVHFVLAHALYLKAIHGAKSKNDAVDSEKLCTLLRGGVIPQAYVYPPRLRATRDLLRRRLFFTRKRAELFCHIENTFHQYNLTRPAGAMRTPKHRARLAAAFTDPVVRATIEADLALCAVFDQRIKTLEKTVEQHARSQEPSALALLRTIPGVGPILGLTILYEIDTITRFPSVQDFSSYCRLIKPEHSSDGKRLGTGGAKIGSAHLKWAFSETAVGFLHRNPRGQAHIKRLRKRYGKGKALSILAARLGRATYFMLKHKRVFEMDRFFDS

SEQ ID NO: 263817 - protein, 372 aa, unidentified
MTKNNIATKSPGRKESNRQSDRITIGMDLGDKTSRYCVLDDGGEVIAERSVASTKNGMLRSFAAMKRCRIALEVGTHSPWVSRLLSKLGHEVIVANARQVKLISASSRKDDRLDAQMLARLARADPKLLAPIRHRSEEAQADLNRIRVRAALVEARTSLVNAARGLSKAAGERLPKCGTDQLDVERLEELPAALGEMLRPLVEEVKSITGKIKECEKKLEQIARDKYPETILLKQVNGVGTLIALTFVLTLEDKTRFAKSRDAGCYVGLRPKRSDSGESQPQLRITKEGDIYLRKMLVQGAHHILGHRGADTDLRRWGLKLAERGGKNAKKRAIVAVARKLAVLLHHLWVSGEVYEPLRNAGQRSGLKKAAA

SEQ ID NO: 263818 - protein, 312 aa, unidentified
MALPDVFVGIDVSKDRLDVHVRPLGQGFSVSNEAAGHAALIARLRPLRSKRIVLEATGGYERALWLALSEAGLVAAVVNPRQVREFARAAGRLAKTDRLDAAVIAHFAETFVPRLGKPDPVADRLGEHVLYRRSMQDELVGLEHQLRRLETPALRQRAERRVAALRAEVKEIEREMRAIVESDPAKKALFDCLTAPKGVGLILACTLIANMRELGALTRHQAAALIGVAPLNHDSGAWRGDRVIAGGRRRVRNVLYVATLSAVRCNPTIREFYRRLSAGGKPAKVALVACMRKLLVMLNGRVRDQLAVTVSP

SEQ ID NO: 263819 - protein, 347 aa, unidentified
MVTLGTDSHKQSHTLVAVDENGRQLGEFRVAATPSGHIEALGWARQWPERRWAMENCRQLSRGLERDLLTAGEQVLQVSPKLMGTSRRSGRELGKSDPIDALAVARVALRERNLPVAQLEGKSRELKLLVDHREDLIGERTRIQNRLLWHLHELEPGFVIGCGGLTRRVVLAEVLRRLEAHRGVVAEIARELVELLAELTPAVNRLQRRIELLAAELAPSLIMLPGCAGLTAAKLMAETADVRRFHSSAAFAMHNGTAPIPVWSGNQQRYRLNRGGNRQLNVALHRIAITQLRLGGEARAYVARRISSGNTKTEAIRALRRQLSNEVYRRLRKDTSQLPSPAGAIAA

SEQ ID NO: 263820 - protein, 413 aa, unidentified
MKIYCGIDWAEAHHDVAVIDDTGRRLAKTRITDDLPGFTALCSLLADAAAATQPAEPVGGFVPVDVAIETDRGLLVAALRAAGHRVWSINPKAVDRYRDRYSSSRAKSDPGDALILANVLRTDAHAHRQLPADSHLAGAVGVLARTQQDLARRRRSEAQAVRSLLREFFPAALLAFPDLTTATAMLVLTAAPTPTAAAALPADDLLALLRQASRGTLPKQAGRLAQLFAAPQLRQPAEVENAMGQALAALVAALRGTVEAVRRLEVALQTTLEQHPHAPILDSLPGLGVVLASRLLAEFGDDPDRFAHAAGRRAYAGTAPVTRASGKMHAVVLRRGGNRRLVDTCRQWAYSAITISPGARAHYDRRRAAGDRHEAALRNLANKLVGQLDHCLRHNRTYREADAWTAPPAALAA

SEQ ID NO: 263821 - protein, 375 aa, unidentified
MGKITRFVGLDVHAETIAVAVAEGRKQVRSLGTIANRPEAIRRLLGKLGKLSEIRCCYEAGPTGYALYWELTRLGVQCEVIAPSLMPMKVGDRIKTDRRDAERLARSYQAGDLTPVWVPNSQHEALRDLVRAREACKADQLRSKHRLKKYLLRYGQRPLDDCSPWTAAWWQWVRALKLPHAEQNIALLELILEVDHQGQRVERFDGAIDKAVETAPEQLKAVVDALQMLRGVAKLTAVTIATEFGSFSRFEKAGQVMSYSGIVPSEHSSGAKKQRGGITKTGNSHIRHVLLESAWHYRHPPKLCKRQKELQTSISPKIAAIAWSAQQRLHRRYWALSNKGKPSPKVVTALARELAGFVWAIGVETERQLNPARAA

SEQ ID NO: 263822 - protein, 346 aa, unidentified
MTIVEAARGVTGGVDTHLDVHVAAALDPLGALLGTERFDTDPAGYQALLTWLEGFGALTKVGVEGTGSYGAGLARFLRRADVEVIEVDRPNRAERRRSGKSDPLDAVEAARAALGGRAKSISKSKDGAVEAIRVLVVAKRSARAARVKALTQMRHLVITAPDQLRCRLRGMTVTALTAEAARLRPSRSGDPVMAAHKASLCSLARRIQGLDDEIAELDQRIEKLLEATAPELLGCFGVGPDTAAALLVSAGDNPERLRSEAAWAHLCGVAPIPASSGKSNRHRLDRGGDRHANSALWRIVMVRIAHDPETTAYFERKVKEGRSKRDVIRLLKRYVARELYRYLPRG

SEQ ID NO: 263823 - protein, 465 aa, unidentified
MAFVNGELQAQFMARIRGVEPQRCLVVPVDVGKSSAVALVADHYGEIVVVPFEFGLTEAGFTVFDAAVAGARNDRDAVVVRVGVEAAGHYHRTLVARLRSAGLEVVELNPGAVKDARGQQLLRTLKSDARDCGAMAELLIRGSGRPPQCRDEALAAQAAWVAHRRRKVAAQVMLTNQIHGQLDLIFPGLTGCFAHGLDAASLRVLIRDLPDPDRVRRLGVEGVLRFVRRRGVRMSRPKAELVVHAAQQALRLPCAERSAPLTVLAADWSLFEAIDQQIQHATDILTALLPDTPAGVLLDIPGVGVLTASSYGAAVGDPNRYRDAAAAYRASGLVPVTYESAGRRRPRTGISREGSVELRRAIVDFGRGLGLHHPDFITYRRQLLSRGKPPLVAMIAVGHRAHRLAFAMLRSQKPYDANRWSDAVAGRRHPTDEQARHGGTTAGGPPARRDLPAQATLARQEAPSN

SEQ ID NO: 263824 - protein, 398 aa, unidentified
MACIATTDEHSHTTHQIRRFSTYTGELNKLASWLLSENCHDVCMESTGKYWIPVFNILEKTCNVVLTHPKYVKAIKGNKTDKKDAKWISELFKCDLVRASFIPPCDIRQLRDLCRYYVKLTYTNTGEKNRAQNCLTMCNFKLDDVFTDIFGQSATRVLDQLLKGRNSSFDVAPLLDWRCRASVEEVQAALEGELTLAQAEKLIFIRQHQACISSLQDALKNLIFQLASKYQPQIDLLLTVPGISEPLTAIRILAEIGVDMSVFETSKQLCSWAGLTPQNHESAGKKKTTRIGRAGAYLKPLLVQIALAVSKSDKHIELKSKYQALKKRRGGKKAVIAIARKLLTAIWHILSKNEPYNAELYRKADKPPKNRELTPDQAFALLRSQGYIIRNEELLPQS

SEQ ID NO: 263825 - protein, 359 aa, unidentified
MKKPNTNTHDLTTTQNAPKAKSIKLGIDVHADSYRVVRQIDHATPQPAQKFTPEGFLSWARKQLELAEEVHSCYEAGPFGYGLHRQLEAMGIHNVVVRPQNWDEHHKGVKTDKTDALALAQRLSRYVDGNRKELAVIGVPTVEQELARSQSRQREQLLSHRLRLEAQGRSLLLYNGIRLKGRWWHPLPWLKLQNQLCPPLLELLTVIHRLLLTVQAELAQSTGRLEKAAKPQPHGVGALTSQVLEREILDWGRFKNRRQVASLTGMCPGVHASGGRSRSGPITKHGNRRLRTALIELAWRSVRFQPEYAPIKRWRLILMNPQVTSAQKKKAIVAVGRRLAIDLWRINTGRSTAAKLGLK

SEQ ID NO: 263826 - protein, 340 aa, unidentified
MEYFAGLDVSMAETHVCVMNREGAVVYEVKVRSTPADIAAAFAQAPACRRIVFETGRMAPMLYHGLTQLGLPVVCIESRQAYQALKSLATHKTDRNDARGLAHLARTGFFKPVHVKSLPAHALRSLIIARKKLVGQRVTLDNQIRGLAVVFGVRLPRALTAAFIRQALRASEGITGLSAAVRGLVAARTAVLAAVAAIDADIKQLVRASAACRRLMTIPGVGQLTALAFTAAIDDPGRFQRSRDIGAYLGLVPRRYQSGEVDYTGSISKCGDRRMRALLYDAANVMLTRYKPALKLKDWAFAIAKRSTMRKARIALARRLAIIMLAMLRDGTEFSPAKQQ

SEQ ID NO: 263827 - protein, 370 aa, unidentified
MLDTTTFVGLDVHARSIKAVSLDVMTGEVRAATFGYDAGAVAEWVRSVDPGARCVYESGVTGFDLQKRLTGLGVGCAVGAVSKMIKPSADRRRKNDRNDAEFLARMLSVGNVVEVWVPDDECEAARDLARALEDARDDLSRSKQRLSKFLLRHGLVFDERTPTGRRKGNWTRAHWSWIESIRFAEGADNDVLAYYVDAVRRAAEEKARLEGLVEAEARKPRWRRRVDSLRCLKGVDTATAADLVFEAGEFSRFGNARSFAAWVGLTPSEHSSGESDRRGAITKAGNKHLRKALVEAAWHYLTCSGRPKEPARGQAPDRVARRHAAKGVRRLVERRKALLARGVHNNKANVATARELACWVWAVGLMAEGA

SEQ ID NO: 263828 - protein, 439 aa, unidentified
MRIASSVPMPNEVPIEQEIVAYVGLDWADQQHVICWQAAGSAPVQTAVVQQRPEELQAWVAELRQRFPQGLVAIALEQSRGAVIAALMHFDFLRLYPINPKSLARYREAFASSGAKDDPDDAGLLLELLVKHRDRLTPWVPDDALSRELALRVEHRRQLVNLQTKLIQQLRSHLKVYFPQALDWVGELDSLQACDFLQRWPTLAAVQKARPSQLEKFYHQHHCRRPQLIQQRLEQIRQAQPLTQDPAIVQAYSQMVLALVAQLRVLIPTLQQWQQQISQLFAQHPDAALFASFPTAGPVFAPRLQAAFGSRRDRFGSAAEVLQFSGVAPVTKRSGKSRQVQRRWARPKFLHQSFVEFAGLSIPHCRWARALYQQLRARGHRHWAAIRVVAYKWIRILFRCWQDRVPYDEQKYLKSLERRNPTLWAAIQQLPAHPSRKEV

SEQ ID NO: 263829 - protein, 342 aa, unidentified
MKDTIIGVDLAKRVFQVHGATMAGQLMFRRKLSREQFRVFMAAQPAALVVFEACGSASYWAREMESLGHEVRLIAPQYVRPFVKRQKNDAADAEAIVTAARQPNMRFVPLKTEGQQAKAVLFRGRERLVHQRTELVNALRGVLYEFGHVFPQGLSHLNLIEELVKNPACDLPMLIIEECQDMLRQIAAKTEQIEAKTKKLKALAAETDAARRLQTMPGVGPMIALAIEAFAPDMAQFKCGRDFAAWLGLVPRQHSSGGKNRLGRVSKAGQADIRRLLIIGAMTQIMDRARHKIPADSWIGRMLARKPRMLVGIALANKMARQIWAMLVKKEDYRNPAIADAA

SEQ ID NO: 263830 - protein, 420 aa, unidentified
MKAWNEIKHYAGFDWAKDHHDVIVLDAGGKTVADFRFDHTASGWEEFSKKLASFPDVAIAVETKHGAVIERLMERECCIFPVHPRSAKGYRQRKVPSGNKTDRVDAWSLADALRLDGAHWKQLSAQDPLIKELRLLCRDEVALIRDRTALITQLRQALYDYYPAALEAFDDWTMPAAWSFVISFSTPQILVKAGKRKWEKFLHVHKLGRPTTYQRRLEIFARAHQFAGSDAAVRAKSRLAVARAKQLQLLEAQLGEYRQEIRRLFAQHPDAKLFGSLPGAGDKIAPRLLAEIGDDRALFPDAQALQCLAGTAPVSYQSGQIHRVYLRRQCNKALRNAVHLWANLSREFCPWAATYYATLRAKGKSHACALRALGQRWLKIVWKMWQTHALYDPDLHARNQLKHGSWVLQLVNKTDVSTKS

SEQ ID NO: 263831 - protein, 348 aa, unidentified
MAVTIVETRAITGGVDTHADTHVAAALDPVGGLLGVQEFPATAPGYARLLGWLGGFGTVCLVGIEGTGSYGAGLARHVTAAGIRVVEVDRSDRQDRRRAGKSDPLDAVSAARAAQSGRARGAPKGRDGAVEAIRALMVTKRSAGGERTRTTSQARALVLTGPDELRERFARHTPAALVTGLASLRPRPGDVPGYATRIALRELGRRAQFLDGQLDRLDELIVPLVTARAPGLLALYGVGPNTAALLLIAAGDHPGRLRSEAAWAHLCGAAPIPASSGKTVRHLLNPGGDRQANHALWRIVFTRLGSHPATRAYAERRTAEGKSKAEIIRCLKRYVAREVYPHLRTPAG

SEQ ID NO: 263832 - protein, 484 aa, unidentified
MSVTQTAVPARPVTVGIDWAKDNHAVCVVDADGEPVQRLVIQHSKSGIGRLLGLLERHRVAGVGIERPDGPLVAALLGAGVELFVVAPSQVKSLRRRYGSAGNKDDRFDAYVLADTVRTDRRRLVALRPDGSATVTLRTLVRARADLVNHRVALGNQLRAHLDTVLPGAVGLFCELDSPISRAFLTAHPTQDAVNALTLDVFTAWLAGQGYRQKKPAVLLQRLTGAPAGVTGPAGVALAGVTAAYLTALTALVEQIAVLETQIADALAAHPDGRIFTSLPRAGTVRAARLLAEIGDARGRYPTAAALAGLAGVTPSTRESGQVRVVAFRWAVDKQLRGAVCDFAADSRRASPWAADLYAKARARGHPTTRPATAPSKPSSTNIKPTRLDTGHSRQTPLRRRAPPLPGPRSPAPLPLLRRSSGQNGAGDHYFPGVVPTNLVGGALQPQGAQRRDPQPRRGRLTVPRLRLGPHRAEVADPGPAVQI

SEQ ID NO: 263833 - protein, 416 aa, unidentified
MKKGQDTRGYERYMALDIHREYLLVGAWNEEKDWVLTPRRVSIEKFPEWAKKNIRTGDIVVLETTTNVWTTYDIVAPLASRVLVANAAEVGEIANARVKTDKEDIKRLLKLLVGGIVPEVWVPPMHVRELRAFVSYRHRLVKTSTMIRNRLQSLLHKHSLMLSEAGLLDQAWWEAQKNISHLEKMQIRQELVLLQEVEKLKAAVDKELQRQSTSSTWGKQALQIMQLPGVGFIVAMTVLAAVGDISRFENANKLVGYAGLGAGVHDSGKTHKEKKITKKGRRELRWALVEAAWRAVRMSPFWKAEYEKHLKRMRKPNQAIVVIARKLLIAIWHVLSKEETDIHASEEELAYKMLLLSWSLSEDVRLGLTYKQFAKYALMKLGVETDITRFVRRNVPRRLAPREEVLARMTDLGLSA

SEQ ID NO: 263834 - protein, 364 aa, unidentified
MDTRVIIGLVHRSIRRRRPLVNEEYGGQQFVGIDLHRRRSVIVRMSESGEPVGWERIVNGGDRLAEAMAQAGEHPEVVLEATYGWYWAADLLADLGANVHLAHPLGVKAFSYRRVKNDVRDATDLADLLRMGRLPEAWIAPPQTRELRELVRHRAKLVHARTSLRCQVHAVLAGQGVAVPVSDLFGIAGTRLLDELVVPEAYRYRIESLRRLIAAFDIEIDGTARLTRERLEHDPGFAAVRTIPGVGPILGAVFVAEIGDVTRFSGPAQLASWAGLTPKHRESDTTVHRGRITKQGSRLVRWAAVEAVQRTEKYSRLWEVRERIAARRGRNIATVAAARELVEMVFYALRDRHVRRLSRPVLAG

SEQ ID NO: 263835 - protein, 393 aa, unidentified
MNKIIYIGMDVHSSNFTLCSFEPGYGMSEDKIFGQVQFKDDLIKNTEKYICNLKSQRKDIDIVCGYEAGCLGYVPYRELTRSGINCKILAPSTMAVQKGGKKLKNDFRDALDIARCLASGSYKAVNVPDVEDEDVRDYIRMRDDHKTALKQIKQRLNAFCLRHGFQYDKSKWTLAHIRWIKHLECTIKQKEIINEYLATYEVLKSKLDAFDVRIDDLATSERYAEKVNKLVCIKGIKTNTAMSFISEVGDFKRFRSAEQFAGYIGLVPGEQSSGDKVCRTGITKSGNTHLRRLAVECCNSFRRGLVGQKSVELKKRQQNAPSEVINYADKASARCQRKYYRMVNKGKNSNIAVTAVAREFCCFIWGMMTSNYEYSNNEVRELMPANGLIRVNL

SEQ ID NO: 263836 - protein, 474 aa, unidentified
MGNRTKSHPDLKALPMLPNESLYIGVDIGKFKHVAGFVSKTLLERHQHFEQCPAFLFEQSREGFRAFVERIRAYCPLEQCFILMEQTGHYHKALQQYLLELDLPVYVMHVQHREGGMIKTDKRDALGLANQLYNQLALGVQVSDKLQVVHRAIPPSEAALQLKGLMRHRYELAIDATQRKNKLTAICDGLFPELTQVFKNPNLTVALDLREKFPTPHAIATTSLIGLREVRRGNCPSEVQLANLQQLAIESIGTKDVARQRGLVLEQGLLIKELRLIQEHMERLDMEVGQIIEHSREGHILLSIPPICPLYAAAILATIGHIGNFEDAAHLKAYFGWAPKRAQTGVSFDRTSLTKGGSREMKKIMYLVAWNAIKTETEWANLYKRLVPRLCPYDERTQTYKGKAKAVGHVIGRLITLIYALLKQDDETLSHLAPGTPPPEPVLYDPEVHRHHRTGHYQPLRKTLPENRIVHVQA

SEQ ID NO: 263837 - protein, 350 aa, unidentified
MLIIGCDFHSRFQQIAMLDPTTGEIIERRLEHENGEAKMFYATLPSPARVGMEATCDAPWFERVLREHHHELWIGDAAEIRAAMVRKQKTDSRDALHILDLLLTNRFPRIWVPSLAERDLRQMLRHRHKLVRFRTSVMNQLHALAMGQGLCRRKKLWAQVGRKELQGLMLDPWASLRRGELLQLLDQFDPWIAKLDEAVMQAAESRPAAVCLMQQAGVGPVTALAFVLTIGPVSRFANSKKLVSYLGLNPSEDSSAGRQRLGGISKQGNPMMRYLLVEAAQTASRLDPELRRDYQRLKFRRGGGVAKVAIARKLAVRLYWKLREAEQPVPSARMQGSPAGPVVGESLSPN

SEQ ID NO: 263838 - protein, 344 aa, unidentified
MDNHTQYSGFAGVDLAKKVMQIHFVTGDGEITDKQVKRAEFLDFFRNRTKCLIGMEACGASQDWARKLEAMGHEVHLMSPKAVKPFVSVQKNDYNDAIGIYKAMFNGVRRVPVKSTEIRDLQTLRRIRSQVTKDKVKEINHVRGLLAEYGIVMGKSITAFNKGISSALESLKERGDVSPLVAEELQTTVESIKTKIERQKRLDREIEQLARGCKNYENFLKTPGVGPFTAAMLCVLLCDPAIFANGRQFAAYIGLAPRSRGSGGKNFIIGIPSKFNCDSESRAVFVECAQALARYKNKSPWVDGILRRKPKKVAVIAIANKLARQVWAMANKGESFKQMTILTA

SEQ ID NO: 263839 - protein, 316 aa, unidentified
MKTTKAEIFIGIDVSKHKLDIAVWETGEYWVESNHEEGFASLMEKLKAMNPALIVLEATGGLELPLVYELAYAKLPVAVVNPKRIRDFAKSIGQLAKTDKLDARIIAHFAYAVRPEVRKLQSEEDERLTALITRRRQVIEMLTAEKNRLHSARLGMKERVEKHIGWLNEELDGLDQEIHDYIQQSPVWKEKNDILRGVPGVGPVTGATLLACLPELGELNRQEIAALVGVAPVNKDSGKKRGKRRVFGGRAVVRSVLYMAALSAAHHNPRISGFYERLLRRGKEKKVALTACMRKLLVILNTMIKNKTQWRFIPAD

SEQ ID NO: 263840 - protein, 370 aa, unidentified
MNYSNTLFVGLDVHKEAIAVAYVAEAPGAEVLSLGSIGTRQCDIDKLIRKLKGKASKLFFVYEAGPCGYWLYRYLTKQRLTCRVVAPSLIPRKPGDRVKTDRRDAVQLARLMRSGDLTAVYVPAIEDEAIRDLSRARQDVMQDLKAAKYRLKAFLLRQDIRYEGRASWSPAHLRWLAEVVCPTPAQQIVFQEYVRTVSEHQDRLQRLESELQAAVKTWRWGLVVEAIQALRGVQFTVALTLIAELGDLTRFDNPRQLMSYLGLTPSEYSSGPMRRLGGITKAGNTHARRALIEGAWAYRYPAKVSRHLQLRLEKVPKAIQDISWKAQVRLCKRYRQLTARGKHANKVVVAIAREMAAFVWAIARVVQEAH

SEQ ID NO: 263841 - protein, 406 aa, unidentified
MERVYPRCCGLDVHKNSVWACARVDGRQQPVETFGTSTRELLRLGDWLAGLGVTMVAMESTGVYWKPVWNLLEERVGLMLVNAHHVKQVPGRKTDLKDCQWIAELLEHGLLKPSLVPQRPQRELRDLTRQRTQLLGDRARVVNRVQKTLEDANVKLASVATDITGKSGRAILDALVDGRLTPEQMAELVHKRMEAKKPALREALAGRVTAHHRFMLKQLLGQIDALDRMIETFDARVEEVMSPLERDSVRRLDEVPGFDQRTGQNLLAEIGTDMSRFPSARHLASWAGLCPGNNESAGKRKGGRTRKANRWLKATLTQAAWGASRTRRSYFSVQHRRLTTRRGVKRATIAVAHSLLTISYCLLSRPAEDYVDLGVNHVTHNAEQKVQKMVNRLRKLGYTVELRDAA

SEQ ID NO: 263842 - protein, 349 aa, unidentified
MLKYSLGIDVSKKDFHACLSVIGTNQQVKVKASRKFSNQQTGFKELLLWLANHTKEADLPLVIVMEATGVYYESCAMFIFKAGLQVSVVLPNKAKKYLQAIGLKTKNDKIDAAGLARMGAEQCLELWQPMDEFFYTLRALTRHHQSLQELKTNVGNQLHADQHSIYSNKKVMKQLKKLVDTIEKEVVETAQEIEKQLYSNSEIAKKVQQIVMIKGIGTISIATVLAETNGFALFNSIAQLVSYAGYDVVENQSGKHKGKTRISKKGNSHIRRVLHMPAFNVVRYNTGSFKTFFERVLNRHGQKMKAYVAVQKKLLVLIYTLWRKNEGFKADVVARQKTSREKETAPSFA

SEQ ID NO: 263843 - protein, 350 aa, unidentified
MNRVLKIAMDVHSSNYTLCAMEPVVGAKDRVFANIQVPPDYKNVLQFIENLKKKLGLTDTYSVECGYEAGCLGYSLYHQLTNAGVQCVILAPSTMLAPQGKRVKTDARDANMIAQCLCYGGYHAVHVPTDKDDSVKEYLRMRDDHKLALKKIKQQINAFCLRHGFFYDGNKWTIKHWNWLKTLEVDDLLRKTLDEYLASYKEHSSKIERFDKRIEELAGDDDYKESVKKLGCVVGIKTHTAPSLIVETGDFSRFAKGNTYAAFLALAPGESSSGTKIQRSGISKAGNSHLRTLLIEGAKGICKGQIGHKSKELRCRQDGNTADVIAYADRANTRLQSKYYRMIRHGKKEM

SEQ ID NO: 263844 - protein, 339 aa, unidentified
MKVTTLGIDLAKSTFRLHGVDGRGTVALRRQVTRKQLLPLLANLPACLVGMEACAGAHYWAREIEKLGHTVRLMSPHFVVPYRKSQKNDGNDADAICEAVGRPSMRFVPVKSAAQQDVQALHRIRFQLIKWRTALANEIRGLLGEYGIVITQGIRALRRQLPLILDDHENQLSGFFHEMLGEMAERFNLIDQRIRQYDLKVEHVFGQDERCQRLARVEGVGPLVATALLAAVGNAHQFKNGRELSAWLGLVPRQHSSGGRNVLLGISKRGDRYLCTLLIHGARAAVRVVERRRDHRSIAITRLKLRHGPNVAAVALANHNARVMWALLTRGEEYRPRCA

SEQ ID NO: 263845 - protein, 411 aa, unidentified
MEAAVITAVGIDVSKSKSTVAVRRPGGEIVLRPFEVHHTNSDLKKLASTLKKLGGDIRIVMEHTSTYWRPIALTLKEAGFFVSVVNAMLIHDFSDNTIRKLKTDRADALKIANYALTFWDTLPPFNSEEETRLLLKMQSRANERITATATALRNGLIALADQIFPVVNIAFDPNTKNANGHEKWVDFFLRYWHKDCVCQYSMEAFTESYRGWCKRKNYKFRTDTAHKIYLLAQEGVATLPRCESTKMLITQACKSLNAVCVAKQSTQLEMQRLAAMLPEYEVVMQMEGAGPITGPALMAEIGDVRRFKNKKALVAFAGIDGPPFQSGAFESKSRHVSKRGSPHLRRTIFIVSNIILTRSNPENAVYCFMDKKRSEGKHYYVYTVAGSAKLLRVYYARVTEFLRSQPSPDAC

SEQ ID NO: 263846 - protein, 336 aa, unidentified
MKKTEFIGIDISKDSIDCALLNVCKPTSFKDKKFKNELEGFEDMEQWLLKNKVNFKNSLFCMEHTGTYGLLLFAWLSQKEYDYCVEPGLQIKRSLGMTRGKDDKIDARRIATYALTNVHKLKLFFFPSEQLVYLKQLLTYREQLVRNRTTFKNSIKSHEQYEKITGKINITENIKHMISFHDINIKEVEKQIINAIESDEELKKNFDLAISVKGIGLVIAAFMLVTTNNFAGFENGREYACYSGVAPFGNTSGISIRGKTKVSNLANKTIKTMLSRGANSASKWDPELKAYFNRKLAEGKDHKVVMNAISCKLVNRVFAVVKRQTPFVITYQQKIA

SEQ ID NO: 263847 - protein, 316 aa, unidentified
MNKTEAQNINAGVDTGKDFLDIHIRPFNEYFKVTNDKRGISEAIKRLKKLDLKRVVIEATGRYEMAFVTACAKANIPFSVVNPVHIKRFAGAIGRKAKTDKLDAALIAHFGEVIQPSLSTLKPENMQQMADLVARRSQLLEMQTREKNRLQIMPTNVHSSIKSLLLVLKKQIQKMDDELAQLIESCPEYKAKSDLVQSMPGIGKVSAAALIGYLPELGLMNNKEVAALVGVAPMSKESGRYKGKQVIQGGRHQVRTVLFMAMMSAMQCNAKFKSTYERLVAAGKPKKVAIIACVRKMVVILNSMVRDGVMWEEKTA

SEQ ID NO: 263848 - protein, 326 aa, unidentified
MTDAFEPIFVGIDVSKETLEVALDDKSKTQTYGNNNAGLKELITRLKALGNRVAVVLLEATGGLEQPAAAALCASGFAVMVVNPRQAHDFAKSMGYLAKTDSTDARALSHFARTLYTSDKRERLLYKLPTPEQEILLAMVTRRSQLIGMRVAESNRLASAHTSQRKSIKVILRALDRQIGQIDEDAARLLKDHFKDKLDLLKGLKGVGPGTQAMLMAALPELGELNQREIGKLVGVAPLNCDSGKFKGKRKTWGGRSNVRAALYMATLSATSHDPTIKAFYQRLLLAGKPKKVALTACMHKLLTIINAVIKSGMPWKASYPQGAHA

SEQ ID NO: 263849 - protein, 343 aa, unidentified
MEHYVGIDVSLESSSICVVDGSGRIVREAKVASEPEALIAWFEGLEIRPGRIGLEAGPLSQWLYAGIRKAGFAIELLETRHVRDAFKAMPVKTDRKDARGIAQLMRLGWFRPVHCKSVPAQEMRALLTARKLIQGKRHDIEMSLRGILRGFGLKIGLTTPRNLESRVRSLVEGHPTLEAVSDALLLARSMLGEQLNKLHKRLVSMARDDTRVRLLMSAPGVGVLVGLTYVAAVDDPGRFRSSKAVGAHFGLTANRYQSGETDVTGRISKIGDASVRTTLYEAANVILTRPVKGSCLKSWAMRIAKRAGMRKAKVALARKLAVVLHRMLTDGTGFVADKAAAAA

SEQ ID NO: 263850 - protein, 352 aa, unidentified
MEQGYHIGIDLHKKFSQVAVLNEKGVVLDNRRVDNDPPLLTEHLSSFPKETPVTLEATIGYEWMSDLLAENGFEIKLANPKKVRLIAEATIKTDKVDAVTLAQLERANFLPTAYLPPKEVRDSRELLRHRMKLVNLRKGLKNRIHAVLAKRGILFYPVKDIFGKAGREFLSSLPLPDVYQTEVDSYLSLIDQIDSFVKEREKDIKDQVVKENKEAQLLLTIPGISYFSALLLVSEIGDIKRFPSPKKLASYAGLTGTISESADKVYQGALKKDSNKYIRWILIEAVDHAIKKDPGLFAFHRKIAHKKGENKARVAVAHKLLISIYFMLKNNQVYQLRNNLRVSPLFVMVTDR

SEQ ID NO: 263851 - protein, 371 aa, unidentified
MNSISYVGLDVHKATVSVAVAEGRRAGEVRHVGVFPNRPDHIAKLIERLGKGRRTLSFCYEAGPCGYGLHRQLTEFGHDCIVVAPSLIPMKAGNRVKTDRRDAVMLAKLHRAGELTSVWVPDDAHEAMRDLIRARATAVRVLGKARQHLQGFLLRHGRVYPGKRGWTGAYRRWLARVRFDHPAQQVVLQDYIHAVEDTEARVERLASQIEELLPNWSMRPVVEAVQAMRGVGLIVAVTVVAEVGDFSRFENPRQLMAYLGLVPSEHSSGATVRKGGITKAGNALARRVLIEGAWTYRMPARVSPKLHARLEAVPKAVRDIAWKAQLRLCNRYRRLAASGKAKAVVTTAIAREMVGFIWAIARHLQATPATA

SEQ ID NO: 263852 - protein, 372 aa, unidentified
MNYNTVYVGMDVHKESFTLCAYTIDAEKGSHFQRTEADYKNVLKYLEFLRTVYGNDANFICGYEAGCLGYTLYHQLTEHDVNCVILAPTTMLEQRSKRRIKTDRRDAEIIGKCLAQHNYSPVHIPTATDEETKEFLRMRDDHKLALKKVKQQILAFCLRHNYRYDGNSHWTAAHIKWLKSLNPEALYKEILDEYLLTYTTLSDKVERLDKRIEELASKDEYRESVKKLCCFIGIKTHTALSVLVEVGDFQRFASAQNFASYLGLVPGEDSSGDGQTRLGITKAGNRHVRMLLTEASQCYARGQIGFKSKELKSRQAGNSPQVIAYADKANERLRRRYYKMVLGKSKKHNVAKTAIARELACFMWGMMTEHIT

SEQ ID NO: 263853 - protein, 341 aa, unidentified
MDKELYFGVDVSKKTLDLAYYDGETIDWKNAHIKVSNDDAGFKKIGSWVAKVGKDFDTFLFCMEYTGLYNQNFRLWLESKEYIYGMVEPRKMHRFEPDLDDDQRSLDRIKTDELDAFRIAIYCEQNHKKILRNPSKLPSPVYFKLKRLLAERKQNTKQSTLYKQQLHDICAYDTDLSVERKKLLLKNMKENLKAIDKEIDSYMQEDANISKNYNLLTSIPGIGRIIALETIVLTENFTAISNPRKYACYIGIAPFKKESGTSVRKKTGVSKKGFSEAKADLSIAVLSAIRNNPSIRDYWIRKRKEKCGGIVLNAVKFKLVLRMFAVIKRGTPYVETDAYKN

SEQ ID NO: 263854 - protein, 343 aa, unidentified
MSKISIVGLDLAKNVFQVHGVDASGGVVLRRQLRRGAVEKFFAQLPPCTVGVEACGSAHHWARVIGRYGHQVRLMPPAYVKPYVKRNKNDGRDAEAICEAVSRPTMRFVPVKSVEQQATMAVHTARALLVRQRTMVANSLRAALSEIGIVAAQGIEGLRELMAKLEAPHEEVPEIMRGALLLLAKHWQALDADERVLERQIAKAARSDREARRLMEVPGVGPIIASTVLAKVPDAKVFRSGRDFAAWIGLTGRDHGTGGKHRPGRISKQGDRMLRALLISGASAYLRHQRTRGVSDPWLRDLLARRPYKVVMVALAAKTARILWAMLVKGEPYRDRASASAAA

SEQ ID NO: 263855 - protein, 364 aa, unidentified
MYYVGIDVSMTESALCILDGKGKIVRETKLPTDPEIIARFIAATGLAIERIGLESGCTAAWVFAGLQRHGWPVICIDARHAAAALQAGFRNKNDRNDARGIADLMRVNKYRPVWVKSPEAQRHGRLLTARATLQSQLVALENTIRGLLCQEGIGLTDRRTAFEAAVREAIDGDCLLQAALHPLLETRNAVLRHRAALDRQILRIVRADPVCRLLMTAPGVGALVSLAFKVAVDDPRRFSRSRDVGAHFGLTPREHSSGELSYQGRISKMGDREVRRLLYIAASRMLRRDAALWCPLKVWAVRLAQRIGIRKARVALARKLAVVLHAMWSDGQVSSGDVLRHWRKSLERLARVSPSPALAAKGRR

SEQ ID NO: 263856 - protein, 341 aa, unidentified
MGQASTIGLDIAKHVFQAHGADTTGRVVFRKRLARAKVLEFFSGQAPSVVALEACGGAHHWAREIGKLGHTVRLIPPAYVKPFVRRQKSDVADAEAICEAAQRPGMRFVPVKTEAQQANALVFRTRDLLVRQRTQCINALRGHLAEYGYVVPKGIDHVDRLIALVENANSSVPEAARRILQALIATLEALGKQIDDLDAEISRRAKDDPVARRLMTIPGIGPIAATAITALVPAPEGFRAGRDFAAWLGLTPLQKSTGGKQKLGAISKMGERTIRRLLILGASAVVRWAVHRGAATGSWLAQMLARKPRMLVTTALANKTARIVWALLVKGGTYKAPAMAA

SEQ ID NO: 263857 - protein, 447 aa, unidentified
MQKKNVKMEVINPNAAGIDIGSRSHFVAIGQGTDDVREFGVYNEDLKAIADWLKENEIETIAMESTGTYWQSLFAVLQAEGLQVILCNGKFTKNIKGKKSDVQDCQWIQKLHTMGLLSGSFLPDEATEQLRTYCRHRSNLIDQAADTARKMQKYLRLLNLRLDVVVNDVCGLTGLKIIDAICKGEINPEKLASFRNGNCKKSEEEIAKALQTNGRNDYLFTLKHEYQMYLNLQTKITECDKEIEKMLNQQINNDDNKKQHHIDKKAHKRINKNTPKNIDINLLSYQYFEGVDLLAIEGVSYSTVLTLMSEVGHGIHKFETAKQFASWLRLSPNNKISGGKVLSNKIPKGSNRQKIALRNAANAIGNLKNTALSNFFARISHRKGRVSAISATARKLAVIIWNMVVKGTSYIPLTEYQFVDQKRKKIAAMKRLINKFEITTEDLNLQV

SEQ ID NO: 263858 - protein, 343 aa, unidentified
MDHFAGLDVSVKETSVCIVDEGGRIVREVKVASEPEALLAVLTNPACHFKRIGLEAGPLSQWLFNALAEAGLPVICVETRHMRAVLKAQINKTDRNDARGIAQMMRVGLYRPVHVKTLRSQKLRMLLTHRKLMQSKAIAIDNDLRATLRNFGLKIGVVGTVKFEARIKELVENLPDLVVLVEPLLIVRRVLREQIGILHRRLLAIVRDDDVCRRLMTVPGVGPVVALTYRATVDVPSRFRNSKAVGAAFGLTPSKHQSGESNRTGGISRCGDEMMRMMLYEAAHIMLVRSAKWSWLKAWAMKIARHRGLKKAIVALARRLAVIMHRIWVDGTEFRWTREVAAA

SEQ ID NO: 263859 - protein, 410 aa, unidentified
MTDGQVTVGIDIGSHMHRVAIGTPEKKIAEEFDLPHNKDGFEKFFERISYYENTYQVPVVVAMEGFNGYARPLDQMVQKKGYRLLNVNNLKLRRFKEIFPSPAKTDAIDARKILELVRLQPLLTDQEVILQEVREVPREHQMLKRLTRRRRQLVCEKAAVLNRMQSDLHAVSPELVELARNKDGLAFLRFVTCREDLRQLQRVQKRTLLGIKGIGKGFAGKIQEWQKKAQFSEEAEYAGPMIIEDARRILELKKRIKGLDTQIGELCERSRLAGIVRSIPGFGLTCTSEIVAEIGTMDRFRSEQSLAMYLGMAPLDNSSGRRKGTRHAKQVNIRARTAMMTAMNRHILRVGESEQYYRKKRNEGKKHNQAIRSLGRHMVRVLWSMIKDGHFYEERAIDNIIEVTKEQIPA

SEQ ID NO: 263860 - protein, 353 aa, unidentified
MNDSHSIAWLGLDAHSKNCVLGQLDDHGTEIKWWGFPTKPEQLVQHIKAIPATEKHLMLEESNLARWLSQLLKPHVQQLVVCDARRNRLISQDHHKHDKRDAFALARLLRLNEFKPVWQPTEAQRVLFKRVAKSYENAVQRQTRLKLQLKSLFQHWGLFPTGATIYSKPGRVAWLKQLPYDTLRAQALLLYELLDQALAGQTQFRRLMCQTGRQFPEIQRLSTTPGVGLVGSHLFVAYVQDPKRFPKFGRLTRYCRLGIRDRTSDDKPLGYQQLDREGIGTLKAISYRAYLQAAKRRTGPVWEFYQLSLRHTGSTTHARLNTQRKILLTLWTLWLTGREFDPDQFSRAQPLDV

SEQ ID NO: 263861 - protein, 451 aa, unidentified
MNVETKEHGNYNLLRMISAVNKNTLTGGVKAMHRKNDIRQIEKRQRITDKTLVVGMDIGCEFNAMCLMNKEGSVLGRYPKIYNSRRGFDFFHTIVETAKKKHRFTDVIIGMEPTGNYWRKIAFFAIEKGHEVRFIRTTALKHQRELDESSSAKNDMRDAFTIANVVREGKYIDTVIEDNIFRQLRTLAHTRERIQRSNTGSKHALKGVLEDYFPELKDIFWSMKAKGLLALLAQCPFPEDVLKTDIDALTVLIAKSTRRKAKAQEKARQIYDSARQSVGLKHIGEADRYRVTAYLSEIRYSETQLKEIELQMEVLLKQIPLAEHILSISGIGVITCGVFLGEMGNPDNFKDPKQIIKYAGYDPQEHDSGQRTGRKIISKKGRWLLRKYLYFMAMRTVHRSPFFKEYYENKQKTMKKKEALCAVIIKLIKVIFALLRDKRTFMEKQSCQKAA

SEQ ID NO: 263862 - protein, 343 aa, unidentified
MLAITTVGLDIAKSVFQVHGVDAHGSVVVRRQLKRRYVLAFFKKLPHCLVGIEACATSHHWSRELQALGHTVRLIPPAYVKPYVKRQKNDAADAEAICEAVQRPSMRFVPTKTSEQQSCLTLHRTRHLFIRQQTAVINTIRADLAEFGIVAPVGRNGVEDLLYAVADQRDERIPEVARACLEALGALLGKLKAQILEFDRQINAWHRSNETCRRLDELPGVGPALATALVASVADPKAFRSGRDFSAWIGLVPKQNSSGGREKLGSITKQGDRYLRSLFCAGALAVIRYAKIHGTKHRPWLAKLLERRPTKVAAIALANKIARMAWAMMAKGECYREPIALAR

SEQ ID NO: 263863 - protein, 416 aa, unidentified
MKLFIGIDVSSEKLDVCFLTDDCQLSILSEISVANDIEGASLIREMILEFNESYGFNQIVIGMESTSMYSFHPSMFFHEDEELKKINTLVTIENPFRIKQFRRMFDEDKTDQNDALRIADFLRIQRFTTSPIKEEKYMALQRLTRTRYQLIKQLTRTKQHFLENLTYKCNTLAREIRDESTSLFSATIISLMTDDFTLDELAELPLEAFCNLIQEKGRGRFKQPERIAKAIQRAIRSSYRLGSVAQESIDIVLGILVCEIRALEKNIRELDKAIEQLVVVIPEYQCLTSIPGIGKVYAAGLIAEIGQIERFEDQTKLAKYAGLSWKVKQSGNYQSQNTPLTKQGNRYFRYYLVEAANSVKNYLPEYKAFYQSKCKEVPKHQHKRALVLTARKFTRLVDTLLRNHQLYTPPRSVIDK

SEQ ID NO: 263864 - protein, 348 aa, unidentified
MEHHVGIDVSLQLSSLCVLNADGKVVREAKVASEPEALVGFLRGLGLPIARVGLEAGPLSQWLYDGLREASFDAVLLETRHVKAALSAMAVKTDRRDARGIAQLLRMGWYRPVHRKSVPSQEVRALLAARKQLQIKAMDLEQTLRGLLRGFGLKVGDVSRGKLPARVRELAAGHAMLERIVEPMLTAGEAVWREFAKLHREVLAVVKEDQVCRRLMSVPGVGAVVSLTYRAAVDDPARFKKSKSVGAFFGLTPKRYQSGETDVTGGITKVGDAAVRTALHDAANVLLSRVTKFSALKRWAMDVAKRRGMRRAKVALARKLATVLHRIWADGTEFVWGKDPAVSAAAAA

SEQ ID NO: 263865 - protein, 320 aa, unidentified
MQTRMPVGIDIASKKFDVAVWKGETSYKTKVFPNTPKGFSALKKWLGPFGCCHICMEATGAYSEPLATFLHDEGYDVSVENPARIKRFGQAELNRNKTDKDDARMIARYCKMHGPSLWQPAPLNERRLKALVKRLTNLQEMRQMEENRLEISDAVVQPSIRVVIAALDAQIDETKRAINDHINNDPDLKKNKELLESIPGIAGVLSSTMLAYMGDMSRFRSSKALVAWVGLNPMRQESGEWKGKSRLSKMGNSAMRKALYMPAIVAMKWNPAVISLKNRLDAGRKTGKVVVCAAMKKLLQLAYGVLKSGRPFDTKICLAR

SEQ ID NO: 263866 - protein, 350 aa, unidentified
MNATTVAVDLAKNVFELALADGRWKIVERARLTRAQFERWFDNRSVGLVVMEACGSAHHWARLIRSRGIEVRLLPAQYVRAYVKRNKTDRADAQALLEATRAGDIRPVAVKSIEQQGLQALHRTRSGWMSTRTRRINTLRGFCREFGLVVPEGAATGLAQIARYLADEHSGLPALLRPSMRLVLEEIRLMEARIGELERQLLQLAKASPACQVLQSVPGIGLLTSTAMVAAVADPGSFASGRRYSSFLGLTPREYSSGNSRYLGRISKRGDRYIRMLLTHGARSILRAATVARRAGRQIDRLKSWALAVQARTNHNKAACALANKLARIAWAVWVKHEAYRSEPAPTTPL

SEQ ID NO: 263867 - protein, 419 aa, unidentified
MPVRTFGTFTEDLHHLADWFKACGVTSVAMESTGVYWIPVYEILEQRGFEVILVNARYAKNVPGRKSDVSDAAWLRQLHSYGLLRGSFRPDAEIATLRAYLRQRERLVEYAAAHIQHIQHMQKALMEMNLQLHHVVSDITGATGMRIIRAIVAGERNPDVLATYRDARCHSSIETIRAALVGNNRHEHVFALTQSLELYDVYQAKMLDCDRKLEVLIAALGNRGAKPGRKLPRPRVKTKQVNTPTFDVRTALYGVLGVDLTEIHGLGPSLALKLIGECGTDLRAWPTAKHFTSWLCLAPGNKISGGKVLSSRTRRSSSRAAALLRLAATTVGRSDTALGAFYRRLSSRAGKSKAVTATARKIAVLFYNTLRYGMSYRDPGATQYEQQYRSRVVANLQRRAKSLGFLLQAIPGDANPAVS

SEQ ID NO: 263868 - protein, 429 aa, unidentified
MDKTELTRLEEFRQLRGEIRGSEEYLIVGIDVAKERHHAFFGTATGKTLHKRLVFENSKEGFERFLVQAEALKVQHGLGKMVLGMEPTANYHKPLGEYLIRRGDQVVLVSGVAVARNRELLDGRWDKHDMKDSANVADLISQGKMLYYDLPSQEVRELRELLSLKRGLKRQEHGMRVRIRNHLLAQYFPELDKPYGEGEAQGLKVVKWCVAPSEIAKMSYEGFIRLVKPGPRIRVEQKERLMAIWKAAPHSIGCEAGGSLGFVARMMVEGLEGLRETLGKVDERIQEICKRVPSYPYLLSIPGVGPAIAAVLIAAIGNPHRFSSAKEVIKLAGLDLSANRSGTTSERAVPVISKKGNASLRYALYQAALIASNKSSPIMRYYTRILQGRERERGIKTKMRIKLAVKLLVIAWTLMKKEESFNPDYLKWD

SEQ ID NO: 263869 - protein, 425 aa, unidentified
MHSSDPLSSPVDASGFAYVVGIDVGSQTATFCVCKPDKRQVIKPSELANSRAGFEALDRSLRQLGVPPERILIGLEATGRYSENLYQFLRAQGYLLCLLHPRQTHQFAQQRGLRAKTDRLDATTIARLLLSGEARPGYVPDELIATYRELERLHSQLADDSARYQNEIQALVVVLFPEFVQVFADPCRPTALALLKRYPSAQAFVEASVEAVAATVRELAPRHYGRKTAQQLVCLATQSAASGRASGARALSLKILCDQLEHTLANLAQVESELDHLLERDTGATGLKSTPEFGRKTVAVLRAELGDVTRFQRVDQVVAYAGLDLEVKQSGKWQGQVKLSKRGSGRLRRVLYLAALRCICLPASAFGAYYQRLVARGLKGRAALMAVMRKMLIVAYHLLRSNELYDPRKVCAVAGPPPRTPSSGS

SEQ ID NO: 263870 - protein, 437 aa, unidentified
MRRKKNNANKSVNLQVLPVVNSNAAGIDVGAKEHLVAVPCDRDPQPVRTFQAFTPDLHELAAWLKRCGIETVALESTGIYWISLYEVLEQYGFEIRVVNARHVKHVPGRTKTDVLDCQWIQKLHSFGLLSGSFRPDQQIRKLRTYMRLRDNLVVASTQAVHHMQKALFEMNVQLSNVISDITGETGLQIIEAIIAGERDPKQLAALCSSRIKASRETVAKSLHGNWEEALLFALKAALETYRFNQTKIQECDCRVQQHLAQFESRSQLTNTLQNLRTQLHRVCGVDLTKIPGIKEQSAQIIISEVGLDMTKWKTEKQFCSFLGLCPDNSISGGKVLHRATRKVYNRAADTLRLCAQSLTHSKSALGAKYRRLKARLGAPKAIVAMAHHLARLLYRMLRYGQNYVEQGIHQYELKFQLQRVKWLRKEAKSLNLQLVPA

SEQ ID NO: 263871 - protein, 315 aa, unidentified
MTNHKQSKSVVNVGVDVGKFELDVCIYEKQIHWRDENSAAGIKRILKRLSHYQVERLVMEATGRYEFKLAQAAYEKQLPVCIVKPLHVRRFVGAIEQLAKTDKLDAELIAEFAYRVQPHVTPEKSKNLLAIKELMARRRQLMNMRTQEMNRMHMVDKLLATSCKRIIKTLEQEIQRIEKRLAKHIEDQTEWAEKQTLLKTALGVGDTLVYTLLADLPELGSLNRKEVSSLVGVAPINRDSGKMKGKRRIQGGRYTVRTILYMATLSATQCNPVIKAFYQQLVAQGKHKKVALTACMRKFITMLNAMVRDRCEWAY

SEQ ID NO: 263872 - protein, 443 aa, unidentified
MSGAKALTRGDRRRNERLVRLRSIVRRDYAVVAVDLASAKQAAVVADHDSIVLGRRMFSGDAWVIDNILDWAEPIAAAAGLAGVVLGCEPTGHRWKPVLDRARARERELVCVNPMLVHRGREEEDFTRDRSDFKDATIIAKRVAELRCYVPYALEGHWCRLRHLGARRNDVLVAAGSARLRSRDLLECAWPAVLSAASEPLDALTWRAAMAVATDPEQIAAMSLDAVAAAVREQLPRCGGARRNLRILRAIHAAAQAPGGVATERAAACERAAYALDDWHRALDQLADVEARMTAVLDTLGLTELVTTIDGLSAVGAAAILAETGDPARYDRARTWAKHAGLCPRANESGNFHGATTVSRRGRPALRTAAWRAIWGALRHNKIYADRYTHLTTRPGNPLRDGQARAAIAAALLRQLFVVVTRRLAWDPALAAAPAEGVAPQAA

SEQ ID NO: 263873 - protein, 338 aa, unidentified
MNQIHAIGIDLAKSVFQVCAFDEYGKKLLNKALRRNQVLKFLANIEPCLVGMEACGSAHYWAREIKKLGHKVRLMPPQYVKPYVKTNKNDSADAEAICEAVSRPTMRFVTVKSEEQQALLLLHRERDGVVRDRTSLINRIRASLHEFGISIPAGRFRLRKWFREDFGVLESKIPSMLLNHIKLMHTRLVDIEAYLEELDRQIDSASRKSEQCKKVQEIPGVGRLTSSALVASIGDAKEFKSGRQLSAWLGLVPSQHSSGGKALLLGISKRGDAYLRRMFIHGARAVIRHTKEGKPFHEWIMALLKRMHKNKVIVALANKLVRIAWAILAKQSQYCATI

SEQ ID NO: 263874 - protein, 341 aa, unidentified
MKKFIRIGVDLAKNFFQVHGIVREGAEAVSRKFTRTKFREFFLSVAPCRVGKEACGSAHYWARELRSMGHDVVLIAPAYVKPYVKRGKNDAADAAAICEAMSRPDMRFVPIKSADQQAALMLHKTRELLVKQRTMIVNALRGHLSEFGLIAAKGIQRVHELVALALGEEGLPEAARQAAALLAEQSEQLEGTIDTLEKKIAETSAKYPMVRLLKEIPAIGPLISSAMAASYPDPGVFASGRDFAASLGLTPSQHSSGGKEKLGSITKKGNRYLRKMLVVGCTSVLRVAHKYKGALAEWIVAIKARKPERVAAVALANKLARICWAMLSTGEGFREELYTRA

SEQ ID NO: 263875 - protein, 344 aa, unidentified
MIYIGMDVHQKSTTFCLFDPAQEGAGRYRTVTRPTTVEGIGEVLAPLDRECQIAFEVGTQAQWIARIVRPLAGETQVANASRIPWLFRDGRKNDKLDARKLATLLYLKQLPQVHLPSADVSAWRALVNHRRTLVKRRTILKNQIRSIVRAFGYCCPHKSCWTRIGKTWLLSLTFDGAREWMIQSLLEELRLADERIVALEHQLDAIAETQPNVALLRTIPGIGPRTAEAIVAFTDCVDRFPDRKRFTSYFGMTPTEDSSGLIRRHGHISKRGPSVVRWLVGEASHQVIARCPALRAFFDRVHRGKKDRYKKAVVATGRKVLAVCYGRMRDGRAFDPEKLLGKAA

SEQ ID NO: 263876 - protein, 385 aa, unidentified
MTGQYRVPAFIPRDYEIFAGLDVDKQSIAVTFADHEKLVRSLRLPYSSEQLVSYVRKHFPAQRVAFVYEAGPTGFGLYDDLVAEGHPCLVVAPSMVPSAPGQRVKTNRLDSKKLSEGLRGGQLHSIHVPSPVYRDLRHLVQLRDTHVRQMTATKCRIKSLLLYQGMAFPAEDGRWSARALGELKLMPCSGAVRFKLDQLIRTLQFHFQSAVTVQKEIRRFCQNDPELRQSISLLTSIPGIGWIVASHLVARLGDWREINNVRQIGGFLGLVSSEHSTGNHQDRGAITRAGDSRLRNKLIQSAWVAIGKDPELRAFYRRIYQRHPIKVAARKAIVAVARKLTTRIYAVLKEQRPYEFRVDSSAAPLTAEETGGPRERLDMAQSEQP

SEQ ID NO: 263877 - protein, 346 aa, unidentified
MLYAGLDLSRKRVDVCLLDERGERVVVTAAPPDADGLRGLAGRLAGCGEPIYAALESMNGARFVHDELERRGWRVELADAQKVKGLAPLAAKTDRIDAYVLAELARRDLVPAIWLPAPGVREARERARFRLHLVRHRAALKARIHASLIAHGHPCPVSDLFGTRGRALLDAFELPEAWRTSTDASLRVIGHLDEEIDACERELRRLGADHAYVPLLMSAPGIAWVLGYTIAAEIGEIERFASPKKLTGYTGLCPRVYQSGASDRRGPLAKNGPKYLRWALIEAATHAASHPCYVAHYQATKRRLGRQRGAKVARVEVARKLAEAIWYMLTRSQTFAPQGPTLPLVA

SEQ ID NO: 263878 - protein, 389 aa, unidentified
MQIIADRPEAPSAIHTDLGAIFISLELSRSTWLITSLSPGGGGKMSKHSVPAGDISALLARFSEFRQKAFARTGKSFPIIVIQEAGLDGFWIHRVLQNEGFESHVVDPASIATSRRRRRAKTDRIDGEALLRALLAHKRGEPRVCAMVKAPTPEEEDRRRLCRERKVLTNERVLHVNRIKGLLFSQGVSWYEPLRRDRRQRLDELRTGDGGRPLPKHLKAQISREFDRLELLIEQIKAVEAERDALLAAQRVAAPAPAAMLLDIKGIGPEFAAILWSEGLFRHFDNRRQVASYAGLAPTPWQSGKVDREQGVSKAGNPRLRTTLIQLAWLWLRHQPQSALGLWFKERVGRNGGRFKKTTIVALARKLLVALWKYVTAGVVIDGAVMKAA

SEQ ID NO: 263879 - protein, 322 aa, unidentified
MSQLNPICVGIDVSKASLDIAGTNNIEQFRVSNNPDGFDTIIYQLKKNNIALILMEATGGLEAAIACALQAEGFDVAVINPRQARDFARSMGYLAKTDRIDARVLAQMADVINRHPERSRFIQAIPDAERQILAAMVGRRRQLIAMLVAERNRMHPSHPQNRKSISNIINALENELKRIDEDMHKHITDHFNELAERLSTIKGIGMMTAATLLAEVPELGKLSRREISALVGVAPVNRDSGTMRGRRTIFGGRAGVRTSLYMAALVATRFNPVIKAFYTRLVAAGKAKKVALVACMRKLLTILNAILRKNQEWDESYHNVAP

SEQ ID NO: 263880 - protein, 350 aa, unidentified
MLIIGCDFHSRFQQIAMLDTQTGEIVERRLEHESGEAERFYRSLPHPVRVGLESSGHAQWFERLLAELGHELWVGDAARIRAAVVRKQKTDTRDASHILDLLMTNRFPRVWRPSPAERDVRQLLVHRQKLVWARIKVKNQLQTLAMNQGVCIRRKLWASAGRRALEGLTLGPWTSRRRKELLQMLDQLNGSVEELDRAVGEEAQKRADVVRLMTHRGVGPVTALAFVLTLGPVERFRRSKQVVSYLGLNPQEHSSGGRQRLGSISKQGNTMMRYLLVEAAQTASRFHPELRRNYQRLKSRRGSAVAKVAIARKLAVRLYWMLREKADHAQLVRMQGSPRGTLVDASPSRF

SEQ ID NO: 263881 - protein, 355 aa, unidentified
MNQEKYIGMDVHQATISVAVMDSSGKLIMECILETKAATILEFIVGLRGTLSVTFEEGTLAAWLHDLLKPHVSHLVVCDPRRNALLKDGSKSDRIDARKLAELLHANKLHAVYHGEHGVRTLKELGRSYLTITKDLTRVMSRIKALYRSWAIPCSGTTVYAVRHRAEWLAKIPEAGVRLRAERLYQQLDLLQPVRQGARRDLMVESHKHPAVKLLRQIPSIGPIRAALLVALLQTPHRFRSKRQLWAYSGFAVETHDSGEYRFVRGKLVRNRERITVRGLNHNHNHDLKNLFKGAALSASTRPGPLCDFYGALVEKGMRPTMARLTLARKMAAITLTIWKKGVDFDAQQLNRQAA

SEQ ID NO: 263882 - protein, 351 aa, unidentified
MMIIGVDYHPSFQTIAFLMEETGECGEQELNHSDGQAEKFYRDLKQRGISVRVGMEATGYSRWFERLLAELGFEVWMGDPAEIKAKRVKKRKTDREDARLLLKLMLENNFPQVWVPGPENRDLRQLLWHRHRWVQMRTRIMNQLQALAMNEGYRWKKKLFSQQGRAQLEKLTLAPWASRRRQELLELLDRMNPTIEELTAAVEREARKRPEALRLMTHPGVGPLTALAYVLIIGTPTRFQRGKQIGTYVGMIPCEESSAGKQRLGHISKQGNSLLRFLLVEAAQAAARINPEWRRRYIHLAMRRHRSIAKVAMGRRLAVRLYWMWRNGCEYSPSLEFGSHAGQLGLVHGGK

SEQ ID NO: 263883 - protein, 353 aa, unidentified
MKYVGLDWAYRTAQWCALAPGGEIAGEGRIAADRDGLARLVLELGDEVTACLEMMSGALWVHDQLVDCGWQVEVADARKVKTVAPLAAKTDKVDARLLAELSRRELVPALWLPSLDERALRERLRRRMHLVRLRTSAKGRIFGLQTQWGVRVSLARLRRADGLTLLERAGVPEVWRRSVGECLALIDFLDARLEPLDAELRPFAKADPRAVLLDTIPGIAELLALTIAVEVGEISRFASPEKLVSYGRLAPRVRQSGQARPRSGPLSKSGSRLLGWAAVEAAQQAWRESNPWHRLYLDVSARSGNRNSAKAAVARKILIAVWHMLSRNEPFNPAPRSTRGDSVPASSRLALAA

SEQ ID NO: 263884 - protein, 324 aa, unidentified
MPDVVTPFIRQTLLDQDGRELLSRRIVNDPEIFLELLNGLGDEVEVALEATCGWEWLADLLEDASFELHLAHPLRTKAIAAARMKTDAVDARTLAHLLRTDLLPEAYVAPRELRELRDLVRHPVALTRMRSALKQRVGAVMAKHGIARPYSNLFGPGGSRFLAELKLREGPRRRLDSLLALIAAFDGEIEATTKEIEQRASEDAYVEVLCQIRGVGRYIAMLVIAEVGDVTRFASARHLCAWAGLTPTVRSSDGKARLGHISGQGSPALRWALVEAAQHGLSPPARRLTAAHLIEPSSPARHSGPPRAAEWMTGTLPLPPQPSP

SEQ ID NO: 263885 - protein, 427 aa, unidentified
MFDNDYNRQVERRQRIKKTTLVLGIDIGDDFNAVAYMHKEGSILSRHPIVYNSRAGFDQFVRITEDLKAKHGMKDVLIGLEPTGHYWRKIAYFAMDQGYAVRFIKTTSVKHERELNESSSAKSDIKDAITLANLTREGKYIDTVIEDGVSRQLRTLSKVREKILRQSTGAKNTLHAVLDDYFPELKKLFYAMNTKGLWAVLETCPFPEDVLKCDQSAIAEIITKASRSKTEGTKKARALYLAAQTSIGLKRVGDADRYRMQVCLNEVKQTERMLHEIKKELKGLLLQLPAAQYLLSIPGVGHLSAAIFLGELGNPEYFHRAKQIIKYAGYDPQESDSGKRIGRKVISKKGRWLLRKYLYLMSVSAVNHSTFFRKYYQRRLKTKNRFGQLLKKKEALCAVAIKLIKVIFALLRDKRAFQDTVRFALAA

SEQ ID NO: 263886 - protein, 350 aa, unidentified
MEYLGIDWSYRRAAWCALSEGGELIGEGAVPADEDGLARLVVDHGREVRGVVEMMSGAIWVRDTLAAAGWEMQIAHARKVRDVAPIACKTDKVDARVLAELCRRDLVPELWVPCLQDRELRERLRRRTHLVRLRASAMNRIFGLLTQWGTRMSLKRLREPGAMQLLDERGVPEVWQRSISEALALIDLLDERISPLDQELRPLAAADARVVLLDTIPGVGELLGLTLASEIGDISRFASPRKLIGYAGLAPKINQSGDRSRTGALSKAGSRTLRWAAVEAAQHAWRESNPWHQLYSDIAGRAGKNPAKAAVARKILIASWHILSRHEPFKAPTRRRPDPASASSRCFLAA

SEQ ID NO: 263887 - protein, 437 aa, unidentified
MRVSIASPLMQPSPSDRRVGIRIVTFEMLWGAASGVWHHRSPKRLSRWSVPMSQPSDFNRSRTGLEQDCTLIAVVEMSLKSWLVAGIVPGIERHPLKKLAADEHALLKLLRRWQAEAIKAGRNVKRVAVAFEAGRDGFWLARWLRARDVEAYVLHASSVAVSREHRRAKTDRLDTELLKRAFIGWLRGEPHHCRMAAIPTIEEEDAKRANRERENLVCERSRIINRMKACLIRFGVRAFKPTLRKAPERLVKLRTPEGVPLPPNTIAEMCRDMARLRFVRDQIKEIEQARLQRLEQAPKERTHAMVRLLTRVVGVGIETADMLVHEVLSRSMRDRRAVARYAGITGSPDESGRKRREKGLARAGNARVRRGMIQLAWRFLRFQKDSALVQWYRMRTTNARAGTRNTMIVALARKLLISLWRLVTVGEVPAGVAMRAV

SEQ ID NO: 263888 - protein, 340 aa, unidentified
MRKLYAGCDLHGNSNFWGIRDETGEKVFHKKLPNDLALMLAMLEPFREELVGIVVESTYNWYWMADGLMEKGYRVHLANPSAIQQYEGLKHADDKHDAFWLAEMLRLGILPEGYIYPKQERPVRDLLRKRGHLIRLRTSMVISLENIICRNVGRKVSANDVKRLGEDRVTPYLEGQEDLALAGQVSKNTVDFLSEQIQEIEKAVLKRVRLKKSYRLLLTIPGVGKILALVIMLETGPIRRFATVGDYGSYCRKVPSQWTSNEKKKGSGNRKSGNRYLAWAYAEASEFARRSYPEPRAYYQRKMQKTNAAVAHSALAHKLARAAYYIMRDQVPFRMEKLFG

SEQ ID NO: 263889 - protein, 369 aa, unidentified
MIKKNTAKLKQEIAEITVTDKKNKADYIIVGVDLSKTKLDVKHIKYNIYSNDEKGHARFIKAIKELGDNVIVAYEATGYISLNFAEMLDTNGIMRCQVSPRRVRHHAKAGVAEAKTDKLDCEVIQSYTMKYWEHLRINEPMNRNYSELQELQRVRNLYTQFIKQAKQILSTCHRESARKPIEENLVKLKEEKKKIEQKIKDLIDEDENSKNLKELLMSQPGVGEETATSLVLNLPELGRVTRKEIASLTGTAPFNYDSGNHNGKRFTRFGRKEIRNLLFMATRAALNSKKENDYHKRFNHLSRITNLKEGRTYMQVIVACMRMMIVRLNGITRDWIAKGKPDLRTYTKMKEEEQKEKEQAEQEKNNQEQ

SEQ ID NO: 263890 - protein, 405 aa, unidentified
MAAELVAHGWAGVDVGKAHHWVCLIDEAGSTLWSSKVVNDEAAILDTIAEVLARAQRVSWAVDITGTSSALLLALLTAHGQAATYVPGRTVNQMSTAYAGEAKTDARDAYVIAETVRLRGDLTPVDVPATLVAELRLLVTHRTDLVADRVRMINRLRDVLSGYFPSLEREFDYSTSRGAVVLLTGYQTPAAIRARGRARLTTWLRVRKVRNAEQIATAAVKAAQSQRTTVPGQDVAASIVAEIATALLGLDGRIRVVDARIGDTFHAHPQAQIIESMPGIGTILGAELIAAAGDLSRYVDAGHLASAAGLVPVPRDSGRRTGNLHRPMRYSRKLRRVFYLSAQTSMMREGPNRDFYLKKRGQGHGHVQALIALARRRVDVLWALLRDDRVFEVAPPPRQQLPQTA

SEQ ID NO: 263891 - protein, 414 aa, unidentified
MFAVGVDVSNGRSTVAVLQSKTKVFLKPFEVPHTPEALGRLVDKLNSLDGETRVIMEHTGRYYESIAMFLDSAGFFVSALNPLLFKDYKEGISVHPVKTDKADAVRIAKFGLDKWDDLRQYEPMDTIRYQLKTLNTQFQLANKSKVAFTNNLIALLEQNYPGIRKLFPSPARPDGSQKWVDYVGTFWHLDCVRKLSLNAFAERYFKFCRKHEYNFSEEKAAELYRHAQSTIALVPKSDISKLMVKEAVSQLNSVSRTLETYRAEMNRLASQLPEYQTVMEMYGVGPSVGPQLMAEIGDIRRFPQRNSIISFAGIDPKKDDSGDKVSTTGKSSKRGSPYLRKTLFVIMDVLLRLKPVDDPVYQFLDKKRSEGKPYYVYMTAGGTKFLRIYYGKVRDCLIEKGLWDKSSIEPSNSD

SEQ ID NO: 263892 - protein, 378 aa, unidentified
MTTTNQFAAHVGLDWADKKHDVCVQFKNGERVFHVIEHTAEALDVWLTELHQKVEGRIAIAVELKKDPMVYALQKYPFITIFPVHALSLARYRQAFSPSGAKDDPQDAELALELMLRYPQKIKAIEPDNADIRLLQQLVEQRRQLVEDKRRFVNRIINTLKQYYPQPLEWFSHRGSLLLCELIIRWPSLQQLKRARRDTIRNFLNAKGGRAMALTEQRVASIDNAIPLTTDPSVIEANALMATALATQIKVVSEIIKTYDERIETLFDTLPDAGLFKSLPGMGPCMGPRMLAALGDNRDRFSSAEEIQNYAGIAPVTERSGQKSWVHWRWQCAKLVRQTFVEWAAKTINSSYWARLYYQGQREKGKSHQWGRFRLRAK

SEQ ID NO: 263893 - protein, 351 aa, unidentified
MIIIGVDYHPSFQQIAFTDKDTGEYGEHQLNHSEGEAERFYRDLKLKAANVRVGMEATGHARWFERLLAELGFELWIGDPAQIKAKRVRKQKTDREDARLLLKLMVEDRFPRIWVPDPENRDLRQLLWHRHRLVQMRTRIMNQLQSLAMNEGKRWKSKLWSGRGRADFEKLPLAPWASRRRRELLELLDRMNPTIAELTVAVQQEANKRPAVKRLMTHPGVGPLTALAYVLIIGTPMRFQCGKQIGSYIGMIPSEDSSAGKQRLGHISKQGSSLLRFLLVEAAQVAVRLDPEWRRRYLHLAFRREPRIAKVAMARRLGVRLFWMWRKEWTYQQVLEFGSHTGQLVTGHGVK

SEQ ID NO: 263894 - protein, 412 aa, unidentified
METLVERGCGLDVHQATVVACLLMVRKDGTVQKQVRTFGTTTRELLSMREWLLSQGCTHVAMESTGVYWKPVYAILEGTFQIVVANAQHVKKVPGRKTDVKDAEWIADLLCHGLLRPSFVPPKPIRELRDLTRYRRKLVESQAAERNRLLKVLETANIKLASVATDVFGTSGRLMLRALIEGKATAQEMAELAKRKLRSKIPQLELALEGRLEDHHRFLLKLQLDRLERVEGDLAVLEQHIQEKLEPYAAQLALLDEIPGVDWTLAVVIIAELGVDMSVFQSVSQLASWAGVCPGNNESAGKRKSSRIPKGNVYLTTALVEAAHAAARTKGSYLRDKFYRLKARRGYKRAAVAIAHKILVATYHMLSQQVSYNDLGDLYLDRLNKNHLTRNLVHRLERLGYSVTLTPQQKAA

SEQ ID NO: 263895 - protein, 404 aa, unidentified
MDTCTAGIDLASQEHRLVVVEADGRRLDERRVAHSEVGLSALCRRLLELGVTRVALERPNGLVVDRLLEAGVTVVAVHPNQLAAARDRYRAGGGKSDGFDAYVLAELARTDMHRLTVLEPDGDETRALRALTRAREDLVEQRVALANRLRAQLEAFWPGAARIFSEVDSPIALAFLERYPSPEDARLLGEKRLAAFLARHRYCGRKSATELLARLRSAPEGRAGALESEARRAVVLGLVAALKPLVEQIKLLTGEIRGLLRDHADGEIFRSLFRDPKSVVTAAELLAEIGDRRERHPVSSSLEAIAGQAPVAVESGKKKVACFRWACNKTLRSAVGVLADSSRKHNPWANDIYQRARARGHDHPHAIRILGRAWLRVIWRIWQDRTPYDPARHGNLQRLLATRG

SEQ ID NO: 263896 - protein, 355 aa, unidentified
MKRTTKYVGLDVHQATTVTSVRDRSGRVIARAILPTEGAALTDFFQGMRGAVNVAFEEGTQAQWLHDLLAPVTHSVTVCNLRGEPRRPGNKADIKDADTVSGRLLKGDLRSVYHGSANRALLQDYARAYLNAVEDATRAMLRLKALYRARGITASGEQVYSAEHRTEWLSRLSHPGARLRAELLMEQVDLLRQLRLRARLAMIREARRDPTYEILRSIPFLGPVRVSLLMATMKTPWRFRTKRNLWGYAGLAVVTENSAEYTYVHGSPVRRRRQPLTRGLNKNYNRFLKNVLKSAAAAAIGRPGPFRDIYDRMISGGMRADMARLTLARKFAAVALRLWKRGERFAPTLLTVQAT

SEQ ID NO: 263897 - protein, 334 aa, unidentified
MSLEYSSRCVVDGTGKIVREAKAASEPAALIAWFGSLGLGLTRIGLEAGPLSQWLYLAMKQAGLAVELLETRHVRDAFKAMLVKSDRNDARGIAQLIRLGWFRPVHCKSMDAQEVRAVLTARKLVQTKLLDVENSLRGILRGFGLKVGKTTDRSFATRIQELVKGHPNLEAIGEALLSVRAVLLREFNAFEKRVRAMSRLNARAKLLMSTPSVGPIVALTYASAIDDPARFKSSKQAGPHFGLTPKKYQSGETDYSGRISKIGDAAVREALYQAAHVMLTKPIKGCSELKSWAMRIARRAGMSKAKVALARKLAVILHRMLANATPFNAAAAAA

SEQ ID NO: 263898 - protein, 315 aa, unidentified
MRSTVAQSVGVDISKDTLDVAIHPGGESFRITNNPEGHRALIKRLKGFDIARIVFEATGAYHRLFQQALVEAGLPWVKVNPCQARRFAQATGKLAKTDRCDALMLARMGAVLDLETRAPASKTVEALRELVNARDALIKDRVAALNRQAIAVSPLIKRQLAQRLRQIDGQIEAIDRRLKTLRNADSDLCQRFDILTSIPGIGEVTANVLVVETPELGRLEHAQAASLVGLAPVPRDSGQTHGKRSIRGGRPRARQALYMPALNAIRLNPEFKAKYEAMVKAGKPAKVAIVAIMRKLLILANALIRDRRKWAPANP

SEQ ID NO: 263899 - protein, 413 aa, unidentified
MSIDPNPTALRVTAGVDWAKDDHVVCVVGDQGEVLDRFTVPHDAAGLKRMAARLLRAGVEQVGIERGDGPVVDTLMQAGLVVFVIPPGQVKNLRSRYGSAGNKDDRFDSYVLADVVRTDVRRLRPMVYDSEQTTALRGSVRARRDLVAHRVAAANQLRAHLQIVFPAAVTIFADIDSAITLTFLGRFTTQEAADWLSPKRLAVWLGSVSYSGGVDPAVLHARLVAAPRGVTGEPAGIHAGTTTALVAVLRTLGAQIQILAASIGEQLDTHPDAAIFTSLPRSGSVRAARLLAEIGDARGRFPTRDSLTCLAGVAPSTRQSGKVKSVTFRWGADKQLRDALCDFAGDSRRANPWADDLYTKAIARGCDHPHAVRILARAWAHVIWRCWQDNLPYDPAAHGALQTLLNQDQPTAA

SEQ ID NO: 263900 - protein, 452 aa, unidentified
MELKMGKSAGLSLECIELNAAGIDVGATEIYVAVPPDRDPQPVRRFATFTADLRAMAAWLVQCRITTVAMESTGVYWIPPYEILEQAGIRVCLVNSKHVKHVPGRKSDVQDCQWLQYLHAVGLLHASFRPDEKICAIRSLSRHRASLIENAAGHVQHMQKALTQMNLQIHHVLSDITGLSGMAILEAIVAGERDAAKLAALCHTRVRSDQQTVIKSLVGNYRSEHLFTLKQSLTAYKHYRELMAECDREIERLTRQLNSRIDPPQKEPMPPADLRFRKRSKNQFHCDMSSELTRVLGVDLTTIPGISALTAHTLLSEIGSDLSPFPNAAAFASWLALCPANKKSGGKVLSSRTRQTNSRASRALRLAAQTLARNRSHLGNFYRSMRARLGAPPAITATAHKLARIIYHLLTTGQPYDESVFLQEGKKQAQRNEKRLRKQAKALGFQLVPIAA

SEQ ID NO: 263901 - protein, 346 aa, unidentified
MNYIGMDCHIKTIDFAVVDEAGRLVKAKSIPTSVNGFIEFVRTVPPPRTVYMEEGTLAAWALETCTRFGEKLVITDPKQNHWIGSSGQKDDPLDAFKLAQLARGGYMKEIHHSLGQRRRFRELMMAYHDTVRSTVRIKNKIKAKFRQNGIQCTGATVYSETYRLEWRDKLPREATPLLILDGLWRQLEESEQTERELLLAAKAQAKQYPEVKSFEALPGIGFINAATVSAILETPYRFATKKKVWMYAGLGIITRSSGGKTYSERLSIDYNRLLKYTLKQSTESALKAADNPFLQKYLDMTLIRGIAPHRAKLTIARDMLATMWAMWKKGEKYDPEIRKGTVLKQG

SEQ ID NO: 263902 - protein, 318 aa, unidentified
MNTNTLQNINVGVDTGKTQLDIYIRPLDIYFNVTNDEKGIKQAIRTIAKYHPERIVIEATGRLEMPFILACENANLPYVIANPLHIKKFSGALGNKAKNDRLDAALIAHYAEAIKPKLTQLKSENIRLMSDLVTRRNQLLSIQTMEKNRLQILPRTLASSIKPILTALKNQITKVENRIEKLIETCPDYQAKNEILQSVPGIGKIAAASLISNVPELGYITNKQAASLIGVAPITRESGSFKGKRMINGGRMQVRTVLYMAMMSAMQCNPVFKETYQRLLAAGKPKKVALIACVRKMVVILNSMLRDGCMWNADSAKN

SEQ ID NO: 263903 - protein, 337 aa, unidentified
MDNIGLDLHQRESQLCILTEDGEIQEQRIRTSRERFTAVLGGRPPARVLLEASTESEWVAQHLEGLGHAVIVADPSFAPMYATRSRRVKTDRRDARTLAEACQLGAFRRAHRLSAAQRHVRAELAVRDVLVRTRSRHIGLLKALVRRDGLRVASSTPDHLLARLAAVPLAPPLTDELAPLLTLFTPLNREITAADRRLERRAARDPVVARLATAPTVGPITATAFVATLDDVTRFTSAHQVEAYLGLTPGEHSSGEHQHRGRITKTGNTRARWLLVEAGWRLLRSTQPEAVALRAWGEQLARRRGKRIAAVALARRLAGILYAMWRDATVFRAPAQA

SEQ ID NO: 263904 - protein, 317 aa, unidentified
MAEVLFEQIVQRGCGLDVHKQTVVGTIDGVGLKRETRKFGTTTSSLTELKEWLERAGVTHVAMESTGVYWKPVYNVLEPSGIAVWIVNARHVKYVPGHKTDKRDSKWLCKLLLAGLLKPSYIPPREQRELRDLTRYRRKLIEQIASEKNRVIRILEDCNIKLSSVLSDTSGVVGTKLIDKLCKSGKISMEDIEEVYHCKLKASKEEIHEACEGMITAHHVFMLQVIKKDIVFCEGIISEITSRIRHILSPYGNVLELLEEVPGLSTKSIEDLIAEIGLDMNVFPTEKHLASWAGVSPGNNESAGKKKVDAQHTVTSR

SEQ ID NO: 263905 - protein, 356 aa, unidentified
MTSTKYVGMDVHKESISIAVMNSAGKIVMECVIETKASVLLQFFNGLRGDVRVTFEEGTWAAWLYDLLKPRVSEVVVCNPRKNALLKDGSKSDRIDARKLAELLRGNHLKPVYHGEHGLRTLKELGRSYLTITKDVTRVMNRLKALYRGWGIACAGHEVYVPRHRSEWLGKISEAGVRRRAEHCYEQLDALRLLHQQVRRDLLLESKKHQAWRLLGLIPGIGPIRAALLIALIQTPHRFRTKRQLWTYSGLGLETHDSAQYRVVEGQLQRSKKSVTLRGLNQDHNRDLKDIFKGAATKVSSSNSGPFHDFYEHLLAQGRKPTMARLTLARKIAAITLIVWKKEVRFDASYLKSQTA

SEQ ID NO: 263906 - protein, 248 aa, unidentified
MTDNKGVTTYKRRRSSTFTTGLRELLQWLLDNNCRDVCMESTGKYWIPVYNVLETECKVVLAHPKYVKAIKGKKTDKKDAKWIADLFKDDLLEGSFMPPKDIRDLRDLMRYRYKLTCFSSSEKNRLQNSLTVSNIQLAKPHQFYIDLILSMPSIKDPFTAITIISEIGVDMSKFPTTKNLCSWAGLTPTNNESAGKKKSVRISYPFFNAIHFFTCKNSTQFSFLAAFFQFGVNRPSCSQGEVHHNERN

SEQ ID NO: 263907 - protein, 334 aa, unidentified
MSNDTRIAVDVAKAVFELAISDRPGHVARRERLPRALFLAFMAQQPAAVVVMEACGSAHHWAREIQKLGHRVVLLPPHHVRPYIRRNKTDRTDAKGILEASRNDDIRPVPVKTVNQQVLTSLHRLRSGWMLERTARLNAVRGLLRELGVFIPVGSREVVPAAWSLIEDADSTLPEALRPVFAEACREIREIETRVKLVERQLEALVEQLPAVEHLRTIPGVGLLSSTALVGFIGDIQRFPTGRHFASYLGLTPREYSISKRGDGYLRTLLIHGARSLLVHARKQQPDRLREWANNLAKTHVHNKAAVAVANKLARIVWAVWKHERPFALMAKAA

SEQ ID NO: 263908 - protein, 339 aa, unidentified
MHVTTIGIDLAKNSFSLHGVDSQGKRVFNKTLSRGKLLAFLAQQPPSLIGMEACSGAHHWGRQLQAMGHRVGIMASRFVAPYRKGGKNDSNDAEAICEAVARPHMRFVPVKSVEQQALLSWHRVRQGLIKERTATINQLRGLLSEFGLIMPKGRYSAQHHIPDLLEDADNGLPTLARRLLNDVYLRLQDMNERLLAYDRELEHFCRQSEVAQRLTTIPGIGAISATALLASVGDPRQFKNGRQFAAWLGLTPRQYTTGGKIRLGRITKKGDVYLRTLLIHGTRAVLATLKDKQDRLSVWTRALIERRGYKRAAVALAAKNARILWAMLARGDSYQLKTA

SEQ ID NO: 263909 - protein, 360 aa, unidentified
MAQARTFVALDVHAAATVAAIVDRESGELRRQRLSGRVSEVCDFVAALEGPVRATYEAGPTGFALARRLEAVGVDCLVCAPGLIPRGPTDRVKTDQRDAERLVRLLIAGELRRVAVPTVQAESLRDLVRAREDLRGDLMSARHRVAKLLLRHDVRFEGAERNWTQPHLRWLSTVRFEFAGTQAAFDDYRGAVEALIIRRGELEREIAEQLPVSPSAQSAKRLMCMRGIDTLTAAGLCAEIGDFARFHHPEQLMSYLGVVPSEHSSGTRRRQGSITKSGSQHARRLLIEAAWHYRQPPRISEPLRRRQAGADPAIVALSWKAQRRLHHLWTRMESRGKRRTIIAVAAARELAGFCWAISTE

SEQ ID NO: 263910 - protein, 400 aa, unidentified
MVSAQLQVAVDVGARRHRVAIGDVAGRLLEEFDVEHSAAGLANFFARVEHWQAQWSWPVAVAMEGFNGWARPLDRQVLLRGWRLFNVNNLKLARYKEIFPAPAKTDPIDTRCMLELFRLRTQLGVARDVLQEVAPVPAANDKLKRLTRRRRQLVIEKGRVLNRLQSDLQAVCPGLLAISAAADNGWFLSLLSCREDIVKLSRLRQSTLLSLPDVGRKYAALIQAWQPAAMFSDEAPWVGPMIVADARRVLALKQEVHQLDAAIAELASDSEIARRIDTLPGFGPTCSAELAGEIGTLERFASEAGLALYLGMATLDHSSGQQSGSKRPRQVNTRAKAAMMIAVARHAQQVAVSRAYYEKKRAQGKTHNQAIRALGRQLVRVIWSMLKQHRDYELRGAIPS

SEQ ID NO: 263911 - protein, 379 aa, unidentified
MAIKQESVGRQETVYAAIELSKKTWVLGIALPDRDRPSIHRVAGGNLGELVARLRAAARENRRILVCYEAGYDGFWLARALAKIGIECRVLDPASIQVNRRARRVKTDRIDVLALLRALIAIDRGERHVCAVVRVPSVEEEDARRSHRERQRLVRERTGHINRIKGLLFAQGIRGVEPKLRRTRIDFAALKTAEGHPLPDRLRRELEREYARHDLIEAQLREVEKERDTADAQDPVVERKRQMLVALQGVGGTSAAILAREVFARSFASRRQLGSYLGLTPSAYDSGSMTRCQGISKAGNSWARRILIEVAWLWQKHQPASPLSHWYIQKTTGQSSRIRRIMLIALARKLAISLWRYVETGLVPEGVVIARAESRCAPA

SEQ ID NO: 263912 - protein, 340 aa, unidentified
MEEYDGRQFVGIDLHRRRSVIVRMTSGGEPVGSTVRIDNDPFTLAAQVASWGECPEVVLEATYGWYWAADVLTGAGVNVHLAHPLGVKGFAYRRVKNDELDARGLADLLRMGSLPEAWIAPPQVRGLREQVRHRCKLVAIRSGLKAQVHAVLAKQGVHVPMSDLFGAAGTELLDELGLDAPFHARVLSLRRLIDAFTFEIDTVGKRVSAGLHNHRGFQAIQAVPGVGPVLAAVFVAEIGDVTRFARPQQLCCWAGMTPRHRESDTKVHRGRITKQGNRLVRWAAVEAVQRLYGGPIGATRARLTQRRGANIAKVAAARELLTLVYYGLRDGHIRCLARPA

SEQ ID NO: 263913 - protein, 330 aa, unidentified
MTTRVLGIDVSSDTFHVALQGENGWMDNSFANSRAGCAQLGRWLKRNGADQVLACVEASGNYWVDVATWLYEHGHQVHRANPLSIRRFIESDLERTKTDKQDARHIGAYIVSRMALPGAVIRLWEPPCAVQYELRALSRRLEELIASRTAIVNRSKDPQVTAFVARGYKRDLTHLDRERERVEAEIDRLIAKDDGLRESRELMETITGIGAATSRLVLAELGDCQQFDSSSQLVAFVGLCPQERQSGTSVRGSNATTRYGHRRIRQALYFPALTALRHDPGCKALRERHAAKDKPPMKTVVAVMHRLLRIIYGVLKNRTPYDPMRALNSA

SEQ ID NO: 263914 - protein, 341 aa, unidentified
MKKFIRTAVDLGKNYFQFHGLASEDGVLVSRKLKRSKVLEFYAQIEPCRVGMEACGSAHHWARELIAMGHEVVLIPPAYIKPYVKRGKNDVVDAAAICEAMARPDMRFVPVKSADDQAVLMLHKSRELLIKQRTMSVNALRGHLAEFGLVVAKGIGRVDELLALAQADARLPQIAKAMVTELAQHLEGLDQSIDAIDDDIAKAHKKNQKSCLIDEVPGIGTLIASVVAASVPDPSVFKSGRDFAAWLGLTPKQHSSGGKEKLGAITKQGNRYIRKMLVVGATSVLRVVGKRKGALADWINALRARKPERLAAVALANKLARICWAIMTTGESFRTETYVKA

SEQ ID NO: 263915 - protein, 422 aa, unidentified
MGSSSKGGAVEKIVERCAGLDVHKDTVVACVRVPGGDEERHQEIQTFATTTRGLLALRDWLGSFGVTRVGMESTGVYWRAAFYLLEDDIECWLLNAQHLKNVPGRKTDVKDSAWIAQLMEHGLVRPSFVPPRPIRQLRDLTRYRKAQIQERTREVQRLDKVLQDAGVKLSSVASRVLGVSGRSMLNALVAGTHDPEVLAGLAKGRLRKKLPELKDALEGRFSAHHALIVGQILAHIDFLDEAIATLSTEVEALIAPFSKEAELLRTIPGVDTFNAQVLIAEIGVDMARFPSAGHLASWAGMCPGNNESAGKHYSGKTRKGSKWLRVGLVESASAAARSRGTYLSSHYHRIKGRRGHRKAIIAVAHSILVIAYHMLQRQETYQDLGEFYFLDRESSARYERRLIVQLERLGHKVTLEPLAKTA

SEQ ID NO: 263916 - protein, 399 aa, unidentified
MAASTAVVIGADTHLDTIHLAALDSVGKPLADAEFRTCPRGYAAAIAWARQQGTIMMAGVEGTSSYGMGLTTALHEAGIAVVEVIRSDRSARRRKGKSDPLDAYAAARVALAGEGVAVPKDEHITALRALLTARRGAMKARTATINQIRSLLVTAPAELRERYRSHSRIALVRALARCRPASHADPTALAVLTACKAMAQRVEFLEAQERELTAQLDELVTAINPGLRAAHGVGPDTAAQLLITAGGNTERLRNEASFAALCGTAPVPASSGKTQRHRLSRGGDRAANNALHRVALVRMSADKRTRDYVARQLANGRSKMEILRLIKRALAREVFRLLTKHCDVDDYSDLRPTRQHKNITLTAVAQHFGVWPTVISRLERGLQRDDTLVENYRQWLAAA

SEQ ID NO: 263917 - protein, 349 aa, unidentified
MTMTTLETARVVTGGIDTHLDVNVAAALDPVGALLGTAAFEASPTGHRELASWLGSFGTVATVGVEGTGAYGAGIARHLHSLGVTVVEVDRPNRQERRRNGKSDTLDAVEAARAALSGRARGQAKSRDGAVEAIRVLLVARRSATRERTRSIVRMRHLGYTAPEELRGRLKGLSVRRFVEEASRLRPEASPDTVTAATKAALRSLAHRVRSLETEIAHLDEQLVPIVGACAPELLSVLGVGTLTAATLLVTAGDNPERMRSEAAWARLCGVAPLPATSGKVVSRHRLNPGGDRQANAALWRIVMVRLTCDPNTRAYVERRMKEGRSKREIIRCLKRYVAREVYRQLPRG

SEQ ID NO: 263918 - protein, 345 aa, unidentified
MEHHVGIDVSLELSSLCVLDVTGKVIREAKVASEPEALVAFLCGLGVTIVRVGLEAGPLSQWLYDGLQAAGFEAVLLETRHVKAALSAMTIKTDRRDARGIAQLLRMGWYRPVHRKSVPSQEVRALLAARKQMQIKSMDLEQTLRGLLRGFGLKVGDVSRGKLAARIRELVSGHAMLERIAEPMLTARDALWSEFAKLHREVLAIVKEDKVCRRLMTVPGVGAVVSLTYRAGVDDPGRFAKSKSVGAFFGLTPKRYQSGETDVTGAITRVGDAGVRTALHDAANALLTRATKFSTLKRWAMDVAKRRGMRRAKVALARKLATVLHRIWADGTEFVWGKDPAATAA

SEQ ID NO: 263919 - protein, 392 aa, unidentified
MIYAGVDIAKTDHVIGAVDETGAEVARPMAFKNTEAGFERCIAWLESVAESEDDVFVGMEATGHYWMACFAYLVAAGYRVCVVNPMQVHAMRRLKGLCGVKNDRIDSALIAETLRQGDYDQTRLATDEVQALKRLTRYHQGLKQELATVKTQAICVLDAYFPEYAGLFSDMFGTASLKVLAECPTPSEASRKRTSSIARLLSEGSHGRLGAERAAEIKSAAKSSVGIRLGEDAASFQIKTMVTQVEFLNRTIAKVEREVASLLEKVEPNITTVPGISTTTGAQIVAEIGDVKRFKGAASIVKYAGLNSGVDESGMFSAEGVPITKHGSPYLRRSLWLAANRARQYDPRLKAFYDKKRREGKPHRVAVTAVARKLCHVVYAVMRDGEPYDPSK

SEQ ID NO: 263920 - protein, 365 aa, unidentified
MNNAYNTAIGLDVGDRKTQVCVMAKDGKSPKIVMEMAIPTTKEGLAKFLSTQDRSTPVAFETGTHCRWMNEVAQELGFKTYVANPCRLRMITESKTKNDVNDARMLARLALLDPGLLHPVKLRGPEHQKMLNLHGARNLAVKQRTEAIVQLRAMAKSMGFRIAKCQAASFHNLDRGAWPEAFRCIAWPMLKNLEQLAITIKTYEKQIRELAETPTFKAQVERLREIHYVGLYVATGFIAATGGDMDRFEKPRDVGPWLGITPKQDQSGDVDRQCHITKAGSPFMRRLLVESAQMILRDGAVDTDLKAKGLRICARGAKIAKRKAVTAVARALAVLMVAMLKKPDAPYVPLSERCEKELLAMRAST

SEQ ID NO: 263921 - protein, 397 aa, unidentified
MIAVGIDISKAKSTVAVIDSDGTVLASPFTMAHTQPEMEAFVTYLKGLGEPTTILMEYTGHYHYPVLKKLQGEGFPVCIVNPYQMKKYGDVEIHKAKTDKKDALRIATYALEKSYKLVPYSSMEQKYEDLKFLSRQYSQRITYVAKLKVQLIALLDQTMPGITRILPLNSRNPEKCALLLFIRRFKSFDEIHRIGKARFLASYDVLAKKTSERSASSKGLSIYELAVDSITTRGEDPYIWLSQNQCVDLLSTTQNAADEIISQMRNIAETIPEYKVLRAMHGVGDRLGPIILAEIGDVHRFHSGKALNSYAGNDAPPYQSGQFESRNRHISKRGSSALRKACYEVMQALKLTKPQDDPVYLFMLKKEQEGKPFNVAKMAGVNKFLRIYYARAMELYK

SEQ ID NO: 263922 - protein, 318 aa, unidentified
MPDQNTPRFVGIDVAKDHLDVYVSLSDESLRVTNDESGFAEVIKMLTSFEIKRIVLEATGKFEAPAAATLSAAGFPVAIVNPRQVREFARANGQLAKTDRLDARILAGFAEHIRTETRPIKNEQTLQWEDLLARRRQLVGMIAAEKNRLKRAGPKTVKDVRAHITWMEKRLTRVDDDLQVAIEKSPLWRERDALFQSVPGAGPVLSMTLLLNLPELGSISKRAVAKLVGVAPLNCDSGTLRGRRVTWGGRANVRRALYMATIACLRWNILIKEHYARLRAAGKPAKVAIVACMRKLLIILNAIARSGQSWNPRPVKTS

SEQ ID NO: 263923 - protein, 358 aa, unidentified
MKEYISLDVHKRYTFAEREDIVTKGVHQRRIEHERGAIATYLAEVEPGTPVAVEATGNWYWIVDEIEQAHCVAKLVHPRKAKVMMGCINKTDKLDVHGMNRLQRCETLPTVWIAPPEIRDLRDLPRTRMFFCQERARLKNRIQASLTKFALNVTGYSDGFGVRAREEMRKHILQLPPHTQAMTNELLRQLDLVEEQIDAQEKRIREVVGQTTSMQLLRTAPGIGDILAVVIAMEIGDITRFASAERLASYAGTTPRISASGDKMRFGRLRPDVNHYLKWAFIEAANCIRLHAKRHPDRHVTRLYKRIAVRRGHPKAVGAVARHLAESVFYVLSRKEAYKEPKQKEMARNQGSASATAA

SEQ ID NO: 263924 - protein, 417 aa, unidentified
MKKHSNSLKQSEAPAKRRKLGVVVERKPQEVMAELVAKLAEQLDVEIVPAVEGKKDGRDAARPNLDRLTVGVDLGDQWSNYCILGLAGETLAEGQFRTRKQEVAEFFQALAMSRVVIEVGTHSAWVREIIAGFGHEVLVANPRLMEGSKRRRRKSDRIDAEKLARLGRMDPKSLHPIQHRSTEVREDLVVLRARDALVKSRTELINSVRGQVKSMGGRVTGCSSVAFSQKAAAEIPEEVYETLQPLLRLIATLSEEITTFDQRIEKLAAEKYMHTQLLRQVSGVGPVTALAYVLTLETPLRFARSRDVGPYLGLVPKQEDSGDIQPQLGISKAGDRMLRRLLVGSAHYILGPFGPDTDLRRFGMRLCERGGKNAKKRAAVAVARKLAVLLHRLWVSGEVYEPLRHGTLTKIPHDVAA

SEQ ID NO: 263925 - protein, 424 aa, unidentified
MKVTFQTCCGVDVHKSFLVATIIKTSSGIEPSYQKRRFSTFNNSILEFKKWLLENECLYVCMESTGKYWIPVFNLLEDEINVTIANPKWVKAVKGNKDDTKDSKWIGDLFRLGLVKGSYIPCKKIRILREFTRYRYKLVSCRSSEKNRYQNALTVCNVALDSVVSDVFGKSSTSIIDYLLEQSGTSIDHEVIASKLLKRLKAKEDAVIESIEGYQMTDSQKYRMHLIRAHMDYITAAINDVDSEIESLIASDPDYENAIELLCTIPGVKYDSAITIISEIGIDMSQFCSSKRLCCWAGLTPGSNESAGKKKSVRITRAGVYLKPALVQCAHAAVKSDKSPYYKKKYESLVKRRGKKRAIIAIARMILTAIFQMLTTGETWNPCDLYKIDMPEALLEKQKQKAIKQAQKLLIREGLLPPTEPIAS

SEQ ID NO: 263926 - protein, 412 aa, unidentified
MQTLVERGCGLDVHQATVVACLLIVVNNGKVQKQVRTFGTTTRELLSLREWLLGEGCTHVAMESTGVYWKPVYAILEGALEIVVANAQHIKKVPGRKTDVKDAEWIADLLCHGLLRSSFVPPPPIRELRDLSRYRRKLVESRSAERNRLLKLLETANIKLASVATDVFGASGRLMLGALVGGEATPQQMADLAKGPLRKKIPHLELALEGRMEEHHRFLLKVQLHRLQSAEEDLAILEQRLQEKLKPYATQLALLDEIPGVDWTLAAVIIAELGVDMSVFQSVSQLASWAGVCPGNNESAGKRKSSRIPKGNVHLKTALVEAAHSAAKAKGTYLRDKFFRLKARRGYKRAAVAIAHKILVAIYHMLSQQVSYNDLGDLYLDKLNKHHLTRNLVHRLERLGYTVTLTPEQKAA

SEQ ID NO: 263927 - protein, 425 aa, unidentified
MKRDLSVENQFSVYVGLDWGTEFHRACVLNSRGEILRECRIDHSGQAITDFVRSLHEMGNGKPDQVAVAIEVPRGPVVEALLEGGLVVFSINPKQLDRFRDRYAVAGAKDDSRDAYVAADSLRTDQHCFRRIAADHPDVVRLRELSRTEESLGEDFRRVVNQLYQLLLRYYPQLLQLSSTPDEPWIWALLELAPIPQRGARLTVARLKTLLSKHRIRRWTADALRVAIATPPLPLAAGSADAISEHALLLLPQLRLLYSQRKEVRDRIEALLNRMTLLGSERSECREHRDVGLLLSLPGLGYLIAANLFTEASDPLAQRDYYALRAHSGIAPVTKQSGKSRQVVMRRGCSERLRNAMYHWARCSVQHDPLSKLHYARLRKLGHKHGRALRGVADRLSSILIAMLKSGQPYDTKRRQNAAAAADTA

SEQ ID NO: 263928 - protein, 317 aa, unidentified
MTDTGTGAFIGIDVGKMYLDIAVWNSEVYWRVSNDGAGIEKLINRLQKLSPVLIVVEATGGLELPVVTALALAALPVAVVNPTRVRNFARSTGQLAKTDKLDARVLAHFAQAVRPQVRPLRSEEQEYLAALVTRRRQVVQMLTAEKNRKSSARPQIRKRVQKHIDWLTEELRALDEDIAKFIHSHPLWREKEALLRSVPGVGPVTACTILAELPELGTLNRQKIAALVGVAPLNKDSGRKRGKRRVFGGRASVRRTLYMATLTATKFNPVIKSFYENLLRRGKEKKVALTACMRKLLIILNSILRHQRPWQVRPARP

SEQ ID NO: 263929 - protein, 343 aa, unidentified
MGEVSTIGLDIAKSVFQIHGVDADGAVVIRARVSRSKVLQFFTDLSPCLVGIEACPTAHHWSRQLQSLGHTVKLMPPSYVKAYLKRAKNDANDAAAICEAVTRPSMRFVATKSKEQQAALMLHRSRQLLVRQRTMLSNAIRGQLAEFGIVASTGRLGFNRLLEMVDGPEELGIPKVAWVSLMALAEQHQRLQVEIGKLEQCIQAWHRSSELSRRLEEIPGVGPIVATALVGTITDPHAFASGRHMAAWIGLVPQQNSTGGKDRLGGITKQGNRYLRWLLVAGAMAVIRYVQKHGTAKRPWLARLIERKPTKVAAVALANKIARIAWVIMTRGERYRAPTLLTA

SEQ ID NO: 263930 - protein, 355 aa, unidentified
MSQEKYIGMDVHQATISVAVMDVHGKQLMECLLETKADTILEFIQGLRGTLALTFEEGTSATWLHDLLKPHVSRLVVCDPRKNALLKDGNKNDRVDARKLAELLRTNQVKPVYHEKHGTRALKEVGRSYLTVTKDVTRVMNRIKSVYRSWAIPCAGTSVYTRCHRAEWLAKLVEPGVRTRAGRLYQQLDSLQPLRQAARRELLLESRKHAAVKLLRQIPAIGPIRSALLVALLQTPHRFRTKRQLWAYSGFAVEVHDSGEYRWVRGKLRRNRERITVRGLNDNHNKDVKNLFKGAAISASTRPGPLHDFYVARVESGMRPTMARLTLARKIAAITLTMWKKGVSFDPKQLQRQAA

SEQ ID NO: 263931 - protein, 367 aa, unidentified
MTYFFGIDLHKTQFTVHYRTEDRIAKEIVQYATDGDGYAEFLRRIRSLRTRGYEVRIGVESTGNTRFFKNKVEQAGAVVTVINTLKFKVINESTKKTDRHDAATISEFLSKDMLPESYLCSKDTENIRRLLKSRERLVRSIVGQKNEVHALLVSMGLQDDLRIIQSKKGRQKVLDTLSSQSDLVLEAQTVKLLFEIIGRIEESVKKVEGQLHGLLDGDGMVRRLLTIRGCGPITAWTIRAYTEDIGRFASAKKYAAFCGLVPWVQDSNRTVHHGKITKRGPQELRTAFVQLVLGIRRCGDTGKWRLMQRYEYMKRGKGSGKSIVAAARKMAELVWTLLTDRVDFDSRRMEGNYTPPSESLAEQAAFA

SEQ ID NO: 263932 - protein, 337 aa, unidentified
MEYFAGLDVSMEETHVCVVDRDGKIILEARTPTAPKTIAAALAKGPPVERVLFETGRMAPTLFHGLTALGMPVVCVESRQAYQALRSMVTHKTDRNDARGLAHLARAGFFKPVHVKSLPSHAVRALLIARKKLVGQRVTLENQIRGLAVAFGVRLPRGLSSGFSEKAMAAGRGIPGLEGAMRGLLAARDAILKAIVAINADMKSLERSSAACRRLMTIPGVGRLTALAFVAAIDDPDRFRRSRDVGAYLGLVPRRYQSGEIDYTGSISKCGDGRLRTLLYEAANVMLTRYRGSLALKTWALDIARRSTMRKARVALARRLAVIMFAMLKHGAEFEPA

SEQ ID NO: 263933 - protein, 347 aa, unidentified
MRFYTTQHPFYCGIDLHARTMYVCILDQSGEIVLHRNMKTDPETFLKAIAPYRAGTVVAVECMFTWYWLADLCADEGIPFVLGHALYMKAIHGGKAKNDKIDAHKIAVLLRGGMLPQAYVYPAKMRATRDLLRRRMHLARKRAELLAHVQNTNSQYNLPAIGKKIAYKANRDGVAERFADPAVQKSIEVDLALITYYDALLGDVERTIVNTAKHHDANTLYLLQTVPGIGKILSLVLLYEIHDINRFPRVQDFVSYCRLVKCAKESAGKRLGTSGTKIGNAHLKWAFSEAAVLFLRDHPAAQKYLTRLEKKHDKGKALTVLAQKLARAVYHMLKRQVAFERETFFQR

SEQ ID NO: 263934 - protein, 420 aa, unidentified
MEEITEEPAELAERVAALDIGKASLVCCVRVPHESRPGARRQEVRTCGTVTPALLELRDWLICQGVTRVVMEATSAYWKPPFYLLEDDIECWVVNARDVKNVPGRPKTDKLDAVWLCKLAERGMLRPSFIPGRAGRQLRDLTRYRRTLTQERTREKQRAEKLLEDAQVKLSSVISDIFGVSGRDMLAALIAGERDPHDLARLARGSMRAKTGVLRQALTGHFTAHHAFLLAMMLDRVDALTAQIDRLTARIEKAIAPFAAQVAQLDEIPGIGVTTAQEILAETGTDMSRFPTPSHLVSWAKFAPKARQSAGRSKAAATGKGNPWLGGTLGEAAIGAARTSTFLAARYKRVVKRRGKKRALVAVGNSILTICWHLLSDPDARFTDLGPDWHDRLAPQRRKRQLIAELERLSGKKVLLQEAA

SEQ ID NO: 263935 - protein, 314 aa, unidentified
MTIPSKVPGSFIGCDVGKTSIVVFDSREGRIRTVPNRPDELAALAGELDQTCLVICEATGGHEAALLRAMIMAAIPAHRADARKVKAFIRSFGTLGKTDAIDARALARYGQERDGRLARWQAPDEHRDQVQALVLTRQDFVAGRQAARNRLTAPGAEIVKPHLEQLLDCLDTEISAIEAAIEALIRRHKPLDEAAKTLRAVAGIGPTTAAGLVALMPELGRLNRRQAAALAGLAPHPKQSGASDAYRRTKGGRPEVKRLMFMAALSAVKHHQDLKAFYQRLIANGKKKLVALTAVMRKLIVICNARLRHDPCAI

SEQ ID NO: 263936 - protein, 385 aa, unidentified
MQKIIKQCVGIDIAKASFTTCVCKRMLSGETQTSPVESFENNKHGFNQFIKWHRKITDPSVEIIFLMEATGIYYESIAYYLHRLNLAVSVILPNKVKHYAKSLNIKTKTDIVDARIIAQMGAERQLPLWQPPAPILKQLRDLTRLYTDLKKERTVYLNRLESENASEETLHFVINANRAILKKLEEQIKNCEIEIEKLIFAEEWLAEKIVKLMTIKGVELITFAIIIAETQGFALVNNRKQLASYAGYDIVKRESGTSVKGKTRISKKGNSRIRAALYFPAMVASRHNLDLKEDYQRINIGKSSKMIGMTALQRKILLLIYTLWKNNEVYKQNENQPSGNRKTKILLRQRKEVKKKVGNSLELPTQDELPYNLSTEVLLRQLQSS

SEQ ID NO: 263937 - protein, 358 aa, unidentified
MQPEASSEMKEMRYVGIDVGKLRCRAAVMDQEGSIIDEFSFNNNHQGIEHLASGLTMDDKIVIESTGSVWTNLYNILDERHIPVVLANPLKTKAIASARIKSDKIDARILAHLLRANLIPESYVPPKELREIRALIRHRASIVKIRTMAKNKIHALLDKHGLTSDCSDIFGKRGMEWLNSLELSSLDRLILNNHLQHIDSLNHQIERVDEEIRIKASQDEDVKLLLSMTGIDVYTALLIRSEIGSIDRFPDYKRLVSWAGLAPSLHQSGNTEYHGAITKQGSRMLRWIMVETARVAATHDERMKQFYERVKHRRGDQKAIIAVANKMLKIIWFMLTKREPYQSRNPQLYKRKLNFLTE

SEQ ID NO: 263938 - protein, 274 aa, unidentified
MNITTIGIDLAKNVFQVHGVDERAKAGLKKQLKRAQVLPFFANLPPCLIGMEACGSAHYWARKLNELGHTVKLMAPQFVKPYVKTNKNDAADAEAICEAASRPSMRFVPVKTGEQQAVLSLHRAREGFVKARTAQANQIRGLLAEYGIVMPVGIDNIVKRLPDILEDGENNLPGVFRQLLQRLGEHLKELDRQVDELNEQIQLWHRENAASRKLADIPGIGPITASALVASIGDAKDFESGRQLAAWLGLVPRQHSTGGKQTLLGISKRGDCYL

SEQ ID NO: 263939 - protein, 349 aa, unidentified
MKRIKFVGLDVHAETIAVAVAEQEGEIRSLGVIPNREESVRKLVKKLGPVEQLRFCYEAGPTGYALYWQLSRMGAKCEVVAPTLVPVKAGDRVKTDRRDALKLARNYRAGELTAVWVPDAEHEALRDLVRAREAAKKDQLRARHRLSKFLLRHGRRPPVGATPWTVKYLEWVKRDVHFAVKAQEATLLDYLHEVEHMAARIVRLDSAIEEAVKVAPAKMRAVIEGLQALRGIAQISAVTIVAELGEVTRFSKARELMGYGGIVASENSSGERQRRGGITKTGNAHLRRVVVEAAWAYRHRPAIGFTLRKRQENLSEEVKEMAWKAQHRLHARYGKLMAKGKNREWWSRR

SEQ ID NO: 263940 - protein, 343 aa, unidentified
MKITAIGLDLAKSVFQVHGVDDRGHAIVRKQLRRDQVVPYFAKVPPCLVGMEACGGAHHWARRLREFGHTVRLISPQFVKPYVKSNKNDAADAEAICEAVGRPNMRFVPIKTVEQQSVLSVHRVRQGFVKVRTAQANQIRGLLAEFGLILPQGISNVARRVPGLVDEAAELPVPMRQLVNRLLEHMKMLDQQAKELEAQIKAWHQGSELSRNLEAIPGIGPLTASAPVASIADAKSFKNGRQVAAWLGLVPKQDSTGGKPKLLGMSKRGDTYLRTLLIHGARSAIVSAQRWHKPNAWLERLLSRRHPNVAAVALANKNARTAWALLAHEREFRPDYVPQPPIA

SEQ ID NO: 263941 - protein, 437 aa, unidentified
MEEVTDEPLYRDRVCGIDIGKAGLVATIRVPSDANPARRAQETRSFGTTKREVLALADWLRSWQVPAVVMEATGDYWKGPFYRLEAEGLDCVLADAKQVRHLPGRPKRDPSDSRWLAACFERGAVTSCFVATPEFRVIRLHTRYRRDLTGERTREKQRAEKLLESAAVKLSSVVTDLHGVTGRDIMDHLIAGQRNPKVLAQLARARARRKISELEAALEGAEFFTAEHAALLAAMLERIDRVNAEITRLTEVIERLLAPYEEQLQQAGSMPGWGRRSAEDAIAETGADMTRFPAGAHLASWAGRTPLDNQSGKRTGRSKSKKGNRYLAAITGETAIAAGKTQTREGARYRRLARRRGKAKAQVALGNTQLKVYHKLLSSPGLRYQDLGPDYYEHQASTRRQIAHHVGKLGALGFEVTLCRLPEPDSGPGQAASTPAA

SEQ ID NO: 263942 - protein, 349 aa, unidentified
MDNETIEFEQVVARGCGLDVHKETVVATVSGTGIKKETRTFSTFTRSLKELKEWILSLGITHVAMESTGIYWKPVFNILEGSGLTILIVNARHIKYVPGHKTDKKDSEWISRLLLAGLLKGSFVPPKEIRQLRDMTRYRRKLQGAITAEKNRMIKMLEDSNMKLSTVLSKVHGVSGTRIIDALLEGQTDPVLLASLCHGKVKAEKEEIILALEGKLTEHHKFMMGIIRRDIQQTEALINELDVEIEKQLLPYAQEVALLSEIPGVGHQTAGDLISEIGVDMEVFATDKHISSWAGVSPGNNESAGKKKWENKPREQTSSIYPQRIGMGGISDQGKLSKFKIQKIGRQKR

SEQ ID NO: 263943 - protein, 365 aa, unidentified
MTNIKEKTKTKTKETVSFVGQTIHLGIDVHKKNWSVSVYLGDKFVKTFHQESIGTILLQHLKTNYPEAIYKACYEAGFCGFSVQRELTLLGIECSVVNAADIPQTNKGMLSKTDAADSRRIGEAFSKGLLKPIYIPKANIEADRNLVRYRKRVQEDLKAKKQGIKSCLFILGLKIPPQHDKSYWTNNFITWLKELEVTDSSNKITVSLLIEDVLLLRKRLFATNKRLRALSISENYATNYVLLTSTPGIGLITAMTMLTEIGDINRFDSFVKFNSFIGLCPSEYSSGERVHKGKMTNRAHKTIRALIIEAAWVSIRVDPALTIKYHELLKTKTGKRAIIVIARKLLSRLFTVWKTNVEYVKGVVK

SEQ ID NO: 263944 - protein, 476 aa, unidentified
MPRKPSSRLDLVALPQLSHETLYVGVDVGKRAHVAGFLSSTLLTRHQRFEHCPALAFDNSREGFRSLLDRLQTYVPLTQVQALLEVTGHYHRALLQYLQELDIPVYVIHVQKRQEGLLKTDKRDALGLANLLYNQLEKGIQVGDPLQAVRRLVSPTEAAAQLRGMVQHHYELVAESTQRKNKLTALCDELFPEFTRLLRDPNLPTALALRSRFPTPAALAAASFWELREARGRACSVSDAKLVDLQRLAAQSIGTKDPARVRGLVFEQKQLITELKLIAEHLQQLETEMIQVVEHCREGKILTSLPGIGPQAAATLIATIGTIANFERAAQLKSYFGWVPKVAQSGSSLDWTRLSPRGVRQMKQTMYLIVWRAIQWDAEWKQMYERLISSKCRYDERTRRLIGREKVIGRLAGQMTSVIYALLKQDLELLAHLAPGAEPPEPQLYDPEIHRQHRMGQYQPRGAAGKPPQVLQLPSA

SEQ ID NO: 263945 - protein, 343 aa, unidentified
MQVSTIGVDLAKNVFQVHGVDSAGKVVITRQLRRKQVIDFFSKIPPCLVGMEACGTAHHWAREVSKLGHTVRLMPPSYVKGYVKRSKNDAADAAAICEAVTRPSMRFVPIKSADQQALLMLHRTRDLLIRQRTQLINALRAHLAEFGLVAETGREGLAQLAAIITDESNREALPSAMKQALQAIVDQLAALELQIGTLDRAIHAHHRANDMSCRLETVPGIGVIGATAIASTVTDPSDFKSGRDFAAWIGLVPRQHSTGGKERLGGISKQGDRYLRRLLVIGATAVVRHARQHPQKHPWIMRLLAKKPAKLVAVAVANKMARIAWAIMAKGGYYRAPELAAAA

SEQ ID NO: 263946 - protein, 339 aa, unidentified
MRLYAAIDLHSNNSVLVVLDEHDHVVLNRRLPNKLPLILAELVAHRQDIQAIAVESTYNWYWLVDGLMEAGYSVKLVNTAAVKQYDGLKFAGDEHDARHLAHLLRLGILPTGHICPKEDRGVRDLLRKRSQMVRAQTTQLLSIKNLIARNSGQNITSNEIPDLDDSAVLRLCEGDEVRAMAIRSNLTVLLCVHEQVKMLEREVLKRAKLRPEFEKLLSVKGIGNILAMTIMYEAGDMARFASVGKFSSYGRCVSSSHWSNGKKKGEGNRKNGNKYLAWAFVEAAHFVVRYNERARRFYDRKKAKRNAIVATKAVAHKIARACYHVLRKQVPFDVTRAFA

SEQ ID NO: 263947 - protein, 484 aa, unidentified
MHPRTTNKPTQTSEVRRFNFESAGALALDNEYSGFAVLPAHYIAFAERKRARPWTSIYHSGRYDVKPPTTQQFTAYVGIDWADTKHDICLQALGNESREFDCIGHQMADIDQWAQSLHQRFGGQIAVALELAKGPIVYALQKYDFFVLFPINPLTLAKYREAFAPSRAKDDPTDAELALDLLMRHPERFTPLQPQSVKMRTLLSLTEHRRELVGDKTRFTNRLTNTLKQYYPHALDWFDQRDTLLFCDFLTRWPTLAQVKRARRASLEAFFYAHNGRRVHVISAPLDAIKAAIALTEDWGVIAPCRLQILVLVEQLRITLQAIERFDREIAELAPQLPDYCLFQHLPGAGPHLTPRLLVAFGEDRQRYQHVDELQKYAGIAPVTERSGKKSWVHWRWQCPTFMRQTFVEWAGQTINKSFWAGAYYRQQRAKSSSYQAAVRSLAFKWVRILYRCWQTRTPYDESKYLNALRKRGSPLLKHLELNV

SEQ ID NO: 263948 - protein, 344 aa, unidentified
MNVTRLGFDIAKRVFQVHGVDENGKVRARKTLAREKVLEYFTQLPACLIGIEACGGAHYWGRELSKLGHTVKLMAAQFVIPYRKRGKNDANDAEAICEAVGRPNMHFVAIKSEEQQSVLMVHRARTLVVANRTAQVNQLRGLLGEFGLVVPKGVARLRRELPGILEDAENGLPALAREVLAGLLDQFHDFDTRVAAYDRQIRALAEASEPARRLMQVEAIGPQTATALVASMGDPHVFKSGRSYAASLGITPRQHSSGGIDRLGQITRQGDSYVRTLLVHGARAYLRVVDKKTDGKSAWARRLKERRHINVVAVALAAKHARIAWAMLAKGTEYRLVGTEEAAA

SEQ ID NO: 263949 - protein, 312 aa, unidentified
MEKLSYGGIDVSKDRLDVVVLPEGWFFSVSNDTAGWTELVARLRPLAVCAIGLEPSGGYERGIIRALLAARLSVRRINPNKLRQFARARGVLAKNDRLDARLMAEYVAIMPTRAVQRDDAVDRLAEVVTMRRQLCDEHVTVENQTAHLEDAMLRRLSKRRLVRLEADIRLLDKRLAEMVATNAAFAQLYELLTSMPGVGPVLAFTLIALLPELGKMSRKQIAALVGLAPYDFDSGKLRGHRSIYGGRMPIRNVLYMAALSASRYNPALKTFSNRLAHANKKSKVIIVAVMRKMITTLNAMLRDNATWQPQSN

SEQ ID NO: 263950 - protein, 388 aa, unidentified
MHVVAAQSEAAIAIRTDLCATFVSLELSRSTWLLTSLSPGAGEKMSKHSVSAGDTAGLFSRFVELQQKARTRTGRTFPIITIQEAGLDGFWIHRLLQGEGIESWVVDPASVLTSRRRRRAKTDKIDGETLVRTLLAYKRGEPRVCAMVKAPTPEEEDRRRICRERKTLTAERVRHVNRIKGLLFAQGVGDYEPLRRNRRGRLEELATGDGRPLPEHLKAQISRELDRLEVILAQLKAVGSERDAMLEPAKEGPPTPALLLAQLKGIGPEFAAVLWSEGLFRSFNNRRQVAAYAGLAPTPWQSGSVAHEQGVSKAGNPRLRTTMIQLAWLWLRHQPGSALSIWFRERVQRNGGRGKKTAIVAMARKLLVALWKYAVHGILIDGTTAKAA

SEQ ID NO: 263951 - protein, 338 aa, unidentified
MKLYAGIDLHSTNSVIVMQDQEGQIISRARLENKPGTILAWLQPYRDALAGAVVESTYNWYWLVDCLQDYGYTVHLANTAAIQQYEGLKYGDDKSDAQWLGTLLRLGLLAEGYIYPRQERPIRDLMRKRSQMVRIQTQNILSVENLFTRNLGDRISANRVKNLSPEDVDEWLPSKDLALAVKCNLAVLATLREQIDILEKTLKNRVALRPEFKGLLTVDGIGLVLALTIMLETGDISRFAHVGNYVSYCRCVKSVRLSNGKKKGTGNAKNGNKYLAWAFVEAAQHAIRHNELVKRFYTRKAAKTKRVVAIKAVAHKLARACYHIIRDGVVFDQSKAFG

SEQ ID NO: 263952 - protein, 342 aa, unidentified
MSIVYVGLDLGSSNFQQVALNHDGVSRVNRDFTTSEGNLVKAFSDLKGEIQVHLEAGELAPWAASVIAPLVERVVCSHPQSNAWIAKDADKCDRIDAYKLAELLRLNRFKEVHYAPDQRRRNFKQLVQHYDELTAQQARLKTKLKARLRMQGVIVTGERLFSAQGRKEVLAKVESRDLRTALTQLYSVLDQSVAAQEQARRLMLRAAQAFPEIRIFRTAPGIGPIGACRFSAYIHTPQRFSTTRKLWKYCRLSVSHRSSNGKPLRRPRLDRSGCGRLKDVSRKAFDVAIRSRRDNGFKRAYLRALETTHDATHARLTVQRKIVSTLRAMWLTMTPYGDELSR

SEQ ID NO: 263953 - protein, 421 aa, unidentified
MTQSAPHTFAAFVGIDWADAKHDVCLQAAGSAKRECCQLDHTPEAIDAWVITLRTRFNGQPVAVCLELNKGPLVFALGKYDFLILFPLNPLTLARYREAFTPSRAKDDPTDAELQLELLLTHRDKLRPLNPQSPTMRALAQLVEHRRRVVGDKVRLTNRLTSTLKNYFPHALQWFQDKDTLLFCDFLSRWPTLKAAQLARRSTLETFFRDHHVRSSDVIDKRIHAIHAASPLTIDEGVIAPHALLVQALVSQLRVTLQAIETFDNAIAQRAQSHPDFPLFQALPGAGPVFASRLLVAFGEQRDRYASAAELQRYAGIAPVTERSGKKSWVHWRLQCPKFLRQTFVEWAAESTRHSFWAQVYYQQQRDKGKAHQAAVRALAFKWIRILFRCWQERTPYNESAYLQALNSRGSSLIHNLAKEA

SEQ ID NO: 263954 - protein, 317 aa, unidentified
MSNSDVFVGIDVCKAELQVATLPEGKPITFANTEDGIALLIDCLKPLHPNLVVLEATGGLEIPVVNALAVKGFAVVVVNARQIRDFAKATGRLAKTDRIDAQVIAQFAEAIRPPLRPLKDEQTQRLHALNTRRRQLVAMIRSEQNRLTSAPKWTQKEIQIHLQWLKKALDKMDKDISDLIKGSPIWREKEALLRSFKGIGPVTSATLLAALPELGAIGSKALSALVGVAPLNRDSGQFRGKRSVWGGRDNVRSVLYMATMAAIRFNPVISAFYNRLREAGKPHKVAITACMRKIIVTLNSMIKNQTRWRPPVSEKCS

SEQ ID NO: 263955 - protein, 419 aa, unidentified
MPFKIFRKNCCGLDVHKTWIYACIGITDPNGRTEYKQTRFSAFTKGLQDLADWLAKYNCKEVCMESAGKFWIPVFNVLEKSCLVTLAHPKYTKPQKGNKTDRKDAKWICDLFMCDMIKPSFIPPPDIRQLRDLMRYRMKLTNMLTGEKNRALNCLTVSNLKLDDVFSDVFGKSSRSIITYILDHPGEKFDVAPFIDKRCKHPLDEIQAAVDGAVSREQAAKLRECLQHIDEIGAHKENIEREIFRLAEPYAYQLSLIQTVPGLSGNPMTSIAILSEIGADMSVFPSAKHLVSWAGCCPRNDQSNGKVKSTRISRAGSYLKPILVQVANAVIKSDKYPECKDRYRRLKARRGHKKAIIAICRMLLTAIWNIISKLEPYSVDGYLADKITEHSIVITKAQGLAFLRQRGYIFKDEETPAPA

SEQ ID NO: 263956 - protein, 393 aa, unidentified
MSLDHHFAEPTAIRTNLGAIFVSLELSRSTWLITSLSPGGGEKMSKHGLSAGNMAALLARLSELKQKAFARTGQSFQVIVIQEAGLDGFWIHRVLQSEGVESHVVDAASIAISRRRRRAKTDRVDGEALVRALLAYKRGEPRVCAMVRTPTPEEEDRRRLCRERKTLTNERVQHVNRIKGLLFCQGISDYEPLRRNRRQRLDELKTAGGCPLPPHLKAQITRELDRLELLLGQIEAVEIERDALLSAMKPDGMNADAVRSPPAMLINLNGIGPEIAAVLWSEGLYRSFANRKQVAAYAGLAPTPWQSGSVAREQGVSKAGNPRLRTTLLQLAWLWLRHQPQSALARWFHERVTRNGGRLRKSTIVALARKLLVALWKYVTAGVVIDGAVVRAA

SEQ ID NO: 263957 - protein, 464 aa, unidentified
MKRHRRRPPTPRTSPHALERLHPHAAGIDCGSAEHFVAVPPDRDATPVRSFATFTGDLHRLAEWLVACRVTHVAMEATGVYWIPVFEILEARGFQVILVNARHVKNVPGRKSDVSDCEWLRDLHILGLLRGSFRPADAIVALRAYLRHRATLIESAATHVQRMQKALVQMNVQLPLVVSDITGVTGLRILRDIVAGHRDPQRLARHRDYRCRASEAEIVAALTGNYRAEHVFVLQQNLELFDTYQRQLTACDVAIDAHLAQLAATTAPPSTPLPAARRRQKPRENEPRFDLRTPLHHLTGVDLSQIDGIGPYNALRLLSEIGTDMTRWPTDKHFTSWLTLAPQNKVSGGRLLSSRTQPSANRAAAILRLAAMNLGRTQTALGAFYRRLAFRVGKAKAITATARKLAILVYRALKDGLLYTDPGADAYDAQHRTRVLRRLRQRAANLGFDLVNRATGELVEGAVS

SEQ ID NO: 263958 - protein, 342 aa, unidentified
MQTTTIGLDIAKNVFQVHGIDASEKVVVRKQLRRGQMLAFFEALPPLLVGMEACATAHYWARELTKLGHQVRLMPAKDVKAYVKRNKNDAADAEAICEAVRRPTMRFVQVKSAEQQSQLMLHRTRDLLMRQRTQVINALRAHLGELGITAAQGKAGLTELLAIIAGSADERLPTEAHASLMVLAAELQAMRTLIASIEKRIIAHHRSDEASKRLRSIPGIGLVGATAIVATITDPKAFRSGRDLAAWIGLVPRQDSTGGKQKLGPISKQGDRYLRRILVVGACAVLRYARQQPQKYPWLTQLLVRKPFKVVAVALANKMARIAWALLAKGGTYRAPVLVAAA

SEQ ID NO: 263959 - protein, 430 aa, unidentified
MIYPPALRRRGAIYEQNHRTLRRDRYRQAFSTVLCGDRAAHEESRSQTLRFDTTVPALERMSEWLHRERVTHVVMESTGSYWVPVFNILEDRFTVVLANPEEVKNRKGHKTDRKDAKHLADLLRHDHIRPSYIPPRATRELRDLTRRRVQLMQDCTRERNRVQKLLEHANVKIAGVLSDVFGVSGQRMLVALLEGESTPDQIAELACGQAKRKIPQLTEALVGHRMTEHERFLIRSCLRHLACLEEELESLDVEIVRRMGMPPFQNAFALLQTLPGVGELSAAAILAETGTDVASFPTAEQMASWAGLCPGNRESAGIQKGSHTTHGNAYLRTALVQCSWCASRKQGSVFEARFKRLVKPLGPKRAIVAVAHHMLIIIYCMLRAGVSFRGAEGAPQQRRRQHRAHHHLRCLRRLGVAVRVLSDDLSGWAP

SEQ ID NO: 263960 - protein, 356 aa, unidentified
METAYDGRQVVGMDLHRRRSVLVRMTEDGRRLGTAKITNSPAELRRAIARAGKHPRVVLEATYGWYWAADVLAAAGAEVHLAHPLGVKAFTYRRVKDDVRDSADLADLLRMGRLPEAWIAPHEVRELRELTRYRIKLVRLRTSCKDQVHGVLAKLGVPVTCSDIFGVAGSAWLDGLRLPQPYAGKVTSLRHLAGELTTEITMLGEVIASLLAGDRGYQVIQQLPGIGPVLAAVIIAEIGEVTRFRNAGQLCSWAGLTPRHRESDTKVARGHVTKQGSRLLRWALIEAIQRIPRDSVIGAVKDGIIGRRGKEAKNIAKVAAARRLLTLVYYGMRDGQIRCLSRPPAGPPVTETARAA

SEQ ID NO: 263961 - protein, 346 aa, unidentified
MDIMILGIDLGKNSCSVVGMDAAGRVVLRRRLLRGTLESFVGELGSCIVAMEACCGAHHLGRIFAARGHEVRLMSPEYVRPYVKAQKNDDLDAEAIAEAATRPTMRFVPVKSQDQSDLQALHRARERLVSERTALINHLRALLLERGIVVPQGRRKLEAALETLAEDGGFAALSPRIRTLIEDLRAEWRSLDQRIAGFDAEFVQLARDDVAVRRLTKIPGIGTINATALAAAVGEAQAFKRGRDMAAWLGLVPRQMTTGGKPRLLGISKRGNRYLRKNLIHGARAALPYLVERDTPLGRWARGLLDRAHKNVVVVALAAKLARIAWAVLAHDCDYDAQFEAAAAAA

SEQ ID NO: 263962 - protein, 395 aa, unidentified
MSAEGEAIRSNDYRKDTTVKAPSTRPGAVLGLDVGKSSHWACLVDRGGKVLASAPVRNREGALDALFSSAPAGTLVVVDQFRNIGSLAVRRARAAGLEVAYLPGLAASRAAGLFAGEAKTDERDAEVIARTALGVPDSLSGVPGRGEALEAARALSSQRDHVVACATRDKNRLRAVLLESCPALEAAVDLSDRRWLELLAGFGGAWGIARSGAEGPQAEAAGEAAAASTAPPPALIEAENRQVRFLAARISEALDEAGALEAETAGLLEGDETYACLLTVPGIGPRTAAQLAVSVDIARFPDHDHLASYCGIAPRVRSSGTSVRSVRASRRGDARLKSLLIFSCNSLVRSSGRYGEYYRACRARGMGHGRALKAVARKRLRAIYAVMRDRVPYRE

SEQ ID NO: 263963 - protein, 435 aa, unidentified
MTSLSEIAEIVIGVDTHVHTHSAAAVDARTGGVLGELTVEATPRGYQALVDFADAHSQLRAWAVEGTGGHGAGLSRLLARRYELVVELDRPERARRRHGAKSDPLDAIRAAREALSRAKLGTPRSAGQRQALSVLLAARRSAVQAGTDAQRQLFSLVIAAPEQLRARFRGRKLAAMVRLAARLRISPRWDAETATTARVLRDLARRALTLGSEATRHEKDILAIVRSWRPDLLTQPGIGPIVAATVLCAWSHPGRVRSEAAFAMLAGAAPIPASSGQTTTRHRLNRYGDRQLNRALHTAVLARLRYDPTTQAYTQRRTSESKTPARSNAASSGTSPETSTGSSKTHPSPLDIHRSVHSSIRQDLIPTDAPIAKVPGERPYPTACAYFASWWSSPPSGISRSVTVSVAGESTAVDRWEAGRRGTPSAVAAPDPIPP

SEQ ID NO: 263964 - protein, 384 aa, unidentified
MSQDGVYAAGTPQRELGAIFTSIELSKKTWLLTSMSPGAGEKMSRHIIAGGDITGLFAQLTMLRRRAYDRTGSDYPFVIIQEAGLDGFWVHRALTAEGYESHVVDAASIATSRRKRRVKTDRLDGESLIRALLAFKRGEPRVCSMLRVPTPDEEDRRRIVRERKVLMEERIRHSNRIKGLLFSQGITGYDPLRRDRREQLETLRTGDGRALPLHMKRQVLREMTRMELLIDQIKEVEAERDDMLAEERQSAREVVLLSKVVGIGPEFAAVLWGEGLFRRFDNRRQVAAYAGLAPTPWQSGSIDREQGIGKSGNPRLRSTLLEMAWLWLRHQPASTLSRWFNERVAQNGGRFKKVMITALARKLVVALWKYASAGVVIEGAVVRP

SEQ ID NO: 263965 - protein, 322 aa, unidentified
MQGKVMTEGAMAAVYVGIDVCKERLDVYLHPTAKRLAVANDPGGWRRLKRVLADHAVERVVMESTSKYHRAAHRSLWAGGFAVAVINPVRARLFAEAAGTLAKTDAIDARMLALIAERLDPAAVQPLRDSVEAVQELARARRAAVDERVAIAQRRNTAVSPLLRRELASRARSLDGHVARLEAELQRIIAADPVLARRQVILCSIPGVARITAVTLIASLDEIGQLTGKQASALAGLAPFAQDSGPRKGARHIRGGRRDLRGALYMAALSAARFNPDLATFKQRLRDNGKPPKVALIAVARKLIHLANTLVRDNRSWSPRTA

SEQ ID NO: 263966 - protein, 460 aa, unidentified
MEKYSEKWTKSTVRSALLTVVNPETAAVDVHPNEMWGAIRPDHPSGKTVRRFGAVTYDLRQLVKWFKDSGVTTVAMEATGVYWLPLYELLEAEGLRVCLVNARHVKNVPGRPKTDVRDCQWLQKLHASGLLTASFIPDASTRQLRGLLRHRDRLTRLQSQHILRMQKALREMNVHLDAVVTDIMGVTGLRILKALMQGRRDFDIIALECRHPLVKATPEQIAAAIDGTYTPDSMFVLEQELEAYDFTGTQIAKLDVQLEQLLQVATAGRPALALPDHGLTGREKRQGDAPAFNVQQYLYQITGVDLTRIPGIGANASLILLSEIGTDMSRWRSSDAFCSWLGICPNLQKSAGKIHGSRPRRTCSHAKHILRLCATSLKNHHGHLGTFFRRIRARAGTPTAITATAHKLARIIFAMLAGKKPYSELGEDYYDKRYRERILRNMKHKAQLYGFQLIPLEQAS

SEQ ID NO: 263967 - protein, 369 aa, unidentified
MKKNNKKSSESAQRKAIQARSRKTKLTVGMDLGDKWSHCCFLDGEGEVVEQCRVKTTREAVKARFGELKQALVAIEVGAHSRWVSQMLSELGHEVIVANAREIRAITGSDRKSDKVDAEKLARYARVDRKILRPLRHRGEEVQVDLLVLRCRAVLVKTRTQIVNAVRGMVKSFGYRMPKCSTEKFAQLTNLVPALLRESLKPLMEALEQVQKKIEEYDERVKKLATEKYPETKVLRQVWGVGEITSVSFVLTIEDKERFGKSRDVGPYLGLRPRRSQSSESDPELRITKAGDCFLRSLLVECAQKILSEKAPDTALKQFGMRIEARGKKKAKKRAIVAVARKLAVLLHKLWVTGEVYEPFPGAREKKAA

SEQ ID NO: 263968 - protein, 409 aa, unidentified
MLFVGDDWAEDHHDVEVQDERGRTLRAVRLPEGVDGVARFHDLVAGFLPEDASPAQVLVCIETDRGPWVRALVAAGYQVYGVNPKQAARHRELMSISGAKSDKADARTLADMVRTRRHQLRQVAADSDIAEAVKVVARAHQTLIWERTRHTLRLRAALREYFPAALQAYEVLTLTGSDTLELLAKAPTPAAAAKLTVAQISAALKRARRRDIPTKAAAIRQALRTAHLGQSEIVTGAYAATVRATVAILQTLNTEIRTMEGQVEAHFGQHPDAEVYLSQPGIGAILGARVLAEFGDAPGRYTDARSRKNYAGTAPITRQSGKTKTVHARFVHNDRLVDALHMQAGAAILHDTAVRAYYNELRARDVSHPAALRQIGNRLVGILHGCLKTNTHYDQATAWSHRTALPTAA

SEQ ID NO: 263969 - protein, 371 aa, unidentified
MNSLIHIGIDVHKDTYSLCSYSFQTSQAFGQTKIGSDNKLVIKYVEKLMKRHPEVEVLCGYEAGPTGFGLYRDLHKANIPCVVMAPTSLPRAVGNRVKTDRLDALELAKHLAYGTYSAVRVPTSEDEAVKDFTRLRNTRQQALKRAKQNLLSFLLRRQRRYTEGSTYWTKTHHRWLKQQKFTDPLDQETYNEYLQELYDQEEKVERYDARIEELSRLDAYRERVEKLRCFKGIDTHTALSLVCEIGDFSRFATAAQFSAYLGLVPSENSSGQRERRGGITKGGNTRLRTLLIEAANGAIRGNLYGAKSKKLKARQAGNTAQVIAYADRAQRRLHRTYSKLVLNSVPRNKAIVAVARELSCFIWGMMNDRID

SEQ ID NO: 263970 - protein, 467 aa, unidentified
MNMTLGIDVACRADHQATLADSAGEFEWSGHRFRTTPVDLERLWAKIPDGAVVTVVLEPTRNAWVPLAAWLQAKGATVVMVPPEQSADLRNYYNKHTKTDRLDSRVLARLPLLHPEGLKPIDSLGPADPLKRAVRHRTSLVKRRAASMLRLDALVELLGPAYADVLGAGDYNKTALMVLERFADPKTLKKLGRKRLAAAMIRSSRGAWREAKADELLAAADEALELWEAAGGLDFAELAEDIALEARHVRQLNEEIAAIDERIEAIYDDVDPNGIFVSGPGMGITLAAGILGRLGDPNRFDSLAGVRSFTGLVPKINQSGTSDHHAGPTKAGDPGLREAVFLAAEHARKTDPTLAARYHRLVVETGKHHNSAVCTIAGVLVTRLAACWRNGERYIIRDLDGNEITAEEGRVICAEQFKIPPAVRAARRSTTAAKKLKARTGRRSKKSTEAASANGPSTSDATARKTA

SEQ ID NO: 263971 - protein, 345 aa, unidentified
MQLHTIGIDLGKTLFHLVGLNQRGEVVVRKKFSRKQLLHFTANLQVKLIGMEACGGSHFLGRALREQGHEVRLMPAQYVKPYVKTNKSDFIDAEAIAEAVERPKMRFVPIKSDEQLDLQSLHRVRELWVMRRTAVINQIRGLLLERGITLRQGRRHVDEALPGILEDASAKLSGAVRLLLAQLKLELDHLQMRIDDADAVIQKIAGENEACRRLVVIPGIGPVTATAIIAAIGNGAAFKKGRGFSAWLGIVPSEYTTGGKQKLLGISKRGNSYLRRLLVQGARAVLQQSAKQSSGLSAWLAQLTTRVHSNVAAVALANKLARMAWAVLAKNEPYRPPVVVSAATA

SEQ ID NO: 263972 - protein, 340 aa, unidentified
MKHTVYGIDIAKNVFQLHWVEPETGEIFIRQIKRVGFLEYFANRAPCLIGMEACGGSQHWARRLMEMGHQVKLMPGKVVKAFVSGNKNDVADARAIWLAVQQSGVKSVAVKSEEQQAVLALHRMRQQLVKFRTMQINGLRGLLTEYGEVMAVGRAALNRAMSDVLARLNERLPAVLIDTLREQCEMLGKLDQQIADIEQRLQTWMKQDKACKTIAEIPGVGLLTATAAIATMGDAKAFRSGREFAAWLGLVPRQIGTGGKVKLLGISKRGDTYLRTLLIHGARAVLTHAKEPGAWVREISKRRPPNVVTVALANKMARTIWALLAHDRKYEKAYIDVKPI

SEQ ID NO: 263973 - protein, 371 aa, unidentified
MKKRTSKVVRIKRAMIVTTGDVVCGLDLGDQDSVVCLIDKATGEKVGEAQVGTTRRELTALFSGRAPMRIALEVGTHSPWVSRLLSELGHEVLVANARKVRLISQNRNKNDRIDAEVLARLARVDPNLLAPIQHRGAEAQADLAVLRSRNALVKARTGLVNHVRGVVKATGHRLPRTNTDAFAVKARTALPPELVAALKPVLETIASLTATIRRYEEQLSTLAGERYPETAFLRQLHGVGLLTAIAFVLTVEDPARFRTSRSVGAYFGLVRARQQSGDRDPELRISKAGDPLMRKLLVGCAQHILGRFGKDCDLRRYGVALAVGGSKKAKKRAVVAVARKLAVLLHRLWADQATYDPFYNLSRTERHQHAA

SEQ ID NO: 263974 - protein, 433 aa, unidentified
MQRAINETMQTTIPGVISCGMDVHKDKIDACVRVGDGSAEGNVTIKTFSTMRKALFELRDWLISLGCFKVLMESTGVYWMPIYYILEEVEGMNAGVGNSRDLKNAPGRPKTDKEDAKWLSRLCMFGLVLKSFVVEKPFRALREYTRYHKKLVQERARQINRIEKLLQMNGFKLSSVLSDITGTSGIRILNKLADKGELNISDIQERLDKRCKHTPEEIEFAINGVMKSTSRLLLKFQLKKLESCNNEIDEIYNLMLSLSEEHAWAVQIIESIPGMSTLSAIYIIAEIGTDLSSFKTANHLAAWAGLAPKDNQSANKARPKKTKKANQYIKSLMIQCAWAATRTRDTRLSLWYWHNKSRLGDKKAITAVARKLLCYIYAMLKDGAFYDKSLDVAYANNVRAKKLDAAQKIVGSRKIDAQNFGKSAYNNDISTPD

SEQ ID NO: 263975 - protein, 353 aa, unidentified
MTSLTDLREVVDVVIGVDTHVHTHSAAVVDAATGGVLDEITVEATAEGYAELVEFANNHATLRAWAIEGTGGHGAGLSRHLLEISEIVIELDRPKRAARRNGAKSDPLDAIRAAREAMARPRLGTPRSGGERQALSVLLVARRSAINASTEAQQQVFSLVIAAPEPIRARFRGQKLAAMLNTAAKLRVHSSWDVETNSTVVALRTLARRAHAMLKEARELQKAILTIIRGWRPDLLEEFGVGPIVAATVLCAWSHPGRIHSEAAFAMLAGVAPIPANSGQVTTRYRLNRYGDRSLNTALHTVVQVRIQYQQSTRDYIARRTAEGKTSREIKRCLARYVARDLYRLLESGAATA

SEQ ID NO: 263976 - protein, 478 aa, unidentified
MIKSVGIDFHQGKHVARCLNERAQLCDGFSFQTTPEGLSTLEERIFRNGSNPVIVFEPAGLTWFILAICLRARHPDCRLVRAKGQKVAALRWYLRGSSKSDRLDALTLAKMSFIDPEQLDEVYLPPAKIHALQRLARQRKRLESEIAARKTRIGSIVESYVPGVRKVFSDPWSSQAKAFLRCRLNPVAVAHNGEKALHSFLARARRRNKADKEESRRVYLTCQSAAVLYQLSSCAGAVDDGFFSVLQEEIARELRLMELEEAESEAIAKHMEELYRDLHPSDNLRSIPGVGQITAPVFLATVGDPARFHNQSAFVNWTGVVPRTRQSSDVEAKGLRMTKAGPAIMKWALFQAGDIGRRFDPQLASLYYREIVHHGKNHKQAMGAVMSHLAARVLAVLQENRAYELRDIQGNPLSHGEARRLILSNYQVPEEIRRERRRRNPVKRGYSKLRGITVPRTNEAAIAPQPVNTTAIPQNQSN

SEQ ID NO: 263977 - protein, 349 aa, unidentified
MNILSIDLGKYKSVFCMYETTTNKHNFGNLKTTPQEVHDLIVSQSPFRVVFEIGTAAGWITDIAKALGKEVEVANTTHEAWRWKNTKRKTDRDDALKLAQLSAMNQLPKVHIPKKDTREKRAFIQYRQKLVRRRTQIKNTIRALLQREGIHMSIGQNAWTKDGLKWLRSIAMPLGKVNNPDDLWKGQLHTELKQLNGISEAIQKVEAKLDRIGKADTQVQRLQTVAGVGPRAAEAIVAFIDDPHRFDNAKQVGSYIGFTPRRYQSSDVDIYGKISKQGNKLLRSLLVEISWIALRYNPWARDMYNRVLKGDKKRKKAAIVALARKILVRCWAMMRDQTEWAQSSSKIAA

SEQ ID NO: 263978 - protein, 320 aa, unidentified
MSGILVVVGIDVAKAHVDVAVLGSAWPAQRFANDVDGHSTLAAALQPLQPSLVVMEATGGYEAPVACALQATGLPVAVVNPKQARDFAKGIGRLAKTDRIDAEVLAEMAAVLVRRDDLARFLRPLPDAQQQELAALVTRRRQLLTMLGSERLRLPLAVPKVRPSIEAMITAIRNQLDDVEGQMQAQVREHYAELDALLRSTKGIGPIASATLIAALPELGRLNRREISALVGVAPMANDSGTARGRRRIHGGRFDVRCVLYMATLSARTCNPAIRAHYERLRAAGKVPKVALVACMRKLLTTLNAMVRTNTPWTNSLHGA

SEQ ID NO: 263979 - protein, 424 aa, unidentified
MKVTYQTCCGVDVHKSFLVATIVKTTGAIEPSYQKKRFSTFNNSILEFKQWLLDNDCHDVCMESTGKYWIPVFNLLEDEINVVIANPKWVKAVKGNKDDAKDSKWIGDLFRLGLVKGSYIPCKKIRILREYTRYRYKLVSCRSSEKNRYQNALTVCNVALDSVVSDIFGKSSTSIIDYLLEQSGTSINHEEIASKLLRSLKSKEDAVIESIEGYQMTDAQKYRMRLVRAHIDYITAEINDVDKMIENMISSNPDFENAVQFLCTIPGVKHDSAVTIISEIGTDMSQFSSSKRLCCWAGLTPGSNESAGKKKSVRITRAGVYLKPALVQCAHAAVKSDKSPYYKKKYDSLVKRRGKKRAIIAIARMILTAIYQMLSTGEQWNPSDLYKIDMPAPLFEKQKAKAIKQAKKLLQREGLLPPDEPLAS

SEQ ID NO: 263980 - protein, 336 aa, unidentified
MKTRYFLGIDIGKNSFHAALTVEGQNFYDQEVSNNTTAIKKYFQELKTKFGFKSDQLIVCMEHTGIYCYPLIDHLTKQRVKVCIEPALRIKQSQGMQRGKNDKIDSIRIAKYGYKNADELRFWQPKREVLQKLRALLVVRERLIRAKTQFEVPIKESREFIEESIRFLAIKNCKATISAIKKDIKKVDAEISKVIKEDNQLQAQVKIATSVTGIGTIIAANMILTTNEFNDISNHKKFACYAGIAPFDNTSGTSPRRSHVSHMANKRIKTLLHMGARSAIQYSPELKQYYQRKLAEGKKPFSVLNAVCNKLISRVFVCIKINVCIKKIINWRLLEP

SEQ ID NO: 263981 - protein, 471 aa, unidentified
MSCFRGAIQNRLRKENFMQKQDSYDYYVGIDCAQNKHDFAMKNNQDKFLIKKGHFSNTLQGYEKFLNTVLSKCLDKDKILFGMEVTGIYGTNLYERLKSDGYHVVMIFPDSVKNYRDYKRLNKTDKIDSACIAELLLNGDAQIVHAEKNGYTDLKAYIRRRNALKVTCTQETNRFLAKVCLYFPDLLKVFPSGRATLKAIFSIYPTPYSIIEADFNELVSVLQKASKNKFGVDKANELIHAARNSIVVRKSISDGELYNIHSLIDSIDSLESEIRNLEKIIDSKAEEFPAYHVLLTLTGCGKITAATIVAEIGDISRFHKASQIVSLAGLYGDNSKSGSSVNKRGKISKKGSRYLRHAIYMVAEFARRNNPIFKAYFTKKKNGDRTKHILAVNAVANKLCKVIYSLMKNQSTYIIQYRDLAKLSESTQNEFFQNAETDFSAKTRRKKYLYEDEYGELHEFVFKSIKTALIE

SEQ ID NO: 263982 - protein, 360 aa, unidentified
MKEDTGEGSGLTVGVDLGDRWSRYCVLDQQGQILEEDTIATTGPAFRKLFGDRPAARVVIEVGTHSPWVQRLLHELGHETITANPRHVRLIYSSRNKNDQLDAERLARLARVDPKLLHPIQHRGEAAQADRALLRSRDALVVCRTKLINHTRGIVKSMGGRLPTCSTSYFHKRVRQDLPDELKPALTPVLDTIAALSAKILRLDTRIEHLASKRYPETGLLRQVSGVGSLTALSYVLTLEDPQRFKSSRAIGPYLGLRPRQSQSGDIDPELRITKAGDSDLRRLLVGSAHYILGPFGPDTDLRRWGLALAAKGKKNAKKRAVVAVARKLAVLLHRLWVTAEVYEPLRTHRPGTAAEAISA

SEQ ID NO: 263983 - protein, 391 aa, unidentified
MVCVGIDVAKDKHDCCILDSDGTIRADCITIPNNMDGFKQLLQTIRDCTKKSDKIKVGLEATGHYSYNILGFLLDNDLAVYVMNPLHTNLYRKSLSLRKTKTDRVDARTIATMLLSDVDLKSYTDTAYHNEELKSLTRYRFEKVRERAKLKQSVSRLVTILFPELEQLVPTLHIASVYSLLSEYPGAKQISEVHLTKLTNLLTTASKGHYGKEKAIQIRDAARVSIGSVMPAKSLERKHTIKLIRELTSEMDEIEVSIQKIMDKLNPPILSIPGMGIHSAAMILAEIGDFSNFESSDKILAYAGCSPSTYQSGKLSNYYAHMEKRGSRYLRYALYNATKYVCHWNPIFAEYLAKKRAEGKHYNVALSHATKKLVRLIYALQKSGKAYLAAA

SEQ ID NO: 263984 - protein, 319 aa, unidentified
MEPTLAQNVGVDISKDFLDVAFYPAGEINRFANDVKGIRALIKWLAPRPTARVVFEATGAYHRLLERTLAKAGLPGVKVNPRQARRFAELIGKFAKTDRCDAAKLAHMGAALVLQARPIVSDTLDQMKELISARDALVKDRAAAVTRSHTLRSPMLKTQHGARLRQMDRQIAAIENELKALRRADPDVQARYEILISIPGVGDVTAYVLIVEMSELGSLDPAQAACLAGVAPLANDSGKSSGPRSIRGGRARVREALYMAALSASAHHPEYSVKYDAMVKAGKVKKVALVALMRKLIILANALLRDNRKWTAARPSGAL

SEQ ID NO: 263985 - protein, 347 aa, unidentified
MRFYTQQHKHYCGIDLHAKAMYVGILDQHGTKLVHKNLPTTPEAFLRVVAPYRDELVVGVECMFTWYWLADLCQQKGIAFVLGHALYMKAIHGGKAKNDKIDAHKIAVLLRGGMFPVAYVYPAERRATRDLLRRRCHLVHQRAELLAHIQNTNSQYNLPEIDKKLAYKANRDGVADHFPDPSVRKTIELDVALIDHYDKVLGEVELYLTRTAKVHDVQTFARLQSVPGIGQTLALVLLYEIQDIARFPRVQDFVSYCRLVKCAKESNHQRLGTSGKKIGNVHLRWAFAEAAALFLRHHQPGKAYFTKLEHKHGKAKALTVLAQKLARAVYYMLSRHQAFDLKRFVAA

SEQ ID NO: 263986 - protein, 338 aa, unidentified
MKLYAGIDLHSNNSMVVIIDEQDRVMFEKRLPNELEHILRALASFKQWLVGVVVESTYNWYWLVDGLMQSGYSVHLAHPAALVQYQGLKYSADEHDARWLAHLLRLGILHEGYIYPRQARAVRDLMRRRMQLVQTRSAQVICMQTQFTRSTAKSPPSNALKRMLPDEIEALLEERNVASGVRANLEVVRTLNREIARLEREVSEQVKLAAQYEPLLSIAGIGRILALAIMLETGAIERFAGVGNFSSYARCVASKRLSNDKKKGEGNSKCGNKYLAWAFVEAAHFAVRYNPRIKRFYERKAAKTNKVVATKAVAHKLARAAYHVMRERVPFDEARAFV

SEQ ID NO: 263987 - protein, 391 aa, unidentified
MVCVGIDVAKDKHDCCILDSDGTIRADCITIPNNMDGFKQLLQTIRDCTKKSDKIKVGLEATGHYSYNILGFLLDNGLPTYVINPLHTNLYRKSLSLRKTKTDRVDARTIATMLLSDVDLKSYTDTAYHNEELKSLTRYRFDKVRERAKLKQSVSRLVTILFPELEKLVPSLHIASVYALLSEYPGAKQISEIHLTKLTNLLTTASKGRYRKEKAIQIREAARASIGSVMPAKSLELKHTIKLIQELASEIDEIEDSIQKIIDELNPPILSIPGMGVNSAAVILAEIGDFSNFSSPDKILAYAGCSPSTYQSGKLTNCYAHMEKRGSRYLRHALYNATKYVCYWNPVFAEYLAKKRAEGKHYNVALSHAMKKLVRLIYALQKSGKAYLAAA

SEQ ID NO: 263988 - protein, 399 aa, unidentified
MFVGWDWASTAHDVTVIDSAGELVHRMAIPHTEDGIARAVAKLADYGDPGELPVAIEATRGLVVDRLLGVGHPVIAVHPNAFHAVRPRWGAARAKNDPGDSFKLADYARTDIHRLPMLVPTLPETLELQALTRQRDCQLALRIAAVSQLAALLDQYWPGGKTIFAQLHSPIALDFLDRYPTPRAAASLTPARIEAFCHRRGYSGRRSGAELLDRLRSAPISASRLGEPVVAQMIRGQVAVVRALQAGIDALDIVIAEKVTAHPYAGLLAVLPRIGTLNLAQIIGEVGPILERATSFDQLAAETGLAPVTRSSGKTHTVAFRYATNRRARQALHTWLDNSRRSSDWAQQRYAAARARGQRHPHALRTIGRAWLRIIWACWRTKTAYDPARDERAKQPTAA

SEQ ID NO: 263989 - protein, 345 aa, unidentified
MKQYAGIDVSLEYSSVCVVDADGRIVREAKVLSEPDALIAWFAEHGVAMERIGLEAGPLSQWLHAGMTKAGLAVELIETRHVRAAFKTMPVKTDKKDARGIAHLMRLGWFRPVHCKSLPAQEVRALLTARKLIQGKLHDIEMSIRGILRGFGLKVGPTTRRTYAARIRELIEGHPTLEAIAASLLKVRDALDDEFAGFERKLRTMARQDDNARRLMTTPGVGVLVALTFVSAVDAPERFRSSRAVGPHFGLTPKKYQSGETDYSGRISKIGDVGVRTALYEAANVILTRPVKGSDLKTWALAVARRAGPRKARVALARKLAVVLHHMLRDGTNFIPHRAAPAMAT

SEQ ID NO: 263990 - protein, 362 aa, unidentified
MQTVTTIGLDIGKSVFQVHGVDATGNVIVRRKLKRRYVLSFFQKLPPCLIGIEACASSHHWSRELRALGHTVRLMPAAYVKPYVKRQKNDAADAEAICEAVTRANMRFVATKTLGQQSCLMLHRTRHLFIRQQTAVINAIRAHLAEFGIVAPVGRNGVEHLLKIVADCSDKRLPDVARACVAALGAQLRMLKARILELDRLIMAWHRSNEASKRLDEIPGVGPALATALVASVADPRAFRSGRDFSSWIGLVPKQHSSGGKDKLGSISKQGDRYLRSLFTTGALAVIRYAKIHGTKHRPWLTALLARRPTKVAAIALANKLARMAWAMMARGDRYKEPVALAACLRSRRHGRDVKVGRANST

SEQ ID NO: 263991 - protein, 355 aa, unidentified
MNDTKYIGLDVHQATISAAVLDSTGKLLMESVLETRASTILQFIHGLRGSVQVTFEEGTCAAWLHDLLKPHVANVLVCDPRKNALLQSGNKNDRIDARKLADLFRNGLLCPVYHGENGVRALQELARSYLALNRDVTRVMNRVKAIYRSWAIPCAGQRVYAPRYRSEFLGQISEVAVRRRAEIYYQQLDGLRSLRQQVRRDLLAESGKHGATKLLRQIPSIGSIRAALLIALMQTPHRFRTKRQLWAYSGLALKTSASGEYRFEEGQLKRSKKFLAIRGLNVNHNPDLKNIFKGAAIRAAAVPGPFQQFYAVLVATGMKPTMARLTLARKIAAITLIVWKKGVRFDAQYLKQQAA

SEQ ID NO: 263992 - protein, 289 aa, unidentified
MKLYAGIDLHSTNNYVGIIDEEDRRVFKQKLSNTLGSVLVSLEPFKEELIGVVVESTFNWYWLVDGLMKHGYKIHLANPSAIRQYEGLKYVDDTWDSFWLAHMLRLNILPEGYIYPKEERPLRDLLRKRVRLVRERTAHILSLESMVQRNLGLQISSNEVKKLQEADVEKLFDQPHLIMAAKSSVAIMRFLTGHIDAIEREVKSHLKLREPFKCLISVPGIGDILGLTIMIEVGDIKRFAKVGDYSSYCRCVRTQRLSNGKSKGKGNSKNGNKYLAWAYVEAANSTLSR

SEQ ID NO: 263993 - protein, 360 aa, unidentified
MAKSIKAGKNVVLVMVAIGLDLADMWSDWVGLDESGTVVHRARVRTTEAELRRVFGEIKPTKIAVEVGTHSAWVSRVLSSLGHRVVVANARRVALISKNKRKNNVIDAEFLARLLRSDEKLLFPIRHREASSQADLATLRSRDVLVGCRTKLINHVRGVCKTVGTKLPKCSAESFVVRCSEQVPEALRKALNPILEQIMGLTVQIKAYDRDISAMIKRYPEAERLRQIKGVGELTALAYYLTVEDPHRIVRSRSAGAYFGLVPGSDDSGEHHEPQRITKEGDRFCRRLLVSSAQYILGPFGPDSDLRRHGLAIAGRGGKSAKKRAVVAVARKLAVVMHRLWARGEEYIPLFNASRASMAA

SEQ ID NO: 263994 - protein, 344 aa, unidentified
MQHYVGLDVSVKETSVCIVDKAGKLIREVKVATKPAEILAVLTEEALAIERIGLEAGPLSQWLYSALAEAGLPVICVETRHMKAALSAQINKSDRNDARGIAQMMRVGLYRPVHVKTMASQKRRMLLTSRQLLQAKAIDIENDLRGTLRNFGLKVGMVGTVEFEARIRELVADHPDLAAIVEPLLIARRVLREQLGVLHRQLLEIVRQDEVCRRLMTTPGVGPVVALTFRATVDVPSRFKNSKAVGAAFGLTPRRQQSGEIDRMGGISKSGDAMTREMLFEAALVLMTHSRKWSWLKAWGMKIARHRGMKRAIVAVARRLAVIMHRMWVDGTEFRWSRKEAAAA

SEQ ID NO: 263995 - protein, 375 aa, unidentified
MEGAPMLDTTTFIGLDVHARSIKAVSLDVMTGEVRAATFGYDAGAVAEWVRSVDPKARCVYESGVTGFDLQKRLTGLGVDCVVGAVSKMIKPSADRRRKNDRNDAEFLARMLSVGNVVEVWVPDDECEAARDLTRALEDARDDLSRSKQRLSKFLLRHGLVFDERTPTGRRKGNWTRAHWSWIESIRFAEGADNDVLAYYVDAVRRAAEEKARLEGLVEAEARKPRWRRRVDSLRCLKGVDTATAADLVFEAGEFSRFRNARSFAAWVGLTPSEHSSGESDRRGAITKAGNKHLRKALVEAAWHYLTCSGRPKDLAKGQAPDRVARRHAAKGVRRLVERREALLARGVHGNKANVATARELACWVWAVGLMAEEA

SEQ ID NO: 263996 - protein, 388 aa, unidentified
MLKIDDLSRSLAAFDQDSTLVAVIELSSSSWLVGGLVPGLSREPLKKLSPDAAAVLRLLHRWRDEAAAAGRKIERICVAYEAGRDGFWLARWLRARGVECHVIHPTSVAVSREHRRAKTDRLDVGLLKRSFLGWLRGEGRHCSMVAVPTREEEDGKRPLRERDRLVGEATRLVNRMKSLLALHGIRGFNVKLKKAAERLPALVTAEGEPLPPHALAELSRAIERLRCVKAQTRAIETASAKRLEATPVAGPHAMTLVLARVVGVGIGTAELLVREALSRNLRDRRAVARYAGVTGSPDESGRRRRERGLAKAGNARVRRALLQLAWRFLVHQPDCALVTWYRARTADGRAITKKVMIVALARKLFVALWELITIGKVPEGVRLHPAVA

SEQ ID NO: 263997 - protein, 383 aa, unidentified
MKAVCGLDVHKDSIYLCILHPDGELFEQVFGVLTFQLHEMCKLLKKHHVSEVSMESTSIYWIPIWRVLSPHFTLRLVNPYFIKQLPGHKSDVKDAQWIAECTMKELVNGSFVPPEIIQQLRQYDRRIFDLNEEIVRKESKVDAVLQRCNIRLSNYVSNIECKSYRTVVRRLSEGVTDPQELIKEIHGRIINKHGRETILASMEGVVSQAEIDVLRQLREEIDIAESHKKECQDKMSEICQKYFPEELRRLQTIPGIKERAATSLIAEIGTDISKFETANHLAAWSGLRPRNDESNKKVKSRKTTHGNSYLRRTIIQCAWAASRQKDYFFSWFSYHQTVVRRKNKMKVIVAVARKMLVAVWHVLYDNVEYFDFKHDCEESANNG

SEQ ID NO: 263998 - protein, 364 aa, unidentified
MGSIVYGGLDVHKETIVACLIHSSTGEMLQEEVRNERERLVRAVRRWAELGELRLCYEASGGGYVLKRWLDGEGVHCEVIAPSTVLRQAGKRIKTDRRDARTLARQYAGGLLSVVRTPSVVEERARAVVRLHDELTRDMTRTKNRILKHLARLGLRYEGGHNWTREHRRWLGRLVLAADEELILRSHLSTLDHLQVQLEGVDERIAALAQEAPYAQGVARLMSLRGIGLYSAMVLLTEIGDIRRFARAPQLMSYFGLVPSESSSGEHRRLGSITKAGNSRARWVLAQAAWNQTRPLRGERLHKHWQRQPLEVVAVARKAGKRLHQKFWKIATRTERKIAATAVARELAGFVWAILRVEVGATQA

SEQ ID NO: 263999 - protein, 336 aa, unidentified
MSLYCGIDLHSNNHVVVVIDEEDKKVVDKRIDNNLDATIELLAPFKKQIKAVAIESTFNWYWLVDGLIEKDYQVDLVNTAAVKQYDGLKYSGDHQDAFHLAHLMRLGILPTGHIYPPEFRQVRDLLRRRRQLVKQASSHMVSIQNQIWRSLGYRVSCADIRKANFELPFDVGSFLYHSAHSNLMMLKALDLQIDLIEQQTLSAVKLKDEFKLLTNVTGIGPILGLTILLETGDINRFSAAGNYASYCRCVNSIRESNGKKKGTGNRKAGNKYLSWAFSEAAHYLVRFDKKAKRFYERKKQKRNGIVAIRAVAHKLARAVFHMLKNNQAFDIDRVFG

SEQ ID NO: 264000 - protein, 348 aa, unidentified
METIGLDLHKRESQLAIQAEDGTITERRIVTSQQRFTAVLGHRPRARILLEASTESEWVACHLEALGHEVIVADPNYAPMYATRSRRVKTDKRDARTLMDACGQGTYRRAHRLSAPRRHLRAELAVRDALVRTRTRYVALAKALVRRDGLRVPSSTAERVGDRVQALALPAPLAAELAPLLTLLPSLNATIAAADHQLSALEQTDPIVALLMTAPGVGAVTASALVATLDDITRFPSAHQSEAYLGLVPGERSSGEQRRIGPITKAGNRRTRWLLVEAAWRILRAKDPESAALRAWTLRIAARRGKPIAVVALARRLAGIVYAMWRDGVPYDGRKIRAPHHARGAQAG

SEQ ID NO: 264001 - protein, 345 aa, unidentified
MEIRTIGIDLGKTVFHLVGINARGEVVVRKKSSRIQLLRFTSNLRACLIGMEACGGSHFLGRALREQGHDVRLMPAQYVKPYVKTNKNDYIDAEACAEAVTRPTMRFVPIKSDDQLDLQSLHRVRERWVVRRTAVINQIRGLLLERGITIRKGRQHIEMALPGILEDPDNKLSGALRVLLTQLRLEMQYLQGQIEESDKLIVRICGELEPCRRLVAIPGIGPVTATATIAAIGNGAAFKKGRGFAAWLGVVPGEHSTGGKQKLTGTSRRGNKYLRKLFVQGAHSVLLQRTKQTSALSTWLANLASRKRPQVATVALANKMARMAWVVLYKGEVYRPPLVPQTVAA

SEQ ID NO: 264002 - protein, 321 aa, unidentified
MEKFSLYVGIDVSKDWLDVAIVSPQNEIMGTYKIDNTVTAIKGFVEGLPRREQILFCLENTGRYCNAFLEVTGWLNLNTWVEHPLQIKRSQGMARGKTDKYDAIRIAQYAHRFSDKAVLWLPEEKTISQLRILQSKRDILVKTYRQIKQVSEGKSDPDLKPTLTALLEAIDKIEEKMKAIIHTDEKLLKQYELLQSVPGIGNVIAVSLLVTTKGFTKLTDPRKLACYIGIAPFPYRSGSSINYKDHVSMLGNQRLKALINLSAWNAIRAVPSLKIYFDRKVTEGKHKLSAINAVRNKMIAMALSVVRRNQPYSKYYSCVGT

SEQ ID NO: 264003 - protein, 389 aa, unidentified
MLLDHPSDGPTAIRTQFGAIFVSLELSRSNWLITSLSPGKGEKMSKHGVTAGDVAGLMQLFADLRRKAAAGTGESYPIITIQEAGLDGFWLHRVLQQNGIESHVVDPASIATPRRRRRAKTDRLDGETLLRALLAYKRGEPRVCAMVVAPSPEEEDRRRLCRERATLIAERITHVNRIKGLLFSQGISDYAPLRRNRRSRLETLRTGDGRELPSHLRTQIGRELDRIELLLEQIKAVEAERDALLAAARKPASEEAAPDAVTMLLALKGMGANFAAVLWSEAFYRQFANRRQVAAYAGLAATPWQSGGIRHEQGVSKAGNPRLRTTMIQFAWLWIRHQPQSALTRWFKQRSQQGRKRAIVALARKLLVALWKYVTQGVVIEGAVMKPAA

SEQ ID NO: 264004 - protein, 382 aa, unidentified
MIVIGIDPHKSTHTATAVDPATNRDLGSVRIRSSFDDYAHLITCSKAWPDRIWAVENASGLGHHLTQWLISRGEAVVDVPSTATARVRELSRGGRRKNDRIDAAAAACVAFGQGDFRPVAPEGHTDVLRILDERRVDLVRQNGRLVNHLHALLRELFPGGMERDFDTEDAASQLKAFLPETTADGMRKNVALDIVGDLRRVRFHIEDITTRIKTELAASGTKLLKIPGVGIVTAARILARTGDPTRFVNEAAFANYSGTAPIEVASADKQRHRLSRSGDRTLNSAIHIVAVTQARTPSSDGYAYHQRKMAEGKTSREAMRCLKRQVAKRLWRTMRDDSFTTSRRHLLRRAWSGADECPKNAFQRHILNEWARTPLQTRSLAC

SEQ ID NO: 264005 - protein, 342 aa, unidentified
MDEVSIIGLDLAKTVFQAHGAAADGAVVFRRKLTRPQVLRFFAAQPNCVVAMEACASAHHWARAIGSLGHEVRLIAPLYVKPFVKRQKNDASDAEAIAEAASRPTMRFVAPKTEAQQAAAMAFRTRDLFVRQRTQTINALRGHLAEHGIVVPSGPAHVGRLGGLVEGEDGALPSPVVELARMLLQHIGTLTEQITILDKNLRERTRHDATAARLMTIPGIGPICASAMTTFAPPAETFAKGRDFAAWIGLTPLQHSTGGRERLGRTSKMGQRDLRRLLIIGAVAVVRWAARRGAPRGSWLERMMARKPRMLVAVALANRMARIAWALMANGGVYRDPATAVA

SEQ ID NO: 264006 - protein, 380 aa, unidentified
MKRELRTFGTTTRELLELSDWLASQGCRHVAMEATGVYWKPVWHILSDGDVELVLANARHVKNVPGRKSDVSDAAWQSDLLAHGLIRASFVPDGATQELRGLLGTRKQLVQERTRHIQRLQKTLEDANIKLDSTISDLLGRSGRAMIEALIAGETDPDKLAALADGRIKASQARLREALRGRVTKQHCFLLRLHLRQIDGLSEGIADIDREVETRIEPFRKAVELLSSIPGVSTLSAQVIIAEIGLDMSRFPTVGHLLSWAGLCPKSDESAGKRRSTRMRKGAPWLKTNLIQCAWAAKNAKRTYLQAQFYRVRARRGDKKAAGAVAASILTAAYHMLQRGVFYQDLGPEHFERSKAAQAKRLVKRLKNLGYAAALTPIAA

SEQ ID NO: 264007 - protein, 344 aa, unidentified
MNYKLISIDLAKTVFQVAAFNPDNTIAFNRKINRPALLDTLRQCEPTLVVMEACYSANYWGRAIEKLGHTVKLIPARMVKAMLVGNKNDANDAVAIGETASRPKVSLLRPKTVEQQDIQSLLRIRERLVENRTANCNQLRGFLAEYGLIVAKTRRQLMLAIPLILEDADNELSTVARGFIQRLYEFQLYLNEQIDQVAQDILALAQAMPQYPLLLTIPGVGPIVASTLLASINEVNDFKNGRQLAAWLGLTPSQYSSGTTNRLGKITKRGNQTLRRLLIHGARTVMNWCDKKDDSLSQWLQRLKQRQHVCKVTVALANKMARMVFVVMSRGQVFDMNKACKVAA

SEQ ID NO: 264008 - protein, 324 aa, unidentified
MAKHTMICAGIDTGKRKLDVALDRCSECLQVDNTAAGHQALLDWLRRHQARRVGIEASGGYEQAVVAELRRHGFVVVVFQPAQVRAYAMFHLQRAKNDKIDAALIANCTAAAEKIHAPPDPRLVPFAAHLTMIDQIGEDIARCKNRLETCRDDRIGQVWKEEIARLKRRQRAEIKALAASVRQHPDLAERLALISSVDGVGLKTALAILVRMPEIGRLSREEAAALTGLAPYDDDSGERSGARHISGGRERLRSALYAASLPASQLWNPQLVALYKRLVAAGKGHKVALVACARKLLIFVNTVVARGTPWIKHQGTLAGMIAGA

SEQ ID NO: 264009 - protein, 348 aa, unidentified
MAYFVGLDVSVKETSVCVVDDSGKVISEQKVLTEPDNIITLLTSIGETYARIGIEAGPLSQWLVNALIAADLPVICVETRHMKALLTAQQINKTDRNDARGIAQMMRVGLFKPVHVKTLVAQEQRMLLTSRKLVQRKLLDLESDLRGTLRNFGLKVGAVSGSRYDARVRELVEGFPGLTAIVEPLLTVRRVMRQQFAVLHKMLLDTVRDDPVCRRLMTAPGVGAVVALTYRATIDQPQRFVHSRAVGAHVGLTPKRYQSGEIDYDGGVSKCGDALLRTMLYEAAQTMLTRAKKWSWLKAWGMRVAQRRGIRRAIVAVARRLAVVLHRMWVDGTEFRWSKDNATVLNAA

SEQ ID NO: 264010 - protein, 343 aa, unidentified
MKHYVGLDVSTKETHVCVIDEEGETRWQGRCRSIPEAIAAAIRAHAPGVERIALETGPLATWHWHALRAEGFPVVCLHARHAKAALSLQLNKTDVNDAHGLAQLVRSGWYREVAVKSLESHRLRAALTARARLVTIRTGLYNQIRGILKTFGVVLKPGRGTAFEANVRTVLRQHDGLAPVLDPLLTVWHITTQQKAELDRQVQRAVRRNATCRLLMTAPGVGAVTALAFVTGLDDPHRFRRSDRVGAYLGLTPRRYQSGDIDRNGRISKCGDAMVRTYLFEAAHVLLTRRRGPCALRDWGLTLVRRIGRHKAKVAVARKLAVILHRMWIDGSQFRGAPVPAAA

SEQ ID NO: 264011 - protein, 453 aa, unidentified
MKRKRTYGSVEVDKMELDAVLKLLAVGCIVAVDVAKSKFVAAMATAAGEVVRLVRFEHPRQTGLFLRLLVALRDAKLEPRVTMEPTGTYGDALRYQCHRLQLPVHMASPKHTHDLAEVLDGVPSMHDPKAAVALARLAVIRPTKRWEPDSDAKRDLRALLDRRAPVSRTQTLYYGLLEGMVARHWPELDALLDVRSQRSWMTLLQRLPGPQAVAASPDEATEVLRQASRGSLPQESISAVVESASTTLGVPMTHEERLTLGVIAQSIERETRQLDALDKQLGELCRLDPEMARMAAVVGPACTAAIVGYIGLPSSFANAGALEKAMGLNLRERSSGEKKGRLSITKRGPGQVRKLLYLAALRRLMSDPVTAAWYEGRAACRRDMKGAAVVAVMRKLARALWHVARGSAFDSTKLFDTRRLEVKSPRTRAGFPARHRSSRTPTIHPGGAPQLTE

SEQ ID NO: 264012 - protein, 342 aa, unidentified
MQVTTIGLDIAKNVFQVHGIDAAEKVVVRKQLRRSQVLAFFKALPPCLIGMEACATAHYWARELTKLGHRVRLMPAKDVKAYVKRNKNDAADAEAICEAVRRPTMRFVQTKSAEQQGRLMLHRVRDLLMRQRTQVINALRAHLAELGITAAQGTAGLKELLKIIASDADERLPVDAHASLVVLAAELQAMQTLVGSLEKRIMAQHRGNEASKRLETIPGIGFIGATAIAATVTDPTAFRSGRDFAAWIGLVPRQDSTGGKRKLGPISKQGDRYLRRILVVGAHAVLRYAKQNPEKYPWLTQLLARRPFKVVAVALANKMARMAWALLAHGGTYRAPALAAVA

SEQ ID NO: 264013 - protein, 493 aa, unidentified
MQRAHLRARCVRMNPLVKGGAPVSPTHPRGKRRREVRIVSKRKVPLPPQLKRVNLNAAGIDIGAEEHWAAVPPGRDSEGRDVRSFGAFTGDLCALADWLKQCEIETVAMESTGVYWIALYELLVERGFEVLLVDARQAKNVPGRKSDVLDCQWLQELHTYGLLRGAFRPVDQVCILRSYLRQRSMLVSYASHHIQHMQKALEQMNLKLSHVVSDITGLTGMGIIKAILSGERDPVKLAKFRDPHCKSSEATIARALEGHYREEHLFSLQQAVELVDFYQHQITACDRQIEVCLQQFEEKSTETLVAARSRKRRRGGITFDVRSYLYRMTGVDLTQIDSIEANTALTVIGEIGLDMSRWPTEKHFGSWLGLAPGSKVSGGKRLSGRTKPSANRAAAALRLAAQSLNQSQSALGAYFRRLKAHLGAPKALTAAAYKLARILYRMLKYGAGYVDQGEVAYEERYRDRLLRNLKRRAAELGFQLTAIDSNAAQPVLT

SEQ ID NO: 264014 - protein, 370 aa, unidentified
MPRHLRYWVGLDAGHSETAVCLVDAEGHVFFEAMTETRAAPIRDILRRFGVEPIQSITIEAGVGTQMVRDLRSFGFPVQVVDVRKSSKFLAIRRQKTDANDAKGLAELGRLAQSFGPHVFIKPVEHQDIRIMINIRRTLLKHRSRTDALLQSIFRLHGASIKLLNGRGSLAAEVANQLRLLSTNGVTICVDLDPLVRMGEDLRSHILDLDRKMRTMAASIPVCARFQTIPGVGTITALSFYSAVGDPYRFRSNRDVGPYLGLTPNLYQSGATARRGRISRYGNKLTRSHLITAATVLLRTIKTESSLRTWGLRLATKIGFLKARVAVARKLAVIMMAMWKTDASFDPDKSKPRFLQPEEAGLDPVRISGT

SEQ ID NO: 264015 - protein, 415 aa, unidentified
MSNSLLVGVDVHRHTNTICCMDQHGQQLGPRVTLPNTRPGTEALVQQLAQQVVAGNFDAIHLACEATGWYWWHFCQTLDQDPVLQQWPLELYALNPRLTATFSKTYVDHEHTDVNDAFVIADRLRMGRDLPPPFHVEERYLAVRLLTRYRFHVIQALARAKAYCLAILYLKASAYAHGRPFADVFGAASQAVLQEFSSLEQVAAIPLADLAEWIDVHGRRRFADPEAKARALQQVARESYVLPVALQAPVQLILDLSLQHIRALERQVQRVERAIAEQMATVPHTLETIPGIGPVYAAGIISEIGGVDRFAYAEGKVAKFAGFKWRKYQSGMFTAEETTLSRTGNRYLRYYLVEAANAVRMHAAEYGAYYDRKYHEVRQHQHKRALVLTARKLVRLVVRLLTTNEPYHARRSAAV

SEQ ID NO: 264016 - protein, 349 aa, unidentified
MLGYAGLDVHKDSVQACLINEQGIVLSQKRFTTNEAGLLALLNTTKEYNCVMESSTACFLVYDYLKDQGVTVRVAHPKRLKAISSAKIKTDKVDAETLAQLNRANLIPESYVPNKEIRQQQDIIREHMQLTKQKTRIINQTKAFLLKNGIKTKRSPLTKGPALKLIQASDLPENIKIKFTNQKQQHDLLKKQLKIVDDKIKELSKNNPNALLLDTIPGVASFTALTIALQIDNIQRFPTVDHLISYAGLCPNIYQSGNIINQSRLTKDNCKIMRWTMTQAAWRAVTNSQHFKQIFEEKIKNKGKQKAIIIVAKKMLTIMYFMLRNKTPYNYKLEGAPKVWEETMGNQAL

SEQ ID NO: 264017 - protein, 462 aa, unidentified
MTTSPCRVHGPGGGVTSSEGTDRPLIRGMTTVLFAGREALRNVDVAISAVARPGEQHRKKPDVIDTSDIDVYLGLDVGKGEHHATALTPTGKKTFDKRLPNSEPKLREVFAKLQAKHGTVLVIVDQVASIGALPLAVARDAGCHVAYLPGLTMRRIADLYPGEAKTDAKDAFIIADAARAMPHTLRSIDLDDETIAELQMIVGFDDDLAAEANRLANRLRGLFTQIHPHLERVIGPRIQHPAVLKLLDQFGSPAQIRKAGRRRLITLIRPKAPRMAERLIEDIFTALDEQTVVVPGTDAAALIVPSLAGSLQAVLEQRKLLAHRIEQLLDAHPLSEVLMSMPGIGIRTGARILIDVGDGTSFPSAAHLAAYAGLAPAIRNSGSSIRCEQPSRRGNKQLKRAFFLSAFAALADPASRTYYDKKITQGKHHTQALLCLARRRADVLFAMLRDGTFYQPPTPIAP

SEQ ID NO: 264018 - protein, 410 aa, unidentified
MSVLEVALDPATVIVAVDPGKVSNRVWISNGSGLLADPMSLPVSRDGIAQLELALNKHGPDAPVIAIEATGSLHRPWVTELERRHPGSVRLFAPSETKSARTQLGSGRFKTDDRDCAALTYMARQGGGRRHGQPAAVEALRAAVRHRRGLVADRKVAQQRLHDQLNALCPGLSAPSGHGRSLALDTPTGFAVLACAAAFSGRAPQLRSLMCRAPGRLRTETAQYWLQRWHGCLPPPADAEQRARRLGRDLDRYRRLRIDIDALDLEVLALLADTDGQILTTLPGVASIRAAAFAAHSLPIERFPDAEHLYSATGLAPALYQSATLNRRGRISRQGLAEHRDALMGIAWGLAQNSPSFAQRDAELRARGMAPIQARVALARHACRLAYRLLRTQQPFDEQRYRQGRLSGER

SEQ ID NO: 264019 - protein, 346 aa, unidentified
MSSNNITIGIDLGDRRHAVCVLSAVGDIVAESELVNTRECLTTFAARYPGATFVMETGTHSPWVSRLLASLGHTVIVANARKLRAISTSPNKNDREDARMLARLGRADPRLLSPVQHRSESAQRALVQFKVRESLVRARVSQMNSVRFLVKSLGLMVPRGVKATAFVRKFRLQADAVTCALVEPLLQMLDALNAQIKQLDARLETMADEQYPVTARLRQVDGVGPLTALCFVLTVENPGRFPHTRDVGAYLGLVPRRDQSGLTDKQLPITKRGNVQLRCLLVNCAHYILGPFGPPSRLREAGARIAARGGKSAKKRAVIAVSRKLAVTLLALWKSGADYQPLLQAA

SEQ ID NO: 264020 - protein, 359 aa, unidentified
MQTQRKELNFDGQNIFVGIDVHLKSWNVSIFTENLHHKTFSQPPKADLLSTYLKLNFPNAIYHSVYEAGFSGLQAHYELTNLGIHNIVTNPADVPTSDKEKRRKTDKVDSNKLARSLRNKDLKGIYTPSQDILEDRSFVRVRSSIVKDQSRLKNRLKSMLYYYGIEFPVEFQKSTTHWSKRFMDWLKTVQLKTRSGNMALEISIKEAEQLRALLLEVNNELKIMSNTEKYAKNMEFIRSVPGIGLVTGMLFMSEIENIKRFENNNKFAGMIGIVPDCHSTGSNEQIGEISPRRHSYLRSGLIESSWVAVRIDPALSRAFSEYCKRMEPNKAIIRIARKLSNRIYFVLKNEKKYETRIVK

SEQ ID NO: 264021 - protein, 374 aa, unidentified
MISVGIDVSKEKSTICILKPYGEIVSRPFEVCHTERELSELASMLLRLNDDVRVVMEATGIYHLPILSYLKEKGLFVAVVNPFEMKEYRCQGLRRVKTDKQDAVTISNYGIDHWYRLKEYEAEESIYAELKLLGRQYRHYMRMRVESVLELTHLLDYTMPGIKTLLKGWNETNGKDKLGDFAEEYWHYDNITEKSEEQFIESYLKWAKERGYHQNQDKAVKIYALAKEGIPTVPSDTPSTKMLVQEAVRVLREVDNTLMAILTQMQALAKSLPEYPVVRAMGGVGNVLAPKLIAEIGDVRRFHSGKALIAHAGIDAPPYQSGQFIGTERKISKRGSSSLRKIGYEVMRCLKTHKEPEDAAVYRFILKKDRILYL

SEQ ID NO: 264022 - protein, 399 aa, unidentified
MPQLWAGVDAGKTHHHCTVIDTDGKRLLSKKVANDEGEILDLIAEVNTLGEGARWAIDLNSGGGALLITVLLDHGQDLVYIPGRTVHHASGAYRGDGKTDAKDAFVIADQARMRRDLHPIASFDEIAADLRILTARRTDLACDRTRAINRLRDQLLGYFPALERAFDYSASKAALVLLTGYRTPRALRRMGRDRLETWLRSRKVRNAAHVAEAAIEAAQAQRTTVRGEKAAAAVVERLAKEVIALDAELAEADAAIEGRFREHRHAGVITSLPGIGTLLGAEFIAATGGDMAAFGSADRLAGVAGVAPVPRDSGRISGNLRRPKHYSRRLLRVFYMSAQVSIRCCPASKAFYERKRAEGKRHVQAVLALARRRVNVLWAMLREERPYAAVPPAKLAAVA

SEQ ID NO: 264023 - protein, 433 aa, unidentified
MNKWYIGIDIAKEKFDAALLHADKGCIKHAVFEQNYEGFHGLLKMVKQHCENPDQVWIGMESSGHYHYNLFEFLREKLTPNITILNPMIIAKYCKVTLRPCKTDKKDAVKIARYLVETKVKPTVPSKVLQQLSYYDKEREHYVTRLAECKVKIRSWLALGFPELEREIVSLSSRYLITFLEEFPSAPSVTAMSRRHFIKRFHEMLPAKTKNMNLKPEEVYSLAKRSIGREFEGYRKLFRTTIEIMYTLKKTVQTLEQEQKQLCTKHYPLQMAIVQSIPGIGPISVVSILSHLPAIENFESHRKVIAFVGTDPVIRQSGKYQGRGRISKKGNPHLRRRLYLCSLRAIQTDGVFKDYYHRLREKGRPARVALIAVANKLLKILYALLSKKEMFDANYHQRFITQSHSNLKNVSQTGEKGYKKTPTLSPKSHKSTV

SEQ ID NO: 264024 - protein, 358 aa, unidentified
MKIIGCDYHPSFQQIAMVDLETGEYVELRLLHAGGEAQRFYESLSGPVRVGVESSGNMLWFERLLQRLGHELWLGDAGVIRAKAPRKQKTDVRDARHLLQLLRENNFPRIWVPSVAERDLRQLLKHRHTLVQMRTRVKNQLRHIALNQGLQKKQKLWTRAGQELLRGLELDRWTARRRDDLLHLLEYLGKQIEELDQAVKAEAEQRAEVRFLMTHPGVGPVVGLATVLTLGEVGRFPRGRQVAAYVGLIPSENSSGQRRRLGAITKQGSSFLRFLLVQAAASAVKGDAEWARAYKRLAHKKHHGVAKVAIARKLVVRLYWMLRTQTRYPEVVRMSGSPSHPVARLQAERLSGHPASRR

SEQ ID NO: 264025 - protein, 364 aa, unidentified
MKGEKKPVTRYVGIDLGKRTYEVAIVEKGKVKKSNGKTFSAGRQTLYKKLRSSDKVAVEAGNMAFIIAKELEASVGCRVYVLNPGNLALIYGSMKKTDKEDSLKLAHILEDFQEDRLPVVPVPSDKEMQRRKLLAAYRRVQQSRSREINKLHALFLAQGITTVVRADLATSGVRKGAVKELTGLEREEAEYLVGCLELHEQRIEILKRQIEADSAGDEVIERLQSVPGVGPMVAFAFVAHVGEKRFETAGQVSNYLGLVPRVYISGQTVRYGRITKRGNGYLRALLNQAAWALIRTKKNNNLKERFEYMTLEKSISKKKAIVAISRRIAELLYTIMRDGTKYESRPFIREKVTAKELAQLAMSA

SEQ ID NO: 264026 - protein, 394 aa, unidentified
MKDVYASVRAGGMDVHYKSTTVTMRDANGRVVRREQLEHADRAKLRRVLSRWPAAAPMVMEASFGWGWLADLMKELGLRPQLSNCYKLEQMRKARGWAKTNKKDADLLSLLPYEADGWWKVWMAPPEVRDRREWMRYRASLVHIQTATKNRIWALFHRHGIQHEFSDLFGAGGRVFLAELCREGRCGEVVLLDGALWALRGLVRLLSDVRGQLARIARALHGQLERSELARRLDGIPGIGLILAHTLMAEIGCIERFASHRRLAGYSLLAPIAADTGEDDGRKPIGRHLGRRGNRTLKWSFIEAAHGAVRRGGKWRRIFDSVTAGGKRNRNDGYIKVARELVKVVFVVWSKKVAYTDSPPPRPRLSPRQRAERFLCSARSGTGQPCHPMAVVRR

SEQ ID NO: 264027 - protein, 341 aa, unidentified
MQITTIGLDIAKNVFQVHGIDAAEKVVVRKQLRRGQVMKFFEAVPPCLVGMEACATAHYWARELTKLGHQVRLMPAKDVKAYVKRNKNDAADAEAICEAVRRPTMRFVEVKSAEQQGRLMQHRARDLLMRQRTQAINALRAHMAELGIVAAQGREGLKALLAIIADQKDERLPDDARASLTVLATQLQALQTMIGSIEKRIIVQHRASEESKRVATIPGIGTLGASAITTTITDPNAFRSGRDFAAWIGLVPRQDSTGGKQKLGPISKQGDRYLRRILVVGAHSVLRRAKKNPDKYPWLTQLLARRPFKVVAIALANKMARVAWALLASGAHYRPARLAAA

SEQ ID NO: 264028 - protein, 451 aa, unidentified
MSDLPVLDARAAFVDVGSEQMHVSVAGGPPQVFGAVTAQLHALRDWLEAQGVRSVAMEATGVYWLPLYGLLEAAGFEVRMVNGRQTRNLPGRKTDMQDCQWGATLHSHGLLRAGFVPPAHIRRMQDYMRLRADHISMAATHVQHMQQALERMNVKLHDVIAKLTGVSGLAVVRAILGGERDPQRLLALCDTQIQRAKAERVKESLRGTWTEEHLFALRQALQSWEHYQAQIAECDRRVEAVLHDIDPGQPPNARALAARPSRPGVNAPDIPDLRAILAQICGGQDLTQLPAHTEYGVLQVIAEVGTDLTKWRTEKHFTSWMGLAPGSHQSGKRKRSAKRSRNRAGRLFCVIARSLARSKDIALGGFYRRMAARRGGLVANIALARKLAALFWRVMVKGMDYVELGLQQYEAKVLETKQRSLRRLARQLGQQLVPMTTPAPTKGPSANNATL

SEQ ID NO: 264029 - protein, 373 aa, unidentified
MTQSTMFNTLFIGMDVHKESIAVAYVAQDHGAEVTYLGAIGTRQTDIDQLVRKLQSKAKQLVFVYEAGPCGYWLYRYLSKKGHACWVVAPSLIPKKAGDRVKTDRRDAIQLARLMRSGDLTPVYVPKLEDEAIRDLTRAREDAIEDLKAAKFRLKAFLLRHDIRYTGRANWAPAHLRWLSEVVCSTPAQQIVFQEYVRSVDTITERLQRLEQELKDQVASWRLNPVVEALQVLRGVQFTVAVTLVAELGDLTRFDHPSELMKYLGLTPSEASSGERRRQGAITKSGNTHARRVLVEGAWAYRYPAKVSRHLQLRLEKQTKVLQNISWKAQVRLCKRYRQLMARGKHANQVVVAVARELVGFIWAIAKEVNVKP

SEQ ID NO: 264030 - protein, 387 aa, unidentified
MPIRMHLPLTGVQNEAQPQTVAKEVNMSSVANRQCKEKCGHVNFEGKACWVGVDVHKVSYAVAILDEDGQRHEFSTSAVPKKLLLQLLGIGMTIKALVYESGPTGYGLAWACQEFGIPVLVAAPSRIPRPVSKTGKTDRLDSMKLAEFLARDMIKSIAIPTEAENHLRSLERCRQQLVERRRTVRQHIKSLLLFHGLDEPAGLSGWSMAYVHSLQVMVLPDVLRITLDSYLKEHAFILEELRCLRKQLSATLQAAEKLQTLENLRTIPGVGETIATTFLTEIFRPERFKRAEEICAYVGLAPVTSHSGSGKATARLGQVGQNYLRSILVQGAWRFITAEPQYHDLFIKIQTKTGLFAKALVALARKFLILLWRVAVENRPYRPASVQ

SEQ ID NO: 264031 - protein, 356 aa, unidentified
MSIQVIKQNVGVDISKDDFKVCFFQLKQDQQSRIKASRTFKNTLAGFKEFAKWMDKHRAADIVLCITVEATGVYYEPLVHFLHDEQHYHISVVLPNKSKAFAKSLNVKTKTDKVDAQILGQMGLERNLEPWAPMCTSLFAIKQLTRERVSLLDEKVALMNKLHARQHAYAPSKDVIKRLQQRLKLLEKQLQQVEQLIQQAIKEDPALKERIDKVCQVRGLGWVTVATIVAETNGFELFSSQSQLTSFAGYDIVERQSGSSIKGKTRISKKGNHFIRRALYCPALTAVRYEPQFKQLYERVTLRTAIKMKGLVAVQRKLLLLIYTLFKKNENYDPNFANKQKQFLGSRQETSPAYAG

SEQ ID NO: 264032 - protein, 344 aa, unidentified
MKTTTIGIDLAKNVFQIHGVDERGHPTMRKKLKRAQVAEYFANLPSCLVGMEACAGAHFWARKLQGMGHRVRLIAAQFVKPYVKTNKNDVADAAAICEAVGRPDMRFVPIKPIESQSILALHRARQGFIEERTAQANQIRGFLLEFGIVIPRGIRHIERCVPGILEDAENELSVGFRQLLARLMGHLRELYRQVEEIEAEIHRWHQDNAASCKLTCIPGIGPLTASALVASIGDAKAFSSGRQLAAWMGLVPRQCSSGGKPTLLGISKRGDTYLRTLLIHGARSVIARLKGKAGYEKSWLGQLLARRHHNIAACALANNNARVVWALFAHNRAYESAYAAARAA

SEQ ID NO: 264033 - protein, 372 aa, unidentified
MKEFSTYVGLDTHKDSIAVAVAQAGRQRAQYWGEIANTPEAIGKLLNKLSPEGEVLAICYEAGPCGYGIWRQVSAMGHECTVVAPGLIPRKAAERVKTDRRDALTLARLHRAGELTAVWVPGVQQEAMRDLSRAREDMKAAERRMRQRLSAFLLRHGHVYRGKSRWTQAHWRWIEQLKMATPVQQIVLSEYADAVQDAQRREQSLVRQIEQALPGWSLAPVVHALMALRGISLINACTVLAELGDITRFDHPGQLMAYLGLVPSEHSSGGTRVQGGITKSGNTHVRRALVEAAWAYRFAARKSRTIQRRAERTSEQVQAIAWAAQKRLCARYRHLIEAGKNSKQACTAVARELAGFIWDIARHTPVQVAAGA

SEQ ID NO: 264034 - protein, 343 aa, unidentified
MEAYAGKQFVGIDLHRRRTVIVRTTGAGEVLETVRIVNDVERLASVMARAGECPEVVLEATYGWYWAVDALQAGGANVHLAHPLGVKAFEYRRVKNDVRDAQDLADLLRMGRLPEAWIAPPPTRELRELVRHRAKLVGLRSHCKAEVHAVLAKCGVQVLMSDLFGLAGTELLDRLDLPASYAARIASLRRLMDDLDFEINLFAGIIRGRMAHEPGYTAVQKIPGIGPTLGAVLVAEIGDITRFTSAAKLTCWAGLTPKHHESDTHVHRGRITKQGSRLVRWAAIESVKTVSKGSTVGMLRERVADRRGRNIGSVAAARRQLELVFYALRDGHVRALEHLPAAA

SEQ ID NO: 264035 - protein, 370 aa, unidentified
MKKNSKNSKSPTRSTKTKLRKTDQVTIGMDLGDKTSRYCVLNAAGEVLLEGSCATTKAGMAQVFGAMPYCRIAIEVGAHSPWVSRTLKRLGHEVIVANARQVKLISQSSRKNDKLDAQMLARLARVDPALLRPIRHRSEEAQKDLMTIRIRAALVESRTGLVNAARGLAKSTGERLAACDADQMEVEKLEELPADLRETLKLLVEEVESLTEKIKECDRKIEQIARDRYPETKLLRQVSGVGPLIALTYILTIEDKQRFPKSRDVGCYVGLRPKQSESGERQPELRITKEGDVYLRKLLVQGAHCIMAKRAPDTDLKRWGTKLAGRGGKNARKRAIVAVARKLAILLHRLWATGEVYEPLRNSQARAKAA

SEQ ID NO: 264036 - protein, 398 aa, unidentified
MEVMDAAGRRLSAAKLPEGIAGIARFHAMIAAQLDPDADLDAPAGQVLIGIETDRGPWVQALIAAGYRVYAVNPLQAARYRERLGVSGAKSDPADAHLLADMVRTDSHQLRVVAGDSDLAEAVKVVTRAHKTLIWERTRHTLRLRSTLREYFPAALAAFEDLTDADTLELLAKAPDPVSAARLTTTQIMAALKRARRHHRDRRAGEIQAALRTEQLGQPAVVARAYAVAVRAQVAILGVLNEQINLLQEQVEAHFGQHPDAEIYTSQPGLGQILGARVLAEFGDDPTRYGDTRARKNYAGTSPITRQSGKKKVVLARYVHNDRLLDALGGQAFAALTRSPGARAYYDKQRDRGLGHRAALRQLANRLVGILHGCLKTRTRYDEATAWSHTQQDQQVAA

SEQ ID NO: 264037 - protein, 340 aa, unidentified
MKMYAGLDVGGKQTAICVMDEVGKIIWRGMADTYPDVIAARLKGFQEKLVKVGIESGPFTPHLHRSLVGLGFPMVCMDARRAADAIKSRRIKSDRADAWALAEMLRTGWFTAVHVKSAESHKIKTLLGARDQLVRVKRSLGNQVRGLLRPFGVRLPSRAGMKKFAEAAHQAVQADKLLRAGISALLEALASIDAQIAKLDDELKALARRSEVAWRLMSAPSIGPITALAFIAAIEDPHRFRRTRDIGAYLGLTEKRYQSADTDVGLGISKQGDAMARHYLYEAANVLLTSVKKGSALRSWGLKLLKNIGPKRARVAVARKLAVLLGRMWKDGTHFEAMAA

SEQ ID NO: 264038 - protein, 342 aa, unidentified
MELMYYIGLDVHKRKISYCVKDGSGKVFAEGSLPATRLDLDLWIKTLPQPWSAAMEATMFTGWIYDHLKPHAAALKVAHPLMLRAIAAAKKKNDRIDANKICDCLRCDFLPECYMASTAIRERRRTLRYRNLLVRQMVQMKIKISALLMEAGVSYKRLHKAGYFRELLASNPDIDEGLGLLLRLCRETVARLQKAESAMVRSLERDSLLIDRVERLMTIPAVGPITALTWALEVGDVQRFSSIKKAISYCGLCGAERSSGNTVQRTPLSKQRNKHQQTTLVEAAKMAPRYSPALAMLYDKEKQKGNTNRATLAVARKLVAYLMAVDRGQRNFQVVETSNIAA

SEQ ID NO: 264039 - protein, 268 aa, unidentified
MDKVTTVGIDLAKRVFALHGVDASGRVVLRKTIRREQFVETVAKLPPCLIGMEACSGSHEWARRFQGLGHSVRLMAPVFVAPYRKSGKNDGNDAEAICEAVSRPNMRFVPVKSAEQQALLALHRVRQGFVEERTALINRLRAVLTEFGVVLPNRTQWVRRDAVAVAEPLPVLARQAVEDLRAHLVQLDERIGAYDRQLEQQAGQSEAAKRLMQIRGIGPLTAVAIVATVGSARDFASGRQFAAWLGLVPRQNSSGGKSRLAWISTANY

SEQ ID NO: 264040 - protein, 413 aa, unidentified
MNEAKVAGIDVHKKVLMVVVVDASRPEEKPARRRFVTMASELHRLLRWLREQGVEEVVMESRAQYWRTVWMELEPHMRLHLAQAFSNRAPRGRKHDFKDAERLVRRLIADELILSFVPSGEQRIWRSMTRMKLQLTRDRVRLQNQIECLLEEMRIKLSFVVSNLLGASGLRILHALANGETDPKKLAQLGGERLQCTEEQLVDALTGRAQPVPGAMLALQLQRLQLIDQQMERLNSMIAAAMKPHQDALIRLAEVPGLGVDSAQQIIAEVGAQASTFPSAAELTSWVGTCPGKDESAEQNHSSRSAKGNKYLRRVLNQAAHAAVAKKGSHFQAVFRRLLPRLGYQSAIWAVAHRLCRLVWKILHEGVRFIEQGTEVGPREKKKRAQMLARALRKLGYEVTITPINQLAPKPAV

SEQ ID NO: 264041 - protein, 387 aa, unidentified
MSTSMEHPASQCSLYVGLDVHKESVTIAVLPAAAAIPSRIDKVANDCKVLRRYFTRLAAAGEIRACYEASGAGYVLQRALTEWGYHCDVIAPSLIPQKPGHQRKHDRYDAKQLAHLYRSGELTPIRIPTEAEERVRDLVRCRATFQRELLRARHYILKFLTRRGLRYTAGKCHWTRAHHAWLEQLSRNSVLAAEDQAIFSEFLGLLRYAQQRRDALDDQIQHLALAPTLRESVAWLSCLRGINTPAAVTLATEVVDWRRFGKPTQLMAYVGLVPREDSSGTTERRGPITKAGNSHCRHVLVQAAWAYRHAPRVGAALARRQRGQPPLVVTHAWKAQHRLHKLYHRIAVRKGPQVAVVAVARELVGFLWAIMQECPLASELAQHGAAA

SEQ ID NO: 264042 - protein, 355 aa, unidentified
MNSEKYIGLDVHQATISVAVMDSTGKLVMESILETKAATILEFFAGLRGTLSVTCEEGTWAAWLYDLLKPHVQKLVVCNPRKTALLKDGNKNDRIDARKLAELLRLDNLKPVYHGETGVRMLRELARSYLTLVKDLTRVMNRLKAMYRSWAIPCAGRDVYYTRHRAEWLSKIREAGVRRRAEHLYQQLDMLQHLRQPARRELLAESRKHVITAKLRQIPSLGPIRAALAVALIQTPHRFRTKRQLWAYSGLALETRTSGEHCYVQGQLRRSKKQVSIRGLNKDHNHDLKGLFKAAATRASVQPGPFQDFYERSLAKGIKPTMVRLTLARKIAAITLTLWKKGENFDAEKLKSQAA

SEQ ID NO: 264043 - protein, 388 aa, unidentified
MNTQTVNQLTPSATNTCFMAIELSNTSWLIGMMTPLSDKISLRKIDSGAVQQLIEIIDRAIEKVSRATGRAPQIVSCYEAGYDGFWLHRVLEARGVVNHVLDAASLMVSRKARRAKTDRLDAEKLVRTLMAFWRGEPKVCSILRVPSIAEEDAKRLHRERQFLMKERVQHIGRIKGLLATQGIRDFWPSRRDWAQQLKASITGDGRPLPPQLTAEISRHCRRLALVNTMLNEIDAQRDATAETKTEVDSSQPQCDDSIRRLVQLRGIGPQVATVLQREVFYRRFKNRRALGSYLGLTPSPFQSGSMDRDQGISKAGNPRARTVSIELAWLWLRYQPQSALADWFKQRTGSLKGRIRRIIIVAVARKLMIALWRYLEAGLVPDGAVLKA

SEQ ID NO: 264044 - protein, 341 aa, unidentified
MMEGLASEAAVPKTVMISEHGQIVKEAQAASEPKALVNWIGDLDGAIAAIGLEAGPLSQWLHHGLSNASLDVVLMETRQVKGALKAMPIKTDRRDAEGIARLLHLGWFRPVHCKSVSAQEVRAVLGARKAIQQGMISLDMSLRGLLRNFGLKVGTISRGRFELRIRELAVGNPMLEGATEPMLRSRACLRQELAGLERRVRHLAQDDPVCRQLMSMPGIGAVVALTFRSAVDDPARFTSSKKVGPWVGLTPSRNQSGERDVSGGITKAGDVNLRRALCQSANVMMHCGRSTWLRTWAAQVARRRGAKRAMVALARRIGVILHRMWVDDTDFRSDIEVPSAA

SEQ ID NO: 264045 - protein, 412 aa, unidentified
MEVVYECCCGLDVHAKRVVACLITKGHKEIRTFATMTDELLQLGDWLSGVGCTHVAIESTGIYWKPVFNILEGLLTVILVNARHIKAVPGRKTDVRDCEWLADLLRHGLLKASFIPPPEIRELRELVRYRHTVVTEHTAVANRITKLIESANIKLGQVASEVLGRSGRLMLRALAAGETNAETLAEFAQGKLKNKKAALRRALTGSLTPVQRWVLTALLTRAEELEAARGRVETRINEAVATCTDPFVPEAVELLESIPGIGQRTAQTIVAEIGVDMSRFPSANHLASWAGVCPGNHESAGKRKSGHPTKGNKSVRTILTEAAWTATRAKETFLHAKYHRLAKRMSKQKALGAIVHRLLVICYHLLKRRVPYAELGTAPLDEQQVARQRRRLVEQLVGLGLKVTIEEGATVS

SEQ ID NO: 264046 - protein, 435 aa, unidentified
MRREQVSVFRERGLRAGVSRSAEPQCLAINSNTERKTDTMKSYILLQPEPVQSQITIAPAGSKSSVLFVGLDVHNDSIAVSIAPSDSTEVRRYGIIGGEHDDVLKLVKKLQAAHPAATLKLCYEAGPRGFALCRCLRAHGLECILVCPSKVPRKPGERVKTDRRDADQLARLFRAGELTGIYVPEPEDEAMRDLIRARYQVGKAQHRARQQLKMYLLRHNLRYGGQTAWNAAHLRYLAQIKMPFPVQQIVFQEMLEVITEATERLERYDQEIERAVPGWRWEPVVRALMALRGMALLHAATLVAELGDFHRFDHPSPLMGYLGLVPSEHTTGDDRQQGGITKMGNGPARRALVEAAWQYRAPARLSPHLKKRQEGLPKAITDIAWEAQRRLHHRYCHLTRVGKKKSQVAVTAVARELAGFVWAIARQVKPRPAKP

SEQ ID NO: 264047 - protein, 387 aa, unidentified
MSSLAVRTPEPALATPVRTIIYLGMDVHKDSITIAVLPQSAKAPTRLEKLANDLPKLKKWIERVAREGEIHACYEASGAGYVLHRALAEWGYACDVIAPSLIPKRSGVRRKHDKRDAADLARLYRAGELVPVRIPSEVDERVRDVVRCRETFQREILKSRHYILKFLATRGFVFREGTNWCTPHLRWLQHLTTEGSPLASEDRLVYREYHALLLYKLQRREELDRQIEQLAELPTLKPMVQRLQCFRGISLHSAMVLATEPSDWQRFERSGQLACYLGVVSREDSSSNRQRLGSITKAGNSHCRHVLVQAGWSYRHRPQISVDLKRRQAGQPPAVIAHAWKAQQRLHARFNHLSYRKRPQIAVVAVARELVGFLWAVAREIEPASAT

SEQ ID NO: 264048 - protein, 397 aa, unidentified
MLNPMLFELRVGVDVGSRSHAVAIGLPSGAVLEEFEIPHTSEGFGDFFSRVEAHANGHGLPVAVAMEGYNGHARPLDALVQARGWRLFNVNNLKLARFKEIFPGAAKSDRLDSRKTLELFQLQGHLPMARDVLQEVPERPRENDILKRLTRRRRRLVDERVRLLSALQSDLRAVSPGLVEITGDAGNLWFLRFLTCRDGLDRLVRVRRAGLLKVAGIGAKYADAVQAWQKRALFSPDVAWVGPMIQEDAARLLELNRRIKTMEGEIARVSSAMARRLRSMPGFGPICSTELAGEIGTIKRFRGEGSLALYLGMANLDRSSGTVRGSKAPKHVNKRAKAALMTAVDRHRKQVPQSQRYYEKKRAEGKTHNQAVRALGRHLCRVIFKMLKTDRSYRIDP

SEQ ID NO: 264049 - protein, 413 aa, unidentified
MKKNSNSQTKTGQKTKPAKARGPVQQESKEVMAELVAKLSERLEQKPTEEKAAEGKPQRAPAPNRDRLTVGVDLGDQWSNYCILGLEGETLGEGQLRTTREDLAAFFKALAAARVIIEVGTHSAWVREVVVGCGHEVLVANPRLMEGTKRRKRKNDRLDANKLARLGRVDPQSLFPMEHRSTEVRQDLVVLRARDAMVSVRTQLINATRGLVKSMGARLPKCSSPSFPDKVEEALPAEVREALLPLVRLAAAVSDCIQVYDERIEQLGREKYGHSELLRQVKGVGPLTSLAYVLTLEKPDRFAKSRDVGPYLGLAPQQEDSGDSQPQLGISKTGDVMLRRLLVGSAHYILGPFGPDTDLRRYGLRLCDRGGKNAKKRAAVAVARKLAVLLHRLWISGEVYEPLRQDAPTAEAA

SEQ ID NO: 264050 - protein, 381 aa, unidentified
MKKDNKAQATTKKPRHRRRSKRNPTNFCLSAVPPSQTVGMDLGDKTSRYCVLDQAGAIQKEGSTPTTKKGMTQTFAQMARSRVSIEVGTHSAWVSRLLASFGHEVIVANARRVRAISDSNCKDDRMDAQLLARLARVDPALLYPIRHRGQQAQQHLAMIRARAALVDSRTALVNTARGLVKSFGERLGKCDTDQMGVEKLSPLPAEEQAALRPLLETVEALTEHIQEYDQQIAEIARKHYPETALLQQVSGVGQLIALTFILTLEDKDRFERSRDVGAYLGLRPKRKDSGESQPELSITKEGDVYLRRLLVQGAHCILSVRGPDTDLKRWGVKLAGRGGKKAKKKAVVAVARKLGILLHHLWATGEVYEPLRQSQAQAAVA

SEQ ID NO: 264051 - protein, 348 aa, unidentified
MAHFVGLDVSVKETSVCVVDDAGKVVLEQKVPTEPSDIIDLLTSLGATYGRIGIEAGPLSQWLFNALTAAELPVICVETRHMKALLTAQQINKTDRNDARGIAQMMRVGLFKPVHVKTLVAQEQRMLLTSRKLLQRKLLDVESDLRGTLRNFGLKVGVVSGGRYEARVRELVAGFARLAAIAEPLLSVRRVMRQQLAVLHKMLLDTVRDDPVCRRLMTAPGVGAVVALTYRATVDQPQRFVHSRAVGAHVGLTPKRYQSGEIDYDGGVSKCGDALLRTMLYEAAQVLLTHGSKWSWLKAWGMRVAQRRGIRRAIVAVARRLAVVLHRMWVDGSEFRWSKDSTAAPTVA

SEQ ID NO: 264052 - protein, 345 aa, unidentified
MDQISRIGMDTSKHIFQLHGVNAAEAPVLRKKLRRKEMVTFFEKLAPTVIGIEACSASHQWARLLQSFGHSVRLIAPQLVKPYVKRGKNDAADAEALCEAMSRPAMRFVPVKTAEQQAALMLVGVRDRLIRNRTQLTNAIRGYAGEFGFTAAKGKAHLDPLLERIQADESLPALARELFVAQAKEYAQLQAQIDEVEARLMAWHRADECSRRLAKIPGVGPIGAVLLKMKTPEPELFRSGRQFAAWVGLTPKDHSTAGKVRLGVITRAGDEGLRSVLVVGATAVIQHVRRGGRATCWLTKLLKRKSPKLTAVALANKMARIAWKLMVTGENYAAKSAPGALAGAG

SEQ ID NO: 264053 - protein, 355 aa, unidentified
MSQEKYIGMDVHQATISVAVLDSRGKLIMESILETKAATILEFLQGLHGSLSVTFEEGTSAAWLHDLLKPHVTRLVVCDPRKNALLKDGSKSDRIDARKLAELLRGNQLTSVYHGEHGMRTLKELGRSYVTITQDLVRVMSRIKALYRSWAIPCSGTSVYAPRHRAEWLDKIPEPGVRLRAERLYQQLDLLQPVRQQARRDLLTESRKHHAVKLLRQIPSIGPIRAALLVAQLQTPHRFRTKRQLWAYSGFALKTHDSGEYRYVRGKLQRNQERMTVRGLNNNHNPDVKNLFKGAAISASTHPGPLYDFYIALLEKGMRPTMARLTLARKIASITLTIWKKGADFDATQLHRQEA

SEQ ID NO: 264054 - protein, 415 aa, unidentified
MKNRNSKTKSDRAAKPGKARGPIQRDAKEVMAELVAKLSETLASRPALASAGGKREAGVAGPNRDRLTAGVDLGDQWSNYCILGLEGETLAEGQLRTTQQDFAEFFRSMAAARVVMEVGTHSAWAREVVAGCGHEVLVANPRQMDGPKRRRRKNDRIDAHKLARLARVDPQSLFAIEHRSPEVRQDLVALRARDALVAVRTELINATRGLVKTMGGRLPKCSSDSFPHKVEEALPAEVREVLLPLVRLVETLSGCIAGYDQKIEKLATEKYADTELLRQVKGVGPLTSLAYVLTLEDPKRFPKSRDVGPYLGLVPRQEDSGECQPQLRITKAGDVMLRRLLVGSAHYILGPFGPDTDLRRYGLRLCERGGKNAKKRAAVAVARKLAVLLHRLWVSGEVYEPLRQSLPARTEQEAA

SEQ ID NO: 264055 - protein, 350 aa, unidentified
MIIIGVDFHPEFQQIAWVDTDSGELEERQLRHREEAEAFYRGLVTEGKKVRVGMEASGHARWFERLLGELKFELWIGDAAEIRTKRVRKQKTDRQDAQLILKLLLEDRFPRIWVPSWENRDLRQLLWHRHRMVQARTRIMNQLQAVALNEGLRCKKRLWGERGRQQLESFRLAPWASRRRRDLLELLDRLNPTIAELSQAIEQEVERCPEAQRLMTHPGVGPLTALAFVLIIGKAERFQCGKQITSYLGLVPLEESSGNRRRLGHITKQGSSILRFLLVEAAQVTVRSLPEWRSKYFHLMMRRGRKIAKVAMARRLAVRLYWMMRQGWDYQQWVKFGSHAGQPENRHGVQ

SEQ ID NO: 264056 - protein, 341 aa, unidentified
MLVAIDADGRTSGSRTVANTPEGWAVALRWARGQQQHVRWGVENSGSLGKGFAQFLLAQGEVDVREVVPHRTAQYRRRGRTQDKTDAADALAMARLLRAEGESLPVVQADDHSTELRLLSDHRDNLVADRTRLINQLHAQMLQLDPGYAARSGPLTRAAGIRYCHDLAVPQPGGVVQARLLVVRQLAERLLQLAADIAAATAALEQRVRALETPLLAVRGVGAVVAARLLGELGCTPRVHSAAALAALAGIAPLTVASGGRHAHRVNPGGNRRLNRAIHVVALTQRRCEPLAQAYYEKKRAEGKTARAAMRCLKRRLVDVLFRRLQPAPSTLPAPVTAVAA

SEQ ID NO: 264057 - protein, 356 aa, unidentified
MSHDVKYIGMDVHKEAIVIAVLNGSGKLVMETILETKASSILQFIHGLRGELHVTWEEGTWAAWLYDLLQPQVQQVLVCDPRRNALLKEGSKSDKVDARKLAELLRTGMLRPVYHGENGLRTLRELARSYQTISKDLTRVMNRLKALYRGWGIPCAGTQVYAPRYREEWLSKIPQVGVRRRAELLYQQLDGLQALRRNVRGEFLAESRKHKAAKLLRQIPCIGPIRAGLLIALIQTPHRFRSKRQLWTYSGLGIETHDSAQYRYVGGQLQRSKKPQQLRGLNQNHNHGMKEIFKSAATRASCGTGPFRDFYAALLDKGMKPEMARLTLARKIAAITLTLWKRGERFDAEQLKTQAA

SEQ ID NO: 264058 - protein, 311 aa, unidentified
MKLYCGIDLHSSNSVIAVLDEQDRPVYEKRLDNDLDEILEALKPFKDEIVGCVVESTYNWYWLVDGLMEAGYRVHLAHAGALPQYAGLKYSNDITDAGYLAQLLRLGILPTGYIYPKQERALRDLLRRRLLLVRQKTLHHLSLQSLIARHSGQWLNANAIKKLEQEQLSYYLDSPILLGGEITHQARCWLDGAIARIERELQKHIQPRQDYRLLQSMPGVGPALGTTIALETGTIARFPSAGNYASYARCVKSEKISNGKYKGQGNKKNGNKYLAWAFMEAAHYSAIWNPQIKQYYQRKQAKSLVPVLLME

SEQ ID NO: 264059 - protein, 410 aa, unidentified
MEVIVERPAALDVHKAQVTACVRLPAGADGRVQEVAEFATTVRGLLTLHDWLCAHHVTEVAMEATGVYWKPVWAILEDDFELLLVNARHVKQVPGRKTDVSDAAWLCQLLEAGLLKASFVPPKPIRALRSLTRYRKAQVRERQREANRLHKVLEDTGIKLGCVASNVLGVSGRAMLDALVRGTTDPAVLAELARGRLRAKLPALREALEGRFDAQHALLVGAILAHLDFLDEQIDRLSEAIGEALAPFAAAVELLRSIPGVERRTAENVLAEIGLDMTRFPSAGHLASWAGQCPGNHESAGKRRSGRTRKGSKWLNEALKEAAMAAVRTNGSYLQALYRRLRPRVGHSRALGAVKHSMICACWHMLSSGELYRDLGGDYFLSRDPERQTRRLVRQLEALGHTVMLQEPAA

SEQ ID NO: 264060 - protein, 356 aa, unidentified
MQPIRPDAVVIGVDTHKDVHVAVALSALGVRLGVTFAPATAQGYRQLETWAYAYGAVHAFGVEGTGSYGAGLSRALTAQGCRVVEVNRPNRQRRRQRGKSDTVDAEAAARAVLAGEADAPPKSGDGEVEMIRHLKIARDTALKCRTQAMVTLKTLLVNAPQLLREQFIAVTGRMTLVRGLAALRPGSMTSTTASAKTALRALARRWLALDAEISEHDAALETLVRRRAPELMEAPGVSTGTIADMLVVLGDNPERIRSEAAFAKLCGVCPIPASSGKTTRHRLNRGGNRRANAALYRVAIVRMRCHPPTLAYVQRRTAEGKSLREIRRCLKRYIAREIFQHLCAEQPRHQAAFKAT

SEQ ID NO: 264061 - protein, 314 aa, unidentified
MSTEYFVGIDVSKDTLDVCVYPTQDAFRVPNSPDGLDELTRRLKLIEPRLIVFEATGGYETLAVSSLAAAGLPVVVVNPRQIRDFAKSIGRLAKTDGIDAGVIAHFASAVRPELRPMKDSASQELTGLVTRRRQIVGMIVAETNRLQAATRRNRRDIQRHIRWLQKRQAQIDDEIKREIKNGPLWRTTDHILQSAPGVGPATSSMLISCVPELGQLNNKKIACLIGVAPLNRDSGRYKGRRTIWGGRAQVRSVLYMSALSAIQYNPVIRQFYQRLTEAGKCFKVAIVACMRKLLIILNAMVRDQTKWRHCENNG

SEQ ID NO: 264062 - protein, 388 aa, unidentified
MTQVDDLSRSLIAFEQNSTMVVVLEMSQSSWLAAGVVPGIERRPLKKLDPDPTTLLRLVEGWRDHAMKAGRMITRIVLAFEAGRDGFWLARWLRARSIEPFVIHSTSVAVSREHRRAKTDRLDTEMLIRVFLGWLRGEPRHCKMVAIPTLEEEDARRPSRERESLISERTRIINRMKAALIRLGIRGFKPELLKAPQRLEAQYTAEGVPIPPNMLDELRRDMARLAWVRQQINAIEQARLERLEQAPSTGPHAMVRMLASIIGVGVETADMLVQEILSRNLRDRRAVARYAGLTGSPDESGVKRREKGLAKAGNARVRRGLIQLAWRFLRFQKESALGQWYRARTEGAAGKRKTTMIVALARKLLIALWRMVTTGEIPAGVALRTAAA

SEQ ID NO: 264063 - protein, 347 aa, unidentified
MSYFAGIDLHKRYLTLCVLDPEGNAVVQHRRLTTDGLFAVLGELDGPMTVAVEATLHWAWLHDRLIEHGYAVQVADPGQVKLICKARCKTDPIDAKKLADLVRSNLLPAIWVPDPATRANRKLLRGYAFLVRIRTRIKNRIHAYLAEINLASPATDLFGKQGRIWIDSLTLPDEVRFQVDGLLELLDSLEVRIRKVDKRIEQRVDMTPEAQLLLTVPGIGAKTAMLIMAEIGNLTRFPTSHHLTSFAGLVPTTRSSGGKTTHGSLPRAGSPWLRWALVETTQTLKMKPGPVRAHFTRLTRAKGNSKATVAAARKLCCYLFWMLKEKRTYSDWLQNRHSQPLLEVRPT

SEQ ID NO: 264064 - protein, 352 aa, unidentified
MNKQLENEIILGVDTHLDQHVGVIINGYGKYLDNISIETNSSGYQKLLKWVQSFGILQRAGVEGTGTYGAGLARFLTEQGVEVLEINRPDRSMRRFKGKSDPTDAESAARTVLSGNACPIPKLQSGAAEAMRIVSVARRSAVKARTQTINQLRGLLISAPDKVRSKLWRTKPAECVASCAHLRTLGESKWLITLATTLRLLAKRWLYLSAELKELDETLEHLTAQAAKRTRQQFGVGPQTAAILLAVAGDNPERLRSEAALASLCGVNPLEASSGKTVRHRLNRGGNRAANNALWTIAMVRMRSDPRTRAYVARRTAEGKSSKEIHRCLKRYIIRELYPLILADLNDSVLVA

SEQ ID NO: 264065 - protein, 348 aa, unidentified
MAHFVGLDVSVKETSVCVVDDAGKVILEQKVLTEPDAIIALLTSLGVTYGRIGIEAGPLSQWLVNALTAAELPVICVETRHMKALLTAQQINKTDRNDARGIAQMMRVGLFKPVHVKTLVAQEQRMLLTSRKLLQRKLLDVESDLRGTLRNFGLKVGVVSGGRYETRVRELVAGFPRLAAIVEPLLSVRRVMRQQFAVLHKMLLDMVRGDPVCRRLMTAPGVGAVVALTYRATVDQPQRFVHSRAVGAHVGLTPKRYQSGEIDYDGGVSKCGDALLRTMLYEAAHVLLTRGAKWSWLKAWGVRVAQRRGMSRAIVAVARRLAVVLHRMWVDGSEFRWSKDSTPVPAVA

SEQ ID NO: 264066 - protein, 374 aa, unidentified
MSAGRKFIGLDVHQDTIAIAVADEGNEKEVRFFGTIANRPEALHAALKRIGQDVSELRVCYESGPCGFVIYRYLIRIGVECMVISPSSMPRRPADRIKTDRRDAQTLARLLRAGELIAVWVPDEAHEAIRDVVRARRQAKNDLSAAKTALKSFLLRHDRRFTGKAIWGKAHWRWLSDQTFDFPHQQFVYEEYKRRIHELEDRCDRLNEVLAQAVSGWALAPLVHALQALRGVKLTAAVTLVAEIGDLHRFDSPKQLMAWLGLVPAEHSSGKRIKRGEITRTGNAAARTMLIESAWHYRFPAREGLALRRRNVEIPDHIRAIAWKAQVRLCAKFRRLAAAGKQTVKVVTAVARELAGFIWDIARHTPVVAVPVRG

SEQ ID NO: 264067 - protein, 418 aa, unidentified
MKKHSKSSQRSEPTLKRTKARGPVQRDAKEVLAEVLGKLTGKLDAPAVSSNVKESRRGNTVGPNRDRLTVGVDLGDRWSQYCILGLEGETLAEGQLRTTQEDVGEFFQAMTAARVVIEVGTHSAWVQDVITEWGHEVLVANPRLMEGSKRRKRKSDRIDANKLARLGRVDPQSLYPIRHRSREVRQDLVVLRARDALVSVRTELINTTRGLVKSMGTRLPRCSSPSFAEKVKDAIPVEVGEALLPLVQLTETVNDCIARYDQKIEELGQKKYGHTTLLRQVKGVGPITSLAYVLTLEDPQRFSSSREVGPYLGLVPKQEDSGDSQPQLGISKTGDRMLRRLLVGSSQYMLGAFGPDTDLRRYGLRLCERGGKNAKKRAVVAVARKLAVLLHHLWVTGDVYEPLHHTGVETRTAQATAA

SEQ ID NO: 264068 - protein, 315 aa, unidentified
MEQSPIAPSFVGIDVSKDRLDVHVCPTGHAFAVMRDSRGLEQLVNDLRRLAPTLIMLEATGGFEITVAAALANAGLPLAVVNPRQIRDFARATGRLAKTDALDAQIIALFAERIRPEPRPLADADSQSLAELIARRRQVVEMLGMETNRLHQARNPRVQRMLKATLKTLKAQLAELDRDIDDTIKRSPIWRAADDLLTSVPGVGDVTAHTLIADLPELGQLDRRRVAALVGVAPINRDSGQMRGRRTIAGGRIEVRNALYMATLSAIRWNPVISKHYQSLVERGRPKKVALVACMRRLLGILNAIIRTNTPWRCA

SEQ ID NO: 264069 - protein, 347 aa, unidentified
MLLGVDAGTGEVSRSKRINASDDGHRDAVRWARELDSERVWAIEDCRHVSRRLEQALLAAGERVVRVPPKMMGQTRRAERQSGKSDEIDALAVARAVVKDGVERFPSAYLDERAMEIRLLSDHRDQLVTERTRIQNRLRWHLLQLCPALEAQLPQAGLTRQAVQERIARRLRTFGDDTRARVAREQLSRVRALTHQINGLERELQRLVAAHRPALLAEQGCGALIAATLIGRTAGAERFPSDSHFARQAGAAPIPVSSGRVDRHRLHRGGDRQLNRALHMIAITKARIDPETRAYVERKRAEGKTRREALRCLKRHLARKIHRLLAMPAADPDPAQFNIAISGRCLT

SEQ ID NO: 264070 - protein, 385 aa, unidentified
MSPTIIGIDPHKESWTAVAVDPRGQRLAALRAPVTRTGYRQLRRFADRYPEPVWAIEGAYGLGAPLSALLAEDGVTAWDVPAKLAARVRVLSTGHGRKSDEDDALSVAVAATTSTRLRPVRADAASTELKLLTEHRDDLVRTRTQTVNRLHAIMTLLVIGGAPRSLTADTAATLLRRVHPAESVTMTRRLIAVDLVAEIRRLDKRISTATEHITTQVTRAETTLTVIPGIGQLTAGKILARTGPVTRFANEAHFAAYAGVAPREVSSGDVIRHRLNRGGDRQLNYALHVIALTQISMKSSPGRVFYDRKRTEGKSGKEALRALKRRLATVVFRILLADHARVAAGPAGQSGTTLKSSATGSHPDTSSSDKSLTGPTTNELIYVTT

SEQ ID NO: 264071 - protein, 431 aa, unidentified
MEQSTRFIGMDVHKDTIVVAVTATGDIGKATAYGIFPNTVAALEKLVRRLRQAGDGPLKFCYEAGPCGYGVHRTLTTLGEDCVVVAPSMIPRNSGDRQKNDRRDAASLAVLHRGGLLTAIWVPDTAHEAMRDLIRARLAAVRAVRAARQQLSAFLLRHERLYPGNRKPWTKAHRGWLADQSFAQPAQQIVLEESIDAVRLGEQRRDRVDDYLRAQIPNWSLFPLVRNLCALRGLDTIASAGLAAAIGDPSRFASASNFMAYTGLTPSEHSSGTQRHLGAITKTGDVHARTLLIEAAHSYRFPARIARHKLAAVDAVPDAVRVIAWKAQTRLCQRYRRMMAKGKPRQLVVTAIARELAGFVWAIACITSDAPAKTPASEDVGPTSRRTIIVSSRNGSERRSEAARPAMRNGDARHRQLAEPEEMIAQHRSTC

SEQ ID NO: 264072 - protein, 408 aa, unidentified
MNAVGIDVSKGKSMVAALRPMGEVALLPQEFLHTGVGLEQMAYAILALGEDTRVVMEATGRYHEPVAAALHEYGIYVCVLNPLLIKQSGGGSIRKVKTDKADAMKIAKYGLDNWVDLREYTPMDTVRQQLKLCSRQYNLYMKTVVSLQNNLISLTDKTFPGVNELFSSPERADGHQKWVDFVMTFWHCDCICRVSEKAFTERYQKWCKRKGYHFSVKKALEVYAGSCGHFTTLPKNDNTKLLITTAAQQLLAGKTTLAALRAEMTRLASQLPEYETVRAMYGVGETTAAQLMAEIGDVRRFPRRSSIVGFAGVDPAVDQSGKHETQSTSTTKRGSPHLRKTLYQIVCTYLRKAPTDEPVYQFLDKKRAEGKPYFVYMTAAQNKFLRIYYARVKECLEAFDAQQDTLQG

SEQ ID NO: 264073 - protein, 345 aa, unidentified
MEIRTIGIDLGKTVFHLVGVNARGEVVVRKKCSRTQLLRFTSNLPACLIGMEACGGSHFLGRALREQGHDARLMPAQYVKPYVKTNKNDYIDAEACAEAVTRPRMRFVPIKSEDQLDLQSLHRVRERWMMRRTAVINQIRGMLLERGITIAKGRRHIEQSLPGILEDADNKLSGALRVLLSELRREMQYLHRQIEESNKLIDRIVGELEQCKHLVTVPGIGPITATATVAAIGNGAAFKRGRGFAAWIGAVPGERTTGGKQKLTGISRRGNKYLRKLFVQGAHAVLLHRTKQDPGLSMWLAKLVSRKPPQVATVALANKMARIAWAVLSKGEAYRPPLAAQAAAA

SEQ ID NO: 264074 - protein, 361 aa, unidentified
MKRVQSNKLDFSGQNIYVGIDVHLKSWSVSILSEHSVLKRFSQGPEPEALHKYLVSNYPGANYFSVYEAGFCGFWIHEKLMDLGITNIVVNAADVPTMSKERLRKTDAVDCNKLARELRSGSLEGIYVPKADVLEMRSLIRMRNLIVKDSTRAKNRIKSLLRFHGVEIPEEFTRCSIGCWSKRFLTWLHSLELLTEYGNKTLGLHLEQFVRLRMMLLQETRAIREISRKAPFEKPIRLLTSVPGIGVTTAATLMVELDDIVRFKNADHLASFIGLVPMCHSTGEHDGTGDITVRRHFMLRCLLVEAAWVAIRKDPAMTVAYTEYRKRMNPQQSIIKIARRLVNRIFYVLKHGKEYVACVVK

SEQ ID NO: 264075 - protein, 412 aa, unidentified
MQDILTCVMGLDVHRDIIVACLVKGAVDAEPEAETRTFSTLIPEMQKLRDWVIEAECRNIAMESTGIYWQPIYEMLESCFDGEISILVVNARHMKNVPGRKTDMKDAQWIATLLRAGLLKGSFIPDKTFRELRHLTRYRKSVVHDITAQKNRIDKFLQSSGFRFTAFLSDTFGASGRNIIRHLIERGSIDREALDKCLKTKTRNRIDEILVALNGSFSVHQRRFLNIVFLHLEDLEAHKHTIEDEITEEVLKHTDALNLLCSIPGIDVTAAAAIVAEIGTDMSAFPDSQHICSWAGLSPGNNESAGKRKSVHINKGNPYLKSMLCETAWIMASHRKLYLSGWYWKVKQRKGAKRATIALARKVLSIIYTMLKTGTPYSEECFEQRRQRCERKRANRMVNELQKLGYTVVAPD

SEQ ID NO: 264076 - protein, 418 aa, unidentified
MNEELIARLSRRYLALDIHKHYSVVAGVNFEGQVVLEPVRIEHGDLEVWLAKNIQPTDFVVIESTTNAWHIYDLLEPLAEKVLVANPIKVKQIAQARVKTDIRDTLILARLLAANLVPVIWVPPAHVRELRYLLSQRRHLVGMHTATVNRMHSVAHRHHLNHPRGKRFNQQNTKWQRDNVLSDSEQFQLELDMNTKKHLAEQTEKITERLRRMSHQKPWAKDMMYLIQLPGFGVITGMTVLSAIGDITRFKDFKKLSSYSGLTPGVEQSGIKNRGKKITKEGRKDLRWAMVEVARRAVKSDPLWTHRFIELCRRMHKNQAIVAIAHRLLELVWYVLSRKQAYRNFSDERIAYKYLTWSWQLSEKDRDGLTRQQFTRYYLMRLGIGHDLERIALNPRYPRRLASEAEVLALRPELKQTE

SEQ ID NO: 264077 - protein, 336 aa, unidentified
MNQYNSHLGLDISKDKIDCALIKDEAPTAHKIIDNNEAGFTELQSWLAEQQVEPDKLHVCCEATNVYYIPIATHLNQSQVAISVINPSIIKSYASLKLKRIKTDKQDAKLIAQYCRAENPNLWQPEHKNKAQLKSLCRRAEQINQLLTMEKNRAHVADEFSQASIARTIEWLEAELETCRESIQNLIKQDETLKQQQKILMSIVGIGQTTAQVLLSVLVDIDKFPTAKKLVSWLGLSPVIRQSGKHKGLSKLSKMGDKSIRKALYTPARVACTRSKLWRAWFDEKAKTKPVKQVYVLMMVKLVKYAYYCIKRNELFDEKRHVRAERSWKTVKGEAL

SEQ ID NO: 264078 - protein, 348 aa, unidentified
MKHYVGLDVSIKETSVCIVDENGKLCRERKVASHPDHLVAILNDPALNLDRIGLEAGPLSQWLFDGLAKAGFPVVCIETRHTKAFLEALQQNKSDRNDARGIANMMRVGLFKDVHVKTLGGQKRRALLTARSLLQEKAIDLENEMRGLLRNFGLKVGQTSGGTFERRILELVENDAELVEIMQPLLDGRRKLREGLAKLEKRVRSEAKNDDVCRRLMTVPGVGAVVSLAYVATVDIPTRFRHSRSVGAVLGLTPVLNQSGEVSRVRHVSLRGDAMMRRLLYEAAQSMMTRVVKWCWLKAWAMNVAKRHGSKKAKVALARRLAVVMHRMWVDGSEFRWTKIEPPTSVAA

SEQ ID NO: 264079 - protein, 368 aa, unidentified
MPRLAFASRLRNLNQENPMNISHYIGFDVHKKSVSYCVKAADGKIIEEGRLRATRQVLREWAQKRQEPWHGAMEATLFSGWIYDALKPFAAELQMGNPSMMKAIGAAKKKNDQLDARKIADLVRCNLLPACYVAPVEMRELRRLLRYRNTVVAHAVRMKNKMSGLLMEVGVEYSKQQLHGKKYFTELMGQLEEVPESVKDMLRLSRSALEMFETTQRQLLNRLQKEPTLVKRLELLRSIGGVGEVTSLTWALEVCDPRRFPSIGDAVSYCGLTSALVSSADKQQRGPISKQRNAHLQTVLIEAAKLAPRWNKQLAELHERELKRGNRNRATLAVARKMVAYLLAVDRSGKPFEVRNSPTKEMEAEKVA

SEQ ID NO: 264080 - protein, 338 aa, unidentified
MFIIGIDPHKGSHTAAVLDRSESVIGELRVVADRRQRERLLCFAADFTPRTWAIESASGLGALLAQQLVAVGETVVDVPPTLSARVRLLDAGCTDKTDPHDARAAAIVALRHTRLRRVLAVDHTAVLRLLADRHHDLTGLRTQAICRVHALLCGLTPGGAGRLLSASQASRMLRGVRPMGPVELERKRIALELVGDVHRFDNQLLAINQRIAEAVVASGTTVTDIHGIGPLGAAIILGHTGDIARFPTGGHFARYTGSAPIAASSGPKQRHRLNPRGNRQLNRALHVAAVTQVRNDTPGRAYYRRKLDEGKSRKEALRALKRQIAKTVYRHLVADAHH

SEQ ID NO: 264081 - protein, 431 aa, unidentified
MEQKRHPYLSVGIDIGADFSLMAIALPTQEIIGKPYKILHSNNRSVQGAVERILSMEQAYELPVRVYMESTGIYHLPLYHRLKNAGLDVYVLNPLVTHANQNINIRNIHNDKLDARRIALLGLRPDLKTSIVPADDVAAVKALLREYHAMKKETSMYICRLKNQLRQIFPQYLPLFSKVNGKASLEVLSHYPSPSAVLSAGADALAKLIQEASGKGRTMAEKKAEAILSAARESLSFGHGNSGITFLIGHYVEMIRILDEKTAAILKQIKRSVQEQPDSLLARQTRLLESIPGAGFLTAVTIVCEIGDFRAFRRPKQLYSYFGLDPVVRQSGNSAGANLRISKRGSPYARRCFYILALQSVSLRKNGEPKNHVLRTYYLEKCKSKAKMTALGAIMHKLCNIVFAVLRDERPFVLISPQEHRQNYLSLPKAA

SEQ ID NO: 264082 - protein, 338 aa, unidentified
MEHIAAIDLHSNNGYYGIIEPDGKRVLEKRLPNDLPMVLEVFEPYRKTLRCIVVESTFNWYWLVDGLMKHGFKVKLANPARFAKYNDLKYADDKTDTFFMTEMERLNILPTGYIYPWEERPVRDLLRRRMLLVQQRTCHILSFQSLIHRQTGNGISSREIQNIDQAALAKLLTDDYNQFAGQTNIDMIECLTGHIRQLEQKILQRARLRPEYEILQSTPGIGKILSLTIMYETGDIKRFADAGNYASYCRCVKSNHMSNSKKKGQGNRKNGNRYLSWAYVEAAHHAQRSCEAVKKFYQRKLAKRNAPIARKSLACKLCKASYFIIRDQVPFDMQKMFG

SEQ ID NO: 264083 - protein, 420 aa, unidentified
MIPAVIERCAGIDVGRKFIDVCVMVGDAPAVPTEEIRRFSTLNEDLERLRVWLQERGCTHAVMESTGSYWRPIYNILDDGHLQILLANPQHVKNLRGHKTDRNDARWLAHLLRHGMIRPSFIPGRETRELRDLTRRRKQMVGCAAEERNRVQRVLQEANVQLGIVLSDLFGESGLSMLDALMNPDASAGQIAELAVKQARKKIPQLRKALEGHRMTEHHRRLLRHSMEHLAFLEEEIADLEKEIAEHVQANAGLRAASELAQSVPGIRQTAAAAIIAETGADMSQFRNGGKLASWIGTCPGNNITGGKRKSGQTRKGNPWARQVLVECAWSATRKKDSEPQRYYERLKVKHRHKPALVATAHLLTLNLYDALASGKPYMEDPQKELTPAKTQRLVRHHSRRIKHLNHWLAGHQQRCTPSS

SEQ ID NO: 264084 - protein, 407 aa, unidentified
MEVMYPRCAGLDVHKDTVVAAVRCVSEPKHSEVRTFSTTTRGLLSLAEWLSSHGCTHVAMEATGVYWKPAWHILEGDFELVLANAQHIRNVPGRKTDVADATWIADLLAHGLVRGSFVPPAHVQELRDLTRTRKQLVREVSQHTLRIQKVLEDANLKLASVLSSILGKSGRAMLEAVIAGESDPETLAKLAVGAARKKHADLVDALRGRVTPHHRALLRLHLRLIDSLNAALQEIDASVGKALAPIRQSAKLLTTIPGISDVAASVVVAEIGTEMARFPSAAHLVSWAGLCPRNDESAGKRRSTRLKKGAPWLKTVLVTAAWAAVRTKGTYLRAQFLRIKSRRGAKKAIVAVAASILTACYHMLRNGVEYRDLGATHFDHHDKTKTIGRLVRRLRDLGCDVDLKPAA

SEQ ID NO: 264085 - protein, 417 aa, unidentified
MIDDVQWFVGIDWATQSHRACLLDVEGRHVSEHDFAHDGAGLTELRDWLLEKTKAAPGQIAVAIETPHGPVVEMLLDHAFLVFAINPKQLDRFRDRFTVAGAKDDSRDARVLGSALRTDRQAFRRLVVDDPVVIELREWSRMADELQQERIRLANRVRQQLWRYYPQAVELTDDVADDWFLALWQQVPTPATAAKVSAKTITRILKDHRIRRLDAATVLLTLRKTPLFVAPGTTEAACAHIRNLAARLHLVNQQIKEAHRALDGLCAKLEARESPSGQNREQRDVTIIRSWPGIGRIVLATLLTEATEPLRRRDYHALRALAGTAPVTRRSGKQCFVIRRLACNKRLQNAVHHWSRVAIQHDTAARRRYDALRRRGHGHARALRTVGDRLLHALCAALKRQTTYNPNCQTAQMTASL

SEQ ID NO: 264086 - protein, 310 aa, unidentified
MQVEPSIIGIDVAKAELVIYFLGQTYSIENTPQAIRAWLKDLPSLCEIAIEATGTYHMDVIELAHRKGHHIYVIDGSRLHHYRKGTGGRAKTDASDAQLLARHLQHEKGALRRWSPPPKAYRTLQTLLRRRAALVKARTIIQQSLGAEPLLKAGLKRLISQINTLDAQIQKHLRDTVRDAGLSEQVQRCKALEGVGDLTAYALVMAFLRGDFRNSDAFVAFLGMDVHVRDSGTKTGKRKLTKKGDSEARRLLYCAAMAARRSKRWAGVYQAYLDRGLATTQALVILARKLVRIAFALMKNGTDYQPAPAS

SEQ ID NO: 264087 - protein, 348 aa, unidentified
MTVAIVETRAITGGVDTHADVHVAAALDPVGGLLGVEEFPATPAGYARLLGWLGGFGTVCLVGIEGTGSYGAGLSRHVTGAGVRVVEVDRSDRQDRRRQGKSDPLDAVSAARAAQSGRARGAPKGRDGTVEAIRALMVTKRSAAGERTQTINQARALVLTGPDELRARFGGQTPAALVAGLASLRPRPGDVVGYATRIALRELGRRAEFLDGQIERLDELIVPLVAARAPGLLALYGIGPNTAALLLIAAGDHPGRLHSEAAWAHLCGAAPIPASSGKTVRHRLNPGGDRQANHALWRIVFTRLGSHPATRAYAERRTQQGKSKAEIIRCLKRYVAREVYHCLRPPAG

SEQ ID NO: 264088 - protein, 355 aa, unidentified
MSASASVVIGGVDTHGRTHHAAAIDETGKILGTAEFGAGSAGYRELLSWLRRHGRIERVGVEGTGSYGVGLSRHLLSEGVDVIEVDRPDRRMRRRRGKSDPIDAEAAARSVLSGTAMAVPKDRGGIVESIRVLRVARSGAVKARTAALNTLRTTVVTAPDVLREQLRALSSARLVDACAAMRPDRERLADSVQGTRLALRALARRVAACDAEVAELDRSLSHLVRRAAPETINRIGIGVDHAGQFLVTAGQNPERLHSEAAFAHLCGSAPIPASSGRTQRHRLSRGGDRQANRALHMAVIVRMRRCPRTRAYVERRTAEGLSKPEIMRCLKRYLAREIYHSLRADLTALGGLDAI

SEQ ID NO: 264089 - protein, 402 aa, unidentified
MIYAGIDIAKSSHVIGAVDERGKDAAKPMQFANSAEGFGKCAAYLEGLGAPAEEMLVGMEATGHYWLPLFSFLHAQGYDVVVINPIRTDAMRRFKGSSRVKTDLVDCILIADTLRLGEFRPSKLGDESMVELRQLTRLHQGLKESVADLKRQVIVALDQVFPEYDSIFSDTFGESSKAFLRKCPTPEECRGVRVDALGNTLSRASRGKLGREKAEEIKGIAKESCGIDRGARTLSFQIKLLVEQIDFIEGQIEEVEARIEEGIETTEPLILTIPGIGHILGAQIASEIGDIHRFRNASAVVSYAGINPSVSQSGKFSSSENHITKQGSPYLRRALYLAATAQLRLSTPFRDYYDKKRADGKSHREALIAVARKLVHVIYAVLSKQEPYRPDAVNANPVSRSE

SEQ ID NO: 264090 - protein, 557 aa, unidentified
MKVMHERVAGIDVHKKMIKVAVRSPGARPWTRKTEVLTFSTFYGVLRQMARELRGRGVTHVVMEASGIYTEPVYYALLEEDFTEVLVVNPAHVKAVKGHKTDAKDCARLAELLECGLLQGSYIPPPELKEVRDLTRLRTKKVQARTSDIQRLGKTLESAGIKLGSVASEITGKGPTAMIEALIDGERRGAVMADLAIGRARAKMADLAMALEGRFTDHHAMMCRLHLDAIALHDAGIADLDTRIAAGAAPWRRETDLLKTIPGFGDTVAWTWIAEIGPAPHEWFASEARLASWAGLAPGNYVSAGKRGYGRTSEAGTYIKPVLVQAAWSAVRTPGRLQARYTRLVRRMGGEKSPAAKKKAIVAIAHTLLKIAYSVLRAGTPYQDLGAGFYTRRQQPAHRQAWLEKQLRSLHPGCTVTVTITPPAEGPPPPGHVPEAVLPEARPPADGSAAGYCRVPRGTPFSCQAVASVSSTVRPRAWSWRTWARILRSRSALLSCQPGPRSANRAPGSDSRCQMMTRMDLATAHLALFPPRRLDRRPIRSPRNVPVPAAPVAAWVQ

SEQ ID NO: 264091 - protein, 429 aa, unidentified
MQNESTPGARGPVFCGVDTHADSHWLCVLDWRGRKVLSRRFPADAAGYEALAGAIAAAGEPACIAMEGTSSYGAGLTRHLASLGMPVREALSPARTQRRRPGQGKCDEADAERAARAAMSGSKLGTPKSQDGWVDGVRCMLAARSGAVKARTSAINTARSLLTTAPEGLRSRFRGMGGPRLMEELPSVRAEGALGAALGALADLWAAARDAALDMERAIEASLEENCPALLAMYGCGPVSAAKLAVAAGDNPGRLRSEASFAAICGACPIPASSGKTVRHRLNRGGDRQANSALHEIARQRVMRDPETAEYAERARARGKSDREVMRCLKRYVAREAYRALMRPHEVRRPEDASGLVAARRAARVSQVRAASILGTSEKYISMLERGQRELKPIRRAYEAWVEAGLPLDWDRQAFEAERKMDSKKHLAK

SEQ ID NO: 264092 - protein, 339 aa, unidentified
MKDIKILGVDIAKDVFQLCGIDEWGKVIYTRRVKRAQYVSTVASLKVGCVVMEACGGANHWYRTFMGMGISTQLISPQHVKPYVKSNKNDRNDAQAIAEAASRASMRFVRGKTVEQQDVQALLKIRDRLVKSRTALINEIRGLLQEYGLTMARGAKRFYEELPLILASEAVGLTLRMKRVLNCLYTELLNRDEAIGDYEEELKAVAKANEDCQRVQSIPGVGYLTALSVYASVGDIHQFHRSRQLSAFIGLVPRQHSSGNKEVLLGISKRGNVMLRTLLIHGARALLRHVKNRTDKKSLWLKALIERRGMNRACVALANKNARIIWALLTRQETYRCGA

SEQ ID NO: 264093 - protein, 399 aa, unidentified
MKQFNPNEVKIESETALALLRQGQKPVNQYGSYVGLDVHKDSIAVAIASADGQPVRYLGGIANTPTAVKKLVGKLSSEGEVLAFCYEAGPCGYGLYRQLLSLGHDCSVVAPSLIPTKPGDQVKTDRRDSEALARLHRAGELTAVWVPGIEQEAMRDLSRAREDIKAIERQSRQRLSMFLLRHGKQYDQGKTKWTQTYFRWLETLKFDHAVQQIVFQEYVDVVKHQQARVTSLEREMTRALDDWSLAPVVEALMALRGCKLITAMTIMAELGDITRFDSPRQLMAYLGLVPREHSSGNRTRRGGITKAGNSHVRHVLVEAAWCYRFPARKTPHLQRRAECTPEKVQAIAWNAQKRLCGRYRHLTDRGLLNVKVCTAIARELAGFIWAIACEVRPTPEQAN

SEQ ID NO: 264094 - protein, 368 aa, unidentified
MNNDLGFDIWCGLDVGKQAHHACALDAAGKKVFDKPLPQDQTKLEALFTRLSEHGRVLVIVDQPNTIGALPIAVARSMGIQVAYLPGLAMRRAADLYPGNGKTDARDAFVIADAARTMPHTLRRVDLGEETLAELKVLVGFDEDLAAEATRLSNRIRGLLTQIHPALERVVGPRLATKQGLAVIEQLGGPQGMTAASKSKLLRVITKANPRHAQNFADAITQALSEQTVVVAGTAAAEQVLPKLAASLRQTLDQRSELAAQVEKVVDAHPLAEVLTSMPGVGVRTAARILLDVGDASLFPTAGHLAAYAGLAPVTHRSGTSIRGEFPARSGNKHLKRALFLSSFAALSEASGIHAAAYLGWPSVRRAL

SEQ ID NO: 264095 - protein, 348 aa, unidentified
MTIIGGFDLHRGQITFDYMDTETGEVSTGQIRPATRAALRGWLDKRFCGRNDVMLAVEGCTGWRFVVEEMQRAGVEAHLAEPADTAGKRGPKKRAKTDKADARLLRELLCKQDLPESWIPPQHLLEVRTLGRLYLSLAAQRRAWLQRIHAQVYHQGVAPIVGLLTCEGRDQLAAAELSAAGRQSVQTALSMIEALDQQIEPLRAQLKSLSDRLPGARALKAHYGIGPLCAVIIWAELGDCRRFSSSDQAVRLSGLDVSVWSSDRKRAPGHLARQGPPALRWALFEAAMCAARPGSPDYDYYKAVSDRLSSKRGALSVARKLARWCHHTLRELGEQAMAPPHEPKAQAA

SEQ ID NO: 264096 - protein, 344 aa, unidentified
MEHVQFYVGIDISQDDFACSILTSPDSPVQTLADIPNDISGFEKLETWIISNQVLSDNCVICLEATGVYGESLCYWLIGKGFNVAVEPPLKVKRAFSDKSHKNDKVDSRTIAEYAYRYFDELRLWRPKNEIVEHIKVLLMTREQFVKQKTALNNTLKALKKKVVQTPFANKIYENNINLLKKQIKDIEKEVQKHIDKHPDFKNTVLFLDSITGVGLLLAANFLVISNGFENELAINYRQAAAFIGICPYEHRSGTSVYKRPRIPKYGPSVARKLLHLAARSVITHNENFNRYFMLKLAQGKNKSLIINNVSNKLLKIMCAIIRTQRPYVKNYVSINPNSLLINT

SEQ ID NO: 264097 - protein, 312 aa, unidentified
MENEVFVGIDVAKDTLDVAATSGAKGSFPNTREGYEELERVVRPLSPVLVVFEATGGYELAAVEYLALEGLPVAVVNPRQVRDFAKALNILAKTDRIDAGVIARFAAAVKPEPRPLKDAEAQKLDALVARRRQLVEMIAAEKNRLPLAKEWVREDIVATIAWLTKSVEKINKEIGDLIKKSPLWHAREALLRTATGVGKVTAFSLLCDLPELGTLNRQKITALVGLAPFNRDSGKVKGKREIWGGRGHLRSVLYMAALAARRSNPLIKPLYDRLIAKGKLPKVALVACMRKLLTILNAMVKTNTPFQVRTCS

SEQ ID NO: 264098 - protein, 341 aa, unidentified
MEEVSIIGLDLAKRVFQAHGASASGTVLFRKKLRRDQVLLFFANQPRCRVAMEACASAHHWARAIGELGHEVRLMPPAYVKPFVKRQKNDMADAEAICEAAQRPTMRFVAIKSEAKQAAAAIFRVRDLLIGQRTQIINALRGPLAEFGVIAPQGPSPVQQLIAEVEDSASRVPDLARSSLLRLVEMLRQLQDEVIALDREIATRAKSAGVARRLMTVPGIGPVIATAIEALAPSPEVFRSGRDFAAWIGLTPVQKSTGGKQRLGRTSRRGERTLRRLFIIAATGVVRWAKRKGAPEGSWLATMLARKPPMLVIVALANKNARVAWALITKGGIYRAPTVAA

SEQ ID NO: 264099 - protein, 435 aa, unidentified
MSLFCGIDWATDHHDIAVVDHTGRLVAGGRVENTASGFEALLAMLADAGEDPHEPVPVAIETDHGLWVAALTASGRQVYPINPLAASRYRSRHVVSGAKSDAVDARTLANILRTDLPEHRPRSNDSELAQSVRVLARAQQDTIWNRQQVTNRVIALLKEFYPAALEAFAGLEGGITRADARMILTAAPTPAQAATLTPARLRKLMAKAGRQRYLDRDAGRLREVFTAEHLRQPAMIEEAMGRQLSALLGQLNAICTAVADLTEAVTETFHRHPDAKILTSFPGVGPVVGARVLAEIGDDRSKFDDARGLKAFAGSAPITRASGKKTVITHRHIKNRRLAAAGSIWAMAALKSSPGARRHYDARRAKGDWLQEAKRHLFNKFLGQLHHCLQTGQTYDETHAFPPPLVLAAWVKSKCVVCEDGHCAISSFRLSVQQR

SEQ ID NO: 264100 - protein, 354 aa, unidentified
MATDRYAGLDVHLESCTLAVMGSSGRRMFSRVLETNGRVLVDAVRGIGGRVHLCLEEGAQSAWLYEILEPHVEELVVTMPGESQGQKDDLRDAWARADEVRLGTFRTRVYKAPKHMTGLRSAGRAYRMATRDVVRVKNRLKAVLSSRGLQSDSSVYDPDARSQWLKQLPSGHRELAEWLGRELDELVPLRDEAEEWLHKEAKTHPIIRTLSTAPGLGPIRTAQLVAIVVSPHRFRTSRQFWSYCGFSIVRRSSSDWVREKSGQWVRGQVHQTRGLSRQRQPVLKAIFKGAATTVIMQLPNDPLHASYQRALKAGIKPNLAKLTLARRIAAIVLSMWKHEEVYDPERIKTTTDES

SEQ ID NO: 264101 - protein, 398 aa, unidentified
MKVSGLDVHKDTVFCAIYNGASPGEVKEFSTVTASIREMGCYLQEAGVEKIAMESTGIYWIPVWNILESMGFTLMLVNPYLIKQMPGRKSDVKDAQWISMLLHKNLLRGSLIPCKRIRELRMYSRKYIKLQQRMTSVLQEIERALEMCNIRITSFVANIESKSVLNVVKQIVQGESSPVRLVECIHGRILNKHGKKIKQSLEGFICEHHRFSLGLMLEEYELLLNQSNRCEEQMYKVCAEHYDQEMKLLQTIPGIKLLAAMLIIAETGADMKAFENSGKFTGWTGLRPRNDESAGKYKSTAITKGNRYLCALLVQVAWGAARTKGSFFKEKFNRLAIRKNRKKALIAIARKIAVVVWNVLYYQQPYNPGLLPIYDPDKLSAKINYHQKEFDRLQKLLK

SEQ ID NO: 264102 - protein, 343 aa, unidentified
MQIHSVGIDLGKTTFHLVALSAAGRVLLRKKFTQKQLITFTANMQISLIGMEACAGSHFLSRTLREQGHDVRLIPAQFVRPFVKSNKNDFLDAEAIAEAVDRQNMRFVPIKTDDQLDLQAIHRVRDRLIARRTSVINQLRAFLLERGMTFAKTPFKLKVAMPDILENAEANLTPRMRNLVSLLWSEWKDLEQQIVGMNQEIEQIASSDPACQRLRQIPGIGPLVATAIVAAIGNGAAFHKGREFSSWLGLVPRQHSTGGKARLFGISKRGNRYLRKLLVHGARSAVLRVKRERSPFGPWLDTLETRAPINVVVTAAANKLARIAWAVLSSGQDYRAAVNSVAA

SEQ ID NO: 264103 - protein, 359 aa, unidentified
MTKKISKKKINIKEKMISIGIDVHKTSWRVTAINAGEIILAITISKPNYSKLSKILARLEGNTVRVAYEAGPSGFDLYDKLTADGIECLVVPPSLIPTESGNRVKTDPRDSLKLARLLESNMLKKVWVLTPEERAHRQLVRTRRQISDHRCDVMRQIKSLLLFNSIDIPFESSRHWHTPFIKWLKSIEFGNQYLAHSLGALIDLYEYLTAEKKHLTQEVLQLAHIEKYARRVDLLKTVPGIGTLSAMEILVELQDINRFQTAEELASYLGLTPSQYSSGERVRMGHITHAGNDRVRTTLVECCWILIWKDPVMRARYENIKRRRGSKRAITAIARKLSACIRRILIDEVPYTVQLPKAA

SEQ ID NO: 264104 - protein, 374 aa, unidentified
MKKNSNGSEDKQRQARGKGSRGRRKVLDRKVLEQAVSIGIDLGDRRSRYCALNKDGEVIEEGEFANTRAGIEGLFAARKRTRVALETGGQSGWIAREISGWGQEVLVANARELRGIWGGPRKNDRRDAEKLARYARLDPKLLHPTRVRSAAGQRELSRLRVRDALVRTRTLLVNAARGLSKAHGERIGPVSTKTFARRARANLSTEIAAILEPLLEQIEVLSAGIAEADKAIEQAAKNNTEAARLTTVHGVGALTAFTFVHTLEDPGRFRDSRDVGAYLGLTPGQAQSGERDPQLGISKAGDVRLRRLLVQCAHYILGPFGRDSALRRWGLELARRGGVAGRNRAVIAVARKLAVMLHRMWVRGENWRPFPEQA

SEQ ID NO: 264105 - protein, 391 aa, unidentified
MIFVGIDVAKDKHDCFILNSEGTVLADVFTIANNRIGFETLLSRIQSCSQGESKIKVGLEATGHYSYNLLGFLLDSGLATYVINPLHTNLYRKSLSLRRTKTDRIDARTIAMMLMSDVDLKSYSNTAYHNEELKSLTRYRFDKVKERAKLKSSVARLVNILFPELEKLVSSLHIAVVYALLSNYPGASYIANANTEELAEILCTASKGRYTKSKTAEIQVAAGVSIGSKMPAKSMELKHTIALIRELDKEISEVESAIDKITSQMDSPIFTIPGIGRHMSAMILAEVGDFSNFASADKLLAYAGLSPSTYQSGQLQNCYAHMEKRGSRYLRYALFNAAKYVCLWCPTFSAYLEKKRSEGKHYNVAISHAAKKLVRLIFAMQRSGKAFLADY

SEQ ID NO: 264106 - protein, 389 aa, unidentified
MKIFVGIDIAKLNHFAAAISSDGEILIEPFKFTNDADGFQLLVSKLESFDKNSIIIGLESTAHYGDNLVRYLVAEFYQVCVLNPIKTCQMRKNNVRKTKTDKVDTFVITKTLMMQDDLRFITFFDLDMMDLKALGRFRQKTIKQRTRLKIQLTTYVDQVFPEIQYFFKSGLHQNAVYALLKEAPSPKEIASMHMTHLANLLKVNSHGHFTKEQAKELRVLAQKSVGANDSAISIQITQTIQQIELLDSQLEKIEAEMTDIMKFNDSVIMTIPGIGYINGGMILGEIGDIHRFSNPNKLLAFAGLDPSVYQSGNFQAKTTRMSKRGSRVLRYALVNAAWNVVRNNATFKAYYDAKRSEGRSHYNALGHCAGKLVRVIWKMLTDEVEFNLE

SEQ ID NO: 264107 - protein, 336 aa, unidentified
MIVVGVDVHKQSLTAVAVDEAGRALAELTAGSGGELLAWADSLESERLWALEDCRQLTRTLERALIGAGERLVRVPPKLMAPQRRAGRMRGKSDPIDALAVARAALREPRLDYPRPGEDRLRELKLLVDHRDDLVDERRRAQQRLRWHLHDLDPQLAVPPGALDRPIWLDRIGRRLARQEQTVQVRVCRELVGRCRSLTRTILALDRELQAQIDKTAALLALPGCGPLSAAKLLGEIGPIERFDTDAQLARHAGVAPLEASSGKHQRHRLDRGGNRQLNCALHRIAITQARMHPPARAYLERKQAEGKSRREAIRCLKRLLVRTVFNTLKTSPALT

SEQ ID NO: 264108 - protein, 400 aa, unidentified
MNRTRTVAGLDVHKDSIYLCIMGYDQAIIWENTYGVLTPDLRQMHHDMRAHGVTEAAMESTAVYWVPVWNELCESMELRLVNPYFIKQLPGRKSDVKDARWIAECLLKNLIKGSFVPEPIVQDMRKLNRRIMDLCEDTTYNSNKLDAALQRCGFRLSNYVATTKSKSYRSVLKAIIDGQTDPDELLRLVHGRILNKHGRERVKAALTGSFSETDLIVLRQLKETLDLIEKQTADCQQELVRLCKEHYPKPYERLQTIPGVKERAATAIIAETGVDMKMFATAASLVGWCGLKPRNDVSNGRFKSRKVTHGNRYLRQILIEIAWAASRTRNCFFSHFSYLQTTVKKKNKMKIQVAIARKILVAIWHMLSKEEDFIDIYLKRQEELKRTEGQIKLLESYMAD

SEQ ID NO: 264109 - protein, 324 aa, unidentified
MNYAALDLHERTVQCVLKDQDGRIVKESKTVKDEGRILAFLDGTDASVVMESGRNHQHIYDVLKERGYDVTVAHPLMVKAIAYAKVKTDKVDARVLADLLRADMIPESYVPGRDIREIRDLVRRRHYMVKLRTMQKNKVHAELATRWLKYEGDPFTEDGKIYLRSLAIDAVIDYLETIEFLNRKIHQLDEKVRRVVESDKSAKLLMTVPGISYYSALLISSEIADIDRFPDHEHLCSYAKLSPGVRQSGETRHTSKSMGNSMMNWIMIQCTRVHVRKYDSAITRFYQQVSKRRGEKVAIVAAARKLMRAIYIMLKEEQAFRLDG

SEQ ID NO: 264110 - protein, 402 aa, unidentified
MFYIGIDWADQKYDIMMLDQAGTMLSKLFTIKKNQSDFERFSDRLSKLSPSAQQCKIGIETPHNVIVDFLIERDYPVFALFPGAMKSFRKRYRSSGARDDQFDAFVLADVLRTDTRCWCKVDFGSQLVREIRVLAQDHHTVVEQHTALSNRLRSTLKSYYPEYQQFFSDVACPSSLAFIQAYPDFQSARQLSRQQLRQFFKEQQLHHNKKVDNIYQTLQQQPVTVPATLVRTKQLKALSTVQQLLAVIATIEQYEQQLQQLLSQHPDSEIFLSYPGVGLITAARLLAFFGDNRDLYQNASELQALAGTCPVTEKSGNYKSVYYRTACNKFFRDVMGNLAFASLRQAKWTLAYYQHHRKRGKNHQHALRCLSNIHVRVLFAMWKNRTQYDENIFLAQRARMLI

SEQ ID NO: 264111 - protein, 422 aa, unidentified
MISDRPVIGIDVAKDFCFYAAASPSGTPFLKPFKALNTKQGLLSALGQIKKVEETFSSKPVISLESTGHYSARIVHFFIKQGFEVYLINPLISHSIKNSVVRKVKTDSVDAFELAKLLFLQDFHTTYIPSDAFANLKILTRTRFQLANQRTTLLNQLVAAIEQIAPLFPKVLNPASLTALTLLTTFTAPSEWLKEVNQQAILSMLETLPRKGKNYGEKKYEALLDCARDAEVTGIDLMANVTTVQVYANGVLFMDHQLKALDNQIDEVAKQLPEFILLKSIPGIGAILASLILGEIGDINRFTNAKQLVAYCGMDPSVRQSGNYVGTKNRVTKRGSPFLRRSLYIVATTAIRKNAKGALVNSVIYDYYQKKIQNKTRKQSLGAVMNKLLRIIFSVLKNKQAFHVITSDEQVLLYQNKRKNAA

SEQ ID NO: 264112 - protein, 371 aa, unidentified
MIKHNILFIGLDTHKEFVEVAYIEDHYGAQSVHYGRVSSAKASITKLAKQFQSKYPDATLHFVYEAGPCGYWIYRLLTSLGHCCYVIAPSLIPKKPGEKVKTDKRDALKLAKLLKSEALTPIYVPEPEDEAIRDLSRARETAMKDLKDAKYQLKALLLRNNINYKGTANWSLQHLRWLTELILPHPSQQIVLQEYLQTVTERIARLKRLDNELEHHVRNWRYYPVVKAIQALRGVRLLVATGVIAELGDLTRFDHPRKLMSYLGLVPAEHSSGGKRHLGAITKCGNTRARRLLVEGAHTYRYPANISTDLQLRQEGLPKQVVDMAWQAQLRLCRRYQRLMQKGKHYNVVVTYMVTLGLARSMSYFIQTNLC

SEQ ID NO: 264113 - protein, 369 aa, unidentified
MSYATAIGLDVHARSITAVALSRDTGEVVSRTFGYDPASVAGWILGFPEPKAVYESGVTGFHLARALRDMGVDCAVGAVSKMQKPAADKRRKNDRNDAEFLARQLLAHNIVEVFVPDEQTEGARSLSRLLEDLRDDLTRAKHRLTHLLIRWGWVWDEKGPDGKRRGTWTRAHWERIRGIELPDACAQEALDCYISEVRHVEAQKKAIEKRVAQHAQEKRWHARVEALRCMKGIETATAFALVVEAGVFSRFGSARAFSAWLGLVPSEHSSGGRVCRGGITKAGNAHLRKLLVEASWHYARATKERKRGVYHDTVPLHIANHAADGIARLVKRRAGFAERRMRPVVANVATARELSCWVWALGRMCEGTL

SEQ ID NO: 264114 - protein, 483 aa, unidentified
MSAGKKNAKEKNAGEGARGAVPVHGGEGAEVAEERVQVVEYAAAIDVAKGSGMVCTRVPGSRPDRRRQRVWRVGATCGEVTALMDHLRCEGIQRLVLESTSDYWRIWYYLAEAAGLEVWLVNARDVKHLPGRGKSDRLDCVWHCKLNERGMLMRSFVPPEPVRDLRALTRTRARLAQDQARHQSRVEKILEDALLKISVVISDLFGASGRRFLDALVAGERSPAALAALGDSRLKATRQQLEDALNGRFRDIHAVEIQTHLRLIDAINGEIARLDEAIEQQLAKVPRTAPACTACGLAGGGHAPGCPGEATKVLGLAERLDEITGIGAVNARVLIAELGTDPSQFPTPGHAAAWARLTPRSRQSGETAKPGRTGKGNRYIRGALGQAAMTAAKTDTRLGALYRRIARKRGKQKAIVAVSRVICEIAWILICDPGARYQELGPDYYSPRSPARQTRDKIREIERLNPGKKVILADAGPQARAAA

SEQ ID NO: 264115 - protein, 417 aa, unidentified
MAKRIHANGKASVQARFNITGGCDTDKNIIVAAIYYAETGNLEAQEFKQHKADALRAAKWFKDHDVELVIIESTANYHLLYYDTLRGEDINISVINPIIVKALLRVEGKSDKGDAMTLARLAANFDLKTSNMPDSQQRELRLLFKRIDSWKQQRTQVTNRANGILTGLGFTVFRLVTLNTPAGLRILQAIIEHRKPEEIAALHRNRLKRPEIEKCASVPLPEYINPYLQEVLDDVNTLNNRIIQAEHELLDKIVSCNLEKQVELMTTVAGVTSMLALRIIAELGANFHQRYCTAEAFSKAIGVVPANEVSGGKLLKRRSSHGNARVKFHLLSAAKAFAIHGNGPLKAWFDQYRGRVHYFKATSALARRMAEGLWWVMIKNEPYRHWQDPYSKEKTENILDNNRLINLETGEILEGQP

SEQ ID NO: 264116 - protein, 346 aa, unidentified
MTIVEAARTIVGGVDTHLDVHVAAALDPIGGVLGVEQFVATPQGYKAMLEWLSAFGTISKVGVEGTGAYGVGLGRFLRRAGIEVIEVDRPNRQVRRTQGKSDPVDAVEAARAVLSGRATGTPKSRDGNVEAIRALLVAKRSARDARLRALHQMRQLSYTGPDQLRSRLKGLSITELVAETAAMRPRASGDQVVYATKVSLSALGRRVLSLEQELTGIDGLLNDLVTTCAPEMLGLFGVGIDTAATLLVTAGDNPERLRSEAAWAHLCGVAPIQASSGKVTRHRLDRGGDRHANQALWRIVMTRLATDLRTRDYMERRTKEGRSKREVIRILKRYVAREVFTHLPRA

SEQ ID NO: 264117 - protein, 356 aa, unidentified
MAPIYIGVDFHARQQTICYLKTETGELVISELKHQNKEQVRAFYQQFQEPVIVGLEASGYSPWFEALLEQLGCEVWLGHATEIRRRARWRQKNDRRDAELIWDLMVHDEFPRLPQPALSSREVLRMLRYRQKLIKLRTMTKNSLQAIALQAGLAKGPQLFTAAGQEQFKAAEMSPVLQWQRDHWFELLKPFNQQLLETVVWFKAQSKDDVQIQRLLTHPGIGLLTALCILHTLQPVSRFRNARKVAAYVGFDPVERSSAERQHFLGISKAGSRMLRYLLVEAVQTAVRHDEDLKRFYKRLAERRGRPKAKVAAARKLLIRAYIMLRDEIDYAEFRRRAVAARLARHGQGPTKCPRY

SEQ ID NO: 264118 - protein, 442 aa, unidentified
MAMRKREASPEVFPNAAGIDVGASSHWVAVPRSAAEEPVREFGTMTDDLHAMADWLLACGVDTVALESTGVYWIPVYEMLEQRGLTVWLVDARQMKYVPGRKSDVQDCQWLQKLMSLGLLRAAWRPGDEVCVVRAVARQREVLLAEQGSWVLRMQKALVQMNLQLTEVLTDVMGLTGQAIVRAIVAGERDPKVLASHRHGRVKASAADIERALTGNWRDEHLFVLQQALAMYDSLAQRILECDAKIEALLIPLGRHDVELAGPGKRRGKNTPQFDARTALARWAGVDLTRINGLSVTTVMTILSEIGPDLSRFASVKHFCSWLGLCPGTKISGGKVLSARTRRSANRVRQALKLAAMSLSRNDSALGAFYRRLCARMDKPRANTAVAHKLARMVYFMLTRGEAFVDQGQQRYEEQQRERSIAALRRRASALGFQITPTGQTP

SEQ ID NO: 264119 - protein, 444 aa, unidentified
MAGVMIGAGPHKASHTAVAISGAEEQLGQLRVRACAAQAGRLLAWAAAWPERTWAVEGAGGLGHLLAQQLLSAGERVLDVQPKLGARVRLLATGNVNKNDPNDARSVAVAALRSPAVREARADDHAAVLKVWSKRHRDLGSARTQVVCRLHAVLCELVPGGVPKKIIAPHAARLLDSVKPPDAVAAARWELAAALIEDLRRIGAQLRDTRKKPGTAVRASGTTLTGLFGIGPVTAAVIIGEVRDASRFKNRDHFAAYNGTAPIEVASGGRKVHRLSRRGNRRVNHAVHMAAVTQVRQPHSEGRAYYDKKLAEGKTRKEALRALKRQVSDAVFTCLQADARRARARDPGGQQGNGSAASAAGSHPKNRLFGQATPGPSPYPMTPAASQVPGTTGHSPVTANLPPTAPQVQVERLQRSEDERPGGAAPPAAAPGREEGRGTPRPVS

SEQ ID NO: 264120 - protein, 364 aa, unidentified
MNLKRIGLDTSKAVFTLHGVGQDEKAVLRRDMRRAEMEAFFAKLPPTHVALEACGGSHHWGRRLAAMGHTVQLIPPQYVKPFVRRGKNDRNDAEAISEAAARPDMPSVPVKSAEQQAEAIVLSARELLVGQRTQLVNAVRGHAAEFGIVAAKTISQLPGLLEAVAAAETVPATAKEMLAFLGAQVAQLDAQIGELERRMKQQHKANPVSQLLAEVPGIGPVSALSLALTIDPGRFQSGRHFAAWLGLVPKEHSTGGRQRLGGISQAGNERLRQLLVVGAMAVIRFAKPGSKSASAWLLALLERKPRKLSPLRSVCEAAIGEADRGAVALANKMARIVWAMMATGQAYRGSKTVATPAAGAAAAA

SEQ ID NO: 264121 - protein, 394 aa, unidentified
MIYAGVGIAKTDHVIGAVDERGAEMCRPMPFKNTEAGLERAVAWLEGLAGSPSDVVVGMEATGHYWMACYSFLVARGYSVAVINPMQVKAVRKLKKLDKVKNDRIDAWLIAEALRIGQYDETRLATDEVASLRSLSRYLQSLRGMAAELKTQCVCLMDAHFPEYAGIFSDMFGAGSRAVLSKSPLPFELARRRADSLARDIAEASRRGGRSAGYAAKIKAAARSSIGVRLGQEAASFQVKSLIRQIEFAESECAKVEARVRALLDEVEPLVLTIPGVSYVTGAQIVSEIGDVSRFRNASALVSYAGLNSSVSQSGQFDSGGGPITKHGSPYLRRALWLAANRARQYDPGLRAFYEKKRAEGKPHRVAVTAVARKLCHIVFAVMRDQVPYDPDRE

SEQ ID NO: 264122 - protein, 304 aa, unidentified
MQVVRIGLDLAKYVFEVHGVDNHGKVVVQKRLRRDAVARFFANLPTSLVGMEASNGAHYWARVLTELGHQVRLISPQFVTPYVKSNKNDRNDAEAICEAVGRPSMRFVPRKSTDQLAVQAVHRIRRRLIADRVRLVNQIRGLLSEHGIVIARDIAQLRRGLASIIGNDNDGLSEMIRTLMRELQTELAELDRRITAYDRRIREIFAASEQCQRLGKIEGIGPVTATALIAAVGDRTCFKNGRQFAAWLGLVPKQRSSGGRARLFGISKRGDRYLRTLMIRGARAALSRAGGKQDPRSLWLGKMR

SEQ ID NO: 264123 - protein, 367 aa, unidentified
MKKVSTAAGKATKNFSQPKLTIGLDLGDRSSWYCLLDEVGEVLQEQRLSTTPKAIREVFGAMPRCRIALETGMHSPWVSRLLSELGHEVIVAHARSVRLIGESRKKDDRLDAQTLARLARIDPQLLCPVKHRSAKAQADLTVIRARAGLVRARTSLVNTARGLAKSYGERLRGCNVRNLNPEKAEGLSPELQRALQPLLAGIESLSERIRECNERIEQLAQQSYPQVALLKQIKGVGTLIALTYMLTLEDPHRFRKSRDVGCYLGLQPGRRNSGQSEPQMHISKEGDPYLRTLLVQGAHHILGPFGADSDLRRWGLKLAERGGKNGKKRAVIATARKLAVLLYRLWVSGEVYEPLRNSHQTAMPAAA

SEQ ID NO: 264124 - protein, 374 aa, unidentified
MATIARLGIDTSKSLFQLHGVDEREEAVLRKQVRRGQFLGFVAKLAPTKIGVEACGASHYWARQLQALGHEVVLLPPQHVKPYVGRNKNDKIDAAAICEAMSRPRVRERFVAIKSAEQSAAQMLLGTRDGLLHRRTQLSNTIRGHAAEFGLVTPKGLAHIKPLLERIAVDQTVPALAKELFATLGEEFTELGPRIARLDKKLKAFQRSDELCRRLGEVPTIGPVIASSMVVKIGNPAAFRSGRRCAAWLGLTPKDHSTAGKMRHGGITRAGDEGLRAALVSGATAYIQQVKRGRTRPSPWLAQLLKRKPEKLAAVALANKTARIAWKLMTSGERYDRARAEAREGLGATQYQGSTPNPSLHPHSADHASAMTAA

SEQ ID NO: 264125 - protein, 425 aa, unidentified
MHLTVTSIRPSVATVAVDVSAYKLNLICRELSAPGASAEWEIANRTEPITSTLLAIHERAQSQGATEFRVVVEPTGIYHKLLLRIAASLGFQTFMVDAGHVQKMRTVLFGDDGKTDRRDPYAIEAVAARGRLIPDRRHAEIYSLLRQWGKIYSDAEVALIDAKSRVHRALTLLFPDFDFTTDFLYGPSGRAIVHCFGLDPHAIATLSVSRLLARLRKHSRILRSSVVRLLTQARQTVAGVTRSRVTDLQARDLAFAWEDFELAARRRQSARTELEALYDEARLHDPLLPVIKAGSVISKLAMARLLGEAGALTSYSSWRQLMRMAGMNLRERKSGTYVGQTRITRIGRPMLRAILNQMALPLVKRDRLFGSYYHHKKTVQKMPGAKAMTAVGRKIVKMIWGWYRSGEAFDVSRVFTCAGQHRPAA

SEQ ID NO: 264126 - protein, 416 aa, unidentified
MFAVGVDVANGRSMVAVLDGMRNIVAKPFEVVHTAQGFATLVEKLRQLDGEVRIVMEHTGRYYESFAMRMHRAGFFVSAVNPLLIKNYQGSISVRKVKTDKADAQKIAQFALDKWTILPHYTPMDTIRYNLKTLHRQFQLASKTKTALSNNLIALLEQSYPGANRYFDSPVRADGRQKWVDFVDTFWHVDCVARSSEHAFVERYRKWCKRHGYIFSEQKAIQLHADARQKIPLVPKSDTCKLLVREAVSQLNAVSRTVETYRAEMDRLASQLPEYETVMGMTGVGKSMGPQLMAEIGDLRCFAHQKSLVGFAGTDPIKEESGDKVSQSAPSSKRGSPYLRKTLFVIMTILLQLQPQEDPVYQFLDKKRSEGKPYYVYMTAGGTKFLRVYYGKVRDCLKAKGLWEVPASASQEVNPG

SEQ ID NO: 264127 - protein, 406 aa, unidentified
MLFVGDDWAEDHHDVEIQDETGRRLAKARLPEGISGMARLHGLVGRFLPEDGDAAGVKIGIETDRGPWVAALVASGYQVYAINALQSARARQSQGVSGAKSDAGDAHVLADLVRTHSHQLPTVAGDSVHAGAVKVLTRMHQTLIWDRTRQVLRLRSSLREFFPAALEAYEDLAFPDVLELLTKAPEPNSAARLTRAQITAALTRAHRRDREAKTTAIMAALAAEHLTQPPLIAAAYGATVRALAALIGTSNEQITALQGQVEACFGQHPDAEIYLSQPGLGLVLGARVLAEFGDDPTRYDGARARKNYAGTSPITRASGKKKVVLARYVRNNRLADALHQQAFSALSGSPGARTYYDALRDRDISYNAALRQLGNRLVGILHGCIKTHTPYDEATAWNQHTQQAAA

SEQ ID NO: 264128 - protein, 353 aa, unidentified
MNSLTDLREVVDVVIGVDTHVHTHSAAVIDAATGGVLDEITVEATTQGYAELVELANHHPMLRAWAIEGTGGHGAGLSRFLMEASEIVIELDRPKRAARRNGAKSDPLDAIRAAREAMARPRLGTPRTGGDRQGLSVLLAARRSAINASTEAQLQVFSLVIAAPEPIRARFRGQKLAAMLNTAARLRIHSSWDTETTSTVVALRTLARRAHAMLKEARELQKAMVAIIRRWRPDLLEQFGVGPIVAATVLCAWSHPGRIHSEAAFAMLAGVAPIPANSGQVTNRYRLNRYGDRNLNNALHTVVQSRIQYQQATRDYVARRTAEGKTNREIKRCLARYVARDLYRLLENGPAAA

SEQ ID NO: 264129 - protein, 348 aa, unidentified
MRVFIGLDVSLAKTAVCVVDHDGAVQWQGKVPSEPGPLIKRLAEWHGMIELAGIEACPLSEWLHRGLREAGIPVVCVETRHAQRFLSSRPVKTDKNDARGIAEMMRLGHYRPVHVKSPAAQSMRTTLAARMQLVASQLQIEGTIRGLLKVYGLKIGAIHRNRFAARVLELLEMAALTELSAAIEPLLRVREGMRTERKAFDRTLASAARRSDVGRRLMTIPGVGPVTTLAYIATVDDPGRFGTSKALGAHLGLTPRVYQSGEIDRSGQISKCGDRMLRHLLYEAASALMTRTRKWSRLRAWGVSVAKRRGMKRATVAVARKLAVIMHRIWVTGDEFDFGGPAVAAKTA

SEQ ID NO: 264130 - protein, 350 aa, unidentified
MSIIGCDVHSRYQVIAMLEVETGEIVKRRLEHENGEARAFYAGLARPALIGIEATGYTQWFERMLAEQGHELWTGDAAQIWARSVRRQVTDTRAAEHLLELLVTNHFPRIWVPTAEERDLRQLLKHRNKLVQMQTSVRNQLHFLAMSQGVCRKRKLWSAKGRAELEALSLGRWASQRRQELLELLDGLGPRIEELNQAVEVQAGRRPDCQELMKVKGVGAVTSLAYALTVGPVERFPNSRKLVSYLGLNPSEHSSGGRQRLGHISKQANQMLRWLLVEVSHSTAQHDPELRRQYQRLKFRRGGKVAQVAVARQLAVRLYWRLRQASRTTPPVRMSGSPGSAVVDESPSQV

SEQ ID NO: 264131 - protein, 319 aa, unidentified
MAFLQHAPDIVLGFDVSKDTLTVFEARSSSSTAKPCVIDNSAAAIRRFLKGIERGDLAVCEPTGGHEHVLLVKLMAAGIACHRVDALKVKAFIRSFGTLAKTDALDAEALARYGKDRWEHLSLFLPPEADRKMLTDLVARREDLVAMKVAEQNRAKGPAGKVIKTSCATMLRTIIGQIETIEAEIESLIDKSPQLRAAFREMQSLPGVGTITAAALLAHMPELGTLQRRQAASLAGVAPHANDSGQFRGHRTMRGGRSEVRRLLFLAALAASRAKGPLRDAYQRLIQNGKRPIVAIGALMRKIIVILNARLRDLSAQQS

SEQ ID NO: 264132 - protein, 413 aa, unidentified
MKKVETQHPVVEFEQIVLRGCGLDVHEKTVVATIDGEGIVRETSTFDTYTSSLRDLRDWLQSHQITHIAMESTGVYWKPVFNILEDHFKVILVNARHIKNVPGRKTDKKDSQWICKLLLAGLLKASFIPQERIRQLRDLNRYSTKLTQQLAAEKNRIQKVLEDANIKLSSLVTNTSGVVSTKLIDGLIEGRTDLETLIAECYHHKMKASKAELLKAVTGRMTDHHRFMLRQIRHHMAYLESQVAVMQTEIDRLLTEDQESIALLTTIPGVNKVVAVKLLAETGTKVEETFGSAKRLAKWTGICPGNNETGGKKISGRTTHGNKYLKAILVEAAWAATRTKGTYLRAKYNSMIGRKGKKKALLIVGHKILCAAYIILTTRQSYQAYSVEEFERRRNQTRIAYLQSELKELGVSA

SEQ ID NO: 264133 - protein, 392 aa, unidentified
MYIVGIDIGKNHHEASIVSPEGKQIGRSLRFATTYKGADSLMSFIFKNIGNSPCVFGMEATGHYWYPIYSFLKAKGYTIYIFNPIQSDSLRKMYIRQTKNDSIDSFLIAEVIRFGQFGTTSMADENILAMRQLCRYRDSVISSRTEIKLRIGTIMEQIFPEYEKQFSSLWVSTSMGILEKYLTPENIENAPIDELFEIIKDKSHNKLTMKKAISIREAAADTFGIKIAQDAFSFQLKQLIDRMNFLDKQIEALDCQILEYYEKFDCYLHTIPRIGMIAAATILAEIGDINRFKSSSALVAFAGIDPTVRQSGEFSSTHNHMSKRGSPYLRHAIFLAATTCSFHNSPLNAYYKKKREQGKHHLTATGAVARKLTTVIYAVLRDGKPYEPKSFC

SEQ ID NO: 264134 - protein, 311 aa, unidentified
MVTLGLDPHPGSHTVVALDLNGSLLASLTVINTLAGLDQLHAFATQFSLRRWAIEGAGNRFIVTFVKQLLMRGEAVYSICPNLTSQYRSRRGRKKNDLVDAANVARALLANPGLPCLREMDSQRQLQDLSRAQRRLSEQLKSNRGALREMTEDSPVREILKQVITTLVVQLRELDRQLRKAVSAVMPCLLDLPGVGAVIAGTLLAEVGDPGRFPSEDHFASYCGAAPVERGSGQNARMQINPGGNRRLNWALHVIAIVRLRVDGGRSKQFVQKAINNGKSQRAALRLLKTYIARELFRTMCEHRWPRVPPA

SEQ ID NO: 264135 - protein, 320 aa, unidentified
MTILTSPTVIGIDVAKAEIVAYREDEKTTEAVNNDRETLGRWLKALPAQSSIALEATSIYHLDTVELAHEMGHRVYVVDAYRLSHYRESIGQRAKTDPCDARLLARYLSSEQERLRLWSPPPQAYKVLKSLLHRRAELINVRVGITLSWSSEPLLKDELARQLQSFKQAEQTIQKLLHKVSKEAGITENIKRCKAIEGVGELTATGLATAFMRGHFANGDAFIAFLGMDLRAKDSGKKNGPRHLSKKGDTEVRRLAHNAAMAACRSPAWKPFYESYLARGLAKTQALVILARKLCRVAFALMKNQSEYQPNLRLQGSPAT

SEQ ID NO: 264136 - protein, 421 aa, unidentified
MFKVAIRSPGDKPWTRTTEIFEYRTFYGVLQAMARELRRRGVTHVVTEASGVYTEPVYYALCEQDFTEVAVINPAHAKALKGHKTDAKDCARLAELFECGLLRGSYIPSAEQKEVRDLTRYRTKTVQARTSEIQRLAKALESAGIKLGSVASEITGKGATAMIEALIDGERRGGVLADLAIGRMRSAGKLADLSMALAGRFTGHHATLCRLHLDRIKVFDDAVDGLDGQIAAGAARWQREAGLLKSVPGFGDVVSWAWLAEIGPAPHKWFSRHEKLASWVSLCPGNNISARKRKHGRTGDAGTYIKPMLIQAAWSAIRVRGRLQARYNRLVRRFGGQKNPAAKKKAITAIAHTLLKIAYQVLKTGTPYQDLGADFYTRRNSPEEQQKYLERQLQKLHPGCTITITISPPEAALRPALNCKP

SEQ ID NO: 264137 - protein, 319 aa, unidentified
MSATTTKVYAGVDVSKGHLEVFVAPTGERFSIPNDDVGVDELLARLEESTPALVVLEATGGFERPVAAALVASGLAVAVVNPRQARDFARATGRLAKTDRIDAESLARFAEAVCPAPRPILDEEARALGEILARRRQLVGMLTAEKNRLLTATNRRVKKRIEAHVRWLEKELTRADRDLEEAIEESPAWRENEALLRGVPGVGPVLARTLLAELPELGALKNKQLAALVGVAPLNRDSGIFRGKRAIWGGRSGVRAALYMGALVATRCNPAVKAFYERLLAAGKPKKVALVACMRKLLIILNAMLRNRTSWRPPHALST

SEQ ID NO: 264138 - protein, 366 aa, unidentified
MHQIEIRDSSPISKVLIVFKTVRLLLNFKYKFMHFNYFIGTDVSKGKLDIAVYRFKELLYHKEIVNELKDIKAFIKDLLKLEGFKLSEAVFCMEFTGIYNNLFVYELVSQEANIWLEPASRIKYSLGLIRGKNDKLDAIRIGKYAYKNYDEVRLWTPRRKVVDKIYHLITLRNRLISTMNMLSTPLNEMDLFVDKLVKSMCSKLSNRSLNSLKADIKKVEKAIDKLIMEDTELSRLVKVITSIPGVGKQTAIGIITTTNEFKDIKDPKKYACYAGVAPFSRESGIFKGRARVSHMANKKIKTVLHMAALSAILYNKDLKNYYERKVAEGKNKMAVINAVRNKLIHRIFACVKQNREYENSYITTLV

SEQ ID NO: 264139 - protein, 342 aa, unidentified
MKIIGCDFHPGFQQIAMLDLQRGEYTERRLTPDEARQFYAELERPVLVGMEACGNTLWFDWLLASLGIELRLGDAGKIRALEVRKQKTDRRDAQLLLRLLLENLFPQVWVPSVEQRDTRQLLLHRHKLVGMRRQVKNELQHLALNQGVQQKRKLWSAAGRRRLEGLPLTGWTARRRKDELELLDDLDRRLAELDIAVQQAAEKDAVARLLQTHPGVGPITALAYSLTLGTIERFARSRQVVSYLGLNPAEHSSGGRQHLGGISKQGNPMLRSLLVEAGQSAARSVPELQRAYQRLKHRKHSGVGKVMVARKLAVRLFWMWKTQQPYTAARTQGSPSHHVVAV

SEQ ID NO: 264140 - protein, 526 aa, unidentified
MNDAKYIGLDVHQATISVAVLDSTGKLVMECILETKAAIILQFFHGLRGSLHVTFEEGTCAAWLHDLLKPHVTEVLVCDPRKNALLKAGNKNDRIDARKLADLLRTGLLSAVYHGENGVRALKELARSYLTVTQDLTRVMNRLKALYRSWAIPCTGQRVYAPRYRSEWLAKITEAGVRRRAEFYYNQLDALQALRREVRHDLLAESQKHNARKWLRQIPSIGPIRAALLIALMQTPHRFRTKRQLWAYSGLALKTSTSGEYRFVEGQLKRSRKFLAIRGLNANHNHDLKNIFKGAATRAAAVPGPFHEFHAALIAKGMKPPMARLTLARKIAAITLLVWKKGVRFDAEYPSLSINPMPPRTTRKSDRRKVSDRTMVGTAQPRCLSASETEGRRYESTMNLRERDTHRVSVHYWGWTARPFSLGRTVLGEVFVLTSPFIERDSRKLGFQRLGRPRFRVQEMFPMCEGRLECRGVLNRSPLKNGAAGLIIFGAPRTGRVAGFRKNRGSYTRPWMRSTRAGASATAATS

SEQ ID NO: 264141 - protein, 347 aa, unidentified
MKDIKVLGIDLAKNVFQLHGTDSRGKRVLSKRLTRSKLAEFIANLPPCLIGIEACSSAHHWARVFEKMGHTVKMMAPQFVKPYIRSNKNDRNDAQGIAEAVTRPDMKFVPNKKIEQQEILLLHRARSLVMKQRTAQANQMRGLLAEFGIIIPKGISHLNKFSEILDDHKDYLTPKSQAIFEQLNDQFKAYKTQLATFSKQIEMIASQDAMCKEIMKIEGVGPLSASAAIATIGDAKLFKNGREVSAWLGLVPKQHSSGDTIRLSGISKRGDRYVRTLLIHGARAVVQNCENKTDKRSLWIADKKIRCGNNKAAVALANKNARIIWAILAKGECYRKSCSANGFSNEK

SEQ ID NO: 264142 - protein, 408 aa, unidentified
MARKRTLSTLDTSIAYEAVGLDLAKEDTAIAAFGPDHEGPYLIDRMPYDKLYELLADMAPTLVAMEPCSGAHQIAEQIQELGHEVMMISGRHVQAWVKDHCNGQKTDLNDAFAILNLAYDRWLTPIRGKTREECRLLALQSSYRQLKGQRTKTMVHVEATLHAWGFPIRTGSFNQKALHELIDANREAFGDEVVETLHLMINRVHDLDHDIATMLKLLTEATQRDPRASLLRSIPGFGVLTTSRWCAVVGDIARFDTPKQTMAFIGLVPNNRITGHHTETSSGREARGQGKMSKRGDKMLRSLCILGAGALCLMVRNDRLPDCPFVASIKERLASPRPWFKVLVYVAAKLVRIATALLKYGETFSFEKAGISKAVLKQWELEQAKAAKALTARKRIVRPQARLIHEMP

SEQ ID NO: 264143 - protein, 395 aa, unidentified
MFIVGIDIAKRSHEAIIIAEDGQVVRKAFSFRNNCTGYNLLLEQVRKLTLVKSQIVFAMESTAHYWLALYARLLKDGYTVMVLNPIQSHSLRELYIRKTKTDARDSLIIADFVRFGRCKASNVPQDKILALRELCRSRAYLVDMAADLKRKLIALLDRIFPEYESLFDSVFSKASIAVLSKYSTPQKVKNANLRKLTDLLMESSNGHFGEWKAHQLKEAACSSFGIDDSGGVYSTLLGMFLEQILSLTAQADSLEKQISVFFQEFNNPLTSIPGVGTVLAATILSEIGDITRFSSADKLLAYAGLDPSVKQSGEFKSNQNRMSKRGSPYLRCAIWLASTVAAHRDPMFQTYYEKKISEGLHYMNVIGHVSRKMTAVIFAVLRDGQPYQPILQSAG

SEQ ID NO: 264144 - protein, 320 aa, unidentified
MQTRTPVGIDIASKKFDVAVWKGETSYKTKVFPNTPKGFSALKKWLEPFGDCHICMEATGAYSEPLATFLHDEGFEVSVENPARIKRFGQAELSRNKTDKDDARMIARYCKLHGPSLWQPAPLNERRLKALVKRLTNLQEMRQMEENRLEISDAVVQPSIRVVIAALDAQIDETQRAINNHIDNDPDLKKNRELLESIPGIAGVLSSTMLAYMGDMSRFSSSKALVAWVGLNPMRQESGEWKGKSRISKMGNSAMRKALYMPAIVAMKWNPAVISLKKRLDAGRKTGKVVVCAAMKKLLQLAYGVLKSGRPFDAEICLAR

SEQ ID NO: 264145 - protein, 415 aa, unidentified
MSLMVLYVCCAGLDVHKKTVVACLLLTAPTGRVTKQVRTFATTTAGLLALSDWLASQGVTHVALESTGVYWRPVFNILEGGFQVILVNAQHMKAVPGHKTDIRDSEWLADLLRHGLLQASFIPPKPIRDLRDLMRYRKSVVQARTQTINRVQKVLETANIKLSSVASDVLGKSGRDMLAGLLAGVSDADTLAELARGRLRKKLPALRQALDGRVEDTHRTLLRHQLDLITFLEDELDRIEGEIDHLLSPYEQLLARLMQIPGIQRITAAAILAEIGTDMSRFPSAKHLASWAGVAPGNKQSGGKRRRAPTNKGNTHLRAVLAEAVWVISHTKENYLSAQYHRLARRIGAKRAIVAVSHSLLVIIYHLLRANQDYQDLGPHFFETLDTTRLRNTAVRRLQALGYKVTLEEQTEVDA

SEQ ID NO: 264146 - protein, 458 aa, unidentified
MAKRRKRTKSRNFKITQLPAELRHMNLNAAGIDIGSEHHLVAVPEGRDEVSVRQFGTFTADLEALAAWLKKCGVTTVAMESTGVYWIPLFELLERHGFEVKLVDARHVKNVSGRKSDVLDCQWLQQLHTYGLLAGAFRPPDEVCVLRSYLRQREMLTQSASMHIQHMQKALQQMNLLLHNVVSDITGVTGMKIIKAILAGERDPKVLARNRHELCKNSQTTIAKSLVGNYREEHLFALRQAVELYEMYQAKIADCDHAIIKQLEKQPNVSDDGPPPLDKPLPPGSRLRDDTDVHELLFKKCGVDLFAIPGLASDTLLTLASEVGFDLTPWKTEKHFASWLGLCPGTKRSGGKVLNAKTKHNPNRAAQAFRMAACSLYRSQTALGAFFRRIKARSGGQQAVTATAHKIARIYYAMLTKGTSYVDLGQQAYEQRYKQRRIDHLKSQAKSLGFQLVPCAAS

SEQ ID NO: 264147 - protein, 389 aa, unidentified
MEESSKSLYVGLDVHKESIAVAYAPEERGTEVVSLGAIGTRQCDIDKLIRKLQAKGAPLVFVYEAGPCGYWLYRYLTRQGLSCHVVAPSLIPRKPGDRVKTDRRDAVLLARLMRSGDLTAIYVPTVEDEAIRDLSRGREDAMRDLKATKYRLKAFLLRQDIRYEGRANWNAAHLRWLSAVVCPTPVQQIVFQEYVRAVTEQHERVQRLETELHEHVKTWRLYPVVEAIQALRGVELTGAVILVAELGDLTRFDTPRQLMSYLGLTPSEYSSGERRRQGGITKAGNTHARRALVEGAWAYRYPAKVSRHLQLRLEKLPAEVQAIGWKAQLEGAGTPVQTLPSANRPGQARQPGRRGHCPRDSRLRLGHRPPRPAGPLTAERFEENGVPTQ

SEQ ID NO: 264148 - protein, 373 aa, unidentified
MKLHKYLGLDVHQVDTEVAIAEGERAGEVRVYGKVSSDLHAIDKMLAKVGGPDAVLHVVYEAGPTGFVLYRHLRQRGIECTVVAPSKIPQPAGGRQKTNRRDALQLARLHRAGELTGIHIPDAVDESVRDLTRARSDASRDLKRAKQRLKSFLLRQGYHYKGKANWSEAHQRYLRELVLPLPALKSVLEEYLLAITQATERLTRLDELIAAQAPQWRMYPAVQALRCFRGFDLVAATIFVAEINDVRRFAHPRGLMAFLGLVPRENSTGDTRRLGAITKAGNAQARWILIEAAQHALLQPKVSAPLALRQEGQPELYRKLAWKTQVRLHKRGWHLTRRGVMAAKVKVALARELAGFVWDLLRQVPAAKAAAPA

SEQ ID NO: 264149 - protein, 331 aa, unidentified
MKAYVGIDIAARTFEMVIRQGGKASRAASFAQTPDGHAKAIRQLLALKPERIVMEATGIYYLDLAVALERAGLPVCVINPKSFHHFATLKQVASKTDSIDSALLAEYGERMEPPLWRAPETTRLSLRGIARQINRLTANRTQAKNRLHALQSTVGTLALLIEDEQEGIAQLDRRIETLQTAATNLLADSPELSAQMDALCAAKGIGMASAIAILGELCVLPAHMKSSQVSRHAGLDVRLTQSGTSVQRPARLSKAGNAYLRSALFMPAMSAVRHDPRAKAFYAALVARGKKKIQAICAVMRKYLTGLWACVQSKMPFDSTKLFSDIHLEKA

SEQ ID NO: 264150 - protein, 431 aa, unidentified
MEEVTDEPLYRDRVCGIDIGKAEMYATIRVPSEANPARRAQETRGFATTRRGVLELADWLRCWQVPAVVMESTSDYWKPVFYRLEAEGLECVLADARQVRNLPGRPKRDPSDSRWLAVCFERGSVTSCFVATPEFRLIRLHTRYRRDLTGERTREKSRAEKLLESAAIKLSSVVTDLHGVTGRDIMDHLIAGERNVKVLAQLARARARRKIAELEQALDGTEFFTPEHAALLKVMLERIDWINAEIARLSQVIEGLLAPYEEQLQQAESMPGWGRRAAEDVIAETGTDMTRFPTPAHLASWAGRTPLDHQSGARQGKARRKHGNRYIGAVTGETAVAAGKTDTREGARHRRLVRTRGKAKACVATGNTQMRVFHALLSHPGTRYEDLGASWYDSERQAARRVSHHVGALGAMGYEVTLCRRPEPGEPAPAA

SEQ ID NO: 264151 - protein, 374 aa, unidentified
MDENGEAIRDSFSFNNDKEGFNTLLNVLNSLDSNQEKRIGFESTGHYGSNLKIFLERNGYSFMEFNPLLVHRHFKSETLRRTKNDKVDARKISSYLYTREYKPNPNSSYHLNCLKSLTRTREALIKDRTRHIIHMINVLDKMFPEFKLQFGNQGLNAASAMYLLENYGSPSKMSNMTRASYDKMKSELRRTISYAKFLRIKELARNTIGNEDEILVFELNTYLELFKELDKKILKVEDKITKEFSIMKCHIASIKGIGIITAAGILAEIESIDRFDNPGQLCAFAGIEPSENQSGTHDGGGKMVKHGSPHLRNYLMQSAGYMLIHNPVLYEYYLKKRNEGKCHTVALSHVAKRLTRIIFYLEKNDTDFNIDKMR

SEQ ID NO: 264152 - protein, 399 aa, unidentified
MSMAELRVAVDIGSKHHRVGIGTAEGAILEEFEISHDREGFELFFSRILIYEKRLRLPVVVAMEGVGGWARPLDRMILRHDYQLLNVNNVKLARFKEIFAAPAKSDKIDTRKMLELMRMREVLPLAKAVVHRVGAIPSENEQLKRFTRRRRLLVEEKVRVVNRLQSDLHALSPGLLEITVAVDNLWFLNFLTCREDLTKLAGLKRASLLKINGVGKVYAAKIEAWQKHATFAEETAWVGEMVIADTQRVLDLVRQIHALEERIETISASSEIATRIRTIPGFGLVSSATLAGEIGTLDRFAFETSLALYTGMTRLDNSSGNYIGTKNTRQVNSQARAAMMTATARHIVNSPESKTYYDKKRAEGKTHNQAVRALGRHLIRVVWSMITHERDYIQKGPIT

SEQ ID NO: 264153 - protein, 384 aa, unidentified
MPKQSTATAFDHDSTLVLALELSGKGWEVGAVLPGVSRRPRRSLPARDMAALLQQIERWKAEVLRAGRTVRRTVLAYEAGRDGFWIARYLLACGIEVQIMHPASIPVERRGRRVKTDRIDLDMLLRTLLAWLRGEPRVCSIVRIPSEAEEDMRRPERERERLVSERVALENRIENLLCLQGITGFKPRLKKAAVRLDELRRPAGDPLPPLLLEELKRLMVRHRLLSEQLREIEAAREQMAMAAEPDHAVQQIQMLTRLVGLGLATATGLTREVFCRSFADRRAIAGFVGLTGTPFNSGGSEHEQGISKNGNPRVRRILLQLAWRWLRFQPDSALSCWFLERTGGAKGRIRKIMVVALARKLLVALWRYIETGELPAGARLAAAA

SEQ ID NO: 264154 - protein, 387 aa, unidentified
MNHLYSNVACGGMDVHYKFSNVTFRDKDGRVVRRERLGHPRRDQLRKRLSRWPRGIPIVLEASFGWGWLSDLLSEAGLEPHLSNCYKLEQMRKARGWVKTNKKDADMVSLLPFETTDWWEVWRAPPEVRNRREQMRFRADLVGSQTVVKNRIHAIFHRHGLFHDFSDLFGGEGRRFLGELCIGGSEHLSPQALQALRGQIKLLDHLRGQLADIAHILHRQLLNTPLIKRLKKIDGFGLILSNVLAAEIGRIERFRNHKALASYTLLAPRSNDTGQDDPDHSPRGRHLGTRGNRTLKWAFIEAAHGAVRSGGRWRAMYDRVTNGGKKDRNRGYIKVARELVKVVYVVWAKRVDYQRNPPARPGSDKNKKRSRSGTGQLLHPMVHASRA

SEQ ID NO: 264155 - protein, 427 aa, unidentified
MAKVEHTSDARVLVGIDISKNRHEVLIAVPGKARRRRMTVLNTADDYRRLIGVLRGFEQPVTIGFEATGNYHRALMFALGSAGFELKLVSSIALARTREALHNGWDKNDPKDAQVILRMLEIGAVQVFHDPLVAGTCDIQELSKTYEMVARAKTELWRRILTHYLPLYFPEADRFHRSSRSDWFLAFLEAFPSPHMITAMDKDAFIEAAWPVIGRRVSKAALLADIYETSKTSVGLPIAPDSDAIRMFRLVLAQGRSLIQQRNAIEERAAELLSAHPDYRLLRSIPGIGPVNALAVLAEAGDLRRFRHHRQFLKFCGMDLATVQSGLFRGRSKISKYGNARLRRTLWIAAQAAVLKPANSFRDKFERYIAQDRHNPDLRRKAYTAIAAKMARTIHAVIKSGEPYRPFFEGVSPGGRTPLCRAVEAGS

SEQ ID NO: 264156 - protein, 417 aa, unidentified
MDTLFAKVAGLDVHLKGIQCAVRSRQESGKLISQVRSFGTMTRDLRALADYLQALGVTHVAMEATGVLWKPVWNVLEGRFLLLLVNPRHLKKVPGRKTDVSDAEWIAQLLQYGLLRGSFVPPRPLRNLRDLTRHRAQLAGEHTRVANRIHKLLEDANIKLGAVASDVLGKSGRKMLRALLRGQDNPEELAELALGRLRQKIPQLKLALEGTCTEHHRYLLGRLLAHLGYLESQIQEFSQRIGQRLAELLPAATWERLDRIPGVNRITIDNILAEIGVDMSVFPDEHHLASWCCMCPGNEESAGRRLRSRTRKGNPWLRRALVEAAWGASRVKKSYLSSQFRRLAAKRGKKRALVAVAHSLLVVIYHVLKHNVEYRDLGPDYFDRLEPERLRRYLVKRLQGLGYDVTLSPKNPDDRAA

SEQ ID NO: 264157 - protein, 340 aa, unidentified
MKKLYAGIDLHGNNNYLGILDRKGQRVFKKRLSNIPEVILEALKPYKKGIVGIVVESTFNWYWLVDTLMGEGYKVHLANPAAIQQYAGKKHADDQDDAFWLAEMLRLGILPEGYIYPKEDRPIRDLLRKRGHLVKLRTSLMTSLQNIISRNCGVKVKASQMKKVRTNEVLPILAGREDLELSGKVSKEAIDFLTHQIKQVENFVEDKVELRAPYKYLQTIYGVGKILSLTIMLETGPIERFSQAGHYVSYCRKVPTKWTSNEKTKGKGNKKNGNKYLAWAFSEAAEFARRYESPARAYYNKKSAKTNFMVAHTALAHKLARAAYFVMRDQVPFDPARVFA

SEQ ID NO: 264158 - protein, 343 aa, unidentified
MKLIRVGVDLAKNVFQVHGVGRDEKAMWRRKLTRENWLKVLLETVEPGCEIGMESCGGAHHWARKLQAHGLKVRLIAPQFVKPYVKSNKNDANDAEAICEAMSRPHMRFVSVKTVEQQDIQAVHRIRAELTKQRMAKANQIRGLVAEYGLVAPKEVVHLRRALPCWLEDAENGLSDRFRRLLNGLWGDLRTLDERTAELDREIAVIAQNDPAAKRLQQLRGVGPIIATALVAAVGNGEQFANGRQMSAAFGLTPRQHSSGGKERLLGISKRGDAYLRVLLIHGARSVIHHSKDKDDRLSQWVARLAARSHPNVAAVALANKTTRMAWAMLKNGTDYQPAMVTS

SEQ ID NO: 264159 - protein, 348 aa, unidentified
MSQIIRIGMDTSKYIFQLHGVDASEQVVLRKRLTRKAMLEFFAKLPPTVVVIEACGAAHHLARELGKLGHTVKLIAPQLVKPYVPRNKNDGRDAEGLCEAASRPRMRYVPVKTAEQQAALMLLGVREQLVMRRTQLSNTIRGHAAEFGLTAAKGVDKLAAFLAAIERSERVPALARELFAMLARQYDQVQAELKAIEAKLVAWHRADAVSRRLAQIPGIGPVTATALVMKAPDPHAFRSGRLFAAWLGLTPKDHSTAGKTRLGKITRAGDETLRQLLVVGATSVVKQATTKGRGPGWLIELLKRKTPKLAAVALANKMARIAWKLMTTGEDYDTARLDAQSDAKVAAA

SEQ ID NO: 264160 - protein, 434 aa, unidentified
MTKLNPTPDSAVLVAIDMSKHRQEVLIERPEGGRRHRLTVMSTKADYDRLTDDLSAIGRPIVVGFEATGNYHRTLAHRLLSAGFELRLISSVALARTREALHNGWDKNDSKDAQVILHMLQIGATQRYVDSLAAGINDLQEMSKTHEMISKAKTQTWHRILTHYLPLHFPEIDRFAGNSRSDWFLALLERFPTPGSMTILGQEAFTCEAWALVGRKVSKARLLNDIYETARASMALPVDEDSVAIAMFRMVIAQARSLIRQRNEIEQLAHAMLAENRDYQLLRMIPGIGPINALTILAEAGDLRRFKYHRQFLKFCGLDLATCQSGTFRGRTKLSKYGNARLRRTFWMADQVAARQRDNSFRDKLGRYMDGHDNDPDRRRKAMTALTAKMARVAHAVIKTGTEYRPFLERADTRWKDPSLTCREGAPKDIGVTL

SEQ ID NO: 264161 - protein, 419 aa, unidentified
MDVVVERCAGLDVHKDTVVACVRSPDPQGGRLSVVRTFGTFTVELLALRDWLLSYGVTLVAMESTGVFWRPVFYLLEDAVECWVVNAAHMRNLPGRKTDVADAEWIAQLVEHGLVRPSFVPPPPVRELRSLTRYRKAQIEERTREVQRLDKILQDAGIKLSSVASQVLGKSGRDMLDALVAGTRDPAVLAELARGRLRTKIPALTQALVGRFGPTHALVIGEILAHLDYLEGAIGRLSDRIDEAIAPFAVERDLLTTIPGVDRRLAEAIIAEVGVDMTQFGTAERLSSWAGMCPGQHESAGKSRSGRSRHGDTWLQKHLTVAAMAAVHTKDSYLPAQYARLVKRRGKARARKAVGHSILVVVFHILASGQPYQDLGGDYLLRRNNPARRARQHLHDLERLGWTITHTDQGVICQQPAAA

SEQ ID NO: 264162 - protein, 293 aa, unidentified
MTITTVGIDLAKNVFAVHCIDQNGKAVLVKPKVSRAALSELIAGLPPCVIGMEACSGAHYWARLFRQYGHDVRLMAPKFVSPYRMAGKTGKNDAADAIAICEAVQRPHMRFVPVKDESQQAMQCLHRTRQGFIQERTATYNRLRGLISEFGVIAPQSTDALRHVVSDQKETLPVQVRLCIDDLLTHVTNIEEKIAEYDRVLSRVAKTDHRSQQLMELKGVGPTTASALVASIGNAHDFKNGRQLAAWLGLTPSQYSSGGKSKLGRITKAGDAYLRTLLVQGARSVMVGAENRT

SEQ ID NO: 264163 - protein, 420 aa, unidentified
MRPLAEQIDFVVGVDTHKHTHTAAVVTPTGGVVAQLTVAADAGGYARSVAFARERAPGRRLWAIEGTGSFGAGLTTALLEHGERVAEIDRPARPARRSGAKSDALDAVRAAREALARDHLAQPRRRGAREALRVLLTTREGLITARTRAICHLKALVVNAPEGLRHPLRHLSTSDLLHHCARLRCAPARPAEHRATLLVLRMTARRALALEAAAATLEAELARLVADVAPVLLSELGVGPVSAAQLLCAWSHPGRLRSEAAFAALAGVAPIPASSGQVTRHRLNRSGDRQLNRALHTIVFVRLRHHPETRAYAARRAAEGKSPRETIRCLKRHLARRLFKLLERVVEPTARDREPSVRTASPVPPITMRRAGSRANQPPRPHSGAGSHPTGRSGAEQPSAARLDAPVGAKPPPTPPGPAT

SEQ ID NO: 264164 - protein, 360 aa, unidentified
MTTTMTCVGLDVHARSIHAAAVELVSGELQRARFGGGSEEVVAWLAGLPRPLRVCYEAGPTGFALYRAARAAGIDVCVVAPSKTPRASGDRIKSDRKDAELLARLLLAGQLKPIAVPSPALEAARHLCRAREQVRADLMRCRHRVSKLLLLHGRVYPEPTTWNERHRRWLGGQRFDEAVAELAYLDTLAAVDGLVARKRALDERLSRIALEGEWAETVARLRCFRGIDTLSALVLALEIGDFVRFGRPAQLASWLGLVPSLDQSGESRHQGAITKTGSSYARRLLVEAAWQYLREPRIGVSLRNRQQDQPAQVLQIAWRAQHRLYRLQQRLRGRGKPGNVTTVAVARELACFLWAAAVAD

SEQ ID NO: 264165 - protein, 428 aa, unidentified
MIKINPLSTLYVGIDVSSKSNYVCALDFYKNKYINSSFANNQPGAEELAQKILECLKEHPDLNTVVAALESTSVYSIHIANYLSSCEELMHIKPYVFVVNPKCTANYKKSYIGLGKSDPIDAFVIADYARAGNIETEPWRGSQFLALKRLTRHRLHLVECMTREKTYLVSNLYLKFSELQMLEGENQPFCDIYGSTSSSVLVEYLSPEEIIDSSEEDLVSFLAEKSRNRIKDISKTADLLKKAARDSYRLDKALYEPLNVSIASSFNCIETFKREIKAIDQAIEREIKGLNPNAFIILQSIDGIGPVFAGGIVAEIGDIAAFSSSDALAKYAGLCWRSNQSGDFDGEDTPMTKAGNRYLRYYLGEAANSMRKHNVEYGEYYRKKYNEVPKHQHKRALALTSRKFVRLVYGLLAKNQLYSGVSLDTSTK

SEQ ID NO: 264166 - protein, 358 aa, unidentified
MTTQEKQRALFVGIDVHKDTHTAVGVSPFGEKLFEITVGNYQKDFDALIHCIEENRGILSPYLGLEDCHGYGERLSAYLSERYPVSHVPPILVDRGRQRTTHPEKSDSLDALGVAKVMMQSIDTLPAYSISESTAEAKDLKELSKDRAFLVEECTRLKNQLHEILHRIYNSEYRTYFKNPFSPKALQYWMRVRPQCDGHMLNMLRRKARRIQQIRVEVRELEADMQSIIEKAGYTLTSASGCSTTLAAVMIGEIGDIHRFKSPAALAKYAGCAPREYSSGKRARHRKTRSGNRTLNCAFHRMALSQISPTGNPVGLRYFKRKVSEGKTKSQALVCLRRQMVNVVYMMLKHRTEYRCPQ

SEQ ID NO: 264167 - protein, 343 aa, unidentified
MDDYDGRQFVGIDLHRQRSVIVRQSESGEQLSAVRIVNDPVALRLQLEDAGADPEVVLEATYGWYWAVDVLQAHGARVHLAHPLGVKGFRYRRVKNDVRDAADLADLLRMGRLPEAWIAPPQTRELRELVRYRAKLVAIRTGLKAQVHAVLAKAGVLIAASDLFGVTGRQRLAKVPLGAAYAQRISSLLELIDILDDHETRFSAMIAEPLRPHRGYQAIQQLPGVGSVLAAVFVAEIGEVHRFAGPTHLCSWAGLTPTHRESDTLVRRGHITKQGSKLVRWAAVEAIQRQPDSTKITRDRKRIEARRGRNIAKIAAARKLLTLVYYGLRDGHIRALAHEQVAA

SEQ ID NO: 264168 - protein, 438 aa, unidentified
MKITEKTLEVNANHILNIGVDVSSRKLDVHFECPLQLNKREVYREQILNRSVEIEKALKNYLSLAQSKGFLNLRIVCEPTGPYSLNLLSMATHLNCLTAYVSGEAVKNSKIIEFNGTNKNDLVDAELINSLAERNKVLIHRTYSANYTRLRMLNSHYEDVDKAYVSARNQVHNTLKQLWPDYSSKLSLLYSSTGQALYRCYGFNPWKIVSYNYSYFERRMRTHCKGVWSSTLKQIYRDAEESVRNHCSDTASTLESILSDHYENCLRGLERKASLKTEMKIILSEIREQDDRIPQARVNFISEFHIARLLAETGPLSDFKNLKQLTKYLGLNLRERQSGEYQGRVRLSKRGRTLARKVLSLVVLPLTTQKALYGPDYHRIKTQKDKPGKLVMCIFMKRFLKSFFGIYRSHQSFDSRRLFIDRGSYEKLNSKEVLEAIS

SEQ ID NO: 264169 - protein, 437 aa, unidentified
MLSYLNLNAAGVDIGATEIYIAVPGDRDPQPVRCFSTFTEDLHAAADWLKACHIETVAMESTSVYWIPLFQILEARGFQVFLVNAHHVKNVPGRKSDVSDCQWLQYLHSVGLLRASFRPEQAVCTVRSILRHRDGLVQMASSHVQHMQKALDQMNLQLHHVISDITGRTGITILEAILAGERNPHQLAKLRDRRVKATEETIAKSLVGDYRREHLFTLRQSLAAFRQYQDWITDCDHEIAQYLEQFESKLDPPPGPTSPSEDGSKPKASEQPFDLQTHLHRIFGVDLTQVPGIHVLTAQTLLAEIGPDLSRFEDGSALASWLGLCPDNRISGGKVLSVKTRKVKNRAAKALRMAAQSLHHSQSFLGHFYRRMRAKLGAPKAITATAHKLTRIVYHMVTTGHAYDETICAQNELQHRQRLEARLRKQARELGLQVVAA

SEQ ID NO: 264170 - protein, 341 aa, unidentified
MQSKTFTHYLGLDVSKKTIDACLFDGQQVLNQCQCNNTSADLRRMISKLLNAYGLGPEHLLICAEYTGMYIYPLTEACTGMELALWLQHPAELKHSNGVQRGKNDVTDARRIAYYAHRFADKVRLYIPCEPSIKQLQYLDMERELMVTDRAKYMAQLKDQKDFMPVEIYKAKSKRFKRLIKQLDKAILELEQNMDKLIKQDTTLTKQYEQVTSIDGVGKQVAIQMLITTKGFTTFTNARKFCCHAGVAPFAYLSGTSQRSRWRVSHRANKRLKWLFHMAALSAIRIPGELQAYFLRKVAEGKNKMTVINAIRAKLIHRIFAVIKNNTIYEKNYLKISLEKP

SEQ ID NO: 264171 - protein, 361 aa, unidentified
MGLTMTWVGLDVHARSTHAAAIDTMTGELSRMRFGAGVEGPVAWLAELAGPVRACYEAGPTGFGLYRSAVAAGIAMQVVAPGKTPRGPSDRVKTDRKDAELLARLLLAGSLARVVVPPPDVEAARELTRAHDACRRDLMTARHRVSKMLLRHGRVYPRPTTWTAAHRRWLSQQQFDEAPSDLVFGDLLAAVDGLAARKAAIALRLSQLATDERWWPTVARLRSFRGIDTLTAFSLHLELGADWQRFERATSLSSWLGLVPSLSQSGESSRQGSITKTGSMLARRLLVESAWHYGRKPRLGATLANRQLGQPDHVLQISNRAQQRLYRVNRKMRARGKPHNVTVVACARELSCFLWAAATAD

SEQ ID NO: 264172 - protein, 428 aa, unidentified
MKVTQNAHKINLNNLVDISVDVHKDTLCSFFEIDGKEFSDTCSNRTTVIEKKLRSYHNIAKEHGRNGLRVICEPTGQYQNKLLRTARKLGFLTNYVNAESVAKFRIVESNDNNKTDKKDPRVISTLGKLNKVIKLRFLGEDYLMLRKLHKLYDECDVSSTSLRCRISKLLVELFCDYSFEKDFLYSNSGLALVKQYGCNPYRIVEDGYPLFCQKIKLAAPRMMTRSLQRLWEDATSSALNEMPAGYVLVLEEYLRDLLDDYSKMLERKGEITKQMLAILEKLRQDDPLIPPPTPKVISDKNLARFLAETGPLSDFEHWRKLMRYAGLNLKTRQSGKFQGQNKISKKGRPLFRKILNIIALPLVKRGSLCGEVYHKKKDVTKMPGNKAMTVIARQLLRKLYGWYRSGQPFDENRFFICQSRYEKLAEAA

SEQ ID NO: 264173 - protein, 408 aa, unidentified
MNPLYVGIDVSSKNNVIYLMLPNGDKHSSFSLANSHDGSTQLVKRIFTAMTSNNIDSVLIGLEATSVYGDNLVYFLKEDTTLASFDRKIHVLNPKQVNKFKESYNDLPKNDYIDAFVIADCLRFGRINKEVYMDDYRYKALQNLTRARYFAVTNLTKEKQRFINVLFKKYSTMTQEKVFSDTFSTTALAVYEKFESAETLAKMDLQELTAFIMEKGKNRFPDPDAVAKALQKAARSSYRLPKTVNDSVNQVLAISITSIRALESQIKAFDKAITKQMELLPNVLISIPGIGPVLSAGIMAEIGDINRFQNQAALAKYAGLAWQQHQSGDFEAQTTRMIHSGNRFLKYYLCEAAFSLVRCDKEYNRFYHIKYKEVNRFQHKRALALTARKFVRLVFALLKDNRLYRPAE

SEQ ID NO: 264174 - protein, 321 aa, unidentified
MHTNTKENINVGVDTGKSHLDIRPLDIFFTVSNNEYGIKKAINKIKIYKPERIVIEATGRLEIPFIIACSEVKLHFVIANPMHVRRFAGAIGQRAKSDRLDAELIAHYADAIKPKLTELKPEKIRLMSDLVTRRNQLLTLQTMEKNRIQILPKTLASTIKPILTAIKNQIGKIELKIERLIEECEEYQSKNIILQSMPGIGKIAAASLISNVPELGYITNKQAASLIGVAPMIKESGAYKGKRVVQGGRAQVRTVLYMAMMSAMQCNPVFKATYQRLIGQGKPKKVAIIACVRKMVAILNSMLRDGVMWDENTGKNKLLTP

SEQ ID NO: 264175 - protein, 344 aa, unidentified
MDHFAGLDVSVKETSICIVDDTGRIVREVKVASEPEALLPVLKNPTYHFKRIGLEAGPLSQWLFSALAEAGLPAICVETRHMRAVLKAQINKTDRNDARGMAQMMRVGLYRPVHVKTLRSQKLRMLLTHRKLLQSKAIAIENDLRGTLRNFGLKVGIAGKVKFEARIKELVENLPDLAVLVEPLLIVRRVLREQIVSLHRRLLAIVRDDEVCRRLMTTPGVGPVVALTYRATVDVPARFRKSKAVGAVFGLTCSKYQSGEIDRSGRISRCGDEMMRVMLYEAAQSMLHSKKWSWLKAWAMQIARRRGMKKAIVALARRLAVIMHRIWVDGTEFRWTREQAAAAA

SEQ ID NO: 264176 - protein, 355 aa, unidentified
MVMIGTDSHKRTHTVVAVDAVGRRLGVKTVRANSEGHLALVEWAAQYASHDGDGVKFALEDCRHLTRRLESDLLAAGQRVVRVPTRLMASARKVSREPGKSDPIDAEAVAVAALRNPDLPVAELDGPAREVKLLSDHRRDLVVQRTRIAAQVRWHLHELDPDLQVPSRGLRRQRVVRDLLTQLDRFDGVVARLARRLLERCQDLTTQINSLERELQQLVRTLAPALLQVPGCGVLSAAVILGETAGVHRFRNKDAFARFTGTAPVPVWSGASKGKVRLNRGGNRGVNCALHMIAVTQARGVGPGKAYLDKQLARGKDRVAAIRLLRRRLSDVAYAALRADQLPAATTSEPTPLAA

SEQ ID NO: 264177 - protein, 467 aa, unidentified
MFSENAAPNDYVCRMLFQAQMNEGFEPRKLIFGETDYSFFNGRPVPACFLKYFLRRLPMPKIVYPVCCGIDVHKSFVVACVATTDSALVTTYKSKRFSTFTGDLRRLAEWLVRNNCKDVCMESTGKYWIPIWNILEPTCRLVLAHPKYVKAIKGKKTDKRDAKWIADIFKHDLINGSFIPPADIRQLRDLVRYRFKLTNYTTGEKNRAQNCLTVSNIKLDDVFSDVFGKAASAITTRLLESNEPFDVRPYLTKNIKASPEEIQSAVDGAMCANQAEKLRIIRSHMDSLKICQANLESEILSLAEKFLPQMNLVLTVPGIQSFAAAAIIGEIGVDMSVFETSRHLCSWAGLAPQNDQSAGKKKTTRISRAGVYLKPLLVQCALTAIRSKKHPEIANRYNAIKKRRGHKKAIIAIARMLLTAIYNILKKNEPYNAEFYRQSEKPPVRREVTVEQAIFILQRQGYLVSSA

SEQ ID NO: 264178 - protein, 339 aa, unidentified
MEEYVGQQFVGIDLHRRRSVIVRQSQAGERLGMTRIDNDPFALAEQVAGWGEAPQVVLEATYGWYWAADVLAGAGAQVHLAHPLGVKGFAYRRVKNDERDAADLADLLRMGRLPEAWIAPPATRELRELVRHRAKLVALRSGLKASVHAVLAKCGLSVPVSDLFGVGGSRLLDQLQIPDVYAGRIASLRRLIDAFGFEIDTYTKLATTRLAAHPGYRAIQAIDGVGPVLGSVFVAEVGDPHRFPGPAQLCSWAGLTPRHYESDTKVRRGRITKQGSTLVRWAAVEAVQRVRSGHLGGVRARIGERRGANVAKVATARKLLTLVYYGLRDGHIRCLARPA

SEQ ID NO: 264179 - protein, 398 aa, unidentified
MICQPGPTIHLDTHRSGERDLVGAWLRGPVPVLSAVPARAFPPLAAETDEGMAMTTMTERKRRVTGGVDTHRDVNVVAALDERGSELGVQSFATTPAGYRAALRWLRRFGTLEKVGVEGTGSYGAGLTRYLHSEVIEISCPNRQRRRSHGKSDPVDAIAAAKAVLSGEAVIEPKTRTGKVEAIRALRTSDRSARHARIKALNQMRALLLTGPEELREQFRGTTPWRMVRIAVRLRPGDPTTAVGATKYSLRLLARRVLELEAEMAALKSILRPLVASTAPELVSRHGVGTDTAGALLVAAGDNPERLSDERSFAHYCGISPIDASSGTVVRKRLNRGGNRFANEALWRIVMVRMVSDPATRLYMERRVKEGKSKREAMRCLKRYVARELYPLLTSIGP

SEQ ID NO: 264180 - protein, 397 aa, unidentified
MYIVGIDIAKRKHEAAVIDGEGAVIIKPFSFTNNCSGYNRLLAMLAKAKLPLDEVSFAMEATGHYWLALFTRLQKEGFRVQVINPVQTNSIRSFYIRQAKTDPRDALLIAEVIRFGHFSESTLHPENIYELRELCRGRHAIVSMQADVKRKVVALLDQVFPEYETAFTNMFGDTSMAILQTCPTPKELSEMPLEELCHLIEVSSHKRFRMAKARELQELARNSFGFAMAGDVFSTMIRLYAKHLDFLKQQVREMDRKIAEIMETLDTSITTINGIGPTLGAYILSEIGDISRFSSAAKLAAYAGIDPTMRQSGEYNGVRNRMSKRGSPYLRHAIWLATSSAVLHDPALKLYFQKKRDEGKPYMASVGHACRKMVSIIYAVMRDNKAYTPYIPNKISA

SEQ ID NO: 264181 - protein, 481 aa, unidentified
MSQQEKRTNQPGEEKTAVGKGKRGRKRKGMCLEDRPILEANAAGIDIGAREIFVAVPPDRDEHPVRVFSTFTEDLEKMAEWLVSCGITTVAMESTGVYWIPPYDVLEQHGVKPCLVDARGMKNVPGRRTDWHECQWIQFLHSVGLLRAAFRPDGDVCAVRSVMRHRTELVEMTSQHIQHMHKALTQMNVQIQHVISDLTGVTGLAIVDAIIAGQRDPVALAKLRDPHIKASEEAIRKSLVGNWRPEHLFTLRQSRKSYQHYQEQIAACDEEIERLVLAFVPRVDPAERPLPPDRKRKQRGRKKKNINPKTGFDLRTESYKLFGVDLTQIPGLMAMVLTLFSEVGRDMSRWPTAGQFVSWLALCPDNDISGGRVLWRGMRRVHNRAGDLFRMAAYALHHDQTPLGDYLRRMKSKLGPAGATTATAHKIAIIFYTMVKKQVEYDGTIWEQRDAQREKRFEAKLKRQAQQLGYKLVPIEEKPAA

SEQ ID NO: 264182 - protein, 352 aa, unidentified
MLIIGCDFHSRFQQIAMMDSKTGELVERRLEHDTGEAARFYAALPAPARVGIEATFATQWFEKVLSQYGHELWFGDAAEIRAAMVRRQKTDARDALHILDLLVKNRFPRIWVPSAAERDVRQLVRQRHKLVRFRTSVMNQLHSLAMGQGLCQRQKLWTTVGRQKLESLNLDPWASRRRRELLELLDQLNPSIEELDQAVITEAESRPAAVCLMQQPGVGPVTALAFVLTVGPVSRFPNSKKLVSYLGLNPSEESSGGRQRLGAISKQGNTMMRCLLVEAAQTAARFDPELRRDYQRLKFRRGNSGLAKVAIARKLAVRLYWKLREAARPVPLARMQGSPMNPLGDEVPRTFD

SEQ ID NO: 264183 - protein, 372 aa, unidentified
MGHHTEAYVGIDTSKSCNAIAIADGGRGGEVRYLGELPATEATIRKLVAKLAAKYRDLTFCYEAGPTGYGLYRLLKSLGHECLVVAPSLVPKKAGDRVKTNRRDAVSLAKLLRAGELTAVWVPDERHEAMRDLSRARQAVKKDLQGKRQQISSLMLRLGRIYPGKTTWGPAHMKWLMAQKLEHREQRIAFEELLEGVRQESERVERLENAIREAVPEWSLAEVVAALQAVRGIDLIAAVGVLAEIGDLSRFQNPRELMGYLGLVPSENSTGDKVKRGGITKAGNGRTRRILVESAWSYRYPPRVSRDKQPKVEAAPRRVREIAWKAQTRLCGRFRSLERKGKRRTVIATAIARELSAFIWAINRELMAHRQA

SEQ ID NO: 264184 - protein, 362 aa, unidentified
MNTLARETSAAQIEVAGGVDTHQDTHTAAVVNEAGRMLGHRRFPTTDAGYRQLLAWLGGFGTLRVVGVEGTGAYGAGLARYLMAQGQAVVEVDRPDRKARRAVGKSDPIDAESAARAAQGRVRTGLPKQHDGMVEALRNLRVARRSAVSERANCMRRIKTLIITAPKELRERLRDLSNARLLRACAGLRPDLSLVGEPEQAAKVALRVLGRRHAALSVEIADLDTLIAPLVEQINPALLVLNGVGPDSAGQLLVTAGQNTERLRSEGAFAMLCGVAPIPASSGKTHRHRLNRGGDRQANAALYRVVLSRMRWDPRTRAYVARRTTEGLSKKEIIRCLKRFIARDIYYVLRQPAVTLVDGHAR

SEQ ID NO: 264185 - protein, 392 aa, unidentified
MVCVGIDVAKDKHDCFILNSEGEILADVFTISNNREGFETLLQTIHSCKCPADKIKVGLEATGHYSYNILGFLLDSGLATYVINPLHTNLYRKSLSLRKTKTDRIDARTIAAMLMSDVDLKPYTDTAYHNEELKSLTRYRFDKVRERSKLKQSVSRLVNILFPELEAIVPTLHIASVYALLAEFPGAQQIAAAHLTHLKTLLEDASKGRYSRDKAVEIREAARRSVGSKMPAKSLELQHTIRLIQELDKEINEIESAIKTIIDEMVSPILTIPGISYRMGAMILAEIGDFSRFESPDKLLAYAGLSPSTYQSGKLNATGAYAHMEKRGSRYLRYALFNAAKYVCIWEPSFAAYLAKKRAEGKHYNVAISHASKKLIRLIFALQVSGEAYKPI

SEQ ID NO: 264186 - protein, 408 aa, unidentified
MEVIHPRCCGVDIHKESVVACLRLHQGRRVKTEVQRFGTTTAELLRLHEWLSQAGCTHVAMESTSVYWKPVFNLLEGSFEVVLANAYHIKAVPGRKTDVKDCEWIADLVAHGLIRASFIPPLAIRELRDLTRHRKSLVRDRVKATNRVHKLLETANIKLANVVSDVLGVSGRAMLDALVAGETDPEHLATLARGSLVPKVKPLAEALCGRFTSHHAFLLGQMLTQLDQLAGLIARCDVRILEVAKPFEPEIQRLQTIVGVGRRSAEVLVSEIGVDMSQFSTAGHLASWARICPGNYESAGKRRNASTGTGNNWLRTVLLECAWAAAHSRKSYLSAQFRRISQRRGSKRAGIAVAHSILIIAYHMLRNGVDFHDLGADYFDRINTAKLKRYHLRRLAELGCDVSVLTHF

SEQ ID NO: 264187 - protein, 441 aa, unidentified
MDLLHSHGAGLDVHKKSVVAHARITDASGRVTRHTRTFGTMTSDLLALAAWLLSLEITHVAMESTGEYWKPIYAILEGSFTLLVVNAQHIKNVPGRKTDVKDAEWICDLLCHGLVRGSFIPPQAQRDLRDLTRQRTNLVRDRATVVNRLQKVLEWANIKLASVVSDVVGVSAREMLAAIVEGQSDVNVLADLARGRMRDKRALLEAALSGRVRDHHRFVIASHLEQIDFLDAQIASFDEQIVACVNEQAPPSPPDAPDTPGAAAPPSTNDTDELSWEDAIDIWDSVPGIGRRLAEQLVAEIGPQPEQFPSAAHLASWAKVAPGNRESAGKRLSGKTGKGNRWLRTSLVQAAHSAVKVKSSALALYYRRLAKRMSGKKAMMAVAHKILTIGYRLLSKREMYSEPDLSVRDARRTEQLAAQMQRRLERLGYRVSIEPLTASAT

SEQ ID NO: 264188 - protein, 357 aa, unidentified
MNITTVGIDLAKEVITVYAQDAQGRNVLSRNFRFKELAEWLVQLPDGCLVGMEACSTAHHWGRRMQAMGLQPRLMAAEFVQAFRKSRSAKNDHNDAEAIAIAVRQPTMRFVAIKTEDQQSRLAWHRVREGWKEERTALINRCRGLLLEFGYPLARSAAAFGRGLKTSLQEEALPPNLRRLLAQIEAQLRQLDQQLALCDREIAQSARDDEAAKRLQAIAGVGVITADAVCASVGNAHDFKNGRQFAAWIGLTPRQYSSGGKTQLGRITRRGDAYLRSLLVQGARSTLQATLKKAPDKLNRMQQWIIRLYGRVGYHKTLVAIANKHARQLWALLAKGETYDLDAWQKYAIGELSLIEG

SEQ ID NO: 264189 - protein, 346 aa, unidentified
MGIDAHKRTHTAVAIDEAGRKLGEKTTRMTTTEANLELLRWADGFGPDRRFGVEDCRHLSRRLEVDLLAAGEQIVRVPPKLMAHARDAARTYGKSDPIDALAVARAVLREPNLPLAHLDARTRDLRLLVDHREDLVRDRVGLIDRLRWHLHELDPSWDPDPRVLVRFKHLDRIAARLEGLTSTLAWVATDLVGRIRELTVAANELERRIVAATSGPAPTLLSVPGVGALTAAKIVAEVADVRRFRSKDRFARHNGTAPLPVWSGNRVRHRLSRTGNRQLNTAIHRIAITQMRIHEPAKTYLERRMVNGNTKTEALRALKRKLSDVVYRALLVDADTTETAALEQAA

SEQ ID NO: 264190 - protein, 346 aa, unidentified
MPIVGGLDIHRKQITFDYLDTATGQVCRGQVSPADREHLRAWLARFAGRDDVAFAVEGCTGWRYVAEELAAAGITAHLAEPADTAFARGRKRHAKTDKTDCRHLRMLLAEGRLPECWIPPARILECRALLELYHDLRAEHTAWVQRIHAVLFHQGAPALGEGTLRTEQGVAALRAVTAEWLSPAGQLQVATALEILEALEARLHMLRHQLTDAARHLTGAKVLAARLYGVGPVTALAMTCWLGGKDRFSSSRKAVRFAGLDVTVYSSDRKGPPGRLSRQGPPVLRWAVYEAGKTHARSSAPDHAYYAQVKDRCNGKRAALSEARKILRQACHILAELGDDALAPAA

SEQ ID NO: 264191 - protein, 357 aa, unidentified
MSQQSNNCAIAVIGIDIGKNSFHVVGHDHRGAIVLRQKWSRGQVEARLANLPPCLIGMEACVGAHHLSRKLQLLGHNARLMPAKYVRPYSKGQKNDFRDAETIAEAVQRPTMKFVATKTADQLDLQALHRVRERLVSQRTGIINQIRAFLLERGVAVRQGLRFLRAELPGILATQTDVLSPRMLRILEDLSTDWRHLDARIEGLSGEIETFAHQDQHCERLMTVPGIGPIISSAMVAAIGTGEVFSKGRDFGAWLGLVPKQISTGDRTILGSISRRGNRYLRALFVQAAWVVLVKLGPKQWERYGLKSWIEAAKKRLHYNVLAIALANKLARIAWAVLNKGRVFTCVKTDAMASRPA

SEQ ID NO: 264192 - protein, 371 aa, unidentified
MGKYIIAGCDLHDASMLLKVAVDRQESEKLYFDNDPEGRQKMIVELKRRKKAARADRVYFAYEASGLGFTLYDELTEGGIPCFVLAPSRMERSVKQRRNKTDDKDAERVLKDLRGHLLGGNELPAIWVPDPQTRDDRLVVRARLNVGDKRTGVKTQIRSLLKLHDVPRASRTPGGRTKAYRVWLQHLSDSEKALPWGARITLKTLLAQLAALDQERARLDEAVRLMAEFPRYAEAVKALTALQGVGILMAMVFLTEMGDLSRFANREAVGAYLGLAPSADESGEQNDHKGHITGHGSGRVRYLLCQVAWVRQRLDAATKERYERIAAKNPKHKKIALVAMMRQLAVVLWHIGLEAQRRAGVFAKGTAATAA

SEQ ID NO: 264193 - protein, 355 aa, unidentified
MQTLDENSIVVGVDVHKYSHTAVAMNAWGEERGMLNFTNNTLETYREWLEQMGLKENIVIGLEDVNSYGLHLVEDLRSRNYHIRYVPAILTERERKCSTKRHKSDAVDAKRVGKVILHKYEETLPARESIADEKELEIAKSLDLLLMERRDLTKQKTITKNQLHCLIHQHYTESYRLHCPRSFTKKAIRWFLDDLKGNKTILASSITRRLQRLLFIEEQICTISKEVSAIGETSREVIALTAIHGCGMVTACTIMAEAVTIKRFKDKHHFSMYAGIAPTPHESGRKHKMHTNPFGNRQLNRAIHSIALSQIAIKGDLRGKEYYQKKLKEGKTKLWALRCLKHQIAKVVFQRLRYA

SEQ ID NO: 264194 - protein, 346 aa, unidentified
MKISVLGIDLGKNVCSVVGLYASGAVVLRRRAKRETLIALASKLPPCIVGMEACCGAHHLGRVFLGQGHEVRLMSPEYVRPYVKAQKNDDRDAEGIAEAATRPTMRFVELKSQEQLDMQTLHRSRDRLVGERTALINQLRAILLERGLVASQGKGKLKQFLVALMDEQGGAGLSPRMVTLIADARTQWAELDRRISAFDAEFVHWTKENEDARRLLTIPGVGATIASALMAAIGNAEAFEHGRDLAAWLGLVPRQFTTGGRPNLLGISKRGNKYLRKLLIHGARAALPYVSERDTPLGRWARALLGRVHPNVAVVAYANKLARIAWAVLRRGEPFAVKGLPLPLTA

SEQ ID NO: 264195 - protein, 367 aa, unidentified
MFTERTSIGLDVHARSVRAAALDTVTGELVEVGLSGEVTEVVAWVEGIRRRWGSVAVAYEAGPTGFGLARALAGVGIGCTVAAPSKIVRPAGDRVKTDKRDALLLARLLRMDELTGVRVPSPAEEDARDLVRARDDARVELMSARHRLSKLLLRRGLVYDGKTAWGPTHDRWLRRERVSGLAGAGSGTLAAFDAGYDAVAGILARRDRLDRLIGGMAKDSPFTPVTNRLCCLRGISTLTGFALAVEIGDWDRFTGRSIASYLGLVPSEHSSGASRSQGGITRTGNSHARRLLIEAAWHHKSRYSPGKTMRDRWALAPQAVAARGDAGNRRLNRRWNVFVTHKKKHNVANTAIARELAGWCWSLAVME

SEQ ID NO: 264196 - protein, 379 aa, unidentified
MKIITQNEKNLYVGIDVHKDTYSLCCFDFQRNELSDEITIRATTKGVIKYLEAIRKKHREEVLFACGYEAGPTGYGLCRGLQKAGYGCVVMAPTTMSNPDGKRRIKTDRIDARAISRILAYKSYSQVHLPSEEIEALKEYTRARYAKKRMLKKAKQELLSFLLRNGKTYPESGNYWTKKFFNWIKTVQFSKKWMQEAFNEYLAEVYSLKAKIERMDMKIREIAGLEIIKDKVDKLVCFSGIDVSTAVETVVEINDFTRFATAAQFVSYLGLCPGQDSSGKRKTMLPLTKAGNCRVRTLLCESAKAIKRTNPYGQKSGRILERQKNASPEIVAYADKATKRIRTKMKNLEECGKNYNVSSAAGARELACFVWGMMNGKIA

SEQ ID NO: 264197 - protein, 339 aa, unidentified
MQLYAAFDLHANNSLLGIIDGDGKRVFKKRLHNERELILEVLRPHKEHIAGIAVESTYNWYWMVDALMEEGYRVHLANPSEIQKYEGLKHADDNHDAFWLAQMLRLGILPEGYIYPKQERPVRDLLRKRGHLVKIRTSLILSLQNIITRNCGLRLNVNDVKRLRENRVSPLLEENDDLALAGMVSKETIDFLTHKIRKIERAVEGKIQLKEQYRYLLTLPGVGTVLALTIMLETGPISRFAKVGNYVSYCRKVSSQWTSNGKKKAGGNKKNGNRYLAWAFSEAAELARRYNSQARAYYNRKMQKTNFMLAHSALSHKLARAAYFIIRDQVVFEPGKLFR

SEQ ID NO: 264198 - protein, 448 aa, unidentified
MPTRKPSRPRKMKLPKDLQHINPHAAGIDIGGRSHFVAVPEGSCEQPVREFTSFTDDLHRMADWLLACGVSTVAMESTGIYWIPVFEILESRGFEVRLVNARHVKNVPGRKSDVLDCQWLQRLHSYGLLEGAFRPSEQVCTLRAYVRQRMNLVRYAASHIQHMQKALAQMNLQLANVVADITGGTGMRIIKAVLAGERDPLVLAQLRDARCKSSEATIARSLQGNFRPEHLFSLKQAVDLYEFYQGQIGECDRQILNQLSSFDGPDASGNGPAESLDEALQRMTGVDLTQIDGINSNSALKIISEIGTDMSRWKSAKHFASWLGLCPGTKISGGKRLSAKSKPVANRAAGTLRMAAFSLFNSKSALGAYLRRQRSRLGAPKAITATAHKLARLVYSMLKHGSAYVDVGQKRYEERYRSRVVENLKRKAHDLGYALVEVCAKQPQPVAS

SEQ ID NO: 264199 - protein, 352 aa, unidentified
MLIIGCDFHPGFQQVAIFDNRTGEIEEKRLQHRAEAEQFYRSLAGQEVLVGMEACGHYPWFERLLEELGMELWFGDAARVRASEVRKQKTDRRDAEHLLDLLRADRFPRIWVPSLEVRDVRQLLVHRHKQVQARTRTKNQLQAMALSCGVQKQRKLWTKAGRAELEQLPLLPYAAQRRQRLLEALDALEAEISELDRRVAEEAGQRPEAVRLMTHPGVGSVTALAMVLTLGPAERFGSAKQVGSYFGLIPSEDSSGGKQRLGRISKQGSSFLRFLLVEAGQTAARYDPQLKRFYRRLAVRKNRSVAKVAVARKLATRLYLMLREDWTYAQLSQAVMQVSPSHSVAGEQEPSV

SEQ ID NO: 264200 - protein, 334 aa, unidentified
MHRAGLAFASMSQNNNNNLTFYAGIDIAKATLELGLGGTSSSASNDPKGHARIIKLLVAAEAARPGYKIHVILEATGGYEAALVEALHGAGLRLSIIQPSRVRHFARAKNKHAKSDPIDAAVLAAFGEAIQPPPTSPPSVAQTHLVRLVGRRAQLLDTRTAELNRAAHYSDKLLRTQSRQLLALLTRQIAQCDRAIAAQLAADEAMKARAERVQQVPGIGPVVAAVLQAHLPELGSLKEGEAAALAGLAPYDRDSGPRKGPRHICGGRAPVRCALYMAALSAVRHDPILRDFYARLCAAGKKPLVALTAAMRKLVELLNHMLSKPTFKLAVRPN

SEQ ID NO: 264201 - protein, 482 aa, unidentified
MKKHNIYQNQSQQLLGLFEQAANNAKVMCVPIDYAKKDHVVMFCNGYGDILRKPFSVKNSPEGVDYLTDQVMRSCRQRAISEKHVFFGGEQVGSFADNFVSTLRNQGWLVAGVNAHEAKIQRENLQASTDRLDLLGIAKSLLNRRADCSPAQSGIYLNMRTVVRHRRKLVGITTEVRNRIHTVVDRLFPGFLNESKSGITPFSKSSLWLMKERFSASQIRRRRRSTLIEALRRLGTKKPEDTADMLQQYASQVLKPPQDYVHMLQLSLAQHVKHFCCLQESIGQLETEIALNLAQTQGAFLTSVRGIGIVLAAGVSAEIGNPFEQKPLNNLVSYCGIIPRIKQTGGPQGNTKTGKVAKRCNRILKDYVVKSASHLGLHGPADLKSDYQRRDAAGQHADFGMARRYLRMAMCLMRTSQIYLPNRLRKSDSQIQDRADYYVMSWPLLRDKWQKSGALETAFNADQPLGQWRKIVQQFYGIKLTL

SEQ ID NO: 264202 - protein, 493 aa, unidentified
MVALVAHGLSNDEIAEALIVSSATAKTHVSRAMIKLGWASMPGTGLLDVACGSGGPIGGHPRFRGSRNCAKRSNYLLAWFGLLKERPPGVMTGFRSQDSRRTFVAQGSGLTRGDRNRNRKIAVVRGVVRRDRAVLAVDLGEDKQVAVVMDHEGRVLARKIVKAKAYQLGGLLGWAAGQAARAGFAGLTVACEPTGHRWTALMGLADAGGHGFCCVQSLAVARAREGDDYTRDKTDHRDAYLIGKLVIRLDCYLPERAGEDWARLRAMGYDRFLVAVRRELPRWGGKLIRHGIARSVWEALADTGGVAAQRRGALERVHLLLGDWRALRARLADTEARMTAVLDELGLTALAASIDGVSALSAAVMLAETGDPRRFTSGRAVVKHAGLNPSERTSATMTGQARISRRGRPGLRSAAWRAVWGALRHNKVLTAKYAHLTGRDQNRLADGQARTACAATLLRWLWAVITTAQAWDARIAAGQIPARPRAVTAPAAA

SEQ ID NO: 264203 - protein, 357 aa, unidentified
MNKQRDYILKGEKVFVGLEDSKKTWKLCARSGGMVVHETSMPAQYEVLHNYFNNKFPECQIEVMYEAGFRGFGLHDRLEADGWECIVTLPHTVTEEKCQRKKNDRTDCRRLAKNLEDRDYHVCFVPDKELREDRQVSRTYGQVYADIKRVRNRIRRMLEFHGLDNGLPAGRWGQAMYARVREQLAETEMSDSLRLSFEAMFRELEHLRQLRKDLLLQLMRLARSNRYKESVELLKSAPGIGVLTAVRLVLEWGDVSRFRRKEEFASFLGLVPSDYSSGERERQGHITKQGNRGARSWLVECSWVAIRFDPVLLEKFRRVLRSCGSKKKAIVAVARKLAMRLRGLLLSREPYVVGVVE

SEQ ID NO: 264204 - protein, 416 aa, unidentified
MKLFVGIDVSSEKLDVCFLTDDDQLSILSEIPVTNDIEGATSIRDMILEFNENYHFNQIVIGMESTSMYSFHPSMFFHEDEELKKLNTLVTIENPFRIKQFSRMFDEDKTDRNDALRIADFLRIQRFTTSPIKEEKYMALQRLTRTRYQLIKQLTRTKQHFLENLTYKCNTLAREMRDESTSLFSATVISLMTEDFTLDELAELPLEAFCDLLQEKGRGRFKQPEKIAKAIQRAIRSSYRLGSVAQESIDIVLGVLVCEIRALEKNIKELDKAIEQLVVVIPEYQCLTSIPGVGKVYAAGLIAEIGQIERFEDQTKLAKYAGLSWKVKQSGNYQSQNTPLTKQGNRYFRYYLVEAANSVKNYLPEYKAFYQSKYKEVPKHQHKRALVLTARKFTRLVDTLLRNHQLYTPPRSVIDK

SEQ ID NO: 264205 - protein, 316 aa, unidentified
MHVGIDVSKNHLDAHIHETGEAFRVSNNDAGIEELLARLAGVEPERIVMEATGGYESAAFAAMSVRGLAVALVNPRTTRHFAKATNRLAKTDQVDAACLAEFAAALRPRITPMPDEEATELDFLITRRRQLVDQLVSEKNRRTSPQVKRLGTDSRVKQSLERHIAWLEKEIAKFDDQIKSRIRSSPAWKQKDELMQSVPGVGPTTSASLLAHLPELGELDRKQIAALAGLAPYNADSGQSSLPRHIRGGRASARTALYMATVAAVTHNPLLRAFYRRLVAAGKAGQVALTACMRKLLTILNAILRDQRPWRLALNP

SEQ ID NO: 264206 - protein, 412 aa, unidentified
MAEETFRWFAGIDWGSATHQACLLDEAGTVVGERAFAHGGAGLAALCDWLVSIAGDPGTVAVAIEVPHGPVVDALLDRGFAVHAINPKQLERLRDRVSLAGAKDDRRDARVAAGGLRTDPHLFRPVEAGDPAVIALREWSRLADELQQERVRLSNRIRQQLWRYYPQLLEVSDDVTAEWVLDLWTLAPTPTKAARLREATLARLLHEHRIRRVDAERVLAILRQRAITVAEGVTEAAVLHLRSLVARLRLANREFHQAERKLNELCATLRESPPAAEGAPHDAAILSSLPGVGTVTLATLLSEAAGPISRRDYAALRTLSGVAPVTKRSGKSCLVTMRYAAQVRLRNAVFHWARVAVLNDPKCRSRYAALRARGHSYGRALRSVADRLLGMACVLLQRQVLFDPDYGSSAAA

SEQ ID NO: 264207 - protein, 338 aa, unidentified
MKITTIGLDIAKSIFHLYAVSKMGRFVNKKQLRRKQVLAYMANLEPCLIAMEACGGSNYWAREFIALGHEVKLIAPQYVKPYVKGNKNDYNDAEAIAEAAQRPNMRFVPIKSVEQQDVQNFHRQRERIKKERTALVNQIRGLLAEYGVVINQGVAAVRKSLPEILEDAENGLTARSRELFAQLLEELWAIDQRFEHCGQRLTSLSQENAVCRRLDEILGIGPITASATYAAAGDGKDFVNGRHFSAWLGLVPGQHSTGGKTVLLGISKRGNAYLRTLYIHGARAVLRHSTKKTDRFSLWAQALLARRGHNRACVAVANKMARMAWVIMAKGETYRVAI

SEQ ID NO: 264208 - protein, 406 aa, unidentified
MRLFVGDDWAEDHHDIEVMDEAGKVLARRRLREGVAGMAQLHQLVGGFLGQDADDSEVLAGIETDHGPWVLALVAAGYRVFPVNPQQSARFRARHGVSGAKSDAGDAHVLADMVRTDSHQLREAAGDSPAATGIKVLARTHKTMIWERTRQVQRLRHQLREYFPAALEAFGDLDASDALELLARAPDPQRAARLTRAQVSAAMKRARRRDIPGKATAVLAALRSEQLAQPAPLTAAYAATARSLIAVITALNEQIKTLQEQVEDHFGQHPDAEIIRSQPGMGTVLGARVLAEFGDDPHRYRDGKARRNYAGTSPITRASGKRKVITARFVHNDRLADALNAQAFAALTASPGARAFYDQQRATGHGHNDALRRLANRLVGILHGCLKTRTPYSESTAWAHRQQQAA

SEQ ID NO: 264209 - protein, 361 aa, unidentified
MIGNRTSVGLDVHARSVVACGLDGQTGELFERRLTPDHGEVAAWVRSLPGPVGVTYEAGPTGFGLARFLAAEGIGCLVAAPSKLQRPVGDRVKTDVRDARHLARLLHLGEIVAVAVPSVEQEAARDLVRAREDVRGDLMSARHRLSKLLLRQGIVYYQGQPWTGVHDRWLRSQSFTLPGLQLAFDIAYDTMLTTVARRDRLDAAITTMAGDSEFTPVVTRLGCLRGVSTLTSFGLAVEIGDWTRLSGRSIGAYLGLVPTESSSGGSRSQGSITKTGNGHARRLLIEAAWHHRQPYRRPGVDLRRRQQRATPAARDRGEQANRRLAARWAAFDARHKRAVVANTAIARELAGWCWSLAVLGG

SEQ ID NO: 264210 - protein, 469 aa, unidentified
MKRKSRRAKCQKVSPFSGDLQLIEPDAAAVDVGSRSHWVAVNPQRDPNPVREFGTFTADLISLADWLAQCEAKSVVMEATGVYWVSLYELLERRGFKVYVVDAHTVRHLPGRSKSDVKDCQWLRRLHSYGLLRGSFRPPAQIRQLRNYLRSRTKIVEAAAQQQLRMQKALTLMNIHLHHVISDLSGLTGLSIVRAIVGGERDPNRLARLRDPRIRASKETIQKSLEGNWQEELLFDLKIALESYDHFQDQIAAYDEQIRQELKEVQSKVDLAHEALPAARLKACRKRPGMSQQDQLDLREELYRISGVDLTRIDGISLQTAQKVFFEIGTDVSAWSDEKKFSSWLGLSPNHRISGGKVLKRSSRKVVNPLSVALRLAARTLRNSHSALGANFRRLIAKIGMPKAITAMARKLAVLLYRMLKYGTQYVDKGMQHYESKYQETKLQYLRAQAAKFGMILLPKQATATHVAS

SEQ ID NO: 264211 - protein, 373 aa, unidentified
MFHFTTLFIGMDVHKESFSLCYYDMMTNQFKHSTKVGPNVSYIVNYVNELRRLYGQDAEVLCGYEAGCLGFTLYHQLQAHGLPCIVMAPTTVMKEGSKRVKTDKKDAAQLAKALAFRSYRPVHIPTVEDEQVKEYIRMRTDHKVALKKIKQQVLAFCLRHDFRYTEGSSNWTQKHVRWLHSLNLDGLYAEILTEYLLTYEKLVDQIERYDARIEQLAQSDCYQEKVSQLSCFIGVKTLTALSIVTEIGDFNRFATAQHFASYLGLTPSENSSGDKERRGAITKAGNSHVRRLLIEAAQSLAKGTIGYKSKELKKRQSGNRVEVIAYADKANERLRRRYRTLVLGKNKKQNVAKTAIARELSGFIWGMMTGRIA

SEQ ID NO: 264212 - protein, 344 aa, unidentified
MDHFAGLDVSVKETSICIVDDAGKIVREVKVASEPEALLAVLKNPAYHFKRIGLEAGPLSQWLFSALAESGLPVICVETRHMQAVLKAQINKTDRNDARGIAQMMRAGLYRPVHVKTIRSQKLRMLLTHRKLLQSKAIAIENDLRGTLRNFGLKVGVVGKVKFEARIRELVENLPDLAVLVEPMLIVRRTLREQIVILHRRLLAIVRDDEVCRRLMTTPGVGPVVALTYRATVDVPARFRKSKAVGAVFGLTCAKYQSGEVDRNGRISRCGDEMMRVMLYEAAQSMLRSKKWSWLKAWAMQIARRRGMKKAIVALARRLAVIMHRIWVDGTEFRWTREQATAAA

SEQ ID NO: 264213 - protein, 427 aa, unidentified
MTDQAKNKPYCSWIAIDIAKDFNVVMIETADGKRRRFRMANSGKDYERLIEILHALPQPCHVGFEATGNYHRPLAFRLLTEGFDVSLISSLASARYREAIFNSWDKNDPKDAGILLELLKRGIVQVYTDPIKSGFHDIQELSKTYYHITLSRTRLQHSILTHYLPLYFPEMGKFWNSTRSEWWINFLLHFPTPASVTQHSEQDFCTIAFPIIGRKVNKQAKLQELYATAQNSIGLPVATDSLACQTFKLQLQRYQELTSQRHQLEQQAESVLSDHPDYCILRSVPGIGPIIAMTILAEGGDLRRFAHHRQFLKYCGLDLAKNQSGNFRGQDKLSKRGNARLRLALFMATITAVRQTENSFREKFHRYTKATPDDADCKRKARTAVMAKMARVIHSLVKSSTPYQGYFEVSPSGSIPLCRAVGATRTP

SEQ ID NO: 264214 - protein, 347 aa, unidentified
MRFYTQQHKHYCGIDLHARMMYLCVMDAAGAVLLSRNIDCSPRAFLSAVKGFRDDLVVAVECMFTWYWLADLCEREGIGFVLGHALYMRAIHGGKAKNDRIDAHKIAALLRGGMIPQAYVYPPAMRATRDLLRRRNHLTHKRSELIAHIQNTVSQYNLPPLDHRIDKRCDRVGLLSHFPDPQVQNSIALDLALIEQYDVLLPKLERHIRACAKQHDRKSFVLLRSIHGADLILPLVILYEIQDIGRFARVQEFLSYCRLVKPARESAGKIQGHAGGKIGNAHLKWAFGELATTFLRANPPAQRLHERLKAKHGKGKALSVLAAKLARAVYFMLKRAQVFDETKFYQD

SEQ ID NO: 264215 - protein, 327 aa, unidentified
MNVAEYKVVYCGIDISKLTFDTFISGKSNAFKNNLKGFKKFIELLPEHAHCVMEATGPYYLKLAVYLQSNGLQVSVVNPLVIKRFSQMRMIKAKTDKADAMLIALYAEKESPKLWIAPKSVLLKIQQEQAVLEGMKKQVRSLNNQMESIQVQPSQSQEALKVLAAMVDIAQKQIDLLEASILDKAQKAFPKELELITSVPGIGIKTAIALLVSTDAFSKFKNGKQVASYIGICPRIYQSGSSINGKGHITKMGDPRARTLLYMGACSAKKHNLACQQLYDRLVKNGKAKKLALIAVANKLVKQAYAVVTQESMYNPEYYSVLNRSLS

SEQ ID NO: 264216 - protein, 413 aa, unidentified
MKIVHRICCGIDVHAKFLVACLICDGTKETRKFSTMTDELLSLRDWLTSKGCTHVAIESTGVYWKPVFNILESALTVVLINPEHARVLRGRKTDVKDAEWLADLLQHGLVTPSFIPPPEIRELRELTRYRESLVREHTAVANRIQKLIESGNIKLGQVATDVLGASGRAMLRALARGETDAGKMADLARGALKEKRGSLTRALEGRLTMAQRFVLKELLQRIEELEDARKRVDRQIEQAMNDPSHPKLAWAWKNLQTIPGVGQRVAEVVIAEIGVQMHEVFPTDGHLASWAGMCPGNKASGGKRMSGKTRHGNTYLRSAMVQAGWASSMTKRTYLSAQYQRLARRLGRKKALVAVAHSILVIIYHILDREQSYTELGGDYFDRQHVDKQRDYLLRRLAALGLKVRIDEEPAAA

SEQ ID NO: 264217 - protein, 427 aa, unidentified
MQQEAQEQQEFGAYIGLDWADRTHVISLRGTDSGKVEHYQLVHKPEALAEWVSDLQRRFPGQRVAVALEQARGAVVHALMGYDFLVLYPVNPKTLAKYREAFSPSGAKDDPTDADLLLELVTLHRDKLRAWLPDDELTRTITLLVEYRRQLVATQTSLSNRLTSLLKLYYPQALAWAGELTTVQACDFLQRWPTLAQVQRAAPAKLRQFYLAHGCRKADVIEQRLQEIKLAQPLTRDGAVISASVVMVQATTTQLRPLMEAIARMEKQIAELFRQHADHELFSSFPGAGPVLAPRLLAALGADRGRFAAATEVQQLSGIAPVMERSGKTCWVHRRWACPKFVRQSFHEFAGQSIRWSTWARAFYDQQRQRGHGHHAAVRSLAYRWIRIIYRCWQMRVPYCEQTYCRALQRRQSPLARVLAAPMQNAS

SEQ ID NO: 264218 - protein, 392 aa, unidentified
MYIVGIDIGKNHHEASIVSPEGKQIGRSLRFATTHKGADSLMSFIFKNIGNSPCVFGMEATGHYWYPIYSFLKAKGYTICVINPIQSDSLRKMYIRQTKNDSIDSFLIAEVIRFGQFGTTSMADENILAMRQLCRYRDSVISSRTEIKLRIGAIMEQIFPEYEKQFSSLWVSTSMGILEKYLTPENIENAPIDELFEIIKDKSHNRLTKAKAISIKEAAADTFGIKIAQDAFSFQLKQLIDRMNFLDKQIEALDCQILEYYEKFDCYLHTIPGIGMIAAAAILAEIGDINRFKSSSALVAFAGIDPTVRQSGEFSSTHNHMSKRGSPYLRHAIFLAATTCSFHNSPLNAYYKKKREQGKHHLTATGAVARKLTTVIYAVLRDGKPYEPKKFC

SEQ ID NO: 264219 - protein, 314 aa, unidentified
MKNDIRFVAMDAHADTLAVSLSEGPGEVRRLGIIPNRPESVRRLIRKLGPVEKLRVCYEAGPTGYALYWQLTQMGVPCDVVAPTLVPCKPGDRVKTDRRDADKLAVLYRGGQLTSVWVPDKEHEALRDLVRAREAAKSDQLRAGHRLHKFLLRHGWRAPQGIKPWTQKHLEWVRRQVHFERPAQEAVLLDYLTEVQHARDRIARLEMAIDAAVAAAPPPMRAVIEALQALRGIAQVAAATVVAEVGALSRFSRPRQLMGYSGAVPREHSSGSSTWRGSITKTGNAHLRRIVGQASWSYRHRPASPGPCAGAKRG

SEQ ID NO: 264220 - protein, 422 aa, unidentified
MPLSSNIYRGDEAMLKIVYPICCGIDVHKTFVVACIASTNDKGVTTYQTKRFSTYTKNLNELSDWLSVNNCKDVCMESTGKYWHPVWNVLERTCRPVLAHPKYLKAIRGKKTDKKDAKWIADVFKHDLVSGSFIPPVIIRKLRDLMRYRVKLTNYTTGEKNRAQNCLTTSNIQLDHAFTDVFGKSATRILNHILDNPGDKTFDVTPFVDRRCKTPIEEIQLAVDGDISSEQAEKLKIIRSHMDSLDLCKVNLESAILFLVDPLLPQVNLVSSVPGIKDFSAIAVIAEIGFDMSVFPTAKHLCSWAGLAPQCNESGGKKKSSRVSKAGAYIKPLLIQCSNAVVTSNKHPEIKNRFLAIKKRRGHKKAIVAIARMLLTAIFHILSKSEPYNPALYRNSDVPPVDSVERAVKLLEKRGFTVSQPT

SEQ ID NO: 264221 - protein, 351 aa, unidentified
MMIIGVDYHPSFQSIAFLMEETGECGEQELSHSDGQAERFYRDLQQRGIRVRVGMEATGYSRWFERLLAELGFELWVGDPAEIKTRRVKKQKTDRKDAQLLLRLMRENNFPQIWVPSSENRDLRQLLWHRHRLVQMRTRIMNQLQALAMNEGYRWKKKLFSEQGRAQLEKIALGPWASRRRQELLELLDRMNPTIQELTAAVERGARKRPDVMRLMTHPGVGPLTALAYVLIIGTPTRFPRGKQIGTYVGMVPSEDSSAHKQRLGHISKQGSSLLRFLLVEAAQAAARKHPDWRRRYIHLAMRRHKSIAKVAMGRRLAIRLYWMWRNGCEYSPKLEFGSYAGQLGGGHSGK

SEQ ID NO: 264222 - protein, 388 aa, unidentified
MIYVGIDIAKLNHFASAISSDGEKLIKPFKFTNDNDGFQLLLSKLDPLDKDSLIIGLESTAHYGDNLVRYLVAKNYKVCVLNPIKTSTMRKNNIRKTKTDKVDTYIICKTLMMQESLRFVTFYDIDLMALKALGRFRQKTIKQRTRLKIQLTSYVDEIFPELQYFFKSGLHQKSVYALLKEAPTPDTIASMHMTHLAHLLKVNSHGRFDKEMAQQLRVLAQKSVGASDSSLSIQVTHTIQQIELLDSQLERVEAEMTEIMKFNDSVIMTIPGIGYINGGMILGEIGDIHRFSSPNKLLAYAGLDPSVYQSGNFQAKKTRMSKRGSKVLRYALVNAAHNVVKNNATFKAYYETKMAEGRTHYNALGHCAGKLVRVIWKMLTDEVEFNLD

SEQ ID NO: 264223 - protein, 412 aa, unidentified
MVARYYYFKEVFFMIAIGVDVSKGKSTVSACKPFGEIIFGPLDVAHTSNDLKELAESIKSLNEECRIVLEHTGKYYQPIARYLFDLGYFVSVVNPKLIHDFGNNSIRNVKTDKADSLKIANYTLANWDSLIPYDFEEDIRMQLKACCRQYYFYLNYRTSLKNNLISILDQTFPDCNYLFTSQKADGSTKWMDFALRFWHRDCVTKHSLADFTRIYNAWCKRHNYRPSDSKAASIYAFAAACVPSLPCNSSTKALIKTASEPLQATCNTMGNLLVEMNNLASQLPEYPVVMSMPGIGPAMCPQIIAEIGNIYRYHDKHALVAFAGVDAPPFQSGTFNSKRRKITKRGSANLRRVTFQIVCGILQRKAEEDPVYQFVRKKQSEGKPYYVYMIAGCNKFLRVYYGRVKEYLDKQA

SEQ ID NO: 264224 - protein, 322 aa, unidentified
MYKFIGIDISKQTFDVAYQKQEKWQLFQLSNTSKGFKSLLAHLNQADYVVMEASGPYYLPLASYLYNKGYKVVVENPLVIKRYSQMKLYRAKTDKKDAQTIAQYASSNQIKLWVPDSEIIIGLKQLQTAIEGIQKMILQAKNQLAAFKSSGVVEPTLAKELSKTIKCLENSKLALEKKQQAIVEAHYQQTMENVTSIPGIGNKTATMLTVITDNFTKFSCYKQLIAYVGFSPRIYHSGTSVRGKSHICKMGKAQIRKLLYMCTWTAKKYNKACREMYDRLKAKGKPERVIKIAIANKLLKQVFAIATSKKKYNENYQPNTCF

SEQ ID NO: 264225 - protein, 356 aa, unidentified
MEQLTTVGIDLAKDVIAACVLDVHGAVIERRVLRRGAFERWAEQLPSSKVAMETCGSAHHWGRWFAARGHTALLIAAEFVVPFRKGGKNDTADAEAIAIAARQPTMRFVPIKTVDQQAILAWHSVREGWKEERTALLNRVRGLVAEFGIVIARSSDRLLTALPELTQDARIPDAMRAVLLEAREQFAALHARLARCDAQIAAHARNSPAAQRASELLGVGPITASALAATVPDARVFKSGRQFGAWLGLTPRQHSSGGKTRLGRISLRGNVYLRTLLIQGARSTLQTAMNREPARASRLQRWIIELYGRKGYYKTLIAIANKHARILWAMLAKDKRYDASAWQQHPMNQLLLAGNT

SEQ ID NO: 264226 - protein, 341 aa, unidentified
MGEISIIGLDIAKQVFHAHGADAKGATLFSRRITRQKLIGFFASQPRCAVAMEACAGAHHWGRELIKLGYEVRLIAPAYVKPFVKRQKNDAADAEAICEAAQRPTMRFVPVKSEQQQASAAVFRARDLFVRQRTQFINALRGLVAEHGWVVPKGLFHARSLMAKIEDPSCPLPQGARDAFLAMVASIRVLDEQIVVLDREITQRAREDPAARRLMTVPGIGPITATAILALAPPAQSFRKGRDFAAWLGLTPQQHSTGGKQKLGAISKMGDRTLRRLLISGSSAVVLHAARRGAPQGSWLEQMMTRKPRMLVTVALANKTARIVWAVLAKQEDYRAPVAAA

SEQ ID NO: 264227 - protein, 349 aa, unidentified
MIVIGIDPHKQTHTAVAIEQATGRVLAELTVRARRPGFERLVAWARALDEQRLFAVEDGCHVSGHLERYLIGRGESSVRVSPRLMGEARRADRVRGKSDPIDATAVARAALAHPDLPRATLAGPEREIGLLAAHREQMVGERTAIQSKLRWLLHDIDPDLAPGPRTLDRYGTLDRLQARLQELEPVAEVRICLDLIARCREITVRANELEREIASLVRAAAPHLLEIPGCAALTAAKIVAETAQVERFPTEGHFARYAGTAPVPASSGAQHRHRFNRRGNRQLNAALHRIAVTQLRIHQPAKDYVAKKRAEGMSKTEAIRALKRRLCRVVFKTMTSTNRPTDGTIPVAA

SEQ ID NO: 264228 - protein, 344 aa, unidentified
MDYFAGLDVSVKETSVCIVDETGKIIREVKVASEPEALLAVLKNPVYPFKRVGLEAGPLSQWLYSALAEAGLPVICVETRHMRAVLKAQINKTDRNDARGIAQMIRVGLYRPVHVKTLRSQKLRMLLTHRKLLQSKAIAIENDLRGTLRNFGLKVGLVGTVKFEGRIKELTENLPDLAVLVEPLLIVRRVLREQLAILHRRLLAIVRDDEVCRRLMTVPGVGPVVALTYRASVDVPSRFKNSKAVGAVFGLTPSRHQSGESDRPGAISRCGDEMMRVMLYEAAQILLVRSTKWSWLKAWAMKIARHRGMKKAIVALARRLAVIMHRIWVDGTEFRWAREETAAA

SEQ ID NO: 264229 - protein, 379 aa, unidentified
MRTAREWGVYVGEVVLLLAIELSAKSWRLVMGANGKRRHVTLEPGDGKGLEEALARAKAKLGLPVDAAVVSCYEAGRDGFWVHRWLAQRGVRNVVIDSSSIEVSRRARRAKTDRVDGEKLLSLLYRWYGGDAEALRPVHVPSLEEEDQRMLHRERQTWVKARTQEGNRIKGLLASQGVRVEGAVAKWGRQLDALRTGDGQPLPPRLMARLGRAIEHYLALSERIKGLEDEQRETLKAAEGAGAVALVELLKTLRGVGLQSAWTLVFEVFGWRRFRNRRELAASVGLVATPYDSGESRREQGLSKSGNRRVRTLMIELAWSWLRFQPDSELSQWWRARFASTQRGRKVGIAALARKLLIALWHMSQTGEIPAGARCSAAS

SEQ ID NO: 264230 - protein, 330 aa, unidentified
MKQYKYFFGVDISKKTIDVTLAKDEDLTHRKFSNDLTGMDELMKWLTELNLNVDDVLFCMEATGLYCFPLTQFLSKNEIDIWIEHAAQIKKTASLDRGKNDKVDSKRIAMYAVKHLDRLRLWKPASHTLEKIRHLATLRERLVETRKKLLIPIQEFEEIGNAEMAKLLTKAIRSSLSALEKDLKNVEANIISVVNNDENLKHLYKLITSVVGIGFVTAINLIIHTNGFTILKDTRKLACYCGVAPFEYSSGSSVRGKTKVHFMANKKLKCNLHMASLSAVKVDADLKAYYERKILEGKNKMSVLNAVRNKLLARVIAVVNKQVEYVKKVA

SEQ ID NO: 264231 - protein, 635 aa, unidentified
MVGPSCEPTVALTPMATTTGEGPDRTRCSGLGLEARCLKNAGDIDRPAIDKMGAVPMRPLIQIDHGVCFTRRCHRHHAQSTAVAQHPAHLRKYVRYRRLEQFEREAHEHRVKHTRSKAQQTRVTNGERHVSHAGCSDTRACHDRHPRRDIHPVNLTGLTNGVRQAEQAVTRPIADLEHSLSVGETERPDPTLPYRVLARIGNQVVAAADPVIVTMDALSRTTMRARFRTRKRPTSVSRGADYAVRVEHTAQSRTRKESRSMANVRFVGLDVHAETIVVAVAETAGEVRSLGMIPNRPEAVRRLVRKLGPPEQLRMCYEAGPTGYVLYWQLIGLGVHCDVVAPSLVPTKAGDRVKTDRRDAEKLARAYRAGDLTPVWVPDAEHEALRDLVRAREAAKKDQLRARHRLGKFLLRQGRRRPTHLKMAWTAGHIDWIRAVRFESTLHQIVLADYLHEVERGAARIAHLNQAILEAIRTAPPQMRAVIQALQALRGVAAVSAATIVAEVGQLSRFENPRQLMGYSGLVPSEYTTGSRRRLGAITKTGNAHLRRVVIEAAWAYRFGPAVRGPLKARQDGLDPVITEIAWRAQKRLHDRYRTLAAKGKNNNQVITAVGRELLGFIWDIARTVERQVPIAATA

SEQ ID NO: 264232 - protein, 368 aa, unidentified
MSNQTIGAVTSDANNRQSAVVTPLALVIKLGIDVHAKEYVVVRQVDEAVSQPAQRFNLEGLLGFVRRQVAVARSVHSCYEAGPFGYVLHRQLSALGVQNLVVRPRDWSTYGERVKTDQRDAAALCSCLDRHLAGNQGALALVRVPSEAEEQARAVARQRQSLVRERVRLTLQGKSAALLRGHRLVGEWWRGNRLAKLAPDLPPELLVILKRWQQVILLLEAQVQALTEQLEQAAPPGLPCGLGSMTWEILSREVGDWHRFRNRRQVASYTGLCPGEHSSGASRQQGSITRHGNPRLRHLLIEAVWRLFRFNPEYRGIAKWRDQFTAARVTQARKKKIVVAIARQLAVDLWRLRTGRTTPAALRLQLSS

SEQ ID NO: 264233 - protein, 385 aa, unidentified
MTATTRRFDPIALENMLCLSFELGEGGWTLSFTSGFAAPVHRRRVPARDRDAVLQQIEAMKERLGLAASCRVVSCYEAGRDGFWLHRFLEAHGIENLVVDSSSIEVSRRSRRAKTDRLDGESLLDLLLRHLAGSQKKVFSVVRVPTVEQEDRRHLHRELQSAKQDRTRVTNRMKGLLANQGLPLDLKRDVSTQLASLRRWDGSPLPEGLRARLGREWERVVFCTALIERLEAERREILQRGKDPVLEKVRQLNLLRGIGTNSAWLYAMELFGWREFRNRKQVGAIVGLTPTPHTSGMQERERGMSKAGNRHVRAMAIEIAWGWLRFQPRSALSQWYQRRFGMGSKRLRKIGIVALARKLLIELWRYLETGVVPEGAELKTDIRVR

SEQ ID NO: 264234 - protein, 358 aa, unidentified
MTTAATHHEHGNTPAGTLFVAFALREKTWKLGFTTGHGQKPRERTVTARHQERVLEEIAQAKRRLGVPDTAPVVSCYEAGREGFWLHRFLQAHGITNQVVDSSAIEVNRRRRRAKSDGLDVRKLLSMLMRYAQGERQVWQVVKVPSVEAEDQRHLHRDLETLKQERASTTTRIKGLLSSQGIRVTSLSNVPEQLEALRLWDGSPIPPGLRRRVLRVYAHYTFLSEQIAAVEAERRALLQASTDASIDQVRQLMQLKGIGINGAWLLVLAFFGWRAFTNRREVGGLAGFTPTPYQSGERTREQGITKSGNRHVRWMTTELAGSWLRFQPDSALSGWCRERFGGGGKRLRRMGMVAVARK

SEQ ID NO: 264235 - protein, 342 aa, unidentified
MQIAVLGIDLGKNSCSVVGLDASGRVVLRRRLHREGVVKLAAEQPGCVMAMEACCGAHHLGRRLRDQGHQVRLMSPEYVRPYVKAQKNDDRDAEAIAEAATRPTMRFVELKSETQLDMQSLHRARDRLVGERTALINQLRAFLLERGIIVPQGRRKLELHLETLLAAEQVSLSPRTRLLIEDQQAEWRELDRRIEAFDEEFAQEAKTDEAARLLLTIPGIGPLNATALVAAIGKAETFGRGRDLAAWMGLVPRQMTTGGKPKLLGISKRGNGYLRKMLIHGARAALPTLSKSETPLGSWLRGLTARAHVNTVVVALAAKLARIICAVLRTGQKFELQAATVS

SEQ ID NO: 264236 - protein, 343 aa, unidentified
MHTTKQDALYGGADLHGRNVLISLCDVEGKTVYSRRVKADIDSVCEALQPYQERIERLGVESTFNWYWFVDGLSEAGYVVDLGNPAKMEQYSGIKETNDLSDAAWLAEQERLGIFPACYIYPREIRPVRDMLRRRQLLVRQRTQSLLSLKSLLERYGIPSPNAQTIKKWAGGDIEKTGLDICVQEQLRSLLNSLKANDREALRLEEIALGFAEPTRDFERVQMVPGIAEVLGLLIMLESGEFSRFPSAGDYASYCRAVKSRRISNEKKKGSNNRRNGNKYLAWAFMEAATYAHRFYPRIHAWYERKRQRKNVAVAKKALACKLSKAVWHVMNGKDYDEKMLFG

SEQ ID NO: 264237 - protein, 412 aa, unidentified
MNIIHRCCCGLDVHAKTVVACLIKHGKKQIRTYSTMTDDLLRLSDWLVSEGCGQVAIESTGVYWKPVFNILEGVLEVVLVNARHVKGVPGRKTDVRDCEWLADLLRHGLLRASFIPPLPIRELRELTRHRHTLVRDQTAVSNRIIKLVESANIKLAEVASDALGVSGRAMLRALAEGEEDAAKMAELARGRLKVKQAQLSRALQGRLTRSQRFVLTELLDQLNQLEAAMARVSEELRVQLEESRDPFVKEAVDLLQSIPGVGEQVAEVIVSEIGTDMTRFPSDKHLASWAGVCPGNNESAGKRKSGKTTKGSNYLRAGLTQASWAASHTKLTYLAAQHKRLIRRMGKKKALVAVGHSILVIAYHILKNRVSYHDLGGDYFDRQNVELQRARYIRRLEALGLKVSVEILSEAA

SEQ ID NO: 264238 - protein, 339 aa, unidentified
MSQEKYIGLDVHQATISAAVMDGNGKLLMECLLETKAATILQFIQGLRGTLSLTLEDGTSAAWLHDLLKSHVSRLVVCDPRKAALLKEGNKSDRIDARKLAELFRNNQLNPVYHGEHGIRTLKELARSYGTITKDLTRVMNRIKAPRHRAEWLAKIVEPGVRSRAERLYQQLDSLQPVHLEARREFLRESYKHAAVKLFRQIPSIGPIRAALLVALLQTPHRFRSKRQLWAYSGFAVQTHDSGEYRYVRGKLQRNRERISVRGLNDNHNKELKNLFKSAAISASTRPGPLRDFYMARVESGMRPTMARLTLARKIASIALTMWKKGASFDPKQLQRQAA

SEQ ID NO: 264239 - protein, 409 aa, unidentified
MRYYLGVDWADQTHAVWVGDERGTKIAARTVPHTAEGMIEWGRELDEWRAQGLELWAAIERPEGRVVDFLLDHGVVVYPVNPKALDRARDRFRQGGAKSDPFDARVLADFLRTDHPRLQALQPSSEAAQELKFLTEDCQRQIRQQTRLVNQLTNTLKAYYPRGLEVAELTTALAREFLQAYPTPAAVAALTERQWQRWARAHRLSEARTQELWAVLQRPQLPVPPHVVRAKARLMHTLLAELELVVAAVGAYRQAVEDFFAALPAAQWIRTLPIGEHGVTAPTLWARLGDAPGRWESFHHLQAHAGAVPVTVKSGKQQVVHFRFACDKALRSVVDQVAFLSLRSSEWARAYYDQQRARGHEHREALRALGAKWVKIIFVLWERQVPYDESYHLATMARQQLRQRPKKLA

SEQ ID NO: 264240 - protein, 477 aa, unidentified
MVSQTQRGGRSVGKRSGGNGMTRGDRRRNARRERLRGLLPRDGAVIGIDLAEDKQALAVIDHDVRVLARKTVKVKAFRLGEALDWAVAAATVKGFAHVTVACEPTGPRWMQVQRLCAERGLPLVCIQPLVSHIAREQQDYTPHKTDESDCVLIGRLATELHCYVPEELDETWAHLRHLGRRRAQLITAATASVQRIRDFLSVAWPVVTEACAGPFESVTWLAALQLVTGRCGGDPARLAALGLEEFTALVRGAVPGWGGMKGWGRICGRVFAALTDTEGVVAWSRRGLLRRVADELGDLARTRAQLRAVAADMVLVLGELGLSRLGDIPGLTAVGAAAILAETGDPRRYDSSSSLVKHAGLSPSENASGAFEGQAHISRRGRPGLRLTAWRAVWPMLQFNPVMAAKYAALTQAAGAAAADAGSQQARAAAAAARARRAKARVACAASLLRWIYSMVVHGTSWDAAAASGAACQPEAA

SEQ ID NO: 264241 - protein, 405 aa, unidentified
MDVIIERACGLDVHKDNITACIMTSEGKEVRTFSTKTVFLLELIDWIKEQGCSHVAMESTSVYWKPVVNLLEAEGIEFLVVNAQHMKSLPGRKTDVKDAEWIAQLLRHGLLKASFIPNRTQRELRELVRYRRSIIEERARQHNRIQKVLEGANIKLGSVVSDIMGVSAKDMLRAIADGEEDPLKLSNLARRTMKRKKDELELALKGYVNPHQRLMLKTILTYIDFLTDQIELLDNEIAQRVSLYEEDIERLDSIPGIAKRMAEQILAEIGPDVGTQFPSAAHLCSWAALVPGHNESAGKRKSSRAKKGNKYLRSALTEAAQSVRGSKNYLGALYRRTAGRKGKKRAAIVVAHAMLRIAYYLLARKEMYVDLGEDYFDKQRQVSIVRHSVRRLENLGYTVTISEAS

SEQ ID NO: 264242 - protein, 392 aa, unidentified
MYIVGIDIGKNHHEASIVSPEGKQIGRSLRFATTHKGADSLMSFIFKNIGNSPCVFGMEATGHYWYPIYSFLKAKGYTIYVINSIQSDSLRKMYIRQTKNDSIDSFLIAEVIRFGQFGTTSMADENILAMRQLCRYRDSVISSRTEIKLRIGTIMEQIFPEYEKQFSSLWVSTSMGILEKYLTPENIENAPIDELFEIIKDKSHNRLTRAKAISIKEAAADTFGIKIAQDAFSFQLKQLIDRMNFLDKQIEALDCQILEYYEKFDCYLHTIPGIGMIAAATILAEIGDINRFKSSSALVAFAGIDPTVRQSGEFSSTHNHMSKRGSPYLRHAIFLAATTCSFHNSPLNAYYKKKRDQGKHHLTATGAVARKLTSVIYAVLRDSKPYEPKSFC

SEQ ID NO: 264243 - protein, 370 aa, unidentified
MKKKVLYVGLDVHKKTTDVAIAPGRSNGKVRSYGKIDSTLDALNKLIKKLKDGDKQLRFVYEAGPCGYQIYRHLDAKGIECSVVAPSLIPRRSGDRIKTDRRDAVNLARLFRAGELTSIYVPTVEDEAIRDLVRCRDDIKRFEKKARQRLLSFLLRHGYQYSGKRNWTKGFYNWLATVKFTHSAQQVTLQEYIEATNECSERIKRITQQIQVHVEEWSRARFVKAYQALRGVSLIVSTTVAAEIGDMRRFPNPKQLMAYLGLIPSEHSSGKTVRRGPITKTGNSHVRRALIEAAWTYKMQARVSNILLKRQQGLPKSVCDISWKAQTRLCARYRRLMARGKTKQTVVTAIARELSAFIWAIDKEMQVAHE

SEQ ID NO: 264244 - protein, 419 aa, unidentified
MGLQSAQEEVHMQVYIGIDWSQSKHDVAFMNEAGVVVIQESIAHSEKGFEKLEWLRRRAGLQPTDCVVGMETAHNLLIDFLWSRNYSHVYVVPPNVVKSSRSRYRQSGARDDRSDAKLLADLLRTDHGRLQPWYPDSPLTCQIRAKISLTCFLTRDIVTLSNRLRASLLRYYPAAVHAFSSLTTRIALQFIRAFPDPEAASRLTFEQFSTFARQHGYHRPRDLPACFARLQADHPVALPHIVLAYQEEAPLLATRLLDALHTKQALLNSIGSLFEQHPDAQLFASLPGTGRFLAPALLAKFGDDRQRFPAPASIQALAGTCPVTDASGKHKAIYFRRACDHEFRHIAQQWAIAATWQSPWARRYFEQVHSRCHSHSQAYRSLANRLLCVAWKVWQSAKPYDETYHWQQCIRRSQPRQPN

SEQ ID NO: 264245 - protein, 348 aa, unidentified
MRGLKDHVPGGEELFVGIDLHKHRWHVTIRTFDVELFSASIPGTWETLYRVLARYAGHRLAAVYEAGYFGFRLHDRLVDHGIPCIVTPPSLVPQEYGNRVKTDRRDSRKLAHLLAKGLLKRVWVPSEEELYHRQVIRRRRQLVRDRVRTQNRIKAELRFYGIHLEEPRGRWTQIYFETLRRIRFGNRWMQASFNRLLEQYEFLSAQIDKQTQLLRELSETALYRERVEILQSIPGIGIISAMELQDVSRFRRAEQLAAYVGLTPSQYSSADKVRMGHITGIGKNTLRAILVEASWKLITKDQIMREKYERIKIRSGGKRAIVAIARTLLLRMRRMLLDKQVCALDLAA

SEQ ID NO: 264246 - protein, 357 aa, unidentified
MTNQQLERGVVGGVDTHKLTHHAAELDAATGQLLGDREFPATRSGYEQMLTWWLTFGVVVKVGVEGTGSFGAGLQRHLEHEHVTVLEVARPNRQDRRARGKSDPIDAINAARAVLSEATAIIPKAREGFVEAVRLIRATRRSASRARRIAIQQIHGVLWGGPDSLREQLAGYDRAALVSRCAKLRLPARPVLDDPAATARRMLRRLARRVQQLDEEIAAANEELRIILTAHTPHLLAATGVGTEAAGQLVTTAGENLDRLHSEAALARICGVAPIPASSGNTTRHRLHRGGDRAANSAIHMIVINRLRWHAPTRAYVAKRTADGKTKKEIIRCLKRAVVRELYHALQTDLKITLDTA

SEQ ID NO: 264247 - protein, 351 aa, unidentified
MRGPTWQWRNTIQLLPKPARRLAPREFVPWVEALLRAGHTVYVVYEACGFGFNLYRQLKRAGAHCYVIAPRKLDEQSTGVKTDPRDATTLCQRLSRYVDGNTRELAVIRVPTEAEEQARHVSRQREQLVRLRLKLEAQGRSLLVSHNLPSPAHWWKNQTWSRLVRLLPSWIRLRLQVHRPALLALQQQIDALSGELEAAAPADVPAGLGKLTTVVMTREICSWERFTNRRAISSYTGLCPGERTSGTKRVPGSVTKRGNPRLRAALVECAWRMVRFQPNYPPVKQRLAILAKGARATGAQRKKAIVAVARHLAVDLWRIHTARCSAAQLGLHNAETLLVRGEQKAELNLLA

SEQ ID NO: 264248 - protein, 312 aa, unidentified
MILYQNFIGIDIGKFSFVTNVHGQKSTNTFDNTMQGIKTFIKDYKDILSDSLTVLETTGGYESLALKTLITKGYAVHRANTRKVKNFIRSFGNDFKTDALDAKALALYGKERSDQLNLYRPPSPEQELLYDLVTRRQDLTKLRAAEKNKIQGPKCQGILKDSCQAMIDFLTQQIKGIEDQITSLINKDEQLKAKVTELQTIPGVGPIVATTLLALMPELGTLTRRQVASLAGVAPKANDSGTLKGYRRIVRGRETVKPALFMAAMAARNSHSDLGAFYTRLTGKGKKKIVALTALMRKIITIANAKLKPATT

SEQ ID NO: 264249 - protein, 422 aa, unidentified
MEGPVEVIFRRCAGLDVHKKTVTVCVRILDETGRLQKQTRTFGTTTGELEIMATWFVALEITHVAMESTGVFWKPIYNILEGRFELLLCNAQHVKRVPGRKTDVKDSEWLAQLLQHGLLRGSFVPERPLRDLRDLTRHRAQLVGEQTRAANRIHKVLEDANIKLGAVASDILGVSGRAILNAIVGGENDPKRLAGMAVGQLRKKIPDLEKALRGNLTEHHRFMLSTLLGQVDYLEGLIAKLSQRIAELTPTLPLEGDVLPFDEAVRLATTSPGFAETGAQNVLAEIGTDMKRFPTAAHLASWSGICPGNHESAGKQRNGHARKGSRWLRRALVQAAWAASRTKNTYLSVQFWRLSRRRGRKRALVAVAHSLLVILYHMLERRQPYGDLGPMHFDELHPERLTRNLVRRLEALGHKVALEKIA

SEQ ID NO: 264250 - protein, 355 aa, unidentified
MNSSTQTNKLSFKGQLFFIGIDVHKKSWTVTIRVNGMHLKSFTMEPSASKLAKFLNKNYPGGIYYSVYEAGFSGYWLHYQLLDLNIKNIVINPGDVPISNKEKSYKDDVIDSRKLARELENNSLKAIYVPTLKQSATRQLSRLYALQSEQCRRTKMRIKSFLNYLGISIPVEVGERWTNRLIKWLERLEFKEEGLCYYLKQLTKDLKRKRKEMAKTIQKIKDHYAEEEIIKLLRTIPGVGLITAFTFYAEIMDITRFSNQDKLASWVGLIPSLKSSGERVKVRGLNNRQNKILKWRLIESAWVAIKHDPALTACYLEYVKRMSRQEAIIKIARKLLNRMRSIWLNREAYQKGRTL

SEQ ID NO: 264251 - protein, 308 aa, unidentified
MSPFIGVDVSKTSLDLSFGDSDSARRIPNQPQAIRRLVSQLRDCSPRLIAMEATGGYERSLMHALIDAKLPVVRVNPLRVRRFAQSRGLLAKTDAIDARVIADFARSNVDQLSPMQPIGETARMLRELTARRRQLVEQTVACKSQLEHVTLKPVRQSIDRTIKHLCGEIRQIETMIQELIDNDPGLQKRQRKLLEVKGIGPRVSRVLVSELPELGRLNRRQIAALVGVAPFNDDSGSHAGPRRIQGGRATVRAALYMATLVAVRHDPIVQARYEHLKQRGKPKKVALVACMRTMLNYLTSILADKENA

SEQ ID NO: 264252 - protein, 391 aa, unidentified
MVCVGIDVAKDKHDCCILDSEGTTLVDCFTIPNNMDGFQKLLQTIRDCTKKSDKIKVGLEATGHYSYNILGFLLDNDLPVYVMNPLHTNLYRKSLSLRKTKTDRVDAKTIATMLLSDVDLKSYTDIAYHNEELKSLTRYRFDKVQERAKLKQSVSRLVTILFPELEQLVSSIHGTSIYALLSEYPGAKQISEAHLTRLANILVKTSRGHYRKDKATHIRDAARTSIGSVMPAKSLELKHTIKLIQELTSEINEIEDAIRKIMDELKPPILSIPGMGFHSAAMILAEVGDFSNFNSPDKVLAYAGCSPSTYQSGKLTNCYAHMEKRGSRYLRYALYTATKYVCYWNPVFTEYLTKKQAEGKHYNVALSHATKKLVRLIYALQKSGKAYLAVT

SEQ ID NO: 264253 - protein, 369 aa, unidentified
MKQDTIFVALDDSKRTLVIGTLRPGAQEPELRSIPNEPRQLRRYFTRLQREGALRVCYEAGPSGYDLYRQFTALGIPCQVMAPALTPRRPGDRIKTNRRDAAKLVRLFRAGELTPIHVPDEAAEAVRDLLRCREDVQEDLLRWRHRLGKFLARHGRVYREGRNWTQRHWTWLRSQHFTLPALERTLTEYRFTVEQLLARVADLDREIAALAATAPYREHVGWLRCFRGIDTLGALTLLAELGDVARFPHPRELMAYLGLVPSEASTGEDARRGSITKAGNTHARRVLVEASWHYRHPPRIGPALARRSQGQPTAVLAQAWKAQQRLHRRYRHLVGHGKRPPVAVVAIARELVGFLWAALTRLEPSAQAA

SEQ ID NO: 264254 - protein, 295 aa, unidentified
MGIDIGKQKCRAAVMDEKGFLVEEFSFRNNSFGIEGLVSKLSMDDRVAMESTGSVWMNQYESLEEMNVQVVLANPWKTKAIVSARTKSDKIDARILAHLLRGDLAAESYVPPKELKVVRALVRHRMSLLRVRTMVKNRVHALIDKYGYRCEFSDLFGKKGLEWLRTLELDSLDRLMLSNHLAHIECVNQQIKRVDLEILDEASHDEDVKLLLSMAGIGVYTALLIKSEIGDVRRFPDYKKLVSWAGLAPSLRQSGNVKFHGGVTKQGSKTLRWAMVECARIAVRFDGRMGVSMRG

SEQ ID NO: 264255 - protein, 345 aa, unidentified
MELFTLGIDLGKTTFHIVGMNQRGEVVVRKCFSRAQLLHFTANLKVELIGMEACGGSHFLGRALREQGHDVRLIPAQYVKPYVKTNKSDYIDAEAIAEAVGRPRMRFVPIKSDDQLDLQSLHRVRERWVMRRTAVVNQIRGLLLERGITLRKGRRYVDAALPGILVNGTAKLSGAVLVLLTALKLELEQLAEKIDGSDTSIAQIARENEACQRLVAMPGVGPVTATAIIATIGNGAAFRKGRDFAAWLGVIPEEHSTGGKQTLWRIPQRGNQYLRRLFVQGARAVMQHRTKQSSGLSAWLAQLTARTHQNIAIVALANKLARMAWAVLAKNEAYRPPLVAGAATM

SEQ ID NO: 264256 - protein, 375 aa, unidentified
MKEKLRFLGLDVHAETIAVAVAELEGEVRSLGTIPNRLESVRKLIKKLGPAEKLRVCYEAGPTGYVVYWQLAELGVKCDVVAPTLVPVKAGDRVKTDRRDAEKLARNHRSGDLTAVWVPDEGSEALRDLVRTREAAKQDQLRARHRLSKFLLRSGQRPPTGIRPWTRPYLIWVAQLRFTQMAQEATRLDYLHEVEHMRERVERLERAITEAVKLASPALQQVINDLQALRGIADISAVTIAAELGQVSRFDSARQLMGYCGAVPSEDSSGKRTRRGSITKTGNAHLRRIVVEAAWSYHRPPCIWYGLRKRQESISEEVKEIAWKAQHRLHKRYMRLAAAGKDKRKITTAVARELLGFIWAIGTRAETTVRQRIAA

SEQ ID NO: 264257 - protein, 315 aa, unidentified
MTAIICGIDVSSDALDVHLRGVAQAPQRFANTTQGIAALAELCRRHGATLAVMEASGGYERLAHGLLWAQGIPAAIVNPRMVRDFAKSMGVLEKTDRIDAAMIAWFAQTRRIVAQPLASESQARLAAWVRRLRQLVTARTAQQQELRLVTDADVLAEGHQTIAYLTGQIRTFEQRIAQVISADPLWARLDAAFRDIKGVAARTVSQLMAELPEIGIVSAKAIAKLAGLAPLADDSGKRNGARHIRGGRPGVRSILFVVAEIVRRHNPDFAAFHQRLIAAGKPKMVARIALAHKLLTRLNAKARDARLNFNAIANA

SEQ ID NO: 264258 - protein, 389 aa, unidentified
MIYVGIDVAAEKHACCILAESGKVLKQFTFSNDMPGFEKLHKALLTPSETKIGLESTGVYGNNLAEFLRRNGYETHIFNPLLVKKSIQATTLRKTKTDKSDAKHIAQYTKEHSQPNPKISYHTSELKSLSRGRFSLVRERSKVKTQAKGLLVQLFPEFSQIFSDVFGAAASAVLRQLPSARTIAQCPVDVLTDLLRTASHGRLGKVKAELLIDLAEHSVGIQSMALELQMQMLLQQIDLFTLQINRYEAAIKSEMETIQSPITTIPGIGCVLGAAILSEIGDIRRFTTPAKLQAYAGVDPSVGESGTSVSTPGRMVKHGSHYLRWALCQAARCVSLYDPIFAVYMKAKRDEGKHYCVACSHVAKKLTRVIYSILKNNTAYSLTYSQIGA

SEQ ID NO: 264259 - protein, 349 aa, unidentified
MNFYTNTHPYYCGIDLHTRLLYVCIIDNENNILVHEKIGDSPEKLLALLTPYLGNIVVGVECMHCWYWVSDFCEQHNIDFILGHALYMKAIHAGKTKNDKIDALKIAKLIRGGNFPLAHAYSKEHRSIRDALRRRTHIMRMSAQLKAHVASTISQYNLPALETRLNLQNSPDRQKMHHFFPDEAVQKSMDLNLNIISTMVHELYKIEHYVKTQAQTHNARDLHILKSFPGVGKILALTILYEVGDIQRFPSVQKFASYSRLVKCKAESAGKSYGTQGNKIGNAHLKWAFSEAAVLYLKGNDNAKRYLANLQKRMSKAKALSALAHKIGRCIYFMLKNQQVFDEERFLNG

SEQ ID NO: 264260 - protein, 372 aa, unidentified
MNQDSRLFVGLDVSKLKISVAVADSERGGEVRFFGDIPSDPASVSSIVKKLAKRGAKLHFCYEAGPTGYELYRQLIEMGHDCVVVAPALIPKRPGDRVKTNRRDAVSLARLHRAGELTPVWVPDRGHEAMRDLVRARDAAQEAQKRARQQLQSFLLRHGRIYPGRTVWSQAHMRWMSTLKFEHPAHFIVLKEYCQAIEDAEVRLRRLTDLITETVKSWTMGPVVHAYQALRGVSVMAAVVFVVEIGDIRRFENPRQLMAFLGLVPSESSTGEHVKRGGITKAGNGRARRVLIEGAWTYRFPARVSRTKQRQLTGLPRAVREIAWKGQVRLCARYRAMLAAGKHKAVTITAIAREMGAFLWAIGQEVQPAAQA

SEQ ID NO: 264261 - protein, 342 aa, unidentified
MNYCGIDVANVTSAVCIIDGQGKVLRQVSIATDVGDLAEALSGFGRLRIMIEASPLAEWVATQVEAMGHEPVLVDARAAKHLVSSAKKTDARDAHTLAQMGRSGWYTAVHRKSASARMLRSRLQGRQALLRTAKASAASIRGLLRAHGIRVGRVAEGAFASRVRQLVGETVAELAETIEALLAVWQQSRAAAVALERALRREGRQDAVRQRLQGVPGVGPLVSSAYQATIDDPRRFETARQVADYVGLAPRVYQSGELDKRGRISREGDTLLRWHLVEAAHVLLTRGPDCALKRWGLALAQRKGASKAKVAVARKLAVLLWRLWRRDEDFQAWPESAGAAAG

SEQ ID NO: 264262 - protein, 351 aa, unidentified
MLIIGCDYHPSVQQIAFVNAETGESGERRLLHKDGEAERFYRDLKLRGVSVRVGIEATGHARWFERLLAELGFEQWIGNPSEIKAARVRKQKNDRLDAQLLLKLLVEDRFPRIWVPSPENRDLRQLLWHRHRLVQIRTRVMNQLQAVAMNEGVRRKGALWSKSGRAQLESFVLLPWASRRRQDLLDVLDRLNPTIDELSTAVEQEAKKRSEVLRLMTHPGVGPLTALAFVLVIGSTKRFACGKQIGSYLGLIPCEDSSANRQRLGHISKQGNTLLRFLLVEAAQAAVRCDKEWRRKYLHLAMRRDPRIAKVAMARKLAVSLFWMWRKEWNYDQVAKFGSHAGESEHVHGVQ

SEQ ID NO: 264263 - protein, 346 aa, unidentified
MKKIYTNEKLFAAFDLHSNNNYLAIIDKEDKRIYKKKLPNSPEMILTELESFRDNITGIVVESTFNWYWLVDLLMDEGYRLHLANPAAIQKYKGLKHSDDNHDAFWLAHMLRLGILPKGYIYPKSERPIRDLLRKRGHLVRLRTSLINSLQGIISRNCGCKLGANKIKAIKEDNVSPLLYGHDDISLSGTVSKETIDYLGCQIRKVENAILGKVKLKKEFVKLLTIAGVGKILSLTIMLETGTIQRFPTVGDFASYCRKVPSRWTSNGKKKGKGNSKNGNKYLAWAFSEAAELSRRFDDQARAFYNRKAAKKNFMVAHSALAHKLSRAAYYVIRDQVAFDPRKLFA

SEQ ID NO: 264264 - protein, 418 aa, unidentified
MNDTPKKFAATIGLDWADQKHDLWLQPALAAKSEHLTLSQQPEVLHEWMAQLRARFQNQPVAIAVETSRGPILAALLAYDFITVFPVNPKALCNYRQAFRVSGAKDDRSDARLLEQYLRCHQDQLKPLSPDTALTRQLSGLVEKRRRLVDHRSLLVNEWHAELKMYYPLAEILLDDLTVPMAAAFLKKWPALEALQKSGPAKMRAFFYAHNCRSAKKMERRFQALAQAQALTTDPALIFPSSLKVQALVALLQALHPAIATFDDEIQKAFAAHPDAAIFRSFPGAGPALAPRLLVAFGTQRDRFASAQDVQQLFGIAPVKKESGQSQTIHMRYHCPRFARQTFHENAGQALKTEPWARAYYDLQRRGKKHHTAVRALSFKLIRIYFACWKQSKPYDRNLYQAALLQHGTSLLANKPKS

SEQ ID NO: 264265 - protein, 348 aa, unidentified
MAHFVGLDVSVKETSVCVVDDAGKVQCERKVPTEPDDIAVLLTSVGGDYVRVGIEAGPLSQWLGNGLSEAGLPVICVETRHMKALLQAQQVNKSDRNDARGIAQMMRVGLFKPVHVKTLAAQEQRMLLTSRKLVQRKLIDIESDMRGTLRNFGLKVGVVSTIGYEARIRHLVEGFPRLAAIVEPLLTVRRVMRQQFAVLHKMLLDTVRHDPVCRRLMTAPGVGAVVALTYRATVDQPQRFVHSRAVGAHVGLTPRRHQSGEIDYDGGISKSGDTMLRTMLYEAAQVLMTQSRHWSWLKAWGMKVAQRRGMRRAIVDVARRLAVVLHRMWTDDTDFRWGSEPGTAVAVA

SEQ ID NO: 264266 - protein, 309 aa, unidentified
MKYYIGIDVSKLKLDICILKSLDSKDFKQIKNDKKDIKDFFISFENLNDLIVVFETTSTYSYNIAKVLTDLKIKYSELNPLKVSHFLKYISNKKNDKIDSYNLAYYSLKFENEIVFDSFNDKSKILRSYQTLIELLNKINVQIQNYDDSQIHIYDENIKSVIDEFLDISNYNKRMLEDKAFDLVCDLLPQTKTILANEKGIGKNLAIYLFPVFYFNQDKNYKQIISYLGLSPKVFESGSSVKKKSIIDKKGNSNIRKALFLSSLSCVRYNPKFKRYYEHLLTQNKNKKVALVAVCNKIIRHLKNRYFRY

SEQ ID NO: 264267 - protein, 417 aa, unidentified
MEQFAAFVAIDWSDTKHDICLVDVATGKKESLILKHTPEELEAWATACRIRFGGRPIAVCLEQSRGPLIYALLKYDFVVLYPIHPTTLAKYREAFSPSRAKDDPRDADYRLELLVQHRDRLKAWRPDHAKTRTLQYLVEYRRRLVNDRTRLSHRLTAVLKAYFPPILQWFDDIRTLLVCDVLLRWPTVEALKKVRPATLEKFFHEHHSVRRETISCRIAAIKEAVPLTTEQAVMTSSVLMINALATQMKTTIEAIRAFDHEIEQLCRTHEDYHLFASLPGAGTVYAARLTAAMGTVRDRWTTVDELLGFSGVAPVMERSGKSTWIRWRYFCPTFLRQSFHEDAGESINHSFWARAYYMSQRARGKSHQAAVRALAFKWIRIIYKCWQTRTPYSEVRYLESLRKKGSPLLTFAANNPS

SEQ ID NO: 264268 - protein, 457 aa, unidentified
MPRKKAKSKSDRTLQMVHPNAAAIDVGATLLMAAVRADRTADPVRSFGTFTTDLHRLVDWFAECGVDTVAMESTSVYWIPIYELLDARGFAVFLVNARDAKHVPGRKTDVSDAQWLQRLHSYGLLRASFRPKGQFTQLRAYVRQRERLLEYAASHIQHMQKALTEMNLQLHHVVADITGATGLRIIRSILSGEHDPKTLACLRDYRCHASIETIEKALTGNYRAEHLFALEQALALYDAYHEKVSACDARIEAVLKDLSIGRGHATGALTPSRRRTDQVNGLAFDVRSALFAVLGKDITKIDGFGPYLSLKLVAECGDDLSAWPSAKHFTSWLGLAPNNKISGGKVLSARTRRSGSRSAALLRLAAVTVGRTDTALGAFYRRLSARIGKAKAVTATARKIAVLFYNAVRHGTEYVDPGASFYETRYRKRVVDNLHRRAKAFGFVLQPLEPTPDGAVS

SEQ ID NO: 264269 - protein, 458 aa, unidentified
MYILGIDLAVTAEHQAILADERGRFIGNILKFRTTQADLERIYATARRRMKADEELVVVLEATDIVWYPVAIYFHQREATVYLVNPRMAADLGRFYRHHAKSDRLSARTLARLPVVNPDGLYPWVWSGPDYLALQRGCKELERLTEQASAIQNRLRSTDHLGWPGLHQRVFADPFSPAARWFRNHCYDPRRVVEAGVSGLQQAWRAAETYNGDEEWIEPLLTLAHEVLSLYSAQGRYLDYRALADEVQREQRHLAALEAEARFVRLQVTRPRYRQLHPSRNLETIKGVGQDGAAVYTAFIAVPDRFATNRAFRGWHGLVPRSNQSGEREAKGLRISQAGPDLIKKYAFLGAESARQWDPQIAAIYHDQMLNKGKHHTQAVCACATHLLDRIRVILSEDRPYELRDVDGTPVTTEEARAIIAERYTVPDEVRRRSTRRARRERAERRAERKEKKRSRSR

SEQ ID NO: 264270 - protein, 341 aa, unidentified
MADLELVGIDLAKNVFQLHGCSSTGAVIFRKQLKRNKLLSFISELPTCTIAMEACSGSHYWGREFEALGHSVRLIAPKYVKPFVKRSKSDAIDAEAICEAALRPTMRFVQVRSEDNQAAGLAFKARDLLVRQRTQIINALRGHLSEFGFVVAKGPTHVRKLVSAVEAGDLELPEISRPLLSILVDTLEALNTRIRLLEAQIAQRAREDEICQRLTTIPGIGPIIATAIAALAPPPSTFRRGRDFAAWVGLTPLQHSTGGKQRLGRTSKMGNRALRRLLIIGASAVVRWAEHKGAAPGSWLARMLERKPPMLVRVALANKMARIAWALMAHGGEYRAQTVTR

SEQ ID NO: 264271 - protein, 431 aa, unidentified
MTQEKEKETVWLGIDWADRKHRWAMRIAGETRTQQGELENTPEAIDAFISSLAIRFPGQRVAVALEQSRGALIFMLGKYQHLILYPIHPNALDHYRKSVYPSGAKSDPSDAALILEFLCKHPERLRVFHPDTAETRTLQLLVEARREAVDDKTRYLNRLTSQLKMFFPQLLDWFSTVDTVVVGRLLQKWPTLEILQAAPANEVADLLNEQRIPESRITVLQQFIEKAIPAVRDKAVLESSVLIVRRIVGQLAALREAITEHDRKIADLTRSHPDYHLFSSLPGAGPVMVPRLIAAFGTQRDRYTTAAAMQCYAGIAPVVESSGKQKWVHWRWACPKFLRQTFHEWAWLSTRQSGWAKSFYDKQPERNKTHHAAIRALAFKWVRILFRCWKDSVPYDATRYAAALQRQDLKKPEEIHWKNVAGFVKLAVVSS

SEQ ID NO: 264272 - protein, 387 aa, unidentified
MLYCGIDIAKFKHVVSLMDEKGEILKAAFTLTNNRAGFDQLHKELQALGGGVTVGLEATGHYWLALYDDLTHNHYPVIVLNPLQVAAYRKSGIRKVKSDATDAFWIADYIRIANLPPSEQNLPVFLQLRELSRFRFRLTEQVGNLKRKLLTILDRVFPEYEHLFSSVFLQASRTVLQEAVSAQEFADFDLQELTSLLTEASHGRFGQEKAEKLQQQARQSVGVGFLTDAVHLEMRCLLAQLELLDAQRADIDQAIAGLMQQIPQHITSIPGIGPVTGAAILAEIGDIQRFETADKLVAYAGIDASVYQTGQFEASEAHMSKRGSPYLRHALWCAATAALLHDPTLKTFYQKKRAEGKHHGTALGAVCHKLLARIFVVLKEQRAYVIR

SEQ ID NO: 264273 - protein, 511 aa, unidentified
MRDNKQCKQLSLSDLIRNPDSVVEDFNELPDGSDIEYVKEYGIGIDCHSKFIEVCIRYRNGKLIQKSQGQFSTQWKDLAAARDWCIAVLKTKANPVPDLSEPLHYVVESTASYHMPVCMAFGGDPTVINPTIAGATKRKTDVLDSRMLALHDQLNIWREFYLPDEDVKTLRVIIAQRERCLRDATIAGNRINNILTRFGYTIGRNGSVVKDPAIRAVVENQISDSPSQIDGLCPTPIPVEVRIVLREEYEKYDFYTAQAAEYKVKIFEKARSMEWETDTGTLPGDEMIRILTTTPQVGELTAVIWLARVITPRRFHNAKALSAYCGFDPSLKISAGKVTSTTMRNGNKDLHKALNMSAHRLIHRHNEMFGIWGYNLQQQTGKKKKAANAVARKLSVAMFYMMKTGTEFTYDNYHSIRNIDVFDIPIEDLVLINRDFKRYIRILKENGIDTTVDLATAYISCSLGSCQGLGKKFYGLLKDFLDHHVTYKQMYEEIQAKLNQKEDTDNAKGQT

SEQ ID NO: 264274 - protein, 387 aa, unidentified
MAAVVIGVDPAKRSNTIEVIDGEENVLLAARFDNSREDYRRMLALVKRWPTRKWAVEGATGVGLGLAQRLVSDGERVVDVPSKLSTRVRAIDTGHGRKNDPSDAHAVAVVGLRTAGLREVSVDDEAVVMRLLSQRRRDLVRSRTQAVNRLHQVLTQLIPAGARKKLTADKAKTLLATVRPRDAAGKARRQLAADLIDDVVVLDRKIDAVDKRITEAVKASTTTLTDIVGVGPVTAAAILGEVGDVARFTTSDQFASYTGTAPLEVSSGDVVRHRLSRAGNRRLNNALHVVALSNKRYDARGKAYYQRKLAAGKGKKGSLRCLKRRLSDVVFRTLVEDRARANPGGQMGATLTASAVDQIPKANTSDKPQPGFTSEATPTRPPAKAAS

SEQ ID NO: 264275 - protein, 417 aa, unidentified
MKSAPSVLPEEAPNGLTCGIDWARDDHAVAVVDARGREVHRCVAGHSAAGLRALLGLLGKRGVGEVAIERPDGPVVDALLEAGITVVVISPNQVKNLRSRYGSAGNKDDRFDAFVLADTLRTDRARLRPLVPDQPATVALRRACRARKDLVSHRVGVANQLREHLKRVFPGAVGLFAELDSAISLAFLARFDCQDRADWLSARRMAAWLASAGYSGRVDPAVLHARLTAAPRGATGEHGAAETHVTRALLAVLVTLTEQIKVLSAQISEQLALHADQHIFTSLPRSGRVRAARLLAEVGDCRARFPTPESLACLAGVAPSTRQSGKIRAVGFRWSCDKQLRDAVTDFAGDSRRASPWAAQLYDQAIARGHDHPHAVRILARAWLYVIWHCWQDGVAYDPARHKALQRILAEQKSKAA

SEQ ID NO: 264276 - protein, 382 aa, unidentified
MDTLSNTVAAIDSEQQKAKLFVALELGQATWVVALHSPIADKISIYRIEGGDTDQLMALIEKKRVQAARRLGRAAQVVSCYEAGRDGFWLHRFLIRRGIDNRVLDSASILVDRRARRAKTDRLDARALLRVLMALVRGEEQVCRVVRVPSIAQEDERRLSRERERLLHERNSHIARIKGLLILHGVRDYRLIERDWKERLDAVRTTEGQALPARAKTEIERECRRLWLAKQMLAEVEREIEQMIAHDGAVAGKLIQVRGIGQTFASVLTHEVYYRSFDNRRQVGSYLGLVSIPWQSGSIRRDQGITRSGNARARRCAIELAWLWLRHQPGSALACWYRTRVGTMTGRMRRIALVALARKLIVALWRYLQNGIVPEGAVLKAA

SEQ ID NO: 264277 - protein, 342 aa, unidentified
MKQYVGLDVSQRETAVCVVSETGQLIFEGKAKSDPGDLTRLLRKHAPLAERIGFETGAMSSWLWHELRRVELPVVCIDARHAHAALSVRMNKSDQNDARGLAELVRVGWYREVKVKSEESQKIRAILVVRARLVSMRRDIENQVRSLVKEYGLLFPRAIGQQFRNTVNDLLGEDHQLLIVVAPLLSIHEHICRQQCAFDDEVRRLARQDETTRRLMTVPGVGVITALTFRHTIDDPSRFRSASLVGAYLGLTPRRKQSGETDTSGKISRWGDRLLRTYLFEAATVLLYRTKKWSSLKAWGMKLAKRIGMKKAKVAIARKIAVILHSIWVDGTSFDWGHAKSI

SEQ ID NO: 264278 - protein, 306 aa, unidentified
MTKLIAGMDLHSNNVVIGLMDMDGKRVAHQKVECRLSEVVRFLAPYKKRLEQVAVESTYNWYWLVDGLQALRYPVVLANPAGMEQYSGIKHADDTNDAFFLAELLRLKILPTGYIYDPHLRPVRDLLRRRLTLVHQRTALMLSFKSLYTRTTGLEMSLGELKELEIKAAQELYDHPANQLIAGMQIKHIEQLTESIEKIEKAVLGCARELPLYTKLTTLPGVGTILGMTITMEVGDIKRFAEAGHFASYCRTVEAKRTSNNKKKGPNNSKCGNKYLAWAFVEAANFARRYDEQCRKWSERMKGVGQ

SEQ ID NO: 264279 - protein, 339 aa, unidentified
MNRIVIGVDIAKRVFQLHWVEPQTGEIVALQLKRERFLEHFANRSSCLIGMEACGGSQHWARSLQQLGHEVKLMSARMVKPFVSGNKNDVADARGIWTAVQQPGIKAVAVKSEEQQAVLALHRMREQLVKFRTAQINGLRGLLTEYGEVMPQGRAGIRRDIPGALGRLSNRLPPIVIETLREQYARLGELDEQIGQIERRLRQWQREDSASQRIAAIPGVGLLSATAAVATMGDAKAFKSGREFAAWLGLVPRQSGTGGRVRLLGISKRGDRYLRTLLIHGARAVLTRSKSPPEWLTELVKRRPKNVVVVAMANKMARTIWALTAHERAYQSGYVSRPT

SEQ ID NO: 264280 - protein, 362 aa, unidentified
MKNNSKENVWKPRPQQTVGVDLGDRFSYYCLLNRDGEVMEEGRIRTSEEGFRQHWEGEARQRVVMETGTHSPWISRLLESLGHEVIVANARKLRAISQNESKNDRQDAEMLARLGHCDPKLLQPIRHRSVERQRDLNLLRARDTLVRARTMLINAARGLVKSSGGRLPAASSESFAAKVGSAVPAELAAATQPLLAQITALTTQIRGLDRTIEKLSERYPEVHILRTVPGVGPVIAAAYVLTLDRVDAVQHSRSVGAFLGLRPRQGQSGDSDPELNISKTGNIYLRRLLVQAAQYVLGRFGPDSALRRWGLKLAAGGQRAKKRAVVAVARKLAVLLHHLWRTGQNYRHFPQVISSPESAAAS

SEQ ID NO: 264281 - protein, 356 aa, unidentified
MSYDVKYIGMDVHKEAIVIAVLNEGGKLVMESVIETKASSILQFLHGLRGELHVTWEEGTWAAWLYDLLQPQVQHIVVCNPRRNALLKEGSKSDKVDAHKLADLLRTGMLRPVYHGENGLRTLRELGRSYQTISKDLTRVMNRLKALYRGWGIPCAGTQVYAARCREEWLSKIPQAGVRRRAELLYQQLDGLQILRRNVRLEFLAESRKHKASKLLRQIPCIGPIRAARLIGLMQTPHRFRSKRQLWTYSGLGVETHDSAQYRFVSGHVQRSKKPQQVRGLNQNHNHEMKEIFKSAATRASCGRGPFYDFYAGLLAKGMKPEMARLTLARKIAAIALTLWKKEERFDAEQLKTQAA

SEQ ID NO: 264282 - protein, 373 aa, unidentified
MKKVRFLGLDVHAETIAVAMAEPEGEVRWLGIIPNREESIRKLVKKLGPAEQLQACYEAGPTGYVLYWQLTALGVKCEVVAPTLVPVKAGDRVKTDRRDAMKLARSYRAGDLTAVWVPNEEHEALRDLVRAREAAKQDQLRARHRLSKFLLRHGRRAPAGIKVWTQKHEEWIKQQVHFEQPAQEYTLLDYLHEVEHMGDRIQRLEQAIAEAVKLAPPRMQEVIQSLQALRGIAQISAVTVVAELGEISRFEGARQLMGYSGAVSSEHTSGKRIQRGPITKTGNAHLRRIAMEAAWAYRHRPAIGPRLRKRQEGLSEEVKEIAWKAQHRLHKRYRTLSAAGKEKQKVITAVGRELLGFIWAIGVQAERNSKRVA

SEQ ID NO: 264283 - protein, 442 aa, unidentified
MRTMYECVAGLDVHKKTVVATRMQVTPEKRVEWETETFGTTTPELLELHDWLQAWPCSHVAMESTGDYWKPVYNLLEDDFELLVVNAQRVKHVPGRKTDVKDAEWLAELMLHGLLKASFIPPKSQRALRELTRYRGRLIQERTRTVNRVQKLLEGANIKLSSVVTDVQGVSARAMLAELAAGNTNAEAMAELAKGRMRNKIPELEKALTGMVQRHQQFLLSKQLGHIDFLDEQIGEIEGEIGRQLMEMSMPAEPPARGSGKRPSEAEAQARKHHNDWMTAVALLDTIPGINRDAAQAILAEIGIDMTQYPTAGHLSRWGGVAPGNHQSGGKRYSGRTTKGNRVLKSTLVQCAHSAARKKGSFFKARYHRLAARRGKKRAMMAIAHSLLVTIWHMLTTGEVYQDLGADYYDHRNKDSKVAYHTRQLEKLTGGAVQVALNPAAS

SEQ ID NO: 264284 - protein, 351 aa, unidentified
MRNAAQAHHVSLYGIDIGKSLFHVAGLDAHGKPVFRAKFHRDEVLTFFGKAQQAVVAMEACPGSQWLARKLSSYGHTVRILPAQFVKPYVKTNKNDTVDAEAIAEAASRPTMRHVAIKCVEQVDVQTLHRARDMLVYQRTALICQMRAFLLEYGIACRVGAGAFKLDLVRHLEDAGNELSPSARRLLATLRQHLKQLDAHVDDLSAEIEALADRSDVAKRLMSIPGIGPLAATALLAAVGDAKQFKSGRDLSAWLGLVPAQFSTGGKTKLLGISKRGNSYVRRLLIHGARSCVMHLDRSRNRLGAWLNALSARVHINKLTVALANKIARMAWAILTRPGALYQRNDPRFAA

SEQ ID NO: 264285 - protein, 406 aa, unidentified
MSDEEPEAAFSVWCGLDVGKQDHHACALDPAGKRLFDAPLPQDQHRLEELFAKLQAHGRVLVIVDQPNTIGALPIAVARSMGIQVAYLPGLAMRRIADLHPGTAKTDARDAYVIADAARTLPHTLRRVDAGEETLAELKVLVGFDDDLAGESTRLSNRIRGLLTQVHPALERVLGPKLATKQVLALIKAHGGPQGMAKAGKARLLRTATNANPRRAGELVDSIVKALGEQTVTAPGTAAAETVLPKLATTLATVLDQRAEIAAQVEQVLDAHPLAEVLTSMPGVGVRTAARILLDVGDGSAFRTAGHLAAYAGLAPVTRRSGTSIRGEFPARSGNKHLKRALFLSAFAALRADPVSRAYYDRKRAQGKKHNAALICLARRRCDVLHAMLRTGSHYQPPATESVPAA

SEQ ID NO: 264286 - protein, 341 aa, unidentified
MKHLYLGIDWGKNFSQLFGFDQAGEVVIEERLKTLDLSVWRKKLRSLKGYSIHAAFEIGAHYDWLHDLLTEYCCEVAVIDPAQFAVICKSQRKTDKIDAQKIAEGLRRGDLPLVHVPDKQTRADRRLVAFTHWHSQQASSVKGKIRSLLLAQQLECPYSNIMGMAALEWLNEQAPQMDDDAQLFLRLLLAQVELLRQQRQELDARVAIRAKRYKQAAVLDSIPGFGQLTILAALSSIAGVARFSRPEQLSSYWGVCSSVYQSGATLRLGSLTRRGNVHVRWLLSQALQHLHRKDARARKRYLKLKRKKPRGVARAAQVRWLTQIIWHLLKKDEPYRIKTAA

SEQ ID NO: 264287 - protein, 409 aa, unidentified
MESIIARCAGIDVHQANIVVTVRTPDAGGGRQHETQKFGTMTSELLAARAWLQAHGVTHVAMESTGVYWRPLYYLLEDGFTVLLVNMQHLRQVPGRKSDVRDSEWLAQVLECGLLKRSLVPPPPIRDLRELTRYRKRQIEDRTQEVNRLYRVLEDAGLKLASVMTDVMGRSGRAMLEAILGGSRDPHALAELAKGRLRAKLPALRLALESQLRARHTFLITQILTKIDFLEEQIDALTAEIDRHLVPFEPVIAKLTTIPGVARRNAVTLLVETTGDMSHFPTAGHLCSWAAMCPGQNESAGKRRSGKMRPGNRYLRGALIESGEAAKRAKQTALQARYFRIKRHRGHKKAVVAVGHQILEIAYFIMRDGVTYEELGATYFEHRNRERTIRRHVKQLESLGYRVTLEDAA

SEQ ID NO: 264288 - protein, 356 aa, unidentified
MTKTLMAGIDLHSNNLMIGIVDQDGQRVGHQKLACDLKAVLAFLRPYQGRLKSLAVESTYNWYWLVDGLRAAGYPVVLANPAKITQYAGLKHADDKSDAYFLAELQRLKILPTGYIYDAELRPVRDLLRRRVSLVQQRTALMLSFKSLYARMTGQAMSLSRLKGMAAKAARELYEHPADQMIASVQQEHIAALNGSIAKIEKLVLARARTLPWYEHLDSLPGVGRILGMTIALEVGEIGRFESPGQFASYCRAVAAERTSNEKNKGANNRKCGNKYLGWAFVEAANFAKRYDERSRRWFDRKAARTCKVLATKALACKLAKAAWHVMSGNVPYDGDRVFGKAAANQVNGLATSQRD

SEQ ID NO: 264289 - protein, 373 aa, unidentified
MPRYSTAFGMDVHLRSTTVCALDAETGEAVARRFRGNPWGEVAEWMSGFPGPSLAAYESGYLGFAPQRELSALGVDCVVAAVSKVPRSAADLSSKNDRNDAARMAKAILSHDITPVWVLSPEIEGLRDLAAAHDAATARLAAAKQRLLAFLARRGYVYGGTTPAGNPRKYWTYGFLRWLDGIHPADDGGIRALAALRNEVEAADETREALLAEYRAAVAAGPLSAEVEALQSIKGCGFALAAAFAAEVGDFSRFRSGRQVTAYFGLAPKQRSSADSVRLGGISGAGNALVRRLAVEGSWCYAQAGHQPKLMPKGSGVPLEVRMHGRKGSERLLRRREEMLERGMPQAKANAATAAELVRWLWALGMMCREAGE

SEQ ID NO: 264290 - protein, 387 aa, unidentified
MIYVGIDIAKLNHFASAISSDGEILIQPFKFTNDYDGFHLLVSKLNSLEQDSLIIGLESTAHYGNNLAEFLVLLNYKVCVINPIQTSTMRKNNIRKTKTDKVDTYIIAKTLMINPHRLFTSYDLDLLHLKNFGRFRQKLIKQRTRVKIQLTSFVDQSFPELQYFFKSGVLINTCYCLLKEAPSPHAIASMHLTHLTHLLEKASHGHFGKDTANSLRILAQKSVGSSDSSISMQITQSIEQIELLNSQVDKIESEMKGIILSLDSVIMTIPGIGYINGGMILGEIGDITRFSNPSKLLAFSGLDPAVYQSGNFNASHTKMSKRGSGPLRYALVNAAHNTVRNNQTFHLYYEKKMSEGRSHYNALGHCAGKLVRIIYKMLIDDVPFNLE

SEQ ID NO: 264291 - protein, 417 aa, unidentified
MSEYAALMAIDWADQQHAVCLYDPSTGAREQTIVKHTPAALQEWALSLRQRFADAPIAVCLEQSRGPLIYALLQYDFFVLYPINPATLAKYRQAFSTARGKDDPTDADYLLDLLQYHRDRLRPWHPDDQKTRTLRLLVEQRRRLTGDRTRISNRLTALLKGYFPQVLDWFEDIRTRLVCDFLERWPQLSVLQQARPATIDRFLRSHHSTSNSTNQRRLAEIKTAVPLTTDAAVMSSSVINVKVLVAQMQTVIAAIAEYDRHLEALCQTHDDYHLFAALPGAGPVHAARLTAALGSDRSRWQTADELVRFSGIAPVLERSGKQFRIRWRYFCPKFFRQTFHEFAAQSIQDSFWARAYYYQQRAKGKEHHAAVRALAFKWIRIIWKCWHTRTPYNEVIYLESLRKKGSSLLKFAADYQP

SEQ ID NO: 264292 - protein, 426 aa, unidentified
MKVMHDRVAAIDVHKDMVKVAVRVPGERRGTRKTDVLEFRTFYGVLEEMGRELRRRGVTHVVMEASGVYTEPVYYALAGLGFTEVMVINPAHAKALKGHKTDAKDAIRLLDLYECGLLSGSCIPAPDLKEVRDLARYRMKTVQARASEIQRLQKTLETAGIKLSSVVSDVTGVSATAMIEALIDGERRGAVLADLAQGRLRTAGKMADLSMALAGRFTDHHALMCRLHLDRIQALGEAVADLDATIAPLVARYSREAELLKTLPGFGDVVVAGWLGAIGPAPHQHFATAQRLASWATVCPGNYMSAKKSKGGRTGDGGNYIKPLLVQAAWAAVRVPGRLQAKFNRLVRKFGGARNKGAVKRAIMAIAHALLKIAYQVLKTGTPYTDLGAGFYASRETPQARQDYLIRQLQKLNPGCVITITPAEAA

SEQ ID NO: 264293 - protein, 320 aa, unidentified
MVKHSTLSAGIDTGKRKLDVALAGRVERLQVDNSADGHTSLSAWLRRYRVERVGIEATGGYEGAVVAKLRRDGFVVVVLQPAQVRAYARFKLQRAKNDRIDAALIAACAAAVQTIHAPPDPRLAPLAEHLTMIEQLGEDIARLKTRRASPRGDVRISALWTAEIAHLKTLVRQEMAALLAAIRQHEDFAKRLDLIRSVSGIGERTAVAILLRMPEIGSLSREQVAALAGLAPYDRDSGESSDKRYIESGRTRLRRALYAAALPAAFRWNAALMALYRRLLAKGKPHKLALVACARKLLVQVNAVVARGTPWIPQVRLLPP

SEQ ID NO: 264294 - protein, 485 aa, unidentified
MTPHTDYFPEPRPPAPTPLQPPAHFVPLPVCNPHAAGIDMGEAEHWVAVPPDRAPQPVRRFGTFTADLDALADWLIDCGVTTVAMASTGVYWIPLFELLEARGLQVLLIDPRQAKRAPGRPKTDRLDCQWLQRLHTYGLLAGAFRPEAQVGVLRGSLRHRQMLITYAAHHIQPMQKALEQMNLKLTQVVSDITGATGMAILKAMIAGERDPVTLAKLRNPRCHHDADEIAKALQGTWRAEHLCALQQAVALYAFSHPQLTLCDQQITAHLETFADHSNGHPLPPKARRHKKTNAPRFDARTPLSRMAGVDLTTIEGIEEGTALVILSEIGTDMTRWPSVKHFCRWLGLCPQHKISGGKVLSRRVRPGAPRVTVALRLAARSVHHSQSALGAFLRRMKARLGTPKAITATAHKLARLVYHLLKHGSAYVQQGLEAYEAQYRERKVKTMAKQAKTLGYTLVPLAAQGEDRVPGRYGRAHPSIAPPMP

SEQ ID NO: 264295 - protein, 410 aa, unidentified
MYKICCGIDVHKTFVVACIASTNDKGITSYESHRFSTYTSGLKTLLQWLIDRNCKDVCMESTGKYWIPVYNVLENDCTIVLAHPKYVKAIRGKKTDKRDAKWIADLFKHDLVAGSFMPPADIRQLRDLMRYRFKLTCFMSSEKNRLQNCLTVSNIQLGNVVSDTFGKSAQAILDKLLENPADTSFDLEPLVYKSLKKKLPELRDAIDGYITPEQAAKLKVIKAHYENLESRKAELEELILALAAPYQQELAILQTAPGIRSDFTAIGIISEIGTNMEAFPSAKHVCSWAGLTPTNNESAGKKKSVRVSKAGCYIKPLLVQCANAVITSKKHPEIRNRYLRLKKRRGHKKAIIAIARMLLTALYHMLKNGENYNAELYRKSDLPPVDREITVEQAIIIARNQGYKIKSATA

SEQ ID NO: 264296 - protein, 401 aa, unidentified
MTRLWAGLDAGKTHHYCVVIDEDGTRLLSRKVANVEDEILGLLADVTALADDGEVVWATDLNQGGAALLIAVLAANGQGLLYIPGRTVHHAARTYRGDGKTDAKDAGIIADQARMRRDLTPVRGADEAAVELRMLASHRADLVADRTRAINRMRATLLEYFPGLEAAFDYAQRKAAVLLLTEYQIPEQLRRAGVTRVTARLRKAGARLPEQVAQVAVDAAHAQHTVVPGQDAAAMIVRRLAGEVLRLREEVEEVESQLEARFRRHRHAESLLSMPAFGPLLAAEFIAYTGGTLAVFESADRLAGIAGVAPVPRDSGRVSGNLHRPKRYSRPLLRTCYLSAEAAARSHPESRVYYDRKRREGKNHKQAVLTLARRRINVIWALLRDDTTFHQQSPASTPIAA

SEQ ID NO: 264297 - protein, 421 aa, unidentified
MEQLAEHFAALIGIDWSDTKHDVCLVDTATGSLEPSVIKHTPESLNEWARGLRQRFGGAPIAVCLEQSRGPLIYALLKYDFLVLYPINPKTLAKFREAFSPSRAKDDPTDAEYLVELLVHHRDRLKPWRPDDQPTRTLQLLVEHRRRLVGDQTRISNRLTALLKGYFPQVLAWFPEMTTVLVCDFLLRWSSLDALSGVRRATLEKFFREHKSHRTDTIEKRLDAITAATALTTDGAVINASVVMVKALAAQMKTTLTAIKEFDREIAELCQAHADYEVFASLPGAGPVYASRLLTAMGTRRERWASADELLRYSGVAPVIERSGKSEWIRWRYFCPKFLRQSFVEYAGESIRHCVWAKAYYQGLRAKGQSHQAAVRALAYKWIRIIYRCWQTRTNYDEARYMEVLRNKGSVLVPAVATVGA

SEQ ID NO: 264298 - protein, 347 aa, unidentified
MRFYTQQHLHYCGIDLHARSLYACILDSKGKTLVHKKLPCDREQLLKTLAPYRKNLVVAVECLFCWYWVADLCNEQGFEFVLGHALYMKAIHGGKTKNDRLDSYKIAALLRGGNLPYAYVYPRQMRATRDLLRRRLFFARKRGELLAHIQNTNTQYNLPPLDERAGKTKDRGAIIEHFDDDTVQMSIASDVALLDSYDQVIRDMELYLIHEVRKDHNREFYLLRSIPGIGEILSLTLLYEIHDLSRFPRVQDFISYARLVKGTHESAGKTKKLTGGKMGNVHLKWAFSEAAALFLRGNSVGQKYFARLEKKHGKGKALSILAAKLGRAVYYMLLRNKPFELQRFVAV

SEQ ID NO: 264299 - protein, 323 aa, unidentified
MNKDKNYLGIDISKDVLDVCDNKNVYYQFNNDVSDFKKLLKLLDDNTICVMEATGYYHLRLAYFLLENNQGVSVVNPLKIKRYIQMKLSKIKTDKSDSKMIQAYAQDQEPILCFGQSKTQQESLQLSRLLSIYIKQSTQLKNKIHGEKVLGFPSKLVLRSLNRQLKSLKKEIEVLENQLLKNVKSEYAESLTLLKTIPGIGDKTALMLLVFTDGFNRFESYKELCSYAGITPIIRQSGSSVNGRPRISKMGNPKLRSLLFVCSFNACKFNKACKALFDRLVAKGKSKKLALIAVCNKLLKQVFSIVKNRLPYDANHRSILVKN

SEQ ID NO: 264300 - protein, 455 aa, unidentified
MAKKNPTTRQSQGKVRQNILERINLHAAGIDIGANFHFVAVGEECTEENVRKFDAFTSDLHRMADWLSEHHIQTVVMESTGVYWIPAFQILEQRGLEVKLVNAAHVKNLPGRKSDVSDCQWLQQLHSFGLLNGSFRPKDEVCVLRSFLRLRDTLVKDSSSHILRMQKALTQITSRVHRVITDITGYSGMAIIRAILDGERNALKLAQMKHPLVKAPTEVIVEALQGDYRTEHLFELQTALDLYDVYQGKILECEAQVEQHLQQWETKVDFEQALAQTAALQTRSASVRLELHRQAQLLSVCGVDLTRVPGLSTLAVRTIIGETGLDMNCWKSEKHFCSWLKLCPDNPISGGKVLSSRARRTRNRATAMFRLAAQSAMRSQTAIGAFIRRIKARLGAPIAINAGAHKLAQLFYRMLKFGETYVERGQTYYETKYKERLLRNLNRRAKEFGLQLAPS

SEQ ID NO: 264301 - protein, 340 aa, unidentified
MRLYTAFDLHANNSYGAIVGEQGQRVKRQRLANDPELVFQFLLPYKAEIVGVVVESTYNWYWLVDALMSEGYKVHLANTAGIQKYKGLKHSDDQDDAFWLAEMLRLNILPEGHIYPKEERPIRDLLRKRGHLVKLRTSLIISLQNIIDRNCGTRIKVNDVKRLKEDMVAPFVAGNEDLALAGLVSKEAIDFLTVKIRTIESSVESRIKLKEPYKHLLTIPGIGKILSLTIMLETGAMDRFEKVGNYASYCRKVSTRWTSNDKKKGKGNKKNGNKYLAWAFSEAAEFARRYDPQARAFYNRKLQKTNFMVAHSALAHKLARATYHVIKEQKPFMPEKLFAS

SEQ ID NO: 264302 - protein, 429 aa, unidentified
MTVSNDTPQRVTLVAVDIAKNSHDVLIESPTRGRRRRLRLANNLEDFEQLAGYLRSLKSAVLIGFEATGNYHRPLAYFLHRQGFELRLIPTLALARTREAMHNSWDKNDPKDAQVILHLLKTGLAQTWHDPMVKGINDIQELSKTHFQVTLARVRVWHTLRNHYFALYFPEIDRFIRSDHSVWLVQLLASFPTPASITALSEGEFQTRAWNLVGRKVSKRALLAEIYAAAKRSIGVPVPLDSAAVAMFRVVLGEYLDLHRLRGHIAERAAIVLGDNPDSRRLMTVPGIGPANALTILAEAGDLRRFRHHRQFLNFCGLNLSTLQSGKSRSQSHISKYGNARLRTALWMAAQTAIRMRENSFRRKFDNYVRGNPLDADLRRKAYTAIAAKLARVIFGLIKSGADYRPFFEHKFQVEEPSRASAVGATSTP

SEQ ID NO: 264303 - protein, 419 aa, unidentified
MSFKIIKNNCCGLDVHKTWIYACIGITDSNNRTEYKQARFSSFTKGLNELCDWLAKYNCKDVCMESTGKYWIPVFNILEQRSLWVTLSHPKYTKPMKGNKTDRKDAKWICDLYMCGMVKPSFIPPADIRELRDLVRYRFKLTCMITGEKNRAQNCLTVSNLKLDDVFSDVFGKSSRSITEQILQHPGETFDVAPFVDGRCKTPIVEIQAAIDGAISKEQAVKLRQCLDHIDELNKHISEVEQEILRLSDKYEAALNLIRTVPGFDKNPLTAIQVLSEIGGDMSVFPTAKHLVSWAGCCPRNDQSNQKIKSTRISRAGSYFKPVLVQVANALIKSKQHSEFTNRYKRIKARRGHKKSIIAICRMILTAIWHILTDLKPYTPDGFLESRPVKEEKVLSTSQALNLLKQRGYIIKDEPLAVS

SEQ ID NO: 264304 - protein, 369 aa, unidentified
MKSIKFIGMDVHKKTITIAIANQDSRGSARSYGTINNDFDAIDKFCRKMVSTTSRLNFVYEAGPCGYNIHRHLTKNGFGCMIAAPSMIPKKSGDRIKNDKRDAKMLARLHRAGELTAVYVPDRQDEAMRDLTRAREDAVSACRKTKQQLKAFLLRHAIVYSGKSRWSNAYFNWLSDIAMVHPAQQIALQEYIDAVHETVARVNRLTGQIQQLVPGWRLSAVAGALQAARGVSLITAVTILSELGDLSRFENPPQLMAYLGLVPSESSSGNKVKRGGITKTGNGHVRKVLVEAAWAYRMKPRVSRILLKRQQHVSKEICRISWKAQLRLCIRFRRMTARGKPQQVVATAIARELSGFLWAMAKQVQPVES

SEQ ID NO: 264305 - protein, 461 aa, unidentified
MQDNSKSGDRPGRARPIAGLPIVRAKVAGIDIGSERHWVCAPGLEGSGREVADFGATTPELVRMAEWLKERKVESVAMESTGVYWIAPHEVLEKDCEVLLVDTRQLARVPGRNKKTDPSDCEWIQRLHSCGLLNGSFRPQEQVCMLRTLVRDKANLVAESADWVRRMQKSLDQMNVRVHRAVSDLNGVTGMAIVRAIAAGERDAQKLAQLRDRRCRQSEQEIAEQLSGHWREDHLFSLRQSLQMYDAIAERITAYEQEILRKLATMEIGEYPGGVVPPVKNLEKGKAIKKRGQEPKRQALYRMSGVDVTQIDAIGVETVEVVLSEYGPDLSRFPTEKQFVSHATLAPRVPKSGGKPLKHKKRNSASTRVAAALRMAALSLRHSATALGAYYRRLARRIGGDVAVFATARKLATLIYRLLRWGQPYVDEGAEAFEQRYRQQHIKGLALRAKELGYQLMPTTT

SEQ ID NO: 264306 - protein, 350 aa, unidentified
MSAPTIAVDLAKSVFELARAGRAGTIRERRRLSRLQFERFWARRTPCRVVMEACGSAHFWARFLRARGHTVVLLPPHYVKPYRRRNKTDRVDCEALLEADRCAGIHPVAIKSEDQQALLALHRVRSQWLASRTARINLMRGLLREFGVVAPAGAQRFMNDLHALLENQRDRLPERVSRTLRSLWDEVRDLEQRCDAVEGELQSVAEREAVVQTLMQIPGIGLLTATALFATVADIHAFQSGRQLACWLGLTPREFSSGSRRRLGRISKQGDAYVRMLLIHGARAALNAARRRAGTDKPLSQLQAWAARRAEGGHPNKAVVALANKLARIAWAVWYHERTFDGDHVVRVAA

SEQ ID NO: 264307 - protein, 355 aa, unidentified
MIMIGIDPHKSTHTAVAIDDKKMVLAEYRVRASSRQLERLREWASDFDDRQWAVESAGGLGYLLAQQLVAGGEVVFDMPPMLAARVRLLGTGRSQKSDPNDARSVAIAALRSERLTMVSSENHVQVLRMLAKRHRDMSRTRAKSKTRLHAVMLELRAGGLASKMSVNKAELFLETVSVTSAVVRHRILIAQELVAEIAEMDERLKASNTRLAEAVRASGSTVTDVVGIGPFCAATIIGYTGDIGRFPTKNHFATYNATAPVEASSGDNARHRVNPRGNRYINHAIHIAAVSQLSYDSEGRHDYDRKRAEGKNPKEAVRCLKCRISDVVYRRLRDDAQRGLSPTAEPTIEPSVPPI

SEQ ID NO: 264308 - protein, 321 aa, unidentified
MHKFIGIDISKQTFDVSFSKKEQKVFDNNQKGFKKLFKDMDPETSVVMEASGPYYLSLATFLYHKQIKVFVVNPLKVKRFSQMNFNRAKTDKKDAEVIRNYALKMQEDLKNWSPEPRHIKDLKQLHTSIELLNKQLRQTTNQLGAFEDSGSVCKELEKSFKSILSNLEKEKKKLEDKMLVLGKEEYKQTLKSLTSIPGIGDKTAIMLIAISGDFEKFEHYKQLIAYVGFSPRIYQSGTSVRGKGHICKMGKSQIRKLLYMCSWTAKRYNKACAEMYERLKKKGKPERVIKIAIANKLLKQAFAIAKNKTTFDKNYQSKVCF

SEQ ID NO: 264309 - protein, 415 aa, unidentified
MTKIIRIGMDTSKSVFVLHGVDAAEQPILRRKLRRKQVLEFFAKLEPTKVGLEACGAAHYWARELRALGHEVVLAPPQYVKPYVKRNKNDAADAEAICEAMSRPTMRFVPVKTAEQQAALMLAGSRDGLIRRRTQLSNTIRGYAAEFGLTAAKGLDKIEPLLARIAAAALPELAKEMFATYAREYARLKVEITKIEAKLMAWHKDNELSRRLEEVPGVGPIGASLAAMKVPDPHAFGCGRDFSAWLGMTPQDHSTAGKTRLGVITRAGDEALRRVLVVGATAVIQKVKQGKGQPSPWLVELLRRKPPKLAAIALANKNARIIWKLMVSGERYNPARAAAARGEGVEVPSCTSGTPCSPPSRTLRAAAGDGPRGPSLTAAALGVTGPRQVGTEKRPSGRTKKLTLKKLENVAPAAV

SEQ ID NO: 264310 - protein, 339 aa, unidentified
MTSLPVFVGLDYHQDSVQVCVLDQNGEQLCNRSVSNSAQQIDQSIRRHGVPKRLAIEACCGAADLAEELVTDRNLNVQLAHPGYVNRMKRSPDKTDLGDAQLLADLVRVNYLPRVWLAPKAIRELRRLVRHRANLVRQRKDVKLRIRGLLRENRLKCVTANAWTVAWRNWLSKQAPLSETDRWLSEQLLEQLAFLESQITQSVSRIKAAVAEDALVAKLLTLYGVGLITAVTIRAEVGRFDRFDKGKQLARFCGVTPRNASSGARQADAGLIKAGNPDLRQVLIELAHRLIYRNHAGWGKLAANMLQRGKPKNVVVAAVANRWVRWLHHEIQRPIQQTT

SEQ ID NO: 264311 - protein, 467 aa, unidentified
MKVDKKPWQSLNRKERKQWVRRLQSQDPGLEVVHEQAAGIDVGNEAHYVAVRPDRDPEPVRRFECFTADLYRLADWLQSCGVKTVAMQSTGVYWIPLYDILEERGFEVYLVNARHTKNLPGRKSDVQECQWLLKLHTYGLLNNSFQPPSEIRVLRTYWRQRAEHVRGAATCIQRMQKALTQMNVQLANVISDLSGLTGQTIVRAIVAGERDPQKLAELRDPRVQASPKEIAKSLEGNWRPELLFLLQQEIEMYDTYQRRVAECDQQLQRQLTSFPGTVAPKQREGDGKRKRAKPAKNAPGFDLGAELQRITGVDLTRIDGIDVMVAQTVLAEVGLDMSRWKTEAHFSSWLGLCPDNRITGDKVLSRGTRRVVNRAATALRMAANALLRSQTYLGAQYRRLRTKLGAPKAITAMAHRLARLTYRMLKYGQRYVDKGAEYYEQKYRNQQLRFLQKKAAQLGFRITEAQV

SEQ ID NO: 264312 - protein, 313 aa, unidentified
MVEHPVFVGIDVAKASLDVAVHPTTERWTLAYTEREVAGLLSRLAALAPALVVLEATGGLEGPLVGALAAAGLPVVVVNPRQVRDFAKATGLLAKTDALDAAVLAHFAAAVRPTPRALPDAATQALAALVTRRRQLVAMLTAERNRLSSAPRALRAEIQAHITWLQRRLGRLDEDLHQAIRTSPAWRAQDDLLQSVPGVGPVLARTLLASLPELGHLDRKAIAALVGVAPLNRDSGTFRGRRRVWGGRAAVRAVLYMGTLVAVRHNPVLRAFYQRLRAAGKLPKVALTACMRKLLTILNAMLKQQTRWNPSYA

SEQ ID NO: 264313 - protein, 437 aa, unidentified
MRTKKSKASKRVNLQSLPILHPDAAGIDVGAKQHLVAVPADRDPRPVRTFQAFTPELHELAQWLKHCGIRTVALESTGIYWIALYEVLEQHGFEVRVVNARHVKHVPGRSKTDVLDCQWIQKLHSFGLLNGSFRPDQQIRKLRTYQRLQDNLVVNSAQAIHHMQKALFEMNVQLSNVISDVSGESGLRILQAIIAGERDPEQLAALCSSRIKASRQTVAKSLHGNWDPALLHCLKTALDTYHFTQRQIQECDLCIQRQLTEMDSRAPIPGTATSLKAQLYRVCGVDLTKIPGIKEQAAQIIISEVGLDMSKWNTEKQFSSFLGLSPDNRISGGKVLRRSTRKVYNRAADTLRLCAQSLTHSKSALGAKYRRLRARLGAPKAIVAMAHHLARLVYRMLRYGENYVEKGIEHYERKFRLQRIKWLKKEARALNLQLVAA

SEQ ID NO: 264314 - protein, 451 aa, unidentified
MRKPQVVPDEDHEVIYERVAAVDVAKASGVVCLRTPDPARPGRFVNRIWDNVPAMRAQIAELGAELLRCRVQMVTLESTSDYWRIWYYVLESLGLAVQLVSASQAKNLKGRPKTDKLDAMWLARLTQWGMLRPSFVPPAAIRRVRDFTRARQDLVAERTRCLQRVLEDAMIKITSVARDGMKAKSVVAMVAALAAGQRDPRALADLARGPLRAKRDQLAQALDGMFDSHHGMIARSLLDQVAFLDRQITLMEDQAIAALAGVPESWGVDADGQTGPQAGTSPGSPVLAAAHRLAEIPGISLWLAIVIIAEIGLNMTCFPTPAHLVSWMGLCRSAASSGTRHGKGKPKKGNSYARAAAGQAAIGAARTATFLGERYSRIARRRGKAIAQAAVARSIMIIAWHLLNDPQARYRDLGPDFYASRINRDKKIRNHIRGLQALGLTIAITGDEQAA

SEQ ID NO: 264315 - protein, 341 aa, unidentified
MGIDVHEKDYQVAKVFDGICLGNHRKAANHQMLIDHLNSRYPGATFKCVYESCAWGFTLQRALNSAGIECIVVHAADVSSSDKEKKRKTDKVDALKLARNLASGDLTGIHVPDEDLQKERNLIRFRKKLVGDLNRSKNRLKSLLKYQGIKIPEHLGKKNNWSYNFMNWVEQEANKDVLLKDTLLLMLEEIKFLRQLLLKTERALRKLMKERHNEKATLLMTAPGIGRTIAMQFVLEVGDIKRFHSFDALNDLIGFCPDTDSSGDMQRDRGITSRRHKQLRSALIEAAWTAIRIDPALMDAYQKLTKRMQGKYAIIRIARKLLRRMRTMLLTGQPYQIGVAA

SEQ ID NO: 264316 - protein, 359 aa, unidentified
MTVTMTYVGLDVHARSIHAAAVDVASGELRRARFGGGSEEVIGWLQTLPSPLRGCYEAGPTGFALYRAAEAAGVALEVIAPSKTPRASGDRIKSDRKDAELLARLLLAGQLKAVAVPPPPFEAARHLARTREQVRGDLMRCRHRVSKLLLLHGRVYDGSAWTKRHRGWLEQQRFEQAATELAYLDTLAAVDGLVARKAALDERLSRLAREGEWWQTVARLRCFRGIDTLTAFVLALEIGDFARFQRPAQLASWLGLVPSLDQSGESRRQGAITKTGSGYARRLLVEAAWHYLRQPGPGVALTERRAGQPDHVIQIALRAQRRLHRLHKRLRERGKPANVTTVAVARELACFLWAAAVAD

SEQ ID NO: 264317 - protein, 418 aa, unidentified
MEMEPLYTCCAGLDVHKQTVVACLLRADGRAERKEIQTFGTTTAALEGLRDWLLAAGCVCVAMEATGSFWKPVYNILEGHCALLVVNAAHMHAVPGRKTDVRDAEWIATLLKHGLLQASFIPSRAQRELRDLTRTRTSLIDERSAAVNRIQQVLEDANIKVAGVGVVTDIMGKSGRAILAALLEGTMDAAAMAELARGRMRRKRAALEQALEGRMGTHHRMLIALHLEHVDMLDEQIERLSAEIAERLRPVEADLARLETIPGVGRRTAEILAAEIGLEMGRFASAAHLASWAGMCPGVHESAGKRKNGKRRAGNKAVRRALMEAAQAAARTKKPGRTYLRGQYRRLVVRCGKKKAAVAVGHTILRIAYRLLKEQETYQEGVLVHLDEHRRARVQQRALDQLKALGYDVTITPKAPAA

SEQ ID NO: 264318 - protein, 315 aa, unidentified
MTQTSITTAGIDTSKDKLDIAVHGRPERWKLANALPGWRTLAANLVKAGVTRVGIEATGGYERGVVEHLRSAGLTVLLLQPLQVKAFGQVRLRRAKNDALDATLIAACAATLDPPEVAPDPRLTELADYLTFLEQIEEDIRRFKTRLEHIGEPALRSIVNSDIARLKVRKSAQMRDIAKRLRAHGDLAKRLKLVLSIPGIGERTALAIVIRMPELGRISREEAAALAGLAPFDADSGQHRGQRKIAGGRSRLRRSLFAAALPAAFRWNKALIALYARLMARGKAHNAALIACARKLLIYANTVVQRGTPWTEKTA

SEQ ID NO: 264319 - protein, 343 aa, unidentified
MNQYIGLDVSMKETAISIREDGKRIWRGKCASDPQLLAAAIRKRAPHVRRIVFETGPLSVWFYHALTAEGLPVICIDARHAKAALDMAANKTDANDADGLAHLAEVGFYREVRVKGFDSMLIRTLITARRQLLKMRLQMSNQIRGLMKTFGLIVPKGAGSVFERNVRDLLQGEEKLARIVVPMLQAWSNIRHQIAELSKQLAAMARDDQHCRLLMSVPGVGTVTATAFAAGVEDPANFKNSRAVGAWVGLTPRRYQSGEVDNDGHISRRGDNQLRGLLYEAASVILNRSSDTSTLRTWALELKERLGFKRAAVALARKLAVIMHAMLRTGELFDPHGGTQASA

SEQ ID NO: 264320 - protein, 340 aa, unidentified
MNQITTIGLDLAKKVFQIHAVDASGAVMLRRALRRGKVLEFFGKLPPCLIGMEACATAHYWARELGKLGHEVRLIPPAYAKAYLRRNKNDAADAAAICEAVSRPSMRFVVVKTEDQQAAAGVHKVRELLVKQRTMAINHLRGMVAEFGIVVADGPQHVAELVAIVLDTAEVRIPALLRQPLMAIADLLGSLERKLQGIEKQLLAWGRNNQTCRNLITVPGYGPILSSAMAAIVVNPDGFNSGRDFAASLGLVPRHEGTGGKVRLGPISKRGNGYLRRLLVNGATSVLNSKRAQQDPWLRKLLETKPRKLAAVAVANKMARIGWAIMTRQESFRAAPVSAA

SEQ ID NO: 264321 - protein, 321 aa, unidentified
MYKYTEIYGVDISKAVFDVYGLETGHVVFKNTEKGFVSFFKSLSKGCLVVMEATGYYHYRLAQFLYKKGIIVSVVNPLSVKRFIQMKLAKVKTDKSDAKAICDYGKQNEVPLYTALTETQSECLQLFSLLDAYLKKQTATKNKIHGEEVLGIPSKFVYRSLNRDLKHLEKEIKGIEARLLELVKQDQQEQLTLVKSIPGIGIKTALFLIVITDGFSKFENASQLCSYVGITPTIRVSGSSVRGRARISKVGNRKLRSVLFLCAFSACKHNKACRELYERITSKGKSKKLALIAVSNKLLKQAFAIAKSGLPYDENFVSKLN

SEQ ID NO: 264322 - protein, 420 aa, unidentified
MTVDLERGYKRREPCGPKQYLNLLLRSVLMIYVGIDVAKDKHDCFITNSDGEVLFQVFTIQNNREGFDGLFSRIQSVSHDMSNIKVGLEATGHYSYNLLGYLMDKGLTTFVINPLHTNLYRKSLSLRKTKTDKVDARTIAMMLMSDVNLKSYSDTSYHNEELKSLTRYRFDKVQERARLKQSVSRLVTILFPELEKLVPTLHMASVYALLSELPSAGKIASCHLTHLTKLLEHASKGRYRREKAVEIREAARTSIGSNMPAKSLELKHTLRLIGELDSEISEIESEIKRIMDEIHSPILTIPGIGYRMGAMILAEIGDFSRFDSPDKILAYAGASPSTYQSGQLESSYSHMEKRGSRYLRFALINAAKYVCHWDETFGAYLQKKISEGKHYNVAITHVTKKLVRLIYAMEKSGKPYIKAE

SEQ ID NO: 264323 - protein, 430 aa, unidentified
MSSANSANEKPIAAFVGIDWADQKHDIVLCAAMGNAQADHRSISSDPDALAEWALEMQGRFGSQGRILICLEQSRGALIYFLMGYECFELYPINPKQLSSYRVAFRPSGAKDDPVDGKLLCQLICLHHQSLRPWRPDDEATRKLALLCEKRRKAVDTRTALSNQLKSELKLFFPLALTILDNDLTTALAGDFLLAWPNFDSLKKASVNKLRKFFYAHQSRSEQKIQERLKCIEAAQPLTRDSAIIETSTIAVRMLAQQLKDLVPFIALYDRLISELFDSHPDSALFNNLPGAGKQLAPRLLTAFGSHRERFQCSLEALTFFGLAPVTEQSGKSKRVHFRWACPKFLRQSFHEFAAQSVRSSPWAASFYQHQRAHGKGHHAAVRALAYKWIRILYRCWKTRQPYNPELYLTALLQRGSPYASPVNNSTKKI

SEQ ID NO: 264324 - protein, 318 aa, unidentified
MLNESFVGIDVSKDWLDVGWEPAQQTERLVHDEVAMVGLCERLVRERPCLIVLEATGGLETHLASALAAAGLPVAVVNPRQVRDYARACGRLAKTDRIDALVLAAFARAIRPQVRAPKDEETLELGALLARRRQLIDMRVQEKLRLERASPVQRDSIKEHIAWLTERIARLDTDLTHRLRNSSLWRDKEDLLKAIPGVGTITRVTLIALLPELGKLNRREIAALVGLAPFNRDSGQHRGERVIWGGRAQVRRVLYMASVAAIRSNPVIRAFYQRLRAQGKPGKVALVACMRKLLTIMNAMLKHNTPWNPNALDLEHSC

SEQ ID NO: 264325 - protein, 533 aa, unidentified
MFYLGIDQHARQITISLRDDSGDVVQARQVSTQPEKVHAFFQQLTRQRLCDGASFVAVLEVCGFNDWLIRMLQEYHCHKVVLIQPEDRKKCKTDRRDAAALSELLWVNRDRLLQGKPVRGVRQVDIARGTDQENRRLTTLRKEAGQARTRLVNQARHVLRRHNLQWQMPTKRLPTQAAIAWLKQLALPAIDRLEMDHLLTDLEQVQRRLKGLERVIAQRCGVSEEAVLLSSIPGVSYFTATALACRVGRVERFPRARSLANYWGLTPGCRNSGEATQRLGNITKAGSGMARWLLAQVAIKVLRKDARLREWYKRIRRRRGSTIARVAVMRKLATIIWHMLASGRAMPSAGPSRGRGRKKGKNKSADKGAGARPPGGRRPGGLAPWCQSRMAEGGLVPPHSVLAPGTALGLLRSRALPSAQVSGIVAATRRPSNRTKQRGVMRERASARLFDRSCPRATRDPSRWGQLGSDRGCGGRGQQRPRPAARRSGWSGPGGEEFAPDTSASAGSQNRAELLTIIVGGTLRRNELGAIAV

SEQ ID NO: 264326 - protein, 312 aa, unidentified
MKTENTSVYAGLDIAKASLQLHLEGRSFDLANSRDGHAQLCRRLAAVPGVHVICEATGGYERVVVAALHAAGLPVSVMNPARVRSFARAQGRQAKTDPIDASVLTAFGQALAPDATPARTATEIKMAALVTRRAQLLQLRVAEEQRAGMCADADLVKLSRRWLRVVEKQIDKVEALIEELLAVETKLAGQVRRLDDITGVGRITAVSVLAALPELGQLNRRQAAALAGLAPYNRDSGTWAGARRISGGRAEVRRCLYMAALCASRSNPVLKAFYDHLIAAGKPAKVALTAVMRKLIVLMNHLLKYPEFALAK

SEQ ID NO: 264327 - protein, 369 aa, unidentified
MRKHSKLDSMKKAAESAERTATRQWIGVDLGDRSSAVCVLDDHGLVRARMSVRTTQAHFEQFFTPFAGVAVALETGTHSAWASRVLTACGLTVTVANAREIRKIHQSHRKNDRSDAETLARMLRFDPQLLSPIQHRNAQMQADITVLRARDVTVRARTMQINAVRGLVKTYGRRLPSCGANGFAHRALEGLPAELTPALLPLVKTIADLTRRIRTYDRLIEAITRKRYPQTALLTQVPGVGPVTSLAFVLTLGDPNRFQRSRDIGPYLGLVPRQYDSGDQRSQLPISKAGNKYLRRLLVQSAHYALGPFGPDCRLRRHGQRLMERGGKNAKKRAVVAIARKLSVLLHRLWTTGAVYEPLYGVAPQPLAA

SEQ ID NO: 264328 - protein, 482 aa, unidentified
MKKSSIYPNRSQELAALFEKAGNLSKLICVPIDYAKKDHLVMFCNGNGEVLRKPFSVKNSVDGVKYLLGQVNRSCRHRHIQSDHVFFGGEDVNSYAENFANTIRSKGWLVANVNAHDAKKQRENLQASTDRLDLMGIATMLLNRRANCCPAQTGVYRNLRTLVRHRKKLVKMKTEVRNRIHTLVDRLFPGFLNEKKSGIRPFSNSSLYLMQERFSAPQIRRRQRGALIRNLEKRGTKKAEQVAARLQNYASQVLKTPDEYTAALQVSLASHVTHYRCLFEGAHQLVNEMAQLLAQTQGAFLTSIKGIGIVLAAGVAAEIGDPLVQRSTDQVASYAGIVPTVKQSGGSQGPSITSHVSKRSNHILKDYVVQSAFHIGRYGPKDLKDDYSRREAAGQHADFGIARRFVRMAMCMMRTSQVYLPPDMRSTHIKPERRADYYLAMWSYLRDKWSKAGGLNVAFARDKPLGQWRYIIQEVYGIKLKM

SEQ ID NO: 264329 - protein, 416 aa, unidentified
MTPITWFLGVDWGQETHVVCLVNADGIVVGTRTVAHTVDAMTAAVQWVQEQSGAAPEAVGVAIETPRGVVVHALLERGFSVFALNPKQLDRFRDRFTAAGAKDDRRDAWALADGLRTDRRAFRVVRPEPAHLVLLREWVRVFEDLQADEQRLVNRLREQLTRVDAPWLSLSPAASDPWVWTILARASDPDAWPTLPRRTITAALREHRIRRHTPEAVVAALRQPRLPAAPGVGAAVAARMATLVPQLRLVHQQRLDAERQIDGILAQLATETLPDEPREHRDVEILLSLPGVGRMVTATMLTEAAGPLATRDYDRLRTYTGAAPVTKRSGKRTPHVQMRYACHPRLRQALYHWAKNSIQHDDAARCYYRQLRERGHGHARALRSVADRWLRILITMLRTDTLYDPTRPQKILATAA

SEQ ID NO: 264330 - protein, 397 aa, unidentified
MTRRDRGKVICVGGGRYRGRTSSPKNSTAAPTHQPCGRQTEGFRDPARSVPKGGSPPTPLKAAPATKYVGIDVSKKSLDVASGDLRLTLPNTRAGCLELLRKTTWPCVQYVCEATGSFTKTLVAVMHAKRRPISVVPGHRVRHFAQASGRLAKNDRIDAEVIATFGAALTPKAISRPAKGTERLRSLVRRRRSLIDVETSQRAQWNADGDAILQTTSHAMIRAIHAQIEVIDESIEKLFDVCPDLAAKRRAMESVRGVGVVTAIYVLAELPEIGGMDRKQVASMCGLAPWDRESGDIVGIRRIFGGRRHLRTALFMAASVAARCNTILRRFYSRLRKRGKPRKVALTAVMRKLVIHLNHVARRAMEQGTGASAIVPLKGSTDPRKRRRVLKHRRRLP

SEQ ID NO: 264331 - protein, 304 aa, unidentified
MEYIGIDIAKRKFDVSTTKRVYTFSNSPKGFKQLLEVCKKLGDTHCVCEATGGYEFELAVFLHENNVRVTVVNPKVIKDFFRCIGANAKTDTLDAIGIRTYAERMSDRLKIWKAPPLNIIKLKRCYRRRDDLLSMITQENNRLSSETDSELKKMIENLISSFKTQIRLLETMMKNILKEDSKIKLIYDCIAQIDGCGNITALGIITQLSEIGTMTRGEVAALVGVAPYNNDSGKKNGIRCIRNGRKSLRVKLYMPTITAMGRNEYIKNFAERLLKNGKPFKKVVIACMRKLLIYMNSKVKVLLD

SEQ ID NO: 264332 - protein, 347 aa, unidentified
MKFYTKQHKHYCGIDLHVSTMYICILDSEGQVVMHKSMSTTPQDLARAIKPFREDLVIAVECMFTWYWVADFCEDNNIPFVLGHALYMKAIHGGKAKNDKIDSYKIVSLLRGGTFPMAYVYPRAMRSTRDLLRRRNHLMRKRSELLAHIHNTNSQYNLPKIGKNLRYKGNRALVNSRFSDSSAQRSVDMDIEFINFYDDQLSRIEWYIKKHAKVYDYHSYMLLQSVPGIGVIISLVILYEIDDINRFPRVQDFASYARLVKCKAESAGKTYGTSGAKIGNAHLKWAFSEAAVLFLRCNPKAKAYVEKLARRHGKGKALSILAHKIGRAVYFILKRKEPFNGNLFLAA

SEQ ID NO: 264333 - protein, 338 aa, unidentified
MTSLSPGKGEKMSKHSVKAGDLAVLLKLLAELRGKAQARTGESYPIITIQEAGLDGFWLHRALQQEGIESHVVDPASIATPRRRRRAKTDRLDGETLLRTLLAYKRGEVCAMVVAPSPEEEDRRRLSRERRTLIAERIEHVNRIKGLLFAQGIFDYVPLRRDRRKRLEALRTGDGRALLPHLQAQISRELDRLELLLNQIAAVEREQDALLTASRPASEKTASDPVTLLLNLKSMGPNFAAVLWSEAFWRQFANRRQVAAYAGLAATPWRSGGIEREQGVSKAGNPRLRTTMIQLAWLWVRHQPQSALTQWFRRTASAAASARSWRWRASCSWPFGST

SEQ ID NO: 264334 - protein, 347 aa, unidentified
MHRYIGIDVHTESCTFAIMGPTGKRLRETTVETNGKVLTDMVRSIAGKKHVCIEEGTHAEWVYELLQPLVDEIVVTIPDKSLGSKSDSSDAWRRADEMRRGSISRPVFKAPDRFTALRASVKTYIVTQRDMVRTKSRLNCLYRSRGMHGMSSAIYDPERRTSWLSRLPSAQRCQAELLSMQLDGLVQTHERARVWMLEESKKVPIVKLIETAPGIGEIRAPLIVAIVISPFRFRTRRQFWSYCGLAVVTRSSADWTKNREGRWVREVAPQTWGLNRNRQPLLKSVFKGAAEIVAHHMPDHPLTLAYNRATVGGTKPNLAQLTLARRIAGAVLAMWKNKEKYDPTRQQ

SEQ ID NO: 264335 - protein, 343 aa, unidentified
MLAIGLDVHKKQTMVAMLDTQTGELSYRRIATAQLVGQLAALPQPMSLGLETGAQSFFLARQLLSLGLEVMVLDAFKVHRRAEAMHSAKTDRLDATALARMVAEGGGDATVWIADAQLDELRSLTRTHRHLVQLGTALRNQIRAFIRHEGQDCPQQNLMGKRAGLWLDDFAATLAPGKQVALAALRRGLQDNVALIAQLQLVMREVAQDNEAVRRLRTICGCGLILALTLVAEIGDIWRFPRRKHLRGYCGLTPRVAQSGETSHSGPLGRRGNPYLRHALILLAQNLARSKQIAGTGLKRFHGRHVARHGPNPAKVALGRKLCDIIFAMLRNGTDFDLGRLAA

SEQ ID NO: 264336 - protein, 410 aa, unidentified
MDVYCGIDWAEDHHDISVVDREGTLLARKRISDSAAGLSELLALLAEHGDTPEDPVPVAIETPRGLLVACLRATGREVYPVNPMSVARYRDRHSVAGRKSDHGDSFVLANVLRTDMHAHRPLPADSELAQAIAVLARAQQDAVWDRTTAHNKLRSHLREYFPGFLAAFAGLDGGILRPEARAILAAAPAPAAAAQLSLAQLRSLLKKAGRSRGIDTAARRLREVLRAGQMRQLPLVEDAMGRQTLALLRQLDAACASASDLEQAATASFNQHPDAGIITSFPGLGALTGARVLAEIGDDRSRFQDAKGLKAYAGAAPITRASGKSRSVTYRRIKNNRLAAVGYTWAFSSLTASPGARSHYDRRRDHDDSHAAAQRNLFGRLLGCLHHCLLTGQHYDEATAFPATATPAAA

SEQ ID NO: 264337 - protein, 354 aa, unidentified
MMIIGCDYHPAFQQIAFVDTDTGELQERRLQHREEAEKFYRSLGAQEMKVRVGMEASGHARWFERLLAELNIELWIGDAAEIQRKRDRKQKTDRQDAQHILRLLLKDDFPQIWVASWENRDLRQLLWHRHRMVQTRTRIMNQLQAVALNEGLRCKKRLWREHGREQLESIRLAPWASRRRRDLLELLDRLNPTIAELSQAIEQEAEKFLEARRLMTHPGVGPLTALAFVLIIGRAERFQCGKQIAAYLGLVPLEDSSGNRRRLGHITKQGSSMLRFLMVEAAQVTVRSLPEWRSKYFHLMMRRGRKIAKVAMARRLAIRLYWMWRKGWDYEQVKKFGSHAGKLEPGDGVQSNIE

SEQ ID NO: 264338 - protein, 437 aa, unidentified
MSKRLQVGFDIHQKHNHVCLMTKDGQMVNPHQRFDNNWSGHQKFVDMLIGVLEEGGFEGVDIAGESSGLLWFYPFYHLTQAKELTPFDPHVYLFNPRTVKHFKKVLAERDKVDPKDAYAVVERLRFGGRMPHELTFDERYLPLQRLTRYRYHLSHTLAREKTYARMVPIYLKASDYTRKPKPFSDLFGATSRHILSEYATTDELAAMPLDDLADELDRIGRHRFSDATDNAQRIKRAAAQSYPLPPCLVEPINVTLDSLLAHIRFLEGELEKLDSLIETTLIDVPGAPYLRSVKGLGLVYTAGLLAEIQNPNRFIRGYKRDKEGNLRPKTKHDAQASLARFFGLWWPRGDSGEFQSEDRRLPKTGNPYGRYYFVEGANSLRRHNAEYTAYYQRKYDQSLKHKHWRATILTARKLVRLVFALLHNEEMYRPPEVRSSS

SEQ ID NO: 264339 - protein, 312 aa, unidentified
MTALCAAGIDVGRDFFDVGVAPSGRVFRVANGPAGVQAVVERLRREGVARVVLESIGGYAAGLVRTLADAGFQVGVIDPKRIRALRIAEGKKAKTDRLDARLIARFALIMQDAARPVPSAKAFEIRALSTRRRQLVEMIAMEKVRLKQTLDEAVAVSCRQIIALLSEERAKVEGLLQAELLMDAAGPQRSGLLQTIPGVGPAISMTLMADLPELGGLDRKAVASLAGLAPHPNQSGTRTGQGHISGGRPCVRAALYMAAVSAVRSDKGFKREYQAMRQAGKPAKVALIAIARKIIVAANGMLKSNRAWQKHA

SEQ ID NO: 264340 - protein, 347 aa, unidentified
MTHVGIDLHKMESQICVIEETGEVVAEVRVTTRRDTLQRALEAWPGAQVLVEACNESEWVARHLEGCGYTVVVADPNYTPMYGHRHRGYKTDRRDARALASASAQGLFRRAHRTSDARRRMRAELVTRDALVRTRTRYISVIRARLRSEGYRLRSGDASTFVTRVNELPLEPEMLDQLQPLLMVMTLVNQQVATMDRSLVQEAKADRVTLRLQSMPQVGPITALAFVAALDDVRRFRNAHQVESYLGLVPRERSSGEHQVRGRITKTGDKRVRWLLVETAWRLMHRSKSEVPALQTWSTKVAVRRGRTIAAVALARRLAGILYAMWRDDRIFDPDHLSRRRDLPHVA

SEQ ID NO: 264341 - protein, 383 aa, unidentified
MEHDSTLYVGLDVHKDSITVAYAIGSGEVELLGKIGTTQADVERLCKRLQSKARCVSIVYEAGPCGYGLYRQLVQKEFQCMVCAPSLIPRKPGEHIKTDRRDAVKLVRSLRAGDLSAVYVPSIDDEAFRDLARAWVIAKDDLKRARQRVKAFLLSHGVRYTGSAGWGPAHRRWLSAYSFDSAWQQFAFEELRRAIEDRLAQCDRLESALREAVVNWRFYPAVLGLQAMRGVQFTTAVGMLAELGDLSRFVHPRQLMAWLGVTPSEHSSGGKRRQGSITKSGNSYARKLLVEAAWSYRHPARVSPDIQRRHEGLPKPIVDRAWDAQVRLCRRYRKLVARGKQKNIAVVAVARELSGFIWDICRLSLSLAIPRETSTVTTRAGVS

SEQ ID NO: 264342 - protein, 346 aa, unidentified
MKKISTIGLDLAKRVFQVHGVNDRGEVIVQKQLLRSEMIMWFSKLEPCLVGIEACGTSHYWARELSKLGHDVKLIPPAYVKPYVRRQKNDRADAAAICEAVSRPSMRWASTKTIDQQAAQVLHRTRELLVKQHLQMSNALRAHMAEFGRVFPQGRIGLAQAITTLQDMPETEMPALAQKSLLGLAEQIGLLKEEVLRLDRQITLWHRAHPDSKRLETIPGIGPVTATAILATIGKGSQFRSGREFAAWIGLVPRQNSSGGKEKLGSISKQGNPYLRKLLVQGAMIHLRGKRYEKAVGGDWFGALLQRKSGKVAAVALANKMARVAWAVLTKEQSYEVRTQGTAVAA

SEQ ID NO: 264343 - protein, 383 aa, unidentified
MNNKRNYAEKIVYMGIDVHKKTYCCVSICEGEIIKRDTLSANPEGLLNYMNKFFPGAKIKSAYEAGFSGFYLHRYLVKNKTNNIVVHPASIEVSSRDRVKTDKRDALKIATQLSANRLRGIYIPSLEQEGKRTISRLRTNFVKSRRQVGTQFKSLLFTQGLIEAAHTTVISQKWITQKLAEIEKGDYPEDFYYSAKKYAEEWKHLTSQIKEIEERLKTQAERDKDIQRIYESVPGIGLIHGRELANELGDMNQFRNERQLFSYTGLTPSEFSSGEHVRQGHISRQGRSVLRKILVEAAWVGITKDPELREVYENISRRKGGKRAIVGVARRLVGRIRSCLKSSKRYNIKHNKKKEENHDVDNMINKNIIQEKNVIHAAICATS

SEQ ID NO: 264344 - protein, 364 aa, unidentified
MEQITRGAIVRVGVDLAKHVMQVHAVDAQGRVVVARALNRERFAAWCAQLPGGCIVAMESCSGAHHWARRLGSLGLEPRVIAAHLVSPYRMEGRRGKNDANDAAAVCEAAGRPSMRFVPVKNVQQQAVLSVHRLREGYKEERTACINRIRGLLAEFGVIVAQTPEVLRSQLPQVLEDATNEMPALARMALQRAQLQWLELECHIAWCDERIQAHAKSDEMARTATQLCGVGPITASALVASVADFRQFKSAAQFGAWLGLVPSQNSSGGKTSLGRITKRGDDYLRTLLIQAAKAAVITAHKRSDRISQWVVQLTARVGWQKAVVALANKNARILWAVLSRGERYDPHHQSVKPSVPAMAGAMAG

SEQ ID NO: 264345 - protein, 312 aa, unidentified
MTQEQEDVFAGIDVSKARLDVCLWPTGEGMAFANDPAGCAMLARHLAGRTVRAVALEASGGYEREAMAALRAAGLRLHRLNALRVRRFAQGCGIMAKTDRIDAAVIARYLAAVPQREAIDDPAAAQLAELVTARRQLIEEMTRCTNQAAQSRQAVLQRLARRRVARIKADILALDQAIAKAVEADADMARKSRLMRSVPGVGPVFAHSLLAWMPELGCLSGRQAAALVGVAPFACESGAFKGQRRIRGGRKPLRDTAYMAALVAARHNPVMAAFKQRLDAAGKQPKLIIVAIIRKLVVTLNAMLKNNQPWNA

SEQ ID NO: 264346 - protein, 375 aa, unidentified
MTRLVINSLPMKTKTPPSVVSPSPAKVVSGFTLGLDLGDRSHHVCVLDAAGQILREAALPNTRPALAQLLAEFPGGTVAMEAGTHSPWISRYLTGLGATVLVANPRKLHAISRNERKCDRRDAQMLARLARVDPALLHPIQHGSAQAQHDLLGLKLRDALVRTRVNLINAVRFTLKSLGHPVRNPSSAAFHKNVLADIPSDCLPVVQPLLTVLEQITGHIKAMEGDLVQRSKKDYPATQRLQQISGVGPLTALGFVLKIGDPQRFSRGRDVGAYLGLCPRRDQSGGTDKQLRISKCGDGLLRRLLVSAAHYILGPFGPACALREHGQRLTGTGSAREKKRAVVAVARKLAVLLLSLWKHGTAYEPRATALVAPPA

SEQ ID NO: 264347 - protein, 423 aa, unidentified
MNYLTGGHYTAFIGIDWADTKHDICLQAANNEQREFDCIPHQVDQIEQWALGLRRRFGGPIAIALELSKGPIVYALQKYDFLVLFPINPSTLAKYREAFTPSRAKDDPTDAELALDLLLRHPDRFQPLAPQSVVMRTLATLVEQRRSLVDDRVRITNRMRSALKQYYPQILEWFDRLDTPLFCDFISRWPTLEQVKRARKSTLERFFHQHNMRFSQVLDERVTAIKAATPLTRDAAVVTPHRLQALVLAEQLRVTLQAIHRYDDEIRALAPTHPDYELFSSLPGAGPSLAPRLLVAFGEQRQRFSSAAEIQKYSGVAPVTERSGRKHWVHWRWQCPTFLRQTFVEWAAQTVNKSFWAGAYYRQQKAKGSSHQAAVRALAFKWIRILYRCWQTRTPYDELTYLEALRRRGSPLLDHLGAAAEST

SEQ ID NO: 264348 - protein, 344 aa, unidentified
MTIIRIGLDTSKHVFHVHGVDGDEQPALRRRLRRSQVEKFFAKLPPTRIGLEACGASHHWARVLRSLGHEVVLIPPQYIKPYVKRGKNDAIDAEAICEAMSRPGMHFVPIKSRDEQAALMLLKVRDLLMKQRTMLTNAIRGHAAEFGVIATKGPQNLAELLERIGEDANVPAPARELLNSLAGQIAALEVRLEALEAKLMAHHKADPRSRLLATIPGVGPITALSLTLKVPDATVFRSGRHFAAWLGITPREHSTAGRQRLGKISRQGDEGLRQSLVLGATAVIQQVKRRFKAQRVSRTDSPWLLQLLARKPEKVAAVALANKMARIIWAMLVSGELYRQPQAV

SEQ ID NO: 264349 - protein, 446 aa, unidentified
MNQHQLDQKRNWITGKFIVGIDPAKDKHQAAIIDSNGNAVGKSFSFNHNSWGFHEQLWFKLKRYLGPESTHPDQLIFAVEAAIDFWQPLVDYLHRQGYSIVIVSPLTTKNSRVLPGHDFTKTDPKDARLVAESAFRGHYHHYEDYSDQIKAMKTLSLTYTKIRKDLSRNQQRLRSIVNRVFPEFLNIVPLDTDTAHFLLSNYLHPQDFLNLDVSGTVAAMLKVSNQQHGMETLSDLQQAAPTSIGIPRDTLEIISDRLTVNSWLTMITMLKQQLKIISAQLIELAKQTPWFDILVSIKGISDVTASLFIAEVKDLNIYRHYKQIQKLAGLNLRLCVSGKSRGRFKINKIGNCRLRWIIYLMTQETIKYIPEVRIKYLKRQIKYSSRTRSIIACSSQLLQLLMALIKANHHYEFIPENQSLVWQLEYQYDKTKKNRKRNKATPVYNI

SEQ ID NO: 264350 - protein, 397 aa, unidentified
MYIVGIDIAKRKHEAAVIDGEGAVIIKPFSFTNNCSGYNRLLAMLTKAKLPLDEVSFAMEATGHYWLALFTRLQKEGFRVQVINPVQTNSIRSFYIRQAKTDPRDALLIAEVIRFGHFSESTLHPENIYELRELCRGRHAIVSMQADVKRKVVALLDQVFPEYETAFTNMFSDTSMAILQTCPTPKELSEMPLEELCHLIEVSSHKRFRMAKAQELQELARNSFGFAMAGDVFSTMIRLYAKHLDFLKQQVREMDRKIAEIMETLDTPITTITGIGPTLGAYILSEIGDINRFSSAAKLAAYAGIDPTMRQSGEYNGVRNRMSKRGSPYLRHAIWLAASSAVLHDPALKLYFQKKRDEGKPYMASVGHACRKMVSIIYAVMRDNKAYTPYIPNEISA

SEQ ID NO: 264351 - protein, 315 aa, unidentified
MTSTQVFVGVDISKAQLDLALRPEGQFSVPNNEAGFAQVLEHLNAVHPTLVVLEATGGLELPLTGVLAAAGVPVVVVNPRQVRDFAKATGRLAKTDALDAQMLAHFAEVMRPEPRPLPDEQTQALAAILARRRPLVEMLTAEKNRLGTAGKPVRKSLRTHIAWLERELSHTDRGLAQTIRESPVWREKEALVRSTPGVGPVVTTTLLATLPELGTLTGKQIAALVGGAPLNRDSGTWRGKRTVWGGRAQIRAVLYMAALVAARCNPVIRACYQRLRAAGKAKKVVLTACMRKLLIVLNAMLKHRTPWRAELVQCA

SEQ ID NO: 264352 - protein, 381 aa, unidentified
MTTAATHDEQSNATEATLFVAFELSEKTWKLGFTTGHGQKPRERTVTARQQERVLDEIAQAKRRLGLPDSAPVVSCYEAGREGFWLHRFLQAHGITSHVVDSSAIEVNRRQRRAKSDGLDVRKLLSMLMRYHSGEHQVWQVVKVPTVEAEDQRHLHRDLETLKQERASTTTRIQGLLSSQGLRVTSLTKLPEQLEALRLWDGSPIPPGLRRRVLRVYAHHTFLSEQIAAVEVERRTQLQASTDTSIDKVRQLMQLKGIGINGAWLLVMEFFGWRAFKNRREVGGLAGFTPTPYQSGESAREQGISKSGNRHVRWMTTELAWSWLRFQPDSALSVWFRARFGGGGKRLRRIGIVAVARKLLIALWRFLETGVIPAGAVLKEA

SEQ ID NO: 264353 - protein, 395 aa, unidentified
MVACVRIASGGEVSRAVRTFETTTARLIELAEWLEASGCTQAAMEATGVYWKPVWQVLAGSGFELVLANAAHVKNVPGRKTDVNDATWLAELLAHGLIRASFVPGPEIQELRGLLRTRKQLVREKASHVQRLQKTLEEANIKLESVLSDVMGRSGRAMIQALIAGETDPAKLAALAHPKVRAPQARLREALRGRVKRHHRFLLGLHLQQIEALDAGIAAIDREVDAGLASFRDAVKQLSTIPGVSELSAQVILSEIGTDMSRFATAAHLRSWAGLCPRNDESAGKRRSTRLRMGAPWLKAMLVQCAWAAARTKATYLNAQFVRLRARRGPKKAVCAVAASILTAAYHMLKDGTFYQDLGATHFDRRPPEAHARRLVKRLADLGFSVQLEPVAAVS

SEQ ID NO: 264354 - protein, 418 aa, unidentified
MEIDKDLDVVHERAAGLDISKRDAKLCVRVPGARPGTYTSKVTTWAATTGQVLELREYLEQARVDMVVMEATSDYWKPFYYLLEETVPVMLVNAKSAKNLPGHKTDVKDAAWLARMGAYGLLRASFVPPEPIRDLRDLTRARAIAARDRVREIQRLEKFLEGSGIKLSSVVSDLTGVSSRDMLEALIRGERNPEVLAGMARGTLRSKIPALVDALTGRFRPHHAFMARLHLDQIDAHTRTIEALTQHIEEAMKPFRDAREALATIPGVSQRVAEVIIAETGANMTVFDTPARLASWAGVCPGANESAGHIKSAHILPGNKYLKAALGTAAMSVTRSKNTYLAAKYRRITARAGRNKALVAVEHSILNAAWHMPRNGEIYNDPGADHYNRISPTRAKNKAIKQLNNLGYDVTITPVTAA

SEQ ID NO: 264355 - protein, 360 aa, unidentified
MKIQRTSVGLDVHARSVVGCGLDGDTGEVFERRLTPDRGEIAAWLRDLPGPVAVTYEAGPTGFGLARALDAAGIACVVAAPSKLIRPTGDRVKTDARDAAHLARLLHLGQITEVTVPSIEQEAARDLVRAREDVRGDLMSARHRLSKLLLRQGIVYCGGRAWIREHQRWLRRQRFDSAALQLAYDTAFDAMLATLERRERLDTAIAEMAADSRFTPVVTRLGCLRGVSTLTAFGLAVEIGDWSRLTGRSIGAYLGLVPSEYSSGATRTQGAVTKTGNGHARRLLIEAAWHHRAPYRPGAVMRRRWDAASPAARARGQAGNRRLHERWMRFDERKKRSVVANAAIARELAGWCWSLAVLED

SEQ ID NO: 264356 - protein, 370 aa, unidentified
MAKRSMFVGLDVHKESIDVSIAEGGRDGEVRHYGVIPGDLEALAKVVRAVRAPNRRLRFVYEAGPCGFGIHRYLTTHGEDCVVVNPSSMPKRSGDRIKTDRRDSQALARLHRAGELTAIYIPTADDEALRDLVRAREDAVGLSTQAKHRLKAFLLRQGRRYPGKAGWTRPYRRWLADLSFPLAPQHIALQEYRDTLDETERRVERLTDQLRQLTPPWRWAPVVDALQALRGISFVTAVGLVAEVGDLRRFAHPRELMAFLGLVPAEYSSGPSVRRRGITKAGNPHARRLLAEAAWAYQGVPRLGRQMLYRQEGLPPSIRDIAWKAQLRLTSRFRRLVARGKAKPKVATAIARELTGFVWAIAREVPVPPA

SEQ ID NO: 264357 - protein, 344 aa, unidentified
MITIGVDPHKASHTAVALDGDGHSLGELRVPATRATAERLLRWAGRWPDRTWAVEGASGLGHLLAQRLVAADETVLDVPATLSARARLLDRGHGRKTDALDARCVARVAMSQAGLRRVCPEDHTAVLRLLSDRRDELTGERRRVVNRLHRLLRDLRPGGAPTELSTAAAATLLGRIRPETAVDLQRKLMARALVADLRRIDRVLAENRTRCANAVAASGTTLTAIFGISDVLAAKILGHVGDVDRFRSDDSFASYSGTAPIEVSSGEVTRHRLSRNGNRALNNALHLAARVQTMHPGLGRDHYERKLAEHKSSREALRSLKRQLAKVVYRRLVADHVHRPALAS

SEQ ID NO: 264358 - protein, 351 aa, unidentified
MNLKRIGLDTSKAVFTLHGVDHDEKAVLRRNMRRAEMEAFFAKLPPTHVALEACGGSHHWGRRLAAMGHTVQLIPPQYVKPFVRRGKNDRNDAEAISEAAARPDMPSVPVKSAEQQAEAIVLSARELLVRQRTQLVNAVRGHAAEFGVIAAKTISQLPGLLDAVAAAETVPATAKEMLAFLGAQVAQLDGQIAELERRMKQQHKANPVSQLLAEVPGIGPIGALSLALTIDPGRFQSGRHFAAWLGLTPKEHSTGGRQRLGGISRAGNERLRQLLVLGATAVIRFAKPGSKSASAWLLALLERKPRKRRVGHDGDRGSVSGQQDGRRAGGRGCRGRLTRSQVPGCKESCRR

SEQ ID NO: 264359 - protein, 345 aa, unidentified
MQLHTIGIDLGKTVFHLVGLNPRGEVVVRKKFSRKQLLLFTANLQVELIGMEACGGSHFLGRALREQGHEVRLMPAQYVKPYVKTNKSDYIDAEAIAEAVGRPKMRFVPIKSDDQLDLQSLHRVRERWVMRRTAVINQIRGLLLERGITVRKGRRHIDAALPGILEDASNQLSGALRVLLVQLKLELDHLQMRIDEVDATINKAAGENEVCRRLVAIPGIGPVTATAIIAAIGNGAAFKKGRGFSAWLGIVPGEYTTGGKQKLLGISKRGNSYLRKLFVQGARAVLQQSAKQSSGLSAWLAQLTTRLHSNVAAVALANKLARMAWAVLAKNEPYRPPIVVGAATA

SEQ ID NO: 264360 - protein, 365 aa, unidentified
MINYKIGCDAHRRFSQFAILDGDGQFLKQARVNHEPGAIRNFLSEYPPGTPVALESVGNWYWSVGEIEAAGCVPLMAHAAKAKVMMGNVNKTDKLDARGLATLLHLRSLPTVWLPPHEVRDERELHRTRMALSKIRTALKNRVHSTLAKYALSLDTDSDIFAPKWRPELIRACNALPPETHRCMQQHLGALDNVQGQIKDLEERIKQRVEATPNIQLLKTLPGVANILSIVIEREIGDVNRFPSSAQFASYAGTVPTIKASGGRIRYGRLRKQSNQYLKWAFIEAANVVVRQRRHPNWRDKHVTILYERIRRRKGHSIAVGAVARHLSEAAYWMLRKQELYKDPARQVVSRGKGQRGANMVKVKP

SEQ ID NO: 264361 - protein, 427 aa, unidentified
MKTEDIRLEEFRNLKKEVRGSDKHLLVGIDIAKEKHNGFFGTATGKVLLKRFVFDNNREGFEKLLAETDALKQKYGLSQTVFGMEPTANYHKPLGEYLIVRDQEVVLVAGSAVRKNRELLDGRWDKHDVKDAANVADLIAQGKFQYYENPCIEVRELRGLLSLKRKLKKQGQGLQLRIRNNLLAQYFPEMDRYYDTCEKDNLAIVSTCLSPPVIGGMEYNEFFKTVVSRKNGLRQHKHLYRIWQLAKESIGCEAEEGAACEAGVLVALLKQTRQAIERVEEEIQKLCLLFSEYEFVISIPGFGPDVSAKVLAYIGDQYRFEKASQVLKMAGFDLSASRSGKSSEKAVPVISKKGKADLRYALYQAAHTASIRNEHFKKYFTAKLRGREKEKGIKTKMRVKLAAKLLIIAWTLMKNKEPFNPEHVKID

SEQ ID NO: 264362 - protein, 351 aa, unidentified
MAKTFETTVAVIGIDIGKNSFHVVGQDRRGAIVLRQKWSRGHVETRLANMPPCLIGMEACVGAHHLSRRLKALGHDARLMPAKYVRPYSKGQKNDFRDAEAIAEAVQRPTMKFVATKAIEQLDLQALHRVRERLVSQRTGIINQTRAFLLERGIAVRQGRLSLRMALPQILAAPPDVLSPRMLHIIEDLAGDWRRLDERIEALSDEIGAIARQDIGCERLMSVPGIGPIIASAMVAAIGSGDTFVKGRDFAAWLGLVPKQISTGDRTILGSISRRGNRYLRVLFVQAAWVVLIRPKNWERYGLKSWLEAASKRLHHNVLAIALANKLARIAWSVLARGRGFEVSRLDHAIA

SEQ ID NO: 264363 - protein, 411 aa, unidentified
MATLFCGIDWGESRHDVAIIDQAGTVVSRTKITAEAAGFTELLNLLAAAGDTADCPIPVALETDRGLLVAALRGTGREVYPLNPLAASRYRARHQVSGAKSDAADAVLLANILRTDMDAHRPLPADTELAQAIRVLARAQQDAVWSRQKLGNQIRSLLKDFYPAAVEAFASMPNGGLARPEPRTILAAAPTPAKAAKLTRAKLRALLIKAGRQRRIDAEVDRLLTVFRSDQLRQPAIVEEAMGMQLTTLLAQFEAACQASDDLEAAAREHFESHPDAAVIGSFPGMGTLVGARVLAEIGDDRQRFADARGLKAFAGSAPITRASGKRTVITYRRIKNNRLASAGSIWALAALKASPGARRHFQTRRERGDWSQQAQRRLFNKFLGQLHHCLQTGTSYDETHAFPPPLDLAA

SEQ ID NO: 264364 - protein, 341 aa, unidentified
MQIKILGIDLGKNLCSLAGLDGSGQVVVRRRVRRENLLKVVSHLRPSIVAMEACGGAHHLGRQLRDAGFEVRLMSPEYVRPYVKAQKNDDRDAEAIAEAATRPTMRFVELKSAEQLDMQVLHRARDRLVAERTALINQLRAVLMERGIVIPQGWRKLNRALVAILEGDEPALSRRVRMLINDMRSEWGELDRRIHAFDNEFAASVRADEGALQLTTIPGIGVLNATALVAAIGKGQSFARGRDLAAWLGLVPRQQTTGGKPRLKGITKRGNVYLRKLLIHGARAAMTSLSATNTALGKWLRGLRARAHVNIVVVALANKLARIVWAILRTGRGFEAKEATP

SEQ ID NO: 264365 - protein, 346 aa, unidentified
MKDVQIIGVDLGKNSCSLVGLEHAGQVVLRRRVRRDGLTALLAKLPSAVVAMEACCGAHHLGRLLVARGREVRLMSPEYVRPYVKAQKNDDRDAEAIAEAATRPTMRFVALKSEAQLDVQVLHRVRDRLVGQRTSLMNQTRSILLERGLVVAQGRRALLDALQAVEEQGEASKLSGRVRLLLADLLDQWHALDSRIAALDEEFTEMARNDPAARRLATIPGVGVMNATALVAAVGDGRTFSRGRDLAAWLGLVPRQATTGGKPKLLGITKRGSKYLRKLIIQGARAALPSLARSPTPLGAWLRGLLARAHGNKVVVALAAKLIRVAWALLRHGTSWSWAPSQLATA

SEQ ID NO: 264366 - protein, 450 aa, unidentified
MSPLALDVVTKTGKTPVLGRMLSKYVGRKTSSIENDITKARNHLRQRGKIMRVVFGIDVSKASSEVAILVNGEKIHGYTIPNDAIGFNRLLEDLGTVYQPEIVFEATGVYSRRLQAFFEDNSYAYTRLNPLESKKQLDSLRVRKTDKIDAEKLATSQFILNRKPSYVQEALYQELRDLSRFYQNLTEDIVCSKNRLHKVLQVTFPELENILSSPTGKQYWNLVMAFPCNSFVLELDDAALRAIIRQSTSKRISENRVTYLVDKLTKLANHSYCAVKKTSPMMEEVKYYAGELLRLSEYRQSVLEKMITLAQPLPEYEILLSIPGIAETTATSIIGELGDIRRFHSANQINAFIGIDLRHYESGDFLAKEHITKRGNPYARKILFKCIHNIASASHTNPCHIADFYEKRKRQSQVTSTKPHTIASIHRLIRTMYYLITHNKLYDYTSTQNR

SEQ ID NO: 264367 - protein, 353 aa, unidentified
MCKGMKNFSIGIDVSKEKFDLTVKKVYYGTKQPEFLHYDVYENNPTGFRKMIKALEKVTGRADKSEWLFCLETTGAYELHLCNYLYAKGYDVWRESALQIKLSNGIAKSKNDQVDSERIADYAIRYMDKMVIYEPEDEKLRTLKSLFLFRERLVKEKRSKQTSSQEIKCTHVMNDEMRWMQTRSQQDIARLNKEIKECEDHIRTLIASCEEIEKNYQHVMSIKGMGIVTTTALIVYTHNFERITSARKASSYCGLAPFYAQSGSSIYYEKNVSNYSNPQLKGYLTQAAFIATRYNEDIANYYNRLRASGKPTGICVNNVRNKLLRITFSLVQNDCNYEENHEWKRSQSLKEAA

SEQ ID NO: 264368 - protein, 342 aa, unidentified
MDIKVLGIDLGKTVCSLAGLDEFGTVVFRKRLQRHRLLDFLEGLSPCVVAMEACGGAHHIGRFGLQKGHEPRLMSPLYVRPYVKVHKNDDRDAEAIAEAATRPTMSFVAIKSEEQLDLQALHRARERLVSDRTRLINQGRGFLMERGIRVGTGRHIFQKELARLTAEGNDDLSHRMLMLLSDMASELDVINDRIAAIDVEIKALAKADADMQRLMDIPGVGPTIATALVAAIGTGSSFGKGRDLAAWLGLVPRQITTGGKAKLIGISKHGNRYLRKLFIHGARTVLHLVRDRTSPITAWADGLKERAHVNVAAVAMANKMARIAWAVLTKGERYRPHALSGL

SEQ ID NO: 264369 - protein, 474 aa, unidentified
MSRLGSASGRTPRITHEVLDQVLNFPHSLDLGPAAKGRPDIHLIERTTIMKRRKPTKDIDRGKPVLAKGRAVVGIDIGKRKHAATALSPQGEVIAQLASFPNTREGIDQLERECLRKAGGPGKVLVAMEATGHYWMCLYHELTRRGYECVVINPIQTNAKGRSRLRKTHNDRIDSEGIARLVLAGEARATRVPDEKTTELRLLVRHRQRLLRAATAMERYAHTLVDRVFPEYADVLSKPFLPSGQKLIRQLGLAPAGLAAQPDETRDVLRTASRSRIAPEAIDHLLEVAGQSIGTRQAEGIAEAQLTSIFDYLETVRSQIVAIEKQLDQRVQKLDSPLLSLGILSTLAAIIHAESDPIGDFHTADRYVAYAGLDPSLRQSGDTIDRRGKISKRGSPTLRHALYLAAFVVCRKHLCFQRVYLKHRKRGKSHRNAQVVVAGKLARVVWRLLTDNREFTKRPPKMPPQAGKNRKQRK

SEQ ID NO: 264370 - protein, 376 aa, unidentified
MREKLRFLGLDVHAETIAAAIAEPDGEMRSLGTIANREDSIRKFIKKLGSAEQLRACYEAGPTGFVLYWQLAQLGVECTVAAPTLVPKKPGDRVKTDRRDALKLARSHRNGDLTAVWVPDEASEALRDLVRQREAAKQDQLRARHRLTKFLLRTGQRAPIGLKAWTERYMRWLAQIRYTQLAQEVTRLDCMNEVEHMSARVKRLEEAILEVVKQAPQAMQELIRGLQALRGIAHISAVTIASELGNISSRFESARKLMGYSGAFPSEHSSGTRIRKGGITKAGNAHLRRIVMESAWCYRHLPRVGAKMRKRQQGIPADIIEIAWKAQNRLHKRYVKLAMAGKDQRKVVTAVGRELLGFIWAIGVKAEQVKRQPLAA

SEQ ID NO: 264371 - protein, 422 aa, unidentified
METIYERCCGLDIHKKTVGACLIVPGPLGRSAKEIRTFGTMTEDLLKLSDWLTANRVTHVAMESTGVYWKPIWNLLEGNFELLLANAQHIKAVPGRKTDVKDCEWIADLLPRGVGGPTYSAHHGLLKGSFVPDLPQRELRELTRYRTSLVRERTSEVNRLQKTLEGANIKLSSVATNTMGKSGRQILEEMLRGSSDAKTLAQLAKGRLREKIGELERALEGCFGAHQRFLVAQQLAHIDFLDDTIEQVSAQVQERMRPFDEALSRLDAVPGVGRRTAEVLVAEIGIQMARFPTPAHLASWAGMCPGNNESAGKRKTARTRKGSPWLRSALVEAAHAAARTKETYLSAQYHRLAARRGKKKAAVAVGHTILVIVYHLLKQGTTYADLGPIYFDQHDRQAVERRLLNRLHRLGYKVTLESLSAA

SEQ ID NO: 264372 - protein, 407 aa, unidentified
MLFLGDDWAEAHHDVELQDEHGRVLARRRLPEGVSGLAQLHVLIADHLNDHAEPESVLVGIETDRGGWVQALIATGYVVYAMNPLQVARYRERHTTSGAKSDPGDAHVLAEIVRVDRGHHRQVAGDSELAEVVKTLARTHQTLIWTRQRQANQLRSMLREFYPAALEAFSDDLAGRDALAVLAIAPTPATGGSLTRTRVVSVLRKAGRQRNVQARAEEIHTALHTEQLGLPEALTEAYGVSVSSMVAVLSTVVAQAARVEGEVERCFGEHPDAEIITSQPGLGMVLGARVLAEFGDDQDRFLDAKARRNYAGTSPITKTSGTRRVVLARYARNRRLADALHQQAFASLNGSPGARAFYDHHRARGATHHQALRALANRLVGILDGCLRHRTKYDEATAWGHRTTAAA

SEQ ID NO: 264373 - protein, 498 aa, unidentified
MYGGEEVSGSLVIARGYSAELLELGEEILDQVARLEQVPVIVAAHFPVGLGRDHDGLASREERFNDPLLGIERLIGDQRLGLHGRQKVVGAEKIVRLAAGQGEADRIAERIDQRVDFGAQSTARAADRLVLAGFMDGPPLMNRRNFAPGAEERSMSNTPIAVLGIDLGKNICSVAGLDASGAVVLRRRMSREGVLAFTAKLVGCIVAMEACCGAHYLGRVLQQQGHTVRLMAPEYVQPYVKAQKTDDRDAEAIAEAATRPTMRFVSLKSEAQLDLQVLHRARQRLVAARTRLTNQLRAVLLERGIIIPKRRSVLKKRLAGLLTAAPELSLRALRLLQELQDEWADLDQRIKAYDDELAALTREDEQARRLATIPGVGVINATALLAAVGDASAFAKGRDLAAWLGLTPRQHSTGGKTKLLGISKRGNAYLRVQLIHGARAAMAHFAKQPTATGEWIRRLLARAHRNVVVVALAAKLARIAWAVLRHGRSFAAQPAMTA

SEQ ID NO: 264374 - protein, 339 aa, unidentified
MKYTPVGVDIAKHLIQVHFIDEHTGEVIDKQLRRQDFLMFFCNREPCLIGMEACRGSQHWGRELTKLGHKVRLLQAHFVKAFVMGNKNDVMDAWAIWMAVQQPGKDIAVKTEEQQSVLVLHRSRRQLVKFRTMQINSLHGTLLEFGKTIHKGRAAMERELPEALERMKERLPPYLITVLENQYNRLNELDSLIEDIEKKLTSVARQNETCKRLLDIPGVGPLIATAAVATMREASAFKSGREFAAYVGLVPKQTGSGGKIRLLEISKRGNTYLRALFIHSARAAALLPKEPGPWITELKKRRPTSVAIVAMANKLARTVWAIAAHGSKYDKNHVSIRSY

SEQ ID NO: 264375 - protein, 373 aa, unidentified
MPKYSTAFGMDVHLRSTTICALDADTGEAVTRRFPGNPWGEIAGWMDGFPGPSLAAYESGYLGFAPQRELAGLGVECVVAAVSKIPRSAADSASKNDRNDAARMAKAILAHDISPVWIPSPEVEGIRDLAGAYDGATARLATAKQRLLAFLAKRGLVYGGTTPAGNPRKYWTYDFLRWLDKVRPEDDGGVRTLAALRNEVEAAAEARADLLSEYRAAVDASPIAAEVAALQSIKGCAFALAAAFSAEVGDFTRFRSGRQVTAYFGLAPSQRSSGDSVRLGGISGAGNALVRKLAVEGSWCYAAARHQPKLMPRDTGVPLEIRMHGRKGSERLLRRREEMLARGMPAAKANAATAAELVRWLWALGMMCREGAE

SEQ ID NO: 264376 - protein, 413 aa, unidentified
MDVLHPRCCGLDVHKSSISACILLREAGRVQKHQRRFGAMTQELQELAEWLRQFGVSQVAMESSGVYWKPVWNILEGQFTVVLANAQPIKNVPGRKTDQKDAEWIAQLLQYGLLRPSYVPCEIIRDLRDLTRMRASLSQEASRISSRIQKVLEDANVKLARVATNVLGKSGRAMLEDIISGEDDPEHLASLALGHLRVKIPPLRLALEGKIRSHHRFLLRRLVDQIQFVEHEIGLLDERLEEIAQQRPELSQAVARWDTIPGIDRVAAWALLAEIGDNMAQFPTAEHLASWAALCPGNHESAGKRLRGTTRQGSPWLCRMACQCAWAAARTKNTYLSSQFRRLAARRGKKRAIIAVAHTIIVIGYHLQKNQSNYEDLGGNYFDRIHSDGLKRYLVKRLQQLGHKVTLEPMEAA

SEQ ID NO: 264377 - protein, 341 aa, unidentified
MDYYAGIDVSLECSSVCIVDASGKIVREVKVASEPVALIGWFRSLGFELARIGLEAGPLSQWLYTAMKHEGLAVELLETRHVSDAFKAMPVKSDRNDARNIAQLMRLGWFRPVHCKSMSAQETRAMLTARKLIQAKLQDIENSLRGILRGFGLKVGKTTKRSFAARIRELVAGHPALETIATATLAVHAVLLREFNGFEKRVRAMSLLDAKAKLLMSTPAVGPIISLTFASAIDDPSRFNSAKRAGPLFGLTPKKYQSGETDYCGRISKNGDASVREALYEAAHIILTKPIKGCAPLKSWAMRIAKRAGMNKAKVALARKLAVIMLRMLKDNAPFRTTAMA

SEQ ID NO: 264378 - protein, 340 aa, unidentified
MNHIAIDLHDAYSQICVMSPDRKILMEVKIATSATALREFFRGRERSRVIYEAGPHALWVGELLTELGHEAVPVHARRLRLIAESRNKNDRMDAETMVRLSLADLDLIRPVKQRSRETLDERSITTTRAALVESQKRLRVTVRGLVKPFGVRLSSGKGTALSEAAQAKLPPGVRSSVDAMLTVLNTLAVEIRALTQAIEQMSERAHTQRMMTIPGVGPIVSVAFSHAIEDPHRFPSKDVGAFVGLTPSNRSSAGKLLSPKDRGRPGDPYVRSLLIQSAWTLMNSRSDSELAQWGRKKVEEIGKKKGAVAVARKLAVLMHHLWLHDENFIAHPSRRSSCAA

SEQ ID NO: 264379 - protein, 329 aa, unidentified
MKKSYIIGVDVSKLKLDMHCYGQSNGLVISNDSKGFKGFLKWLKKEVSKDTTAVMLVMEYTGIYTYGLEQFLQNHGIAYVKRPALDIKRSVGMKRGKTDQADARMISQYGWYRRDELKPMKPISDAQQQLQQLMNYRDKLVADRASYEARVGELRGQLGEKLPEKIAASSEYIMEVLSVEIKEAQQAIEQVIEEDKELKVNYDLVSSVKGIGFVTAVHMLIVTENFSRFSNPRKFACYAGVAPFEHSSGSSIRGRTKVSQLANKKIKSLLTLAAICAVKHDPELKAKYAQKIQEGKAKMSALNMIRFKLIERMFAVIKRQSPYILSQAA

SEQ ID NO: 264380 - protein, 359 aa, unidentified
MNAIHYIGLDVHKKTISYCIKTADGQIVQEGTLEAERTVLRRWAKGLRQPWHGAMEATLFSAWIYDTLKPYAQQLYMGHPAKMKAITAGKKKSDRIDARTIADLVRCDLLPKCYVLPPELRDLRRLLRYRNMVVQQSVRMQNKMAGLLMESGTAFNKEKLHGKKYFTELIKSLQEVPESVKDLLRMSRGAMEMFESTQKQLIQRLLSEPALEQRVERLMSIRAVGPITALTWALEIADPHRFSSIADAASYCGLTTAFRSSAGKQQRGPISKQRNAWLQTMLIEAAKLAPRWNPQLAALYAQQLKRGHPNRATLQVARKLVAYLLAVDKSGEPFQLPTPPTLPITTKTKKKKAAMARAA

SEQ ID NO: 264381 - protein, 342 aa, unidentified
MEKTLFIGIDFSKKTFDVSVMHRSNLQAEDYKQFENSKEGCIALLQWLKTLSKESPEKWLFCGEQTGLYSICLSEFLVKKGFFIWLDNPLQIKQSMGIKREKNDKLDSHDILFYAYRFQDKARAWSLPEKALKSLELLLAFRARLLSNKHSLLVSSSEIRRVMQRNATARYIYEQSQKDIDRINKEIKEIEKQMLEQIESDETLQENYELVSSIKGVALINTVTILVATHNFNRFENSRQFSCYAGMAPFGKQSGTSIHTKPHVSRLADKNIKVLLTQAAKCAIVYDANIRQYYARKLAEGKDKWLITNNIKNKLIHRIFAVVRNKQLYQMNYTNLSNKAII

SEQ ID NO: 264382 - protein, 356 aa, unidentified
MRYYKDIKEFIKGKAVFVGIDVHLNKWCLCFYCDGEVLEKMNIHAKYPILHHILKSTYKNARSINLVYEAGFSGFWLYRNLKKDGYDCIVTPPNRIPKDNNKVKTDKRDAEKLARFHASGHLKAVAVPSTKIESERRLVRQRNRLVKKQTRQKNEIKSFIHLHGLSRPEYIRTNWSKAYLQWLKDTEFEHESDMFLLSQMLDHLAAIRQELASLSLLLRKMSKSPEYKPSYDRITKLRGVGLITAMTFLLELFDLNRFRSTSHFCSYLGLTPSQHSSGESVHLGRITRQGNSHLRNVLIESAWTVIKHDPHLRDKYNRIRAKATNGNKAIVAVARSLAVRLRRCLLDEVEYVVGIC

SEQ ID NO: 264383 - protein, 415 aa, unidentified
MKVVYPICCGVDVHKSFLVGTIVSTTSGVEPHYQKKRFSTYNNDLHRFCDWLLSNGCKNVCMESTGKYWVPVFNILEERGITTTIANPKWVKAVKGNKDDTKDSKWIGDLFRLGLVPGSFIPSKEIRVLREFTRYRYKLVSMKSSEKNRFQNAFTVCNVALNSVVSDMFGKSATAITDYLISADSFDAEYCTSLLQRSLKKKADSVIESIEGYSITDEQKLRMRIVRSHLDYIQSAIAEVDSAIDAMVTQHEGLIALLQTIPGVDRNSAITIISEIGTDMEQFGSSKRLCCWAGLTPGNNESAGKKKSVRITRAGVYLKPALVQVAHAAVKATDNSYYRLKFEQISKRRGKKRAIIAIARMILTAVFQMMSTGEVWNPTDLFKVDMPQALKEKQLEKAIKQATRFLEKQGVFTPA

SEQ ID NO: 264384 - protein, 356 aa, unidentified
MSREIKYIGMDVHKEATVIAVLNGSGKLVMESIVETKASSILQFIHGLRGELHVTWEEGTWAAWLYDLLKPQVQEVLVCDPRRNALLKEGNKSDKIDARKLADLLRTGMLRPVYHGEHGLRTLRELGRSYQTLGQDLNRVMNRIKALYRGWSIPCAGTQVYAPRYREQWLQKIEHVGVRRRAELLYQQLDGLQTLRRTLRPELLAESRKHKASKLLRQIPCIGPIRAARLIALMQTPHRFRSKRQLWTYSGLGIETRDSAQYRYVHGQLQRTKKPQQIRGLNQNHNHEMKEIFKGAATRASCGVGPLRDFYVALLAKGMQPEMARLTLARKIAAIALTLWKKEERFDAEQLKPQAA

SEQ ID NO: 264385 - protein, 412 aa, unidentified
MSYTQKRFVALDTHKLYVMVGAVNAAQEVVLPARKVSLSEFESWAKKHLRPTDEVVLEATSNAWYFYDLLEPLVERVVVGHPPHIKLIAAAVVKTDKKDTMTLAKLLSVNMIPAVWVPPQQVRELRALISHRQRLIGQQTRTKNRLRSLLQRQHIGPTGGEVFSQAQRAWWLKLDLSSSEKLRMRQDLLMLDHLSPLIQEVEAEIERLSLAEPWAEPVPYLLQLPGIGLLTAMTILSAIGHIRRFPSAKKLVGYAGLGAKIHASGQTHRSGGITKQGRKELRAILVEAAWIAIRYNQRWREQFEHLAFRIGRQKAIVAIARKLLVVIWHVLSAKVADRHADPQQVARFFIRWGRQLRVKTTLGLKASEFARQQLDRLELGQELERVAYGSVTYCLPPAAQAQSPTEPTTTPA

SEQ ID NO: 264386 - protein, 359 aa, unidentified
MSSKIKYIGMDVHKEAITIAVRNGSGKLVMESIIETKAATILQFIQSLRGELHVTFEEGTWAAWLYDLLQRHVHELVVCDPGRNGLLKEGNKNDKVDARKLSELLRAGLLRPVYHGENGLRTLRELARSYSTLSKDMRRVMNRLKALYRGWGIPCGAIQVYDPRYREQWLEKIPEAGVRRRAELFYGHVDGLHALRQQARQELLSESRRHKASKRLREIPCIGPIRAALLVALMQTPHRFRNKRQLWNYSGLGVTRRDSAQYRYVRGQLQRSKKPQQLRGLNQNHNHQMKEIFKSTAITATRCAGPFQDFYARLLAKGMAPEMARLTLARKIAAITLTIWKKGDRFDPNQLNQPNVQAA

SEQ ID NO: 264387 - protein, 373 aa, unidentified
MAGKKFIGLDVHQDTIAIAVADDGVDSEVRYFGTIANRPEALHSALKKIGQGGSELRVCYESGPCGFIIYRLLAKLGVDCMVISPSSKPRRPGDRVKTDRRDAQTLARLLRAGELVAVWVPDEAHEAVRDVVRARRQAKDELGAAKSTLKSFLLRHGRRFNGKAIWGKAHWGWLSEQKFAFPHQQFVFEEYKRRIHDLIARCNRLDDVLKEAVSGWVLGPLVHALQALRGIKLTAAATLVAEIGDLHRFGSPKQLMAWLGLVPAEHSSGKRIRRGEITRSGNAAARTMLIESAWHYRFPAREGRSLIDRNAEIPEHIRAIAWKAQVRLCAKFRRLVASGKQTVKVVTAVARELAGFIWDIARQTPPVAVEPRR

SEQ ID NO: 264388 - protein, 369 aa, unidentified
MKKKINTTQRSELARAPRRQRSPIVGVDVSNKNSHYCVLGPEGEIAAEGTLRTTPAGFSAQFPRAIRCRIVLEVGTHSPWINRLLHSLGHEVIVANAGRVRMIYDNDNKNDRVDARTLARLARVDAGLLHPIRHRSAEAQADLAVLHARDSLVSLRTKLVNTVRSMVKSFGSRLLSSSPEYFPRKVRTHIPASLQPALFPLLDQMEMLTSQIHAYDKQVEQLTRTRYPKTQVIQQIRGVGALTSLAFVLTIDDPHRFQKSRDVGSYLGLRPRRDDSGQSRPQLSITKAGNQFLRRLLVNCAQYTLGHFGMDSDLRRWGQALMARGGKNAKKRAVVAVARKLAVLMHSLWVNGEVYEPLRRPVHAQEAAA

SEQ ID NO: 264389 - protein, 405 aa, unidentified
MGKVFVGHDWAEAHHDVFIEDGEGRRLGGGRLPEGIEGVARFHELVAPHAEEPAEVVIATETDRGLFVGALVAAGYTVLAVNPLSTSRYRERHSTSGAKSDPGDAKVLAELARTDSHNHRPVAGDSELAEAVKVLARAHQGLIWTRQRQLNQLRSTLREFYPGALEAFAELSHGDALAVLALAPTPVLGRGLSRAKIAAALRRGGRQRRVEERAAEIQAALRTDQLAAPTLVSEAMGSSVAALVAVVAELVTQIVRLEAELADRFESHPDAKVIRSLPGLGMILGARVLAEFGDDPNRYADAKSRKNYAGTSPITRASGKHHVVLARYARNKRLADACYQWAFASLTSSPGARGFYDQRRAAGDTHHRALRALANRFVGVLHGCLRHDTFYDEHTAWGHRLALAA

SEQ ID NO: 264390 - protein, 402 aa, unidentified
MTGPRPHHDVHLMNDTGEKLAAKRFPEGLEGIAGLHALIAEHTTDPGEVIVGIETERGMWVQALIAGGYRVYAINPLSVSRYRDRHNVAGAKSDPGDAKLLADLVRTDRHNHRPVAGDSDEAAGLKVLARSHQNLIWDRTRHTNRLRNDLREFFPAALVAFESLADRDAVAVLGKAPHPELARRLSVAQIRSALRKGGRQRNLDDRATQIQAALRTPQLTAPPDVAAAFAATTKALVEVIAGLNDAIGELETELATHFDEHPDADIYLSLPGLGVVLGARVLAEFGDDPDRYDTAKSRRNYAGTSPLTIASGKKHAVLARHVRNRRLYDAIDQWAFCAITTSPGCRQFYDHRRTTGDLHHQALRALGNRLVGYLHGCLRTRSTYNEHTAWAHRQPAPTQTAA

SEQ ID NO: 264391 - protein, 499 aa, unidentified
MARTVIEAINVPSCGLDVHKDMIEACVINEAGEKHRKTFDTMRKSLYELKDWILSLNCMHVLMESTSVYWIPIYEILEEVKGMDVGVGNAQRMKQVPGRPKTDKADSDWISRLCMIGLILKSFIVGRRFRELREYTRYHKKLVQERARQVNRIEKLLQMNGFKLSSVLSNITGSSGMRLLRKLYEKGNVTITEVQASLHRRVKKEPEEIEKAINGEMKLTSRLLLGKMISRLETCDKEILEIYQMMAEVSKDYVTYIEQLESIPGIGEQSAIYILAEISTDMSSFKTAGHVTAWAGLAPKDNKSAGKLRYSKTQKANIYIKSILIECAWAAVKTRNTRLSNWYWSNVGRLGTKKAITAVARKILVYIYSMLKSGEMYNDSLDVADTEKRKANKLESARKIVEHRSNTANTQNNRGNINHETFLTSSLLKQKINDTSVNSADVAIPNPLKKRGRPCKQIDNNKPDESSVITDITIPVIPKKRGRPCKKVEDNKLVENQIA

SEQ ID NO: 264392 - protein, 328 aa, unidentified
MLTYVGIDVAKRTLEVAALSGDGEIERVQFGNDEAAHQALVNWLGRYALCQVVCEATGSYHQRLVKHLQTCGVRVSVVNPAQAQDYAKSQRRRNKTDGVDALLLAQYGREREPEQAPALIGVRQSLARELEALSQDLTRLKNRLEAAEAGVTHPQVITSLRRRIGTLEEEKQALEDELKGELEQHKPQELSLLESIPGIGTRTACLLLAELGDPLRFSSARSLVAYAGLTPERCESGSSLHKQSHISRLGSAHLRRLLYMPALSGLRYNPLLKVFFERLVAKGKARKAALVACKVPCDRQGTGMAKLLRIAYGVLRSGRPFDATLNRT

SEQ ID NO: 264393 - protein, 407 aa, unidentified
MELVALYKRVIGLDIHQAQITACALIEEADGSTRIEQRQFGGFKKDRRELAEWVASLHPDEVVMESTGIYWKSPYAALETVGIRAKVVNARHVKNVPGRKTDVGDAHWLATLARAGLLRGSFVPPAKLRELRLIARQRQKLVGQLASEKNRLHKVLTDSGVRLGVVVSDLHGQSARAMVKAIIAGQSPQEVIKLASHRLKASREEIFDALQGDLTPSHRFVLDELIRHIEEIEARIARFDTRLLAELESERNTLALLQTIPGVDLIGAAMLLIEIGTNMDAFGSADRLASWVGICPGNNESAGKRKSGHVRKGNLYVRRLLCEFAHAASRTTSVFKSKFQSLVVRRGYKRAIIAIGHKILRTIFFMLKRREHYRDSATDYEALSVQRNAPRWIKALTKFGFITPAST

SEQ ID NO: 264394 - protein, 435 aa, unidentified
MLGDPVNAFSSPFQYEEVSFVKVVFPTCCGVDVHKRFLVATIITSPTDSLQPRYQKKRFSTFNSDLNRFADWLHENACLDVCMESTGKYWVPVFNILEKCGIRVVIANPKWVKAVKGNKDDTKDSKWIGDLFRFGLVKSSFIPDKNIRILREFTRYRYKLISMKSSEKNRFQNALTVCNVALDSVVSDMFGKSATAITDYLTSNEPFDAEHCVSLLQRSLKKKAGAVLESIEGYSITDEQKMRISIIREHLNHIVGLIDKVDDCINTLISEYEGQINLLCTIPGVRRDTAITIISEIGIDMSQFGSSKRLCCWAGLTPGNNESAGKKKSVRISRAGVYLKPALVEVAHAAVKDKSHPYYALKYERIAKRRGKKRAIIAIAKMILTAIYEMLSTGEVWNPVDLYKVDMPEYLKEKQLEMAVKQAIRFLEEQGLKVS

SEQ ID NO: 264395 - protein, 344 aa, unidentified
MHIASIGIDLGKTTFHLVALGERNKVLVRKKFSRAQLLAYTANLEKSLIGVEAGAGAHFMGAALRDQGHEVRLIPAQFIKPYRKSNKNDFLDAEAIAEGVSKENMRFVQIKTEEQLDLQAMHRVRDRLVQSRTALINQIRGFLLERGITFAADPIHLRKNLPEVIEDAEQNLSSRLRLLLERLWQEWKQLELDVKTITEEIERISKENALCRRLLQIPGFGPLVSTATVAAIGNGAAFRRGRDFAAWVGIVPRQYSTGGKQKLLGISKRGNIYLRRMLIHGARAVLFRVKYDTGGFGQWVHRLAQRAPRNKVVVAIANKLARMAWAVLSSGKPYRHQSLQPAAA

SEQ ID NO: 264396 - protein, 308 aa, unidentified
MERFAGIDVAKETLDVCVRPDTIRKQFSNNEEGRSNLVRFLGKLKPVLIVLEASGGYDIPVVEVLALRLLPVVVINPRQIRDFAKATGKLAKTDTIDAEIIARFGEVLRPEIRPLKDTDTQRLQALIARRRQLVQMLTEEKNRLQIASSWIREDIEVHIAWLTSCVDKAGKDIRDFIKKSPLWREKENLLRTFKGIGPVNACTLLARLPELGRLDRKKIAALAGLAPMNRDSGKYRGRRTIFGGRADVRAALYMAALTAAVHNPVIKAFYQRLIHAGKLPKVALTACMHKILLILNAMVRTNTPWCAA

SEQ ID NO: 264397 - protein, 448 aa, unidentified
MMEPNAAGVDIGAMEHWVAVAPDRDEQPVRKFGTFTSDLYAIADWLRLCDVKVVAMESTGVYWIPLFEVLVERGFKVDLVDARHTKNVSGRKADVTDCEWIRQLRSYGLLSPAFIPAADMAVIRSYVRHRQMLIQYAAIHVQHMQKALTLMNLQLHHVISDITGVTGMRILEAILHGERDPHRLAEMKDRRIKNDTQTIARALEGHYRQEHLLALKHSYDLYQTYQSKVADCDQQIQQYLKTLESKANPDTLPKSSRKRQRKPQRNEPNYDCRREMYRLTGVDLTRIDGIDAAAAQIIVSEIGRDMSPWTTEKHFAAWTTLAPNHQISGGKILRRRPKRSPNRFALLLRMCAQSLLHSQSALGAYCRRICGRIGTPKGLTATAHKLARLIYRMLKYGDSYVDIGQEQYEKKYKQRLLQNLRKKANEFGFALIERSALPQNSPSPQEVS

SEQ ID NO: 264398 - protein, 345 aa, unidentified
MDEAYDGRQVVGMDLHRRRSVLVRMSMDGRKLETVRITNSPGALRAVLARCGERPLVVLEATYGWYWAADVLAGAGAEVRLAHPLGVRAFSYRRVKNDERDAADLADLLRAGLLPEAWIAPPEVRALREVVRYRHKLVGQRTSCKDQVHAVLAKLGVPVTHSDVFGTGGGLWLDQLVLPEPYAAKVASLRALIGVLDGEIARLGQRAAGVLGADPGYAALRELPGIGPVLAAVIIAEIGDVTRFRRAGQLCSWAGLTPRHYESDTKVIRGHVSKQGSKMLRWALVEAIQHQPAGTRPRQARDAIIARRGKEARNIAKTAAARVLLTQVFYALRDGHVRSAGRPAA

SEQ ID NO: 264399 - protein, 350 aa, unidentified
MIIIGCDYHPGFQQIAFVDTDTGELRERRLQHPEEAEQFYRDLAAPGMKVRVGVEASGHARWFERLLAELNFELWIGDAAEIRAQRVRKQKTDRQDAQHILRLLLEDRFPQIWVPNGENRDLRQLLWHRHRMVQARTRIMNQLQAVALNEGLRCKKRLWRERGREQLESFKLAPWASRRRRDLLELLDRLNPTIAELTEAIEQEAEKCPEAQRLRTHPGVGPLTALAFVLIIGRAERFQCGKQIACYLGLVPLEDSSGDRRRLGHITKQGNSLLRFLLVEAAQVTVRSDQQWRSKYFHLAMRRGRKIAKVAMARRLAIQMYWMMRKEWDYEQVKKVGSHAGQPGNPHGVQ

SEQ ID NO: 264400 - protein, 342 aa, unidentified
MNLPVRIGMDTSKSVFQLHGVDENEAVVVRRQFRRAEMIRYFERLPPVLVAIESCGSSHHWARLLQSFGHEVKLIPPQYVKAYVKRGKNDAADAEALCEAVTRPSMRFVPVKSKERQAACMLMTVRERLVSVKSQLSNAFRSYAAEFGIVGPAGRQNVAQLIKRVLEDDSLPEMAKDLFRLQAEEYAAVEARLAKIEAKLMKWHRDDDVSRRIATIPGVGPIGSSMLSMKAPPPETFRSGRDFAAWLGLTPKDHSTGGRQRLGGITKAGDSILRSTLIVGATALLRHIRKGRHKPTPWLASLLERKSPKLVAVALANKFARIAWRLMISGGVYKQPVAVMPT

SEQ ID NO: 264401 - protein, 320 aa, unidentified
MKEGNYVGIDISKETLDVLVCPTGEIAKFANDNDGIGHAINWLKKVSPELIVMEATGGLEMPLYITLAEAQYRVAVINPRQIRDFAKSTGQRAKTDKLDAAILARYAMSIRPEPRSCPEQVFLQLKSRVVRRQQIVDMMATEKNRLGSCHDPVTREEIKVHIAWLKEQIDSIDKDIKKKLVENTEWQEKAKLLMSVPGVGPVLAATLIAQLPELGKTNRCEAAALVGVAPMNHDSGGHKGQRSIIGGRCRIRGALFMGTLSAIRFNPVIKDFFQRLTAKGKTTRVAMIACMRKMVCILNAMVKHNKPWECHGLYTQIVTI

SEQ ID NO: 264402 - protein, 460 aa, unidentified
MIVRIGVDIAVRAPHQASVADERGELLWSGYRFRTSPADLEQLWSRLPDEVTAEDVTVVMEPTRNAWVPLAAWFRRRGAHVVLVPAERSADLRAYYAKHTKSDRLDSVLLARLPLLHPEGLYAERGLGPGDPLRRATKMHSTLVKRRTTSIARLDALLEILGPDWHAAFSGDLSNLTPLRFLAAGYADPIAVRRLGRTRLVRFLSRHSRGAWGEAVADTIFAAAAASRKLWGEDLEFADLAEDIAVEARLALRITEELKELDDRIDALVRERDPRGIITSAPGVGPVGGAVILGRLGDPGRFRSLAAVRSFSGLVPSLDSSGISGHHGGPTKHGDALLREALFISADQARRQDPTLAAKYHRLMVVSGKHHNTAICHIAAALLTRIAACWNAGTPYELRDVDGTPVTTENARAIIRARYTVPDSLRRTRTTTRTSRRSKESQRAPSTGPSHPKATQHTAT

SEQ ID NO: 264403 - protein, 414 aa, unidentified
MGGFPVFTLLPFQGGVALSALYIGIDVSKDFSTAQAIDEKGNKCFYLELAMTADGFDKLLKAITTHGKDNAQVTVAMESTGCYHINLFSFLTHKGIRCVIINPLLIANFTRLSLRKTKTDKKDALTIAQFLLVHKDALLKTELSPGRQDLKDLAREHESLTNLIAGMKNDIRRMLQITFPELESLCNIFSETILDLLRQFPSARLIKIAKPNTIVKALLHEDKRKKISVSAEGIIRAAKASVASHGAAKEIILPEKISTLQHLIGKKVRMKKALVEACEGMMVEDIEIITSIRGISEITASRLLAEIGDYRAFSTYKHIIAFAGLDPSVHQSGKFEGISRISKRGNRHLRYIIYLMTTCVVRGDNIFRTYYQKRRAEGQPFKKAIMATAHKLIRVLFTMLSKRTTYQALEVNAI

SEQ ID NO: 264404 - protein, 350 aa, unidentified
MTRYIGLDVHSQSTALAIVGESGRKLGSKVLETSAPVLIEALRAIPGPRRLVLEEGTQSSWLAEVLGPHVEKLVVTVPRARTGEAKSDVADAFARAEELRRGALDKTVFKSAATPLRQALKLYQPLTTDMVRAKNRFRALLRSRGLQVNAEDPYDPTPKELERMLKQLPTGMRFAAEATLEQIMLLEDLRNRAEDVLVGEASKHPAFGKLLTAPGFGPIRVATVLAIVVIPDRFRQSHQFWSYCGLGVQTVVSSEFRFRGGLPVRQRQPMTRGLKPGNPMLKNVFKGAALTVALRLVNHPMHAHYRQLLKRGMGESLARVTIARKLAAIVLAMWKNMEAYDPAKHHIHHP

SEQ ID NO: 264405 - protein, 389 aa, unidentified
MRITYERVAGIDVHKKTVVVTRLRVTEEQQVEWETHTFGTTTPELLQAYDWLQEWECQQVALESTGDYWKPVYNLLEEDFEVWVVNAQHVKRVPGRKTDASDAEWLAELLAYGLLQPSFIPPKPQRALRELTRYRTRLIQERSRLVNRVQKLLEGANIKLASVATDLQGVSARAILAELAAGNTDAEALAELARGRLRNKIPELERALTGKVEPHHRFLLSQQLEHIDFLDEQVAEIEAEIERQLEAMSPLSEASETAEEATATPPTPAGSPISWSTAVSLLDTIPGINRQAAQIILAEIGVDMSVFPTAGHLCRWAGVAPGNNESGGKHYSGRTTKGNRVLKSTLVECAQAAIRTKDSFFKARYQRLVARRGARLEIFAVKRDMTFNL

SEQ ID NO: 264406 - protein, 477 aa, unidentified
MPLLGRNHNHTNMKSKTPKSKKEKKKISVDQGWEAINPQAAGIDIGAKEHFACVPAKATPKNVRSFGTCTADLNALADWFKECGVTSVAMEATGVYWIPVFQILEERGLAVILVNARQTKNVAGRKSDVQDCQWIQRLHTYGLLQGSFRPEDAYCVLRTYLRYRDELVSARSTQCQHMQKALQQMNVQLVQVLSDVMGVSGMAIIQAILEGERDPVKLANMVDRRVRATQIQIQKALEGDYREEHLFVLRQAFSLYGTYEEKINACDEQIVRETATLSDKVDPQHKPLPPRKEGRPASKDKMQGQDMREVLYRKFGADLTAIEGIGVTTALVVLTEVGPDVSGFKTEKHFCSWLGLCPDNRISGGKVLSSHTRRVMNRASDALRMAAVTLERSQSALGGFYRRMKGRLGAAEAITATAHKLARIIYRLIKHGEAYVRQGMEDYERKFRERKLHALRKTAISMGFTLIAKQELTSPVS

SEQ ID NO: 264407 - protein, 316 aa, unidentified
MKNLSKIFVGVDVSKNFLDVAFYPINKHFRVTNNEVGIKNIVKKLLTQNIVRIACESSGGYEHVMIKALKNFGYHVKLLDPKLVRYFILAQSVKAKTDKIDAHMIAFYIASNAPKYIQEVRSDEDEELRDLIHMRYNFIEDIAREKKRLKQVVTQISKDLIFQHICHLKQQVELIESKTKQLIKNNDSWNKKSIILQSMPGIGNIVASALITEMRELGKIKNKQAAALLGVAPYTKQSGTYEGLSNISGGRFMIRKIVYMGALSACHSKGKLSQYYKRLKSKGKKPKVCVIAVMNKIISIANTLIRKNELWKPHII

SEQ ID NO: 264408 - protein, 291 aa, unidentified
MQYFVGLDVALRSLALCIIDGEGKIVLEQALLCEVEDITSCLEQFGHPIVRIGFEAGTMSQTLFHGLKAEGYDVVCMEARQVYAALSAMRNKTDKNDARGIAQVLRSGWFNPVHIKSYEAHYDRALLTSRKAILRKCLDLEAEVRGLFKVFGIRLPSPLKRNRFDEAARVIIEDDERLAFALLPMLDARLVLYKTFLEMERRLRAITHKDPVCMRLLTAPGVGPVTALSFKAGVDDPARFKSSRLVAAHFGLTPRRFQSGEMDNMGRISKAGHKREVSAVLCCQRIVDAIR

SEQ ID NO: 264409 - protein, 349 aa, unidentified
MKFYTKQHRFYCGVDLHADAMYVCILDASGEVVLHKNIPTRPKTFLRLIKPYRDTLVVGCECMFTWYWLADLCAAEEIDFVLGHALYMRAIHGGKAKNDRIDSHKIAVLLRGGSFPLAYTYPKKMRATRDLLRRRNHLTRKKAELLSHIQNTATQYNLPEPLGRIAKPSERGDLPKKFRDPIVRAMVELDLATIEHYEDLLGTLERHLEKVAIGHDPVTLALLKSVPGVGRILAMVMLYEIENIGRFPRVQDFVSYCRLVKPAKESNGKSYGHSGKKIGNAHLRWAFGEAVVLMLKGNKPAQSALQRLSSKHGKGKAMAILSHRLGRAVYYMLKNQEPFDQERFLRQGA

SEQ ID NO: 264410 - protein, 323 aa, unidentified
MSKHSMICAGIDTGKYKLDVALNGCAEQLQIDNAADGYAALSVWLKRCRVKRVGIEASGGYEQEVVAWLRRDGFVVVVFQPAQVRAYAKFLLQRAKNDKIDAALIAACTAAIKKIHAPPDPRLAPLAERMTLIDQLTDEIAGFKNYREGSRDPQIRQFWKEQIAHFNKLLRAELKELVAAIRQHRDLAERLDLIESVDGIGLKTAVAILVRMPEIGRLTRTQAASLAGLAPFDDDSATHAGIRHIAGGRERLRGSLYKAALAAAFHWNPQLIAFYRRLIAAGRPHKYALVACARKLLIFVNTVVERGTPWVSAASPSADRAAA

SEQ ID NO: 264411 - protein, 446 aa, unidentified
MPAKKKRALATPPHIAHPNAAGIDVGSDAHVVAVPGDRDPEPVRTFGVFTADLRRLADWLRQCGVTSVVLESTGVYWMPLCDFLEGQGFEVLVIDPRSLARNLKKKTDVSDAAWLQELHAFGMLKSCFRPPQEVRSLRALWRHRDHLVTEAAKLLQMVQKVLVQMNVYLHLVVADIAGVTGMRILRAIAQGQHDAQTLAGMRDPNCKKSREEIAKALEGTWDAAHLFELKQLLKAWDFYQNQLHVCDKEYAKAAGKMPDQTQGRPPPEPEKRPQTHRNSPTAFDSHALIFKMTGVRLTEVDGLGASTVLTVLSETGPDLAAKFATEKHFAAWTTLAPRKYQSGKRTKFPAQTASRVAKAFRLAARALLNSKSVLGNFLRRLRARLGIGTAIRATACKLAKLFYRLITKGEAYRRESTAAEEEKQRERQLRALERKARELGMQVMPV

SEQ ID NO: 264412 - protein, 352 aa, unidentified
MTAKKRQVTGGVDTHGKTHHAAAVDQAGRFLGDREFAATAAGYQQLLAWLGAFGRVVKVGVEGTGAYGAGVMRHLSGSGITVVEIDRPDRKIRRTRGKSDPIDALAAARAALSGQAAGVPKTRTGPVEAIRALRVARRGAVKARTAALNQLHGLLTSAPQEIREDLAGVTGAALVQRCVELGIDESALTDPVHATNAALAAIATRITALNVEITRADRRLRPAVARTAPTLSSLFGAGPEVAGQLLNTAGDNPDRLRSEAALAHLCGAAPIPASSGRTDRHRLNRGGDRAANNALHTIVLSRMRHDPRTRAYVDKRTKQGLSKKEIMRCLKRYVVREVHTALLADFAALNTA

SEQ ID NO: 264413 - protein, 313 aa, unidentified
MSLNTTATIYVGLDIAKLNLHCHLAGRLHDLPNTPVGQRQLVKLLAAHPGAQVICEATGGYEREVVHALHHAGLPVSILNPARARHFARAQGQRAKTDPIDAALLTAYGRALQPAPTAARTPVQEALTELVRRRAQIIQMLVAQRAQLTFLVSPFLRRQAQGLVRRLERDQAQIESQLEKLRQQNQPLHHQAQRLEAIDGVGPVTALGVLAELPELGSLNRRQAAALAGLAPHPRESGLWRGRRSIGGGRAPVRKALYMAAVASVRANRILGAFYQRLRAAGKPPKVALTAVMRKLVVLMNQLLKSPAFELSI

SEQ ID NO: 264414 - protein, 412 aa, unidentified
MEGETVIAGVDTHKDVHVLCLLDGLGRKIWSGSFGADPEGYDRLAEAIGDPGSCMVVGVEGTASYGAGLTRRLAELGYNVVEVLRPKRDKARPGEGKSDPLDAERAARKAASGRGCSVPKSQDGWVEAVRQLYVARRLAVATSTSCVACAKSMLTTAPSALRERFRGRERPKDLMPLLARGRKAGDALEESVLASLRSVAAVWKEARSQVESLDERIRALLEANAPALLGIEGCGTTTAAALVVAAGDNPGRLKGEAAFSMLCGASPIPASSGKTERHRLNRGGNRQANWALYEIAIKRMAYDERTRRYVAKRTSEGKSRREAIRCLKRYIAREVYRVLMDPNPDGAAPEGPELAKMRKAMRVTQKQAAAGLGMSAASLGHLEHGRRRSTKLERRYYELLCELKGALPQTAY

SEQ ID NO: 264415 - protein, 338 aa, unidentified
MAIVTVGIDLAKNVFAVHGVDEAGKPALVRPEVPRTKLLELIANLAPCLIGMEACSGAHQWARDFARFGHTVRLMAPKFVAPYRMSGKRGKNDAADAAAIAEAVTRPNMRFVPVKSIEQQSRLFVHRARQGYVEQRTALINRIRGLLSELGIVLPLKAATVRREAHKHLEDLPGWCNTVMGDALSELTRLDERISQYDKYIAQAAKEDVQSVQLMRLSGVGPTTASAIVATVGKGHDFSCGRQFCAWLGLVPGQYSSGGKQRLGHITKAGDNYLRTLLILGARSVLNAARNKTDPLSRWAIEVQQRRGYWKAVVAIAAKNARMCWAMLQCGEAFKLPA

SEQ ID NO: 264416 - protein, 372 aa, unidentified
MKRLAATNVVAKAPQNKNAVKCRKWRPAVEHIGIDVHKRQSQLYIVTEKGEVIEKRILTERGRFSEVLGGRPQAKILLEASTESEWVARCLEELGHEVVVADPNFAPMYGMRSRRVKTDKRDAQALADACMTGTYRKAHRTSEIRRQLKAELAVREALVRQRAKHIALVGALVRQQGLRIATGSADAFLTRLEKSGLTERMRSVVAPLVAVMRKLNEQIQLLDAELEKLASEDEQVARLCTMPGVGPVTAAALVAAIDDAKRFAGPHQVEAYLGLVPSEMSSGEKRRKGHITKAGNPRMRSLLVGVAFSMMRLRKATTATLWEWAMRIEVRRGRKVAAVALARKLAGILYAMMRDGTTFKPCVRKEGMSSAA

SEQ ID NO: 264417 - protein, 345 aa, unidentified
MEDARVAYQLYVGVDIAAATFVAAWLAPGGQSGTPFTGEQTPVGFAALQRRLQATAISPTATLVVLEATGTYWVALAVALHEAGYRVAVVNPRQAHHFAKAQRRRAKTDALDARDLAQLAATLRPAPWTPPPAVDHEVRQRLVARDGRLTMRTQARNQRHALVQWPVVVAAVRQHLDELIADLDRRVAALEAEIAAVLRDGAWAESLACLMSAPGIGLVTAVWLLVGTLDFALCSGPEALTAYAGLAPVPRASGRSIRSRPTIGHDGNGRLRTARYMATLSAARYNPAIKAFYQRLRAAGKPKKVARCAAARKLLHQAWALGSKRQRFDPGYQQQQHDTLPHLAA

SEQ ID NO: 264418 - protein, 334 aa, unidentified
MDKVTTVGIDLAKSVFSLHGVDGTGRVMLRRTVRRDQLIQTVAALPPCLIGMEACSGAHEWGRRFQGLGHTVKLMAPKFVVPYRKSGKNDGNDAEAICEAVMRPNMRFVPVKSAEQQALLVLHRVRQGFIVERTATINRMRGVLCEFGVVLPLRSKTVRRQAAQAAEAVPELARRAIADLLEQLRLLDERIDGYDREIEAQARLSEPAQRLMKIRGIGATTALAIVATVGNAREFKNGRQFAAWIGLVPGQYSTGGKTRLGHISKRGDAYLRNLLVQGARSVLHSASGHQDRMSRWILELQPRRGYYRTLVAIANKNARIAWALLAKNESLRPA

SEQ ID NO: 264419 - protein, 370 aa, unidentified
MAQSSTPYVGMDVHKESIAVAYVAQDYGAEVISLGTIGTRQCDIDKLIRQLQSKSKQLVFVYEAGPCGYWLYRYLTKKGHGCWVVAPSLIPKKSGDRVKTDRRDAIQLARLMRSGDLTPVYGPAVHDEAIRDLSRAREDTLHDLKTAKFRLKAFLLRHDIRYTGRATWGPAHLRWLSEVVCPTPAQQIVFQEYVRAVTEHTDRLQRLDQELHEQVTAWRLCPVVDALQALRGVQFTVAVTTVAELGDLTRFDNPRQLMNYLGLTPSEYSSGERRRQGGITKTGNTHARRALVEGAWAYRYPAKVSRPLQLRLDKLPKPIQDVSWKAQVRLCKRYRQLCARGKNPNQVVVAIARELSAFMWAIAKQVPVTA

SEQ ID NO: 264420 - protein, 335 aa, unidentified
MGKNTLHLIGLDARGAIVLREKVARGRIALRLANLPPCLIGIEAGMATHYVARELAALGHDVKQVPATYAKPFRQGHKNDFRDAHAVAEAVQRPTTRFVPAKTNEQLDLQALHRVRSRLVSERTAVINQIRGFLLERGIVVRQGLRFLRQQLPDILAKRTDVLSPRMARIVADLASDWRRLDERIETVTDEIGTLAKSDDSCRRVMTVPGIGPIISSAMVAAIGNGAAFARGRDFSAWLGLVPKQMSTGERTVLGRISKRGNGYLRTLFMQAARVILLRSANWPKHGFGLWLVRAAQRLHPNVLAAALANKLARIAWTVLAQERSYEARVTKAAA

SEQ ID NO: 264421 - protein, 416 aa, unidentified
MKASKSRIDRSVNDHEMIVGIDVAKHKHVAKILFPNGSESQPFSFSNHRRGFETFLAWVCLHQKRATCNSIIVGLESTGHYWEPLAFFLEAIPRIRVVQVSPKHVKKTKEVYDNSPGKTDRKDAGVIAMLIQMGRFQRLVLPRGPYAELRGYARLRERKVVELGVQRNLLHSLVDWVFPEYGSLFPKLEGKTSLTILRHYTTPEQISRAGLPRLSNAIRQASHGRLSEACAERLMEAASATIGLQEGIEAAAFAIRNIVASLERIQQEIVLIEKQLAKVLDQIPYAQQLLSIPGVGKVTVAILLGEAGDLRRYQKAEELIKLAGLNLFEISSGSHQGRRHISKRGRPLLRKCLFFAALRTVKTGGAFRAVYVRLAQANRMQKTKALVAISRKLLRLVFALVRDDMAYQPRGELRAA

SEQ ID NO: 264422 - protein, 335 aa, unidentified
MQIYGIDLAKEKFDVSFFDLTSKKVSNQPSHKVVTNNLKGIGKFLKGLPSDAILVAEHTGVYGDTLLKCCMDSNVKIAFVGGYVIHRYRATPDRAKTDVLDCALLRDFGERYPDKLKYKTFPEEALYELRQLARHREMLVEQRKQLITADKSEDCRPIRSLAVKRSMDRLKEMLDTEIAETEKEMLKVINGHESIHHNYELVKSVDGVGLITAVELLVKTENFTKITTARQYAAYAGTAPYEKSSGKMDKGAHISKIGNRRSKTLLYICAESARLHNKEIKLYYERRTLIDKKPRHYVLNAIANKLLRIIFTLVEKGEYYDANFIRQDPRVVKHN

SEQ ID NO: 264423 - protein, 346 aa, unidentified
MMIIGCDFHPSWQQVSWLDTETGESGERKLVQAAGDAERFYRPLPAPALIGMEATGNCHWLVDLLAELGHELWVGDAAQIRASCVRRQKTDRRDAEHIRILLQEGRFPRIWMPSSEVRDLRQLLLHRYKLVIIRARVKNELQHLCLNQGVQRKHKLWSQAGQQVLRELPLKPWAGRRREDLLGLLAMLDQQIEPLDRAVKEEAQRDKMALLLQTQPGVGAVTSLAYVLTMGDVSRFPRGKQVASYLGLIPREHSSGGRQKLGAISKQGNRMLRMLLVEAAQIAVRFDPGLRKEYLHRCHSKPKAVAKVAAARKLAVRLYWMLRTQKPYPEVVRIESSPRVPLVGAS

SEQ ID NO: 264424 - protein, 342 aa, unidentified
MKTITTIGIDLAKNSFSVYGVNAQGKPVLQRTLTRAGVIRFFANLPECLVGMEACASSEYWARTVESMGHTVRRIHPRYVKAFLLGSKNDANDAAAICEAVQRPNMRFVPHKSPEQTDIQCIHRIRQGFVRSRTALVNQIRGLLGEYGIIMRQGVSTVRNRLPEVIADETNELSPIMRRNLSSLYESLCFLDNRILDQEKILKDIVRENEACKRLLKVPGIGLLTATILLSVAGAASNFKNGREFAAYLGLVPRQNSTGGKTKLLGISKRGDSYTRTLLIHGARAVLYSLKTERTPRARQNAWLAELAARRGTNRASVALANKTARIAWSMLAQGTEYKIAA

SEQ ID NO: 264425 - protein, 337 aa, unidentified
MEQRYVGIDLHRRRSVIVTMDHAGEVLSSVRIENDPVAMSLAVAEAGEGAEVVFEATYGWYWLADLLEADGHVVHMAHPLAMAGMTNNRRVKTDWKDATLLADVLRMGSLPEGWIAPPETRELRELVRYRAKLVALRSGLKAQVHAVMAKHGILPTRVQMFGPGGRAQLDALELPAGYAMRIASLRHLVDVYDKEVAVLEREVHRHLKDDPGYRAIQQLTGVGKVIGAIFVAEIGDIDRFPSAKHLCSWAGLTPKHRESDLTKFQGEITKQGSTLVRWAAIEAISGYRGGARLQADYHRIAERRGVYKARVAVARKLLTLVYYGLRDGEIRCLTQAA

SEQ ID NO: 264426 - protein, 446 aa, unidentified
MSIEGSSIAIGIDAAVVANHHVVVRRPQAGRKGEVVDQFVAPPTLAGMDALTKRLAQWPGSMAVAEPTSMTWLPLAIALGDAGVDLALIGNRHSARLRSAVAGKNKSDPIDADLLAQAGELFELVPVRLPCPSELALRRAAQRRGKVLVDANRCLRRLISQARWAFPDVWNACSGSRSTAIGILSRWPHLEQLSRARTSSIIEVVAEHTRGVASVEKRATDIRTAARRWAAFWEGHLDLDALAWETASLLDDLEVGEARVERAQERARKYWEQLFGDDPLLISVPGMGPRTAPTVRAFFGDAMHFETAKQAQAYVGLNPSNWSSGQMSSPSRAITKEGPSVLRLAFYQAANVARSHDPQLADFYYRLMVERGHCHAKATCAVARKLVARTWATLTSGTPYELRDVDGTVITRREATARASAITVPASVRSRARAHSAATHRGRLTR

SEQ ID NO: 264427 - protein, 428 aa, unidentified
MSEKDHSRIQEFRQIRKEIRGSSDYLIVGIDVAKDKHHAFWGTATGKTLLRRLIFENNMNGFEKLLDYTETIKTEYAMEKVVFGLEPTANYHKPLAEYLIKSGYNVVLVSGVAVVRNRELLDGRWDKHDDKDSANVADLISQGKCLYYDHASNALRDLRDLLSLKRRLKKQEHGTTVRIRNNLLAQYFPEFDKYFGKGCSESLAVVKWCLRPSKIWNMEFDEFVQLVAPRIRTTGQEKRLREIWDLAIESIGCESGEELDFEARFMVEDLRQIKESLKKVDEHIEDVCLRFPEYEHLRSIPGFGPDVSSNVIAAIGDPFRFENGRQVLKLAGFDLNANRSGNTSDKAVPVISKKGNAHLRYALYQAAFIASVKNKHFMVYYTNMLRGREREKGIKIKMRVKLAAKMLIIAWTLMKKKESFNPEYLNID

SEQ ID NO: 264428 - protein, 355 aa, unidentified
MERYIGMDVHAASCTLAIISEKGRKLKDFPIETNGQALVEAIRMIPGHKHLVFEEGLQSAWLYEILNPHVDDIIVAGITTSRGQKSDKSDAYGLAEDLRTGSLDKHVFKAPRQFTRLRELSRSHSTLVSDTVRVQARIKALYRSRGILVSGANVYGVRLRDEWQKQLPSSIQTRATRLYDYLDFLLEQKKQAEADLLREAKKHPIAKLVETAPGFGPIRAARLVPIVVTPHRFRTRRQFWSYCGLGIVTRSSSDWVQTADGKWVRARVPQTRGLSRQHNHFLKSIFKGAATTVITQNKKDPIYARYERLLDGGTKPTLAKLSLARIIAATVLRMWKDEKEYDPGRASPTAKKREG

SEQ ID NO: 264429 - protein, 367 aa, unidentified
MTLINFVAANQKYYAFNLLSVFIMVFWSVQYLLQHLLVQTQLSDQLLQRLILILQLPQTPQFRHARPGKFFLPVNGMDYLLPLRLTVRNVLTRRITMNIVFLGIDLAKNVFQLCGLNQAGKPVYTKRTGRKELLQTLANIPACLIGIEASTGAFYWQREFEKLGHKVKVISPQYVKPFVRGQKNDGNDAQAIAVALMQPTMQFVPPKSPEQQDIQALHRARQRIVNHRTATVCQIRGLLLDRGIPIGSAVSRARRAIPLILEDAENGLSSRMRRTIAELYDLFNDLERRIHFFDKEIETVFRQSEACQRIAKVKGIGPKTATAVAAAIGKGTEFKNGRHFAAWLGLVPRQHSSGDRQVLMNMNEKRR

SEQ ID NO: 264430 - protein, 444 aa, unidentified
MKPLPVLDPKAAAIDVGSEQLHVSIADDTPKVFGTFTADLEALRDWFQAQGVRTVAMEATGVYWLYLYEVLEAAGLEVVVVNGRHVQNVPGRKTDMADCQWLATLHAHGLLRGGFVPPADIRQLQDYQRLRADHIIGAASQVQKMQQALERMNVKLHEVISDLTGVSGLKVVRAILKGERRPGELLALCDEQIQKKKSAAVKESLRGCWKKEQLFALRQALELWEIYQQKIADCDREMEALLQQLAGPQGPEGGSGILGPVQLAPAKAPGKNAPVIERCQELLARLCGGRDATQIPGLSVYLVLQLISEVGTDMTRWQTEKHFTSWLGLAGGRKQSGKRKGSVKAHRNRAGRMFCAAARALAQSVDKALGGFYRRLRGRVGGLAANVALARKLAQLFYRLLRYGMEYVEKGLKAYEVKVLETEARLLRKLAKKQGFMLIPSTLN

SEQ ID NO: 264431 - protein, 354 aa, unidentified
MSEKLNTAVAVMGIDIGKNSFHVIGLDARGAIALRQKWSRGQVETRLANMPPCLIGMEACVGAHHLSRRLKTLGHDARLMPAKYVRPYNRGQKNDFRDGEAIAEAVQRPTMKFVATKTAEQLDLQALHRVRERLVSQRTGIINQIRAFLLERGVAVRQGLRFLRAGLPQILATRTDVLSPRMVHVIEALAGDWRRLDERIEGLSADIETLVQHDPACQRLMTVPGIGPIISSAMVAAIGCGEVFSKGRDFGAWLGLVPKQTSTGDRTILGRISKRGNRYLRVLFVQAAWVVLIRPKSWERYGLKPWIEAAKKRLHRNVLAIALANKLARIAWSVLAHGRNFEVRKIDEAAAQSV

SEQ ID NO: 264432 - protein, 372 aa, unidentified
MNYNTVYVGMDVHKDSFTLCAYTVDADKGSYHRKTPADYREVLKYLDFLRTVYGNDVGFVCGYEAGCLGYCLYHQLTDRNVNCVILAPTTMLEQRSKKRIKTDKRDADIIGRCLAQHNYSPVHVPTAGDEETKEFLRMRSDHKLALKKIKQQILAFCLRHNYRYEGKSNWTDRHMKWLRSLKPAALYKEILDEYLMTYTVLSEKIERLDTRIEELAREDKYSESVKKLCCFIGVKTHIALSVLVEVGDFNRFATAEKFASYIGLVPGEDSSGDDQVKLGITKAGNRHLRILLTEAAQCYGRSQVGYKSKDLRTRQAGNPPQVIAYADKANDRLKRRFYKMVLGKNKKHNVAKVAIARELACFMWGMMTDNIA

SEQ ID NO: 264433 - protein, 339 aa, unidentified
MENNNNPYYKHYLSIDWSQQDVSIARMRAGSNQPETKMFPSDIKKIKEYLKGLQGKKILTIEETTGSHWLYVELLESVDKILICDPYRNSLLKEGAKNDKIDARKLCLLLRSGLLKEVYHTSNEDYKIRKLASAYIALVKSGVRIKNQNSALYRGEGLKYKKDKIKKGEEILSFVEGQQKRAIKLYEEEKKKYEEVFKELKKKNEVIKMLCQVSGIKETSGVKIYSVVIEARRFENKYKYWAMCGLVKHDRESGGKNYGKKNPRYSRILKNVYKSAALAAIGGNNDIREYYEVLLQKGYPIAEAKNQIARYIAKVTYAVMKNKKPYKAYQWRELNKQKS

SEQ ID NO: 264434 - protein, 359 aa, unidentified
MRQKRSDGIEGGASGVQLGCVREIAAAADEEAVDILGIDVGKEYLDCELLGEKRATKRVNNTIRGFEQLAGWLRNRKVRKVHACMEATGGWSEELAFYLQEGGHDVSIINPMQIRAFGQSELSRTKTDKADAALIARFGQAMRPPAWDPPTAPERRLRQLIRRRRSLVEMRTQELNRLEAPGNENVEKSIRDMIATLDGQVAELDADIKKTIDDDDDLRGKRDLIESIDGIGPTTSATILAETPHIDKFESAKALAAFAGVCPQLRQSGKSVARSRTTKIGNREIRKVLYMAALAALRSNAVIKAFADRLRERGKCNMEIIVATMRKLLVLVFGVLKTRRPFDPAWGLTSNTESRLRSG

SEQ ID NO: 264435 - protein, 317 aa, unidentified
MLCAGIDVSKPHLDLALVSTTAKPTRLRFPNTPEGRQALLAALAHHRPTWVAPEPTGAYHLPLLQLLAEKGLQVALVNPYHLAAFRRATGERHKTDRQDALLLARYAQVCGESLRAYTLPPKALQELKALVGYREDLAQRERAILNQREAARWAGSEEILVLLQRELACLEGLLGEVEARIQALLATLPEAEVLMGLPGVGPQVAAAVLALLPPHLWGRAKAAAAYAGLIPEREESGKSVERSWLSRKGPPLLRRKLFMGALVAVRHDPEMRAFYHRLLSRGKRKKQALVAVAHKLLRRMMGRLREYYAGQSLQGVA

SEQ ID NO: 264436 - protein, 385 aa, unidentified
MQTPNDLNQSPIVLKQDSTLIAVIEMSLSSWLVAGMVPSVERQPLKKLAIDENALLKLLHRWREEAEKAGRKIERIAVAFEAGRDGFWLARWLRARGIEAHVIHASSVAVSREHRRAKTDRLDTELLKRAFLGWLRGERDHCKMVAIPTIEDEDAKRPNREREGLVGEQTRIINRMKAALSRLGIRGFNPKMKKAAQRLEDLRTPEDEPIPPNTLAELRRDMERRRLISEQIRQIENARLERIEHAPRHGPHAMVRVLARVIGVGIETADMLVQEVLSRNMRDRRAVARYAGLTGSPDESGTRRREKGLARSGNARVRRGMIQLAWRFLMFQKDSALARWFRARTENARGARKTMIVALARKLLIALWRLVREGVVPDGVVLRPV

SEQ ID NO: 264437 - protein, 449 aa, unidentified
MPKKTLEMEVINPKAAGIDVGSRSHFVAIGQSDQEVKEFGVCQEDLEDLVEYLKSHDIETVALESTGTYWQNVYALLIASGFDVILCNGKFTKNIQGKKTDVKDCQWIQKLHTLGLLNTSFLPSEDTEILRTYCRHRMTLIERAASCSNKMQKYLKLLNLRLDVVVSDVCGKTGMEIIRAICQGENNAQVLASYRDPRCKASEVEIAKALKGNNRSDYLFGLSQELDIYDTLQSQIRACDQKIIGQITRTIDKNDGKKEHVLEKKTRKKVNKNAIKGIDMDKASYQMFEGVDLLEIEGVSHATVLTLMSELGIEGIQKFNSAKQFSSWLRLSPNNKISGGKVLSSRIPKGSNRTKIALRNAANSIGNLKKDTPLKLFFAKISFRKGRAAAISATARKLAVIIWNMVTKSTPYQKDLGIVDIKKQQEKLIKRIRKQMKNYNIRPIDLKPL

SEQ ID NO: 264438 - protein, 357 aa, unidentified
MSQQSNNCAIAVIGIDIGKNSFHVVGHDQRGVIVLRQKWSRGQVEARLANLPPCLIGMEACVGAHHLSRKLQLLGHNARLMPAKYVRPYSKGQKNDFRDAEAIAEAVQRPTMKFVATKTADQLDLQALHRVRERLVSQRTGIINQIRAFLLERGVAVRQGPRFLRLELPGIVATRTDVLSPRMSRVIEELAGDWRHLDVRIEGLSSEIETLAHQDQHCERLMTVPGIGPIISSAMVAAIGTGDVFPKGRDFGAWLGLVPKQISTGDRTILGSISRRGNRYLRALFVQAAWVVLVKLGPKQWERYGLKSWIEAAKKRLHHNVLAIALANKLARIAWAVLNKGRTFTCVKTDAIASRPA

SEQ ID NO: 264439 - protein, 357 aa, unidentified
MQPQIKELDFTGQNIYAGIDVHKNSWNVSIYSDDLYHKTISQPPRPEALYGYLSKHFPKGTYYSAYEAGFCGFWIHNQLQSLGINSLVVNPADIPTTDKEKKHKTDKVDSNKLAKHLRNGDLDPIYIHNVNILEDRNLLRTRRTVVKELTRYKNRIKSDLYFFGIEIPENFSNKSYWSKRFLNWLSSVKFRKDSGDAAFGVLLDQIILLRSQLLEINRKIRVLSRTEKYHKRVTLLLSIPGVGKITAMTFLTEVEDINRFANLEKLRSYVGLTPRSHSSGDKAIHGEMINRGNRFIKSSIIESAWVAARRDPALHLAYIRYRKRMDKNKAIVRIACKLLDRINFVLKNEKPYISGTE

SEQ ID NO: 264440 - protein, 355 aa, unidentified
MSQEKYIGMDVHQATISVAVMDVHGKQLMECLLETKADTILEFIQGLRGTLALTFEEGTSATWLHDLLKPHVSRLVVCDPRKNALLKDGNKNDRVDARKLAELLRTNQVKPVYHEKHGTRALKEVGRSYLTVTKDVTRVMNRIKSVYRSWAIPCAGTSVYTRCHRAEWLAKLVEPGVRTRAERLYQQLDSLQPLRQAARRELLLESRKHAAVKLLRQIPAIGPIRSALLVALLQTPHRFRTKRQLWAYSGFAVEVHDSGEYRWVRGKLHRNRERITVRGLNDNHNKDVKNLFKGAAISASTRPGPLHDFYVARVESGMRPTMARLTLARKIAAITLTMWKKGVSFDPKQLQRQAA

SEQ ID NO: 264441 - protein, 362 aa, unidentified
MFVAGIDAHTRYVVVTIVNRSGELIVKPTRVRVEQSERLLTLLAPYRPLQAVMETSSSWPWLHEVLSGAGIDFVLAHARRLRAIAEANYKRDEIDAELLARMQLAGCIPPVYPTPFAQREWATLIRHRTALVMQRTAVVNRLHAQLHQRGLHLERGRLLTRAGRQWLKREAWPALSLEQRAVVRSHLRIIRGLGPLIRALDRRIAEVAASIPEAQLLRTIPGIGAHRALIVCAEALPIGRFRTPGHLASDAGLVPTSRQTGLRPVHHGPIPGGANRWLRGALVRAVVSHVQHAPDSWLTHYYLTQKPRLGWPVARVATARKLTRAIHAMLRTTTPWTNEGPTTGSTIRPGVSSHERMPQCTH

SEQ ID NO: 264442 - protein, 388 aa, unidentified
MTQAPGVLPTPTVLDYERTLILAIELSNTSWVLAAQIPGLPGVKAKRSIEPTPEALMAAIEDYRTRAVKAGRNVEQVVAIYEAGWSGFWLARWLAQYGIETHVIQPSSVPVDRRARRAKSDGIDAELLLRTLLAWLRGEPRVCSMVPIPAEADEDARRRVRERAELVAERVGLVNRIGAVLATLGVGEYNPLRRDRRQRLDELRTALGGSLPTHTRAKIVRMLDRLELLLIQITELEKSRDAVLEDENPDKAASMIQQLAKLRGVGVQSATVLVREGFVREFANGKALGSYAGLTSTPYSSGGTEREQGIGKAGNVRLRTLMVELAWLWQRYQPDSAQVSWFRERVSGTGRRMRKVMVVALARKLLIALWRFATQGVVPEGAVMKPAT

SEQ ID NO: 264443 - protein, 384 aa, unidentified
MRRQSRIREEPVVQSDSITWVGLDAHKNSIKVAALFPGRPEPEEWQEQTTAEAIRRLGRKLRRQAPGEVRCCYEAGPTGYALQRQLSAGGVICTVIAPSLTPVQLGVRIKTDRRDARKLAELLRAGLLTEVHPPSESDEALRDLCRCRDDVRVDLMRARHRLGKFLLRRHCIYRETKHHWGTRHWAWLEQLRFDDPMSQATFDSYMLAVQQLEERLQQLDVQLEEFGGQEPYREPVSWLRCFKGIDTVTAVCLVAELHDFRRFRTARELMSYVGLVPSERSSGERERRGGITKTGNRHVRRLLVEAAWHHRHRPALSAPLRRRREGQPARVLAIADRAQERLAARYRRMTGRGVAPPKTIVAMARELTGYLWAVLQPAADVPRS

SEQ ID NO: 264444 - protein, 320 aa, unidentified
MSKKKSKSFIGIDVSKQQLEVAAHESDYQFRCANKISCFGQLIAELIDLRPALIVLEATGGLEIAVVNALHAVALPVVVVNPRQVRDFAKALGQLAKTDRLDARVLAHFAAAIKPPLRPIKTKDEQELDALNGRRGQLVEMLSDEKNRRRSATSDRVRDKIKEHIDWLEDCIAEIDQQLKALLKTSAGWQAKDKILQSVPGIGPVTSFSMVADLPELGKLDRQKISKLVGVAPLNRDSGQQRGSRHIYGGRAQLRRVLYMAALTAARINPVIKEFYQRLRANHKPFKVAITACMRKLLSIINVMVRDSTPWKSLEVAVSA

SEQ ID NO: 264445 - protein, 370 aa, unidentified
MGNRNMFVGLDVHKETIDVSIAEGQRDGEVRHYGVIPSDLEPLDKVVRALRAPDRRLHFVYEAGPCGFGIYRHLTKRGEACVVVSPSMIPRRSGDRVKTDRRDSQMLARLHRAGELRAIYVPDATDEAMRDLVRARADAVVVGTQAKYRLKAFLLRQGRRYPGREGWTLPYRRWLADLSFPNAAQHIALQEYRDTIDETETRIDRLTEQVRQLAPTWRWAPVVAALQALRGVSFVTAVALVAELGDLTRFGHPRELMAYLGLVPSEYSSGPSVRRGGITKAGNPQVRRLLAEAAWAYQGIPRIGRQHAYRQEGLPKVVCDIAWKAQLRLTARFKRLVARGKAKPKVATAIARELAGFIWAIAREVSPTPQ

SEQ ID NO: 264446 - protein, 322 aa, unidentified
MHPFQLGIDVAKAKLDCALRLTSGKFRHKVVDNTPAGFKALDSWLAKECATTLHVCMEATGTYWEAIAEHLAERPATTVSVINPAQIKAFGASQMVRTKTDKADAKLIAQFCAERTPEPWQAPTPAEKTLRALVLRLDALQTMHTQESNRLEVARESVAEGIAKHLTWLDDEIARLSKAIRNHIDNDPTLKDKHRLLDSIPGLGERTTAVLLAFLAEPARFGNARQVAAFAGLDPRQHESGSSVRGKPRLSKVGHSFLRKALYMPAMVALYRTDWGKLFRERLAARGKPPMLIIGAMMRKLVQVSYGVLKSGQTFQPELHGA

SEQ ID NO: 264447 - protein, 410 aa, unidentified
MENILARCAGLDVHKESVEAGVRRIEANGRVHSETRHWGTMTRDLLEMADWLAAEEVMNVAMESTGVYWKPIFNILESRFTVLLVNARHLKQVPGRKSDVRDCQWIAQLLQCGLLKGSFIPPRAQRELRDLTRHRTQLVEGKTRTINRIQKVLEDANIKLASVATDVMGVSGRAMIQRLIEGETNPCKLADLAQRQLRGKIPELEKALEGKLTDHHRFLLMMLWKELAQQEELLAELDAKIEEHTRPFAAEIVRLDAIPGVDHRVAEVLLAEVGADVKPFPSDEHLSSWAGMCLGNEESAGKRRRRRITPGNRWLKKTLAQAGWAASHTKNTYLASQYRRLAGHRGNKRALIAVGHSILVIFYHMIRTRSGYADLGVDFFDRREPERLTRYYVKRLERLGHKVTLATSVA

SEQ ID NO: 264448 - protein, 316 aa, unidentified
MLIGIDVAKAELVIAARPSGERWTVANDERGVKTLVDRFTKDRPELIVLEATGGYELLVVAALAAAGLPVVVVNPRQVRDFARATGQLAKTDGIDADVLALFAERVRPEVRPIADEAAQELEALLARRRQLLEMLQAEKNRAGQVFGRGKRLVKKSLKAHITYLERELRIADTDLGTMVRESPAWRERDDLVQSVPGVGRVVSLTLLADLPELGRLSRREIAKLVGVAPLSRDSGTFRGRRFVQGGRATVRAVLYMAALVATRRNAVIKAFYQRLVEAGKPKKLALVACMRKLLTMLNTIVRTNTPWHEPGRATSA

SEQ ID NO: 264449 - protein, 353 aa, unidentified
MEQFIGCDAHKKFSLFIAMNQEGGYGKPMRVSHDREEMRAFLKALPPASKIALETSGSYYWLVEEMERAGHQAQLAHALTAKRRMEGRHKTDERDARGLAMLLRNGTLPRVWIPPAELRDQREMLRWRMSVVESRSQVKNRIHGVLLRYNVAAQAADLFGQAGREELEQLLGQLPEWSRQSVQEQLETIDHLDQQIEECEQKLETLLEASAERDLLKTLPGVGQILSAVIALEIGDIGRFATAQNLASYAGLVPAARESAGKKRPGKCPADCNTYLKWAFIEAGNVVSRFQEKWRDRHVAQLYRRVKHNSRMHGKATVAVARHLAEASFWMLTQQQIYREPNGKRNVLSSTHG

SEQ ID NO: 264450 - protein, 271 aa, unidentified
MRIIGCDLHARQQTLAMLETTSGERVNLILMHEGNKVREFYSQLPHPVLVGIEATGSMHWFLNLMAELGIECRVGHPAQIRAAEPRKQKHDRRDADLILKLLTEDRFPAIWLPSQELLDLRALLLHRHQWVRLRTRVQNALQAIALANGLRRGPSLWSYDGQAKIALLPLLSHTAYRRSALQAMYQTMEAEIEKLTQQVAEQAENRSRARLLMTHPGVGPVPALATEVFLGDPLRFADGKALASYVGIIPREYSSGERQRLGRVTKQGNPL

SEQ ID NO: 264451 - protein, 368 aa, unidentified
MKQALFAGIDLHSNNVMIGIVDQSGRRLKHQKLGCDLKEITSFLEPWKPQLKSVAVESTYNWYWLVDGLRALSYPTKLADPAQIEQYSGIKHADDKNDAFFLADLQRLNILPTGYIYDPALRPVRDLLRRRLGLVHQRSALLLSFKSLYARTTGQAMSLSRLKAMEPNDTKTLYRHPANCLIALLQKEHIDKLCQSIELIEKSVLAQARELPCYQKLLSLPGVGRVLGLTITMEVGEISRFKTPGQFASYCRTVNSQRLSNNKKKGDNNRKCGNKYLAWAFVEAANFAKQHHQHCRRWFDRKAARTSKVIATKALACKLAKAAWYLMSQGSDYAPERMCPEGAMKEEKLKFVRAAASQKIGVGKNPFD

SEQ ID NO: 264452 - protein, 345 aa, unidentified
MEHYAGIDVSLESASICVVDASGRIVREAKLASEPEVLISWFGTLGIAVARIGLEAGPLSQWLYAGMRDVGLPVELLETRHVRAAFKAMPVKTDRKDARGIAQLMRLGWFRPVHCKSLPAQEVRALLTARKLLQTKNHDVEMSLRGVLRGFGLKVGPTTPRTFASRIRELVAGHATLSTIAEALLAARGTLFEQWQKLEKRLRSLAREDHRVQLLMTAPGIGPIVGLTYASAVDDPGRFRSSKAVGAHFGLTPKKYQSGETDVTGRISKIGDGGVRTALYEAANVILTRPVKGSTLKSWGMRLAARAGMRKAKVALARKLAVVLHRMLANGTTFLADKAAPAAPH

SEQ ID NO: 264453 - protein, 407 aa, unidentified
MELPAIFQCVVGLDVHQAKISACAMIEQPDGTLTVEHREFGAFKRDRRALAEWVRTLGPDLVVMESTGIYWKSPYAALEQVGIAAWVVNARHVKNVPGRKTDVADAQWLATLARAGLLRASFVPPADIRHLRLIARQRQKLSGMLASEKNRLHKLLADAGIRLNVLVSDIHGQAGRAMVKALIEGQPLPEILDLAGRLRASREELFEALQPEQLSDAHRFVLSEIMAHIEELEARMGRFEQTLLAGLAAWEPQLVLLQTLPGVDRIGAAMLLVEIGTDMASFASAEKLASWVGICPGNNESAGKRKSGKIRKGNAWVRRLLCEFAQAASRSRCGLKEKFKALSIRKGHKKAIVALAHKMLRIIFAMLKNHTPYQDQAVDYEALLVQRNAPRWIKMLAKHGFISPAST

SEQ ID NO: 264454 - protein, 380 aa, unidentified
MTSMHDSVRFKTTVYAAIELSKKSWVVGIAHPDRDRPSIHRIAGGNLADLIGRLRKTAGEKRRIVVCYEAGYDGFWLARSLAKIGIDCRVLDPASIQVNRRARRVKTDRIDSLALLRALIAIDRGERHVCAVVRVPTVEEEDARRSHRERQRLVRERTGHINRIKGLLFAQGIRGIEPKRRRTRIDFSKLTTAEGRPLAERLRRELEREYQRLELVQSQLRIVEKERDIADAQDPAVERKRELLCALQGVGGASAAILAREVFARPFASRRQLGSYLGLTPSAHDSGSTTRCQGISKAGNSWARRVLIEVAWLWRKYQPGSPLSHWYARKTADQSPRIRRIMLIALARKLAISLWRYVETGLVPDGAVMAKTTPHMAPAM

SEQ ID NO: 264455 - protein, 418 aa, unidentified
MKKNSNSPRKKEQGAKRAAKAQRPVQRETKEVLAELVQKLRGKLELKATSANQGEASPRPELSSNLDRLTVGVDLGDQWSHYCILGLQGERLSEGQLQTRRAEVAEFFQVLTPARVVIEVGTHSAWIQEIIAGCGHEVLVANPRLMEGSKRRKRKNDRIDANKLARLGRVDPQSLHPITHRSREVRQDLVLLRAREALVAARTELINTTRGLVKSMGARLPQCSSRSFGHKVGDAIPAEVREALLPLVQLADGLSHCIKEYDVKIEAMASQKYGHTNLLRQVKGVGPITALAYVLTLENPERFAKSRDVGPYLGLVPKQEDSGESQPQLGISKTGDRMLRRLLVGSAQYILGPFGPDTDLRRYGLRLCERGGKNAKKRAAVGVARKLAVLLHRLWVSGEVYEPLGYASSTAIVQQAGA

SEQ ID NO: 264456 - protein, 393 aa, unidentified
MFFVGIDVAKRGHEVAVIDQTGNLVIKPFKFPNTTQGFTKLTDTLAAVSESLADIEIGMEATGHYWLNLYCKLIEAGAVVHVVNPVQSDALRGLNIRKVKNDSKDAILLAELIRFGRYSETTLSDPDLISLRELTRQRFYLVDCISDAKRKIISLVDKVFPEYELLFSDMFGATSLAILEQYPTPDLLCEVSTTKLANFLKSASHGRHGRSKAEEIKSLAAVSFGAPVFATGSAFALKQFLEQIELLERQVSDIDDYIAELLPKFNQTLTTVKGIGPTLAAVLVAEIGDINRFQSSDNLAAFAGVDPSVNQSGEFNGTKARMSKRGSPYLRRALFLAATAGVLHNSALKALYDRKRSQGKHHLVAISAVMRKLVNIVYSILKSGQPYVMVMPD

SEQ ID NO: 264457 - protein, 351 aa, unidentified
MPRTSTVHAVTTIGIDMGKNTLHMVGLDSRGAIVLREKVSRGGILLRLANLPPCLIGIEAGMATHYVARELAALGHDVKQVPPTYAKPFRQGHKNDFRDAHAVAEAVQRPTTRFVPAKTDEQLDLQALHRVRSRLVSERTAVINQIRGFLLERGIIVRQGLRFLRQMLPDILAKRTDVLSPRMVRIVADLASDWRQLDERIELVTDEIETLAKSDDSCRRVMTVPGIGPIISSAMVAAIGSGAAFAKGRDFSAWIGLVPKQLSTGDRTILGRITKRGNGYLRTLFMQAARVILLRPASWPKHGFGIWLGRAAQRLHPNVLAAALANKLARIAWTVLAQERSYEARVTKIAA

SEQ ID NO: 264458 - protein, 370 aa, unidentified
MKDYSEVFVAFDVAKLKNAVAIAQDGRDGEVRYLGEIRSTEAATRKLVAKLATKHAKLTFCYEAGPTGYGLYRLIKSLGHDCIVVAPSLTPSKPGDRVKTNRRDAVGMARLLRAGELTAVWVPDERHEAMRELARARAVAQKDLRSKRQQISGCLLRMGYHYPGKKTWGRAHLNWLTSFKLDHLEQRIAFEELMGAMRQAKERSERLEQAIREVIPDWSLAQQVVALQAMRGIDLITAVGVLAEIGDLSRFESPRQLMAYLGLIPSERSTGDRVRRGSITKAGNTRARRLLIESAWSYRYPARVSKDKQAKVEAAPRAVREIAWKAQTRLCGRFRSLTRNGKKSTIVATAIARELSAFIWAINREVAATQ

SEQ ID NO: 264459 - protein, 406 aa, unidentified
MERVPIHKRVIGLDVHQAQITACAILEEADGETRIEQRQFGAFKKDRRALAAWAAALDPDEVVMESTGIYWKSPYAALEAMGIRATVVNARHVKQVPGRKTDVGDAQWLATLARAGLLRGSFVPPAKLRELRVISRQRQKLVSLLTAEKNRMHKVLTDAGIRLSVVVSDIHGQSARAMIKGILDGQAPHEVLNLASRRLKASREELHDALQGELTASHGFVLDELLRHIEELEARIARFDARLLGELASEKNALALLQTLPGVDVIGAAMLLVEIGSDMSVFGTPDRLASWVGLCPGNNESAGKRKSGHIRKGNPYVRRLLCEFAQAARRTKSAFQSKFQSLIVRRGYQRAIVALAHKMLRTIFFMLKRGEYYRDSATHYEQLSAQRNASRWIKALTRFGFIPAAA

SEQ ID NO: 264460 - protein, 370 aa, unidentified
MKKPATLFVGLDVHKESISVAHVPDDRRAEVTYVGRIGTRPADIDRLVRRLQEKADRLVVAYEAGPCGYVLYRHLSRRRITCLVVAPSLIPKKPGDRVKTDRRDAIQLARLLRSGDLHSVYVPSVEDEALRDLCRAREAAVVTLKAAKFRLKSFLLRLGLHYTGRADWNDAHLRYLAKVVCPTPAQQIVFQESLRAVGEQVERLKRIETELADLVPAWRLAPVVRALQALRGVQDTVAITMVAEIGDLTRFDNPRQLAGFLGLVPSEDSTGESRRQGPITKSGNGHARRVLVEGAWAYQYPAKVSPHIRKRLEGLPQPIQDIAWKAQVRLCKRFRRLVARGKHPNVVVTAIARELAAFMWAIAKEVPVTA

SEQ ID NO: 264461 - protein, 380 aa, unidentified
MKAGSPGVVYYVGDRQLNELTRRGTAQDQDTERRPVMKILALDLGNFKSVACDYEVETTKYEFAGVVSSKEAVRALVQERRPDRVVIEICPLAGWVCDVVRELGIAIEVASTSEKNWRNAKRKSDRRDALKLAHKSALGDLKFVHVPAPQVRQWRALINYRQQLVRRRTKIKNHLRALLVRENLGWPRGKRGWTEESLLKMEEWALPLAEVNAEELWRGELGVELEALKATALQLRQVEKRLDLIGKANEQVQALQSIPGVGPRLSEALVAQLDDPGRLKNGKEVGPYIGLVPKQWQSGETDRLGHITRQGSGVLRSLLVEASWAGLRYNPWLREIYERVKRGSKARRKIAIIAVARRLLICCWAMLRDGTRWCPLQRSA

SEQ ID NO: 264462 - protein, 327 aa, unidentified
MDKPSYIGIDIGKFKNSCSAPGKRPRMFENNEKGTALMLHHCTQIAPANELFFVMEASGEYSNTCALTLLGLADTRVAITPPACVLGFIKSKIKRIKNDNADAVAIREFAEVAHPSEWLPPTKGQQRLRDLQLVLAGVIKTIARKKCQLEKLESAKEYDRFAWDSLLRSMQNELLEKKLLEKEIEAVIAADETLSQDSANMLSVPGVGAGVRNVLMTRCYRQLKELSQRKLLSYTGICPQENQSGKSRGHTRMNKAGDPRIRKIMYMGAMSAIKPGKILHGYFHKLKKKGKSGKSAMVSVMRKLLYLIQAVVKSNTPFNLETYLKSA

SEQ ID NO: 264463 - protein, 341 aa, unidentified
MNEVTMIGIDLAKSVFQAHGATAAGEPVFRKKLSRGQFLKFLSEQPRCVVAMEACASSHYWGREIMKLGHDVRLIPPIYVKPFVKRQKNDANDAEAIAEAAVRPTMRFVPVKSAEQQSRSMVFKTRDLFVRQRNSIINALRGHLMEYGIIAPPGRNFVKKLAEQIESSDCDLPAIVIELSRVHLDQLGVITDKVVAIERRLKEESKSDPETIRLQTTPGIGPVSAMAIKAFSPPLESFKRGRDYAAWLGLVPVQKSTGGRQILGKTSKMGQRDIRRLLIIGAMTRIRWAIKNGPPKGSWLEQMLDRKPRMLVAIALANKTARTIWAMMTKHEDYRDPIAAV

SEQ ID NO: 264464 - protein, 411 aa, unidentified
MQVVHARCCGLDVHQKTVVACILRTETDGTVYREVHSFGTMTADLLALNDWLNARRVQQVAMESTGVYWRPVFNLLEADHEIILVNAQHMKAVPGHKTDVKDAEWLADLLRHGLLRASFIPPAPIRALRELTRYRQTLTAERTQEVNRLHKLLESANLKLGAVATDILGKSGRDMLDAILTGEQRPETLADLARGRLRAKLPQLRQALEGRVQVQHRVLIRHVLAHIDFLEGQLAQLASDIEELLAPCAEAVALLKTIPCVGHTAAVAIVAEIGTDMSRFPSAKHLASWAGVCPGNRQSAGRRLGGKTTYGDTWLRAVLGEVAWSLAHTSSSYLAAQYHRLARRCGKHKAIVAVCHSLLVVIYHMLRDHRPYQDLGPDYFERLDATRLQRHYVRRLEQLGYDVTLAPTQVA

SEQ ID NO: 264465 - protein, 331 aa, unidentified
MYYYTGIDVSKQSLKVFDGIKEYEVPNERGLKTFKKLIKKNYGKEWNEAELIYESTGSYSNYLREFASKNKLRVYEMNPKKSANFAKALGNRSKTDSIDAKMLYRFHLLLKEEDLNIPEIDEATEQLGSYIVSYEIIQKARIMLSNHLYSKEYVQGVDSKLKESIKKEAKHLTQIEETLEKEMKAFAENNSKIREDFSNLLSIKGIGVISAINLLYLFRKYPNANRNEITALAGLDPVKRQSGSSLNGGRKISKAGNSLLRKILYLSCMNSIQHNDRIRVFYEHLITNHKKPKVALIACMRKILLIAHQIYANKSEYKPLYIDDKNICPSS

SEQ ID NO: 264466 - protein, 416 aa, unidentified
MNQLNYDFYVGIDLGQWLHMASVLDAKGEFLGELGFPHSREGLSGTVEWLLEMTTQDTKRIAVAIEKPHGAVVELFLDNAIAIFSINPKQVDRFRDRHSMSGAKDDRRDAFVLADALRTDGHRFQRLKLPPPEIIAMRGLLSSRDQLIKNHVALSSQVRELLTRCWPHLVSLAPKDKALDSFFCELLQLFLDAEGPADLAPTIFQQLVKKHHIRRVQPEQILDILYQTPLRVAPATTEATSAHLKPILQQLLLVRQHRRDSDQLLEKWFEQQRTTNEPYTDAAILASFPGVGAFVLASVLSYAHDPVRLRNLEAFRSLGGIAPVTKQSGKRRQVLLRRARSQPLNNALHHWARIAVLRDPHSKQHYDRLRSRGHSYARALRGVMDRILSVAMAMLRDRTLYDPSQRSQKRPNGDDS

SEQ ID NO: 264467 - protein, 490 aa, unidentified
MQRRLVGIDLGIASAHTVRVLDGAGREVCRRRTGPTVAELSRIEDAALHDAEPGTRLEVVLEPTGPAWLPVAVFFCGRGHVVFRVSSAKASDLRRFLSRHAKSNGIDADTLARLPLIDPDGLRPLQLPGPQTAALDRRVRATDRLTRAAAEHKVRIKDLVRQLLPATPLTGDLGRADLAVLERWADPRALLAAGLSQLTAVIVTASNGHQGTDRATAWRGAAAAAVELYSSYPAMPFTDLAAEVASEVRLLRAVTAELAEHAAHREDAYRWADPGQLARSLPGLAAVGAPALVAVVGDAARFPSARHFTSFTGLAPRASETGDTDRKGQPMSKAGPALLRTTLVRAADNARRQDPQLARIYYTQIVERGANHTKALCVVAAALAHRAWTVLRRGMPYVVCDTDGNPIDPALAKQIIAERWTVPAEIRARRRSSKHPTARPKTGKAPQQVPTGQDRSDTRRRRQTRRPSPPVILTRSTTTTQEDRLTADPP

SEQ ID NO: 264468 - protein, 443 aa, unidentified
MAELVNGKAPEPDFAAFVGIDWADQKHYWKLVVAGTQASETGELKQTPEELSIWAAALHHRFSGQPVAVALEQSSGALVYQLSQYPHLWLYPVHPATAAHYRQAFYPSGSKSDPADAGLLLELVMHHRDRLRRLAPDTPETRLLRMLVEQRRQVVDEKTRWNNRLKAALKMYFPQVLDWVDVDTIMGCDLLERWPTLQQLQRAHPGTLRKFFREHNCRSESLITERIAAICQAMPAVQDAALLEGEAAIAATCIAQIRTLLASIAKLDDHIEPLSSQHPEASLFAELPGAGAALKPRLMVAFGTQRDRYANAGELQAYSGIAPITESSGHSRWVHVRWACPTFLRQTFHEFATCSISRSEWARVFYDTKIAAGKSHHAAVRALAYKWIRVLFRCWKDGRPYDERTYLQTLAERNSPLNWGAGASTKPVWKTVGGFKKLSTENS

SEQ ID NO: 264469 - protein, 410 aa, unidentified
MSHTIAGIDVHKKLLVAVIANSAQPDVVLQSGRFGAGSAELNHLAAWLEQHGVVEVVMESTAQYWKPVWMALEPHLRLHLAQAQSNKASQGRKSDTADAKRLVRRFAAGELMLSFIPEPEQRVWRSVTRGRLQLIRERVQLQNQIESLLEEGRIQLSSVISDLPGASGRRILRAMAKGETNPESLAVLGDKTLRCTLPVLVDALTGSMGDVHRRLLGQQLDRIELIDKQIQELDQLAAELMGKYQNTITRLVAIPGIGAEAAQEILSEIGPEAAAFPSSEQLASWIGVCPGSQESAGENHSGRCAKGNRFLRRVLCQAAQAAARTKDSHLQSIFQRLVVRLGYVKAIWAVAHRICKIVWNILRKGASFIEFSETRSPKAIRRAITHHLKALRRLGYQIPPLPAIAVEAQR

SEQ ID NO: 264470 - protein, 387 aa, unidentified
MEVRMVNTPSADSNNEPVACYVAIELSKSGWLVGFLTPLSDKTSRYQVKAGDAQALLDLIERVHTRVARQLNRPVEVMSCYEAGYDGFWLHRVLEAHGIHNHVLDPASLQVNRRARRAKTDRIDVDRMLRALIRYLRGEPEACSVVQVPRVEEEDAKRLHRERKRLVAERVQHVNRIKGLCAAQGIYNYAPLRPDRWSQLDKLRTGDGRSLPARLKSEIVRELKRLELVLEMIETVEVERDAIIKDPRSRHLNADKIKMLARLRAIGPEFATSLTGEVFYRKFANRRKLGRYVGLDGSPFRSGSVERDQGISKAGNPVARSMMVELAWTWLRYQPDSALSIWFRERVGNLKGRPRRIAIVAMARKLLVALWRYLETGVIPTGAVLKA

SEQ ID NO: 264471 - protein, 304 aa, unidentified
MIRQRTSVGLDVHARSVFGCGFDRETGEVFERRLTPDHREIGGWIRSLPAPVSVVYEAGPTGFGLARSLTAAGIDCVVAAPAKLVRPSGDRVKTDARDARHLARLLHLGEVVAVTVPSPSQEAARDLVRARDDCRGDLMAARNRLSHLLLRHGKVYYGGPAWTGKHELWLRAQRFDDRGLQWVYDAEFDAVLAATDRRDRLDAAIAEMAADSEFSPVITRLGCLRGVSTLTAFGLAVEIGDWHRLSGRSIGAYLGLVPTEYSTGTTRCQGGITRTGNSHARRLLIEAAWQHRKPYRPGPALRRR

SEQ ID NO: 264472 - protein, 438 aa, unidentified
MRAKCNDDLSTVNFSTIGLDIHKNRLVGCAVHVHHDAKGREVHEKEYFESTGTYSGRQRLVEWCASQNADLILMESTGIFWKAPFRDLEKADLHPVLINPRLFNRGSDKRKTDKSDATWLANLARLGLYRASFIPAEPYRSLRLVQSQIKSLVAERQRLKNRLVKVLDDSGFRFTVAFADIDGASSQSIIAGILEDAPPEELALMIDPLCKKSIEEILDAVSGKLSQINKDIVQSILRLIEAHTKEIETLEKTVIRELKKCQKVNQNIRLMTTIPGVSDKSAQLLMSMIGPDFVEDFSSPHSFARWLGVCPGNNESAGKIKSGRTPHGQRLIKKVLTECAQAACHTKGSHLATLFGGWKHKGFCKAVMAVAHKLALLIHWVVANQKPYIDKEFDYKIAFCKDGQRRPRWIRALGRYGLKTFADVENEKATRGWNIAKA

SEQ ID NO: 264473 - protein, 352 aa, unidentified
MRIVVALDVHRRQITYKTLDRESGEVRRGRIAPATRGAVREWLERFAGREAEFVLEGTTGWRFVVEEIERAGHRAHLADPAETASKRGRKRRAKTDNADCDLQLKLLLAGELPESWIPPAHILELRTRVRTRKLLIDQRTAWQQRLHAQLLHQGVAGLKPRTRAGREALARAELSPAGRELVALALRTMDAIDRELAPLDRALRSFAHRQPACRALIANLYGVGAISATAILAELGDCRRFASSDDAVRHSGLDVTVHQSDNKRSAGHLSHQGPELLRWALFEAAHQSARRGSPDHDYYLQVARRIDHNRACLSVARKLCRRSHHILRELGDAALAPVERERQTDEAIQAAA

SEQ ID NO: 264474 - protein, 316 aa, unidentified
MKKHSTVCAGIDTGKRKLDVALAGGGARLEVANSAESHGKLVAWLRQHQVRRVGIEASGGYEQAVVSRLRRDGFIVVVFQPIQVRAYARFHGRRAKNDKIDAALIADCTADAKKIHAAPDPRLEALAAHQTLIDQIVDQIARCKNYRESSRGLQRQFWDDEIKRLRGLFRQQLKQLVAAIRQHGDLAKRLDLIASVDGIALRTAVAILVRVPEIGRNSREQIASLGGLAPYDNDSSEQTGQRHLEGGRKRLRNNVYNAAFAASFHWNAELAALYRRLIAAGKEHKVALVACARKLLIYANAVVARGTPWVSRAAAH

SEQ ID NO: 264475 - protein, 392 aa, unidentified
MYIVGIDIGKNHHEASIVSPEGKQIGRSLRFATTHKGADSLMSFIFKNIGNSPCVFGMEATGHYWYPIYSFLKAKGYTICVINPIQSDSLRKMYIRQTKNDSIDSFLIAEVIRFGQFGTTSMADENILAMRQLCRYRDSVISSRTEIKLRIGTIMEQIFPEYEKQFSSLWVSTSMGILEKYLTPENIENAPIDELFEIIKDKSHNRLTKAKAISIKEAAADTFGIKIAQDAFSFQLKQLIDRMNFLDKQIEALDIEIMKCYEQFDCYLHTIPGIGMIATATILAEIGDIHRFKSSSALVAFAGIDPTVRQSGEFNSTHNHMSKRGSPYLRHAIFLAATTCSFHNSPLNAYYKKKRDQGKHHLTATRAVARKLTTVICAVLRDSKPYEPKKFC

SEQ ID NO: 264476 - protein, 371 aa, unidentified
MSNVAKYIGLDVHKATIAVAVAEGGPGGEVRFVGTVANDDDEVRKLVKRLATPGATLSFCYEAGPCGYGLQRLLIKLGQPCIVIAPSMMPRRPGDHVKTDRRDAMTLARLLRAGELTAIWVPDEAHEAVRDLIRARRSAQEDATAVKQTVRSFLLRHDRRFEGRSAWTKMYWRWLSEQRFDYPHQQLAFEELQKRVLEAQARVVRLESALGEAVASWHFAPLVRGLQALRGIKLVSAATLVAEVGDLTRFDNPKQLMAYVGLVPSEHSSGARTHRGRITRAGNAQARTTLVEAGWSYRLPAREERRYRERVADLPEEVQAIGWKAQMRLCQRFRRLSATGKPQPKVTTAIARELVGYAWDIARRMAPAMAN

SEQ ID NO: 264477 - protein, 429 aa, unidentified
MIMGFTKPIEHFNLQRKKVITMNTLYVGIDVSSKSNVVYLMLPNGDKHSNFSVANSHEGSTQLVKRILSALASYSLDTVLIGLEATSVYGDNLVYFLREDATLAPFNRKIHVLNPKQVKKFHDAYNDLPKNDYVDSFVIADCLRFGRINKEVYLGDYHYKALQNLTRARFFAVQNLIKEKQRFMNVLFKKYSTMTQEKVFSDTFSTTALAVYNEFESAEALANMDLHELTNFIMEKGKNRFPDPDAVAKAIQKAARSSYRLPKTVNDSVNQVLSISITSMKALESQIKEFDKAIKAQMELLPNVLISIPGIGPVYSAGIVAEIGDINRFNSQAALAKYAGLAWKQHQSGGFEAEVTKLIPSGNRFLKYYLCEAALSLVRCDKEYSDFYHLKYKEVNRCQHKRALALTARKFVRLVFRLLKDNRLYCPAK

SEQ ID NO: 264478 - protein, 310 aa, unidentified
MGESFVGIDVSKGHLDITALPEDRRWRVTNDDAGVSALVAALVPLAPACVVVEATGGYETTMVTTLALAGVPVAVVNPRQVRDFAKGLQRLAKTDAIDAWVLARFGEVTRPAPRPLDDAASLDLSALVHRRRQLVEMLVAEKNRRSVARPAVRRRLELHITWLAREVATADTEIATRIRQSPVWREREQLLRSVPGVGPGTASLLLTGLPELGQASPRQLAALVGVAPFNADSGRWRGQRRIWGGRADVRAGLYMAALAAIRCNPVLKAFYQRLRTIGKPPKVALVAVMHKLLTVLNAIVRRGQPWALPA

SEQ ID NO: 264479 - protein, 354 aa, unidentified
MIIIGCDYHPSFQQIAFVDSETGELQERRLQHREEAEKFYRDLAAQGVKVRVGMEASGHARWFERLLAELQFELWIGDAAEISAKRVRQQKTDRQDAQLILKLMLKDDFPQIWVPSGENRDLRQLLWHRHRMVQARTRMMNQLQAVALNEGLRCKKKLWREAGREQLESFRLAPWASQRRHDLLELLDRMNPTIAKLTQAIDLEVEKCPEARRLQTHPGVGPLTALALVLIIGRADRFQCGQQVACYLGLVPLEKSSGNQRRLGQITKPGNSLLRFLLVEAAQVTARSLPEWRSKYVHLTMRRGRKIAKVARARKLAVRMYWMLRQGWDYGQLTKFGAHAGKPGPGDGVKSNTE

SEQ ID NO: 264480 - protein, 426 aa, unidentified
MSAANQTSQEPIAAFVGIDWADEKHDIALRAAEPEAKVERSKIANQPEALSDWVLALRERFKQGKILICLEQSRGALIHFLMGYDCFELYPINPKQLDNYRKAFRPSGAKDDPTDGELLCKYLSLHHQELRPWRPNDEQTRKLALLCEKRRQAVDARSALSNQLKSELKQYYPLALGVLDNDLTTILAADFLLKWPNFASLKKVSAHKLRRFFYGHQCRSEKKIETRIQLIESAQPLTRDGAIIEAGTLTTQMLARQLQALAPFIRQYDEQIAQLFSQHPDRILFDNLPGAGDALAPRLLSAFGSDRDRFDNVLEPLSFFGVAPVTERSGKTTFVHFRWACPKFLRQTFHEFAGCSVHFCDWAAAFYDQQRARGKDHHAAVRALAYKWIRILFRCWKARQPYDPQRYLTSLAQRGSPLTTAVKNSK

SEQ ID NO: 264481 - protein, 440 aa, unidentified
MNRVIPTSAAVTTRKESKNMNAWNEVTHFAGFDWAKDHHDVLVLDNTGKIAAELRFEHTAAGWSLCQQRLAAFPHLAIAVESGHGAAIERLMVLGYRVYPVHPRSSKSYRTRKLPSGTKTDHIDCWALADALRLEGESWHVLNTPEPLVQRLRLLCRDEVALIEQRTALINQLQQALYEYYPAALAAFDDWTSLSAWAFVARFPTPQALVKAGKRQWEKFLHTQKLYHPEWYQKRLAIFAKADEFCGPEAVTAAKSVLATALVKLLQTLELQLASYRLLITKCFKQHPDYHVFASLPGAGPKLAPRLLAELVALQPLADQPQVLQCLAGMAPVSYQSGKVSVVYLRRQCNRFLRATLHLWVDLSRHYCDWARIYYEAHKKKGQSHACALRCLGMRWLKILAAMIRSHTPYDAALHARSQLQHGSWVLQLQPKLSITKDAS

SEQ ID NO: 264482 - protein, 333 aa, unidentified
MKKKWFIGIDISKKTLDVVIYDPAKKHAEETNYKQVSNNKTGYQALFAWMKQKRISPKQTVICLENTGIYSYDLCLFLESCKQDYSSFTPLDLKRSLGLVRGKNDRVDAERIAYYGYLHRDELTYSKLSGSAVLILRDLSSERKRLVKHLTENKGFITDRKDRESTSTSRRAEEMVKILEKQIQSVEDEMHGIVSSDPTMNLNYQLLNSIKGIGSVNAINTIIHTNNFKAFETARQYACYLGIAPFEHSSGTSVKGKTRVCATGARLLKADLSQAARSAVVWDKELKEYYERKRKEGKEHGVVLNAVKFKLVCRMFAVVRRGTPFVDLITYKE

SEQ ID NO: 264483 - protein, 368 aa, unidentified
MKKVSITATMQSGNCFVRQKLTIGLDLGDRNSWYCVLDEVGKVQLEQRVGTTAKALREVFGAMPRSRIALETGTHSPWISRLLSELGHEVIVANARKVRLIGESRKKDDRLDAQTLARLARIDPHLLCPVKHRGAQAQADLTVIRARAGLVRARTGLVNTVRGLVKSHGERLRGCNVRNMNAEKAEGLSPELQRALEPLLSAIEELSERICEYNERIEALAQESYPQVALLKQIKGVGTLIALTFLLTLEDPHRFGKSRDVGCYLGLQPGRRKSGQSEPQMHISKEGDPYLRTLLVQGAQHILGPFGIDCDLRRWGLKLAERGGSNGKKRAIVATARKLAVLLHHLWVSGEVYEPLHNSSPMTVATAA

SEQ ID NO: 264484 - protein, 319 aa, unidentified
MSTPGVFVGIDVAKATLDVAVRPSGARWTNANEEPGIQALLGQLRALAPTLVVLEATGGYEHAVAATLATAGVPVVIANPRQIRAFARATGHLAKTDAIDAQVLALFAERVRPTPRPLPDDATQALEALLTRRRQLLEMLVAEKNRLGVARASVRRDIGHHIRWLERRLADLDRRLHDAIRTSPLWRAQDDLLQSVPGVGPVLSCTLLAQLPELGKLGRKQIAALVGVAPLARDSGTHRGRRTTWGGRASVRTVLYMATLTATQWNPVLRQCYQRLRAAGKPHKVALTACMRRLLLILNAVVRTQTPWRSTPAIARASV

SEQ ID NO: 264485 - protein, 353 aa, unidentified
MELDKYIGIDAHSSTLVVNARDAFGKVILQSTVATNAEAIVQCIGGLRGRLHVTFEEGTHAQWLYDILRRRVDDVLVCDARESRLLQDGNHADRIDASKMSHLLRLGALKPVYHERQGTAALKELVRSYDGLVEDSIRAMNRIKAIYRSRAIPTPGQSVYRPNQRESFMEQLKEAGALKRVGLLYEELDTLNLLRHQAEKFMVTEARRHPAYGLLRSIPQLGPVRVARLISIVDTPHRFPNKAAFWNYCGFAVVLHSSGEHRFIGDQLVRSPKAVTTRGLNKDHNPAMKEIFKGAAMKARQRGAFTAYYQDLVNRGLKSELATITLARKISAITLAVWKKGERFDPKKLTQRT

SEQ ID NO: 264486 - protein, 429 aa, unidentified
MEEIDDTDLVVERVAALDLGKAGLDACVRVPHTHHPGRRMQELRSYGTTTAQLLELAAWLRHWHVQRVVMESTSTYWKGVYYLLEAEGFDCWLVNAREVKNVPGRAKTDRADAVWLAKVAERGMCGPSLVHPAEIRRLRDLTRYRRALVQDRTRERQRVEKLLEDAQIKISSVLSDLHGVTGRAMMDALINGQRDPHTLARLAKGSARKKTARLEEALRGFFTDHHAMILQMMLANSDRLSSQIAELDGRIEEAVSPFCAQSARLADIPGVDVMAAAELIAEVGVDMTRFPSAAHLVSWAKFCPQTHQSAGKSKSQGRGKGNPWLAGTLGRVVFANSRSETFLGARYRRLARRRGKQKAIVATGNSLLTVVYHLLLNSDARFCDLGPGYYESRINKHRRARDLATQLQALTGQHIVIRDGKAVITDTAA

SEQ ID NO: 264487 - protein, 341 aa, unidentified
MDITTIGLDLAKNVFQVHGINAAGDVIVRRRLRRAQVFAYFASLKPCLIGMEACGTSHFWARELLSLGHDVKVIPPSYVKPYVRRGKNDAADAEAICEAVTRPHMRFVPIKTEDQQAALMLHKVRELLVRQQTMLVNALRGHMAELGMVAPLGRGHIKDLIAVIEDCEDESISTLAKAALKPLVMQLAANEDSTAMLDAEIKIWHKKSAASQRLATIPGIGYLTASAIAATVPDPSFFKSGREFSAWLGLVPRQNSSGGKERLGRISKQGNPYIRRLLVIGATSMLRYARAKTAPGANWVNGLLERRPARLVTVAMANKTARIAWAVLAREETYQAPKLAV

SEQ ID NO: 264488 - protein, 375 aa, unidentified
MIATTRPEMSVSEPTLYVAFELGKKEWKLAMTSGFGVAPWLRSVASGDWRGVDRAIAQGRARFGLAAAVPVVSCYEAGRDGFWIHRALQQRGIRNRVVDSASIEVNRRARRAKTDRLDALKLVTMLVRVCWGERRVWSEVHVPSVAAEAARQVSRERTALTQEQTRLTNQLKGWLATWGATLPRRRPSGWWTTVSDWAGAPLPVEVQARVARAEARQAVLAGQIAELDAQQQAAVTTAAPGSAVRQLVQLKGVATTSASVLLDEGLVWRAFQNRRQIGGFLGFAPTPYDSGESAREQGISRAGNNRLQSISIQLAWNWVRWQPHSALTAWYREQFGTGKRSRRIGIVAVARKLVIALWRYVTTGVIPAGAILKVA

SEQ ID NO: 264489 - protein, 409 aa, unidentified
MSYSENMTQINASCIFADDFARILLAPFGCKSSSSNKKDPMSSRPLTLVSHFGPRLFSNNKPNRGSKMIYVGIDVSSKDFVVHAINEKKKVVFKRSISPTKKAIRDLIAELGIETKLFVFEAGNQMKWMADYFKKLGEDIHIVHPNEVKWIAESGGKKTDKVDARKLAELARADMLPRRVYVADGEARTLRELTTAREMLVRRRVSLINSLRGYLKQENIKLGTKFFSSRDWQFELIQKKLSKSCEVIVANFMHSIEALKESEASIQNEIVTISNNEIKLLETIPGIGKLNARVLFGAIADIERFGSSKELASYGALAPTIYQSGNDLRMGPVSRAGRKEMRRALLQGAHAVARMKSAGAKPLLDFFHRLERKRGKKRALIALSRKLLTVVYAVLKSQEPYIPGLVRAA

SEQ ID NO: 264490 - protein, 348 aa, unidentified
MLADQLDYVVGVDPHRDWHALAVVRVVSGAVVFEGSVAADSLGYAQALKLADQHAMGRRAFAVEGTGSFGAGLTRYLAGRGEQVLEVGRLRRERGSAGKTDALDAIRAARSVLAQERPATPRASGEREALRALMAAREGAVNAKRAALCQLRDLLVTTPEPLRSELRPLTRAPLLRRLAATRPERRQDPQLRGALLALRSVARRVLQLASEERELAREIETLTRKLAPQLLDQPGVGPLAAAQLVLSWSHKGRISSEAAFARLAGCAPIPASSGQMIRYRLDRSGDRKLNRALHMILVTRRRTHPPTIAYIERRIQEGKSRREATRCLKRYLARTLFRLLEHGTPQTA

SEQ ID NO: 264491 - protein, 363 aa, unidentified
MSDGICFAGLDVHARKTAAAAVRLGSGEVSQAQISGSPVAVIEWLQSLRGPVRAVYEAGPTGFGLARAARAVGIEMMVCSPGAIPRQPGDQVKTDTRDALKLARLHAAGQLRPVAVPTLELEALRDLVRCREDLRSDLMACRHRIGKLLLRQGLVYPGPGHAWTRRHASWLSAIKLAQPLTRLVFAEQLAAHEVLLARRDRLDGLITEQAATGPWAQQVGRLRCLRGIDTLTAVGLVAEIGDFTAFVHPRRLASYLGMVPSEHSSGTRRRQGAITKAGSTHARRLLVEAAWHYRRHPSLSIDLRRRQAGQPPAAIDAAWRAQLRLHRRWRHLDGLRAKRRTTVAVAVARELACFVWEIANLPD

SEQ ID NO: 264492 - protein, 412 aa, unidentified
MTAIDQFAAHVGLDWADKKHDVCVQFKNGERTFHVINHTPEALDTWLNELHQKVKGRIAIALELKKGPVVYALQKYPFITVFPVHALSLARYRQTFWPSGAKDDPQDAELALDLMLRYPQKIKAIEPDNADIRLLLQLVEQRRLLVEDKRRFVNRLINTLKQYYPQPLEWFSHRDSSLFCELIIRWPSLQQLKRARSNTVRHFMNARGGPAVAYTEQRVTSIANAIPLTTDKSVIEANALMATALASQIKLVGELIRTYDERIESLFDTLPDAELFKSLPGMGPCMGPRMLAALGDNRDRFNSAEEIQNYAGIAPVTERSGQKSWVHWRWQCAKFVRQTFVEWAAKTVNSSYWAKLYYQGLREKGKSHQSAIRALAFKWIRIIYRCWKTRTRYDEAKYLLALEARKSPLLMP

SEQ ID NO: 264493 - protein, 338 aa, unidentified
MGTYAGIDLHSSNNYIGIMDQDHNRLFGKRLPNNLDKILMVLEPFKDDLQGVVVESTYNWYWLVDGLQEHGHRVHLANPSAIQQYEGIKHTDDKWDSFWLAHMKQLNILPEGYIYPKAQRAVRDLLRRRLFFVRQRTSNILSLQSMITRNLGIKLSSNQIKKLDMDAAGELFDSSNLVFMAQNNIATIKHLAKIIKGIEKQVKSQVALGKQFVMLTTIPGIGLILGLTIMLEVGDIGRFAKVGNYASYCRCVDSKRVSDGKKKGENNKKNGNKYLAWAYVEAAHFAKRYIPKAQRFYQRKMAKSNGAVATKALANKLARASYFIMRDQVAFDQQLLFR

SEQ ID NO: 264494 - protein, 417 aa, unidentified
MCHKIKRKLLLEIIFYGVFLLFYCGIDIAKNNHEASIIDEKGKRLIESISFSNSQKGCEKLFKLFEKFEINSENIVIGMEATGHYWLSVYSFFIENNFNTKVINPIQSEAFRKMYIRQTKNDSKDSFIIAQIIRFDEYSETKLAEENIIALRQLSRYRLALVDSCGDCKRRIIALLDQVFPEYQKFFSDTFGTSSKEILLKYPTPEDILSISTKKLSKILEKASKGRFSLEKAENLKFVAEHSFGVSFAKDAFSFQIKQLMQQIIFIENQIEDLETQISNLLLKTNQVITTISGIGETLGAITVSEIGDIHRFDSPSKLVAFAGLDVKVNQSGEFSGTKNKISKRGSPYLRRAIWLAANKAAFCDPILSAYYQSLKSRGKHHLTAVGAVARKLCNIIFVILRENRPYQVNPPIDQKL

SEQ ID NO: 264495 - protein, 344 aa, unidentified
MECYVGLDVSLKQTSICVVNEKGLVVREGVVDSVPEAIAGFVRSKAPGAVRVGLETGPTATWLWTELARLDLPVICIDARHAKAVLKMQVNKNDRNDAAGIARIMQTGWFKEVRVKDLDSHAVKALLASRALLVKIKRDLENQVRGLLKNLGLVVGHGTFNVFAVRAKELIADRPELTSAVSPLLTARTAIEQQIGKLDRQVLKLSRQDAQARRFMTVPGIGPITALCFKATIDDPARFRRSRSVGAYIGLTTRRHASGELDWSGRISKCGDAMLRMYLFEAAGVLLTRVPKWSALKAWGTRLTKRNGLRKAKVAVARKLAVILHRMWVDGTEFNWSNNKEVAA

SEQ ID NO: 264496 - protein, 332 aa, unidentified
MNLVSTLGIDLAKSMFSVHGVNSNGEVVLRRSLSRAKLSELVAQLPTCLIGMEACSGAHEWARRFLASGHTVKLMAPKFVTPYRKSGKNDGNDAEAICEAVARPNMRFVPVKSLEQQSDLSLHRVRVGFVEERTATLNRLRGLLAEFGHVLPLRAVEVHRRVPLLLEKLPARVAACARDLLEHAARLAAKTQQYEHEIRAHVRSNALAARTQTRTGIGPITASALVATVGNGRDFKNGRQFAAWLGLVPRQYSTGGKTRLGHITKRGDAYLRTLLVMGARAVLQRAASLTDPFSLWAMALRERRGYHRACVAIAAKNARVAWALLSKEPTAT

SEQ ID NO: 264497 - protein, 407 aa, unidentified
MIFVGVDWAEAHHDVHMADGEGKRLGKARLPEGVDGIARFHELVGAHADDPAEVMIGIETDRGLFVAALVATGYQVYAVNPMSTSRYRDRHSTSGAKSDAGDAMVLSDMVRTDRHNHRLIAGDTEEVEAIKILARAHQSMVWSRGRQTNLLRSTLREFYPAALVAFDDLASPDALEVLRVAPTPTLGAGLSRSKIAAALRRGGRQRRVDERTAEIQTALRSEQLQAPAVIATAMGASVAASVAVIAEMVAQTARLAQELSAGFEQHPDAEVVRSLPGLGTILGARVLGEFGDEPNRYATPKCRKNYAGTSPITRASGTKRAVLARHVRNRRLADAIYLWAFASLNASPGARAYYDARRAAGDGHNQALRALGNRLVGILHGCLAHHTTYDETIAWAHRPSNELATAA

SEQ ID NO: 264498 - protein, 315 aa, unidentified
MNHDVFVGVDVSKARLDVFMSHPAQACAFANDEPGVAELVRCLVKAAPTLVLLEATGGLERRLVACLMAVPLPVVVANPRQVRDFAKATGQLAKTDALDAQMLAQFAAVVKPAQRALPEKAALELADQLARRRQIVDMLTMEKNRLQQTHSVGVRKDLAQHIEWLQRQLQGSDGDLRRAVEASPIWSAKRELLLAVKGVGDVTALTLTAGLPELGSLDRKQIAALVGVAPLNRDSGTLRGRRTCWGGRADVRAVLYMATLTAIRWNPVLKTFYERLRRAGKLKKVAIVACMRKLLTILNAMLRDNQSFDPTLHST

SEQ ID NO: 264499 - protein, 321 aa, unidentified
MEKVLFDQVVKVGCGIDVHKDIIVATIRKSENEYETMEFTSFTSSLTELREWCKSESVTHVAMESTGVYWKPVFNILEAGDFEIILVNARHVRNVPGHKTDKQDSQWLSKLLVSGLLKASFIPPVEIRDLRDLVRYKKKVVAQASSEKNRIIKILEDANIKLSSVLTSVDGAVGTKIIDDLIAGKADINELMKHYHGKIKASKTEFRLALEGRLTKHHQFMLRVIQESIADKEKLTAKIETQIDELAKQYSVEIDLLQTIPGVAYDSAVSIISEIGADMSQFSSEEHLSSWAGMSPGNNESGGKKKAQPQSTGTNTYKPPL

SEQ ID NO: 264500 - protein, 349 aa, unidentified
MTVSVTKQDENGSVPIDFTAGMITIFPLLYFIREDGDMDNEVIIDKGCGLDVHKETVVACVMGSGIKKEIRTFSTKTNDLLRLKTWLSGLGITHIAMESTGPYWKPVFNVLEDGFTLILANARHIKNVPGRKTDVKDSEWICRLLRSGLLSASFVPPQGIRELRDLTRYRRKLTQALSAEKNRIQKVLEDANVKISSVLSDTFGVSGSQMIEAIMKGRLSEAEMADLAKGKLKSKKEEIREALVGYFQEHHRFMIRASLEHIKHLEKLISDLDQETKKKLAQYPKEYELLQTIPGVKEQGAAAIIAEIGADMDIFPTEGHLSTWAGMSPGNNESAGKKKVERRPTAIRI

SEQ ID NO: 264501 - protein, 361 aa, unidentified
MNETYYIGFDVHKQSVSYCVKRASGEIVEEGQLRARREDLRAWAAAQPGPWRGAMEATLFGAWIYDTLRPYAERLEMGHPARMKAIACAKKKSDRLDARTLADLLRCNLLPASYVLPPALRDLRRLLRYRQLVVGQAVRMQNKIAGLLMETGAPFLKTKLHGKKYFNQLLQTLEEVPESVKELLRMSRGALEMFQSCQKRLIQKLLAAPGLAARVERLATIPGVGVLTALTGALEIADPERCSSIGQALSYCGLTSAFRSSAGKEQRGPISKQRNAWLQTALIEAAKLAPRWNHPLAAVYERERERGHRNRATLQVARKLVAYLMAVDKSGQPFQMRSAPPPAGVFSTQKERQARAALQPA

SEQ ID NO: 264502 - protein, 427 aa, unidentified
MPYRIAGIDVHKRMLTVVVRDVEVRGESEFERRQCGSTPSQLRSLAAWLVEQQVEEVVMESTAQYWKPVWATLERYWKPLQRAREGVRPMSGMLHLAQAQSNRGPRGRKNDFADPERLVKRLVAGELVLSFVPSAEQRLWRTLMRTKYQLRCNQVQLQNRLEALLEEAHVKLSSLVSDLLGLSGRRMLTAIAEGETDPAGVAARADYRLRATPEELCDALGACGELHPVYRRLLKTALEDWQRIETEIHRLAQEMATLLAAHQEQVQRLAEVPGLGVDSGQQIIAEVGASAATFPSAKALSSWVGECPGEEESAGVNRNRRSPKGNRHLRRILNQAAQAAVKLKGSVFAILYRRYVVRFGHNKTLAVIAHRLCRLVWKILHEGVRYEERGPAVHQKSIQRRTARMIRQLRDLGYRVELPQAAAGASA

SEQ ID NO: 264503 - protein, 410 aa, unidentified
MNTTTLFVGIDVDKQSNTVRFMDGSGDTLSLFTVKNNADGAAELQEKLHRKLLHTDYSKVTVGMESTSIYADHLAAYLRNDEFLRKWECKVYVINARNIRNFKKSYPELPKTDSVDTLIIADYMRFGRLPKMVVHDEKYLALRNLTRARFQAAQNLSREKTRFIETLFQKFSSLDSSKVFSDTFGATALAAACDFLTVDEIIDMPMDDLADFVNKKGKGKFADPAQIAAALQAAARSSYRISKTVNDSLNQLLAVRLVGIRSIEDQIKSLNKAIESFMGAFQNVLITIPGIGPVYSAGLMAEIGDIERFDKGQASLAKYAGLAWSKHQSGGFEAANTKMILSGNKYLKYYLLEAANKVRMHDAEFAEYYRIKFREVHKHQHKRALALTARKLVRLVYSLLSTNRLYTPQG

SEQ ID NO: 264504 - protein, 413 aa, unidentified
MAAVEFTQVVSRGCGMDIHKEVVVATVRGEGIQKETRSFDTFTSSLTELREWLVSLGITHVAMESTGVYWKPIYNVFEGHIPHVWIVNARHIKNVPGHKTDKNDSEWICQLLMAGLLKPSFIPPREQRELRDLTRYRRKLIQMVSANKNRIIRTLEDGNVKLSSVLSDTSGKTGATLIEMLCDGKELTLQDIEDVRHGRCHHTSEEMLEACTGYMNDHKRYMLQRIRECNRKLTAEVFELDRRVKEIVNPYAEVMERLDEIPGLHDRTLEDLIAEIGLDMTVYPCAESLCKWAAMCPGNNESAGKKKSGKTNHGDKYVKATLVEAAWAASRTKGTFCRERFERLSKRRGGKKALIAVGHSILKAVYHVISTGGRYHELGEQYVPSRIEKKRRDYLKSELQKLGYEVSLIKKKD

SEQ ID NO: 264505 - protein, 409 aa, unidentified
MNSGIITSVGIDISKHKSTVAVRRPGGEIVLMPFDICHNVDGITSLIKILKSLDGEIRVVMEHTGAYWRPIALSLKQAGFFVSVVNAILIHNFSDNSLRKVKTDKADSLKIANYGLTFWSDLREYTSEDETRQLSKMQSRLYERTTNIGIMLRNALISLLDQTFPGANKLFRDESRNTKGHVKWVDFVMRFWHKECVATLSLNAFADKFLKWCKRTGYRFNPSDAQRIHTIARNTVATLPKNNSTKLLIVQAVISLNTVYDSLQVIRTEMNHLASLLPEYEIIMNLDGVGKITGSQLIAEIGDVRRFSHKGALVAYAGVDAPPFQSGTFDSKNRHVSKRGSPYLRKILFQIVSMILVNEKMDNSVFCFMDKKRAEGKHFYVYTVAGAAKFLRIYYAKVKEYLNKQNCLT

SEQ ID NO: 264506 - protein, 401 aa, unidentified
MKEFSAEAVRIETAAALETVLQAQAERQYRAYSGLDVHKETIAVAVARSGRAAAESRGEIANKPQAVAKLVERLSGEFGGEVLSFCYEAGPCGYGLYRQLLASGHECQVVAPSLIPKKPGERIKTDRRDACKLAGLLRSGDLSAVWVPDEEQEAMRDLSRARDDLKAQERKARQQLNAYVLRHGHAWPSNRTRWTQTHYHWLESLRFAHDWQQVVLQEYIDAVKAASQRVADITAQMERVLPEWSLAPVVASLVALRGIDKLAAMVVLAELGDISRFESPKQLMAYLGLVPREHSSGGRRRQGAITKTGNGHARRMLVESAWSYRFPARQTMHLKRKAKPASEEAKAIAWRAQKRLCGRYRTLVQAGKNTKQANVAVARELVGFIWAIVCHEMPKLQQTTR

SEQ ID NO: 264507 - protein, 341 aa, unidentified
MKQYVGLDVSMEETKVCVLDGAGVVVFEGSVASRPAALAKLLNAKAPHAERIALETGSLSSWLWHELKAAGFPVVCLDARHAKAALSMRINKTDRNDARGLAELIRMGWYREAKVKSMESRQIRALLAARSKLVDLRRDLENQMRGLLKSLGLIIGKSGVRVLPNRITALLRDAPHLRSLIDPLMTTHSTLAQQIATYDLQVRELAKTDQTIGRLMTVPGVGPVTALAFVSTVDDPQRFARATDVGAYLGLTPRRYQSGELDRNGRISKRGDRLTRSYLFEAANVLISVVRRTSPLKSWATKLVKRIGRKKTTVAVARKLAVILHCIWTDGTEFNWGGAAV

SEQ ID NO: 264508 - protein, 347 aa, unidentified
MNFYTQQHKYYCGIDLHAKSMYLCILNQEGNLVLQRNIRTHSEVFLKTIERYREDIVVAVECIFTWYWIADLCAQENIPFVLGHALYMKAIHGGKAKNDKIDAHKIAVLLRGGMIPMAYVYPQEMRSTRDLLRRRMHLTQKRAELLGHIQNTNYQYNLPDIEKKVAYKANREGVAEHFPDESVRKSIELDLKLLDYYDQLLPRLEHEISLIAKIHDPDSYFRLRSVPGIGRILGLVILYEIHDICRFPTVQDFVSYCRLVKSAKESAGKRLGSSGKKIGNAHLKWAFSEAAVLFLRRNPEARKYRDKLQKKHGKAKSMTILAHKLARATYYILKRKEVFHMNTFFER

SEQ ID NO: 264509 - protein, 365 aa, unidentified
MELSLSSWLVAGVVPGVTRQPLKKLDPNEEDLLRLLQRWRTEAERSGCKIERIVVAYEAGRDGFWLARWLRAHDIETHVIHSTSVAISREHRRAKTDRLDTSMLLRVFFGWLRGERGHCGMVAIPSIGEEDAKRPHRERENLVGERTRIINRMKATLIRLGIRGFKPELRRAPAKLDALRTPEGLAIPPNTADEIRRDMARLAMVREQIDLIEHARLARIEQAPETGPNAMIRFLASIVGVGVETADMLVQEVLSRNLRDRRAAARYAGLTGAPDESGAKRREKGLAKSGNARVRRGLIQLAWRFLRFQQDSALAKWYRQRTSGPNGARKTTMIVALARKLLIAMWRMVTTGAIPDGVIIRQAAG

SEQ ID NO: 264510 - protein, 364 aa, unidentified
MDEFTHIGLDVHKDTIAVAVLRPGASECEERMIPNAPEAIRKLLSRYPDRAALRTCYEAGPTGYDTYRLLSSQGIACEVIAPSLIPRRAGVRIKTDRIDARNLARLQRAGELTAVRVPTPAEEALRDLVRAREDLKNDRRIARQRIRSFLLRYGKRYPSPGASWSFRFEVWLRALRFEEAAAQAAFDHLVGAYSVRDAQLAAIDKQIEAVAGEAPLAEAVARLRAFRGIDTLSAVTILTETCDFRRFPSAASYMAFTGLVPSEHSSGASRHQGSITKAGNAHVRRVLVEAAWAYRHRPAVRGKLAKRLEGQPPEVAAYSWKAQCRLSSTYRKLAARKGPNKAVVAVARELSGFVWGAMTERMGA

SEQ ID NO: 264511 - protein, 435 aa, unidentified
MEEVTDEPLYRDRVCGIDIGKAQMAVTIRVPSEKNPARRASETREFATTRRGVLALADWLRCWQVPAVVMEATGDYWKPAFYRLEAEGFECVLADAKQVKHLPGRPKRDTSDSAWLAACFERGAVRSCFVATPEFRVIRLHTRYRRDLTDERTREKNRAEKLLESAAIKLSSVITDLHGVTGRDIMTRLIAGQRDPKALAQLARARARRKITELEHALEGAEFFTDEHAALLKTMLERIDQLNKEIARLTEVIEQLLAPYEEQLQQAESMPGWGRRSAQDALAETGPDMTRFPTPAHLASWAGRTPLDAQSGKRTGRARHKKGNKYLGAITGETAVSAGKTATREGARYRRLARRRGRPKAQVAVGNTQLKVYHKLLSTPGMRYEDLGPDYYERQAAIRRKIAYHVRQIEALGLDVTLCRRPEPEPDGPANTQTA

SEQ ID NO: 264512 - protein, 351 aa, unidentified
MEEYIAFDSHKRYTWVEHQQANTGKARGYRLEHGAGAIRQALAGCAAGTAVAIEATANWYWIIDEIEQACCVPQLVHPRKAKLMMGLINKTDKLDAHGLNTLQRNGTLPTVWIPPGTLREQRELTRTRLVLVAQRTRWKNRITATLAKWGMPPSEYSDPYGKKARVELEQQMERLPEQTRWATRQMLAQLDSLSEQVRQFEKRLEELVEVTPMMQWLMTLPGVGVILSATIALEIGEIERFANAERLASYSGTTPRVHSSGDRTRYGRTRPDVNRYLKWAFAEAGNSVAVNHRRNPERHVSRLYARLRASKGHARAVGAVARHLAEAAFHVLQRKEIYRDPSLHARPEQGV

SEQ ID NO: 264513 - protein, 391 aa, unidentified
MIYVGIDVAKDKHDCFITNSDGEVLFKAFTITNNLDGFNELHQKIASVMDDVTKVKVGLEATGHYSYNLLGYLIDKGLPTYVINPLHTNLYRKSLSLRQTKTDKVDARTIASMLMSDVNLKSYSDISYHNEELKSLTRYRFDKVKERAKLKTSVSRLVCILFPELEKLVPTLHITSVYALLSEFPGAKHIATAHLTRLTNLLSEASKGRYGKDTAITFRDAARASIGSNMPAKSLELKHTIKLIQELDSEIDEIEKEIKIIMDEINSPILSIPGINYRMGAMIIAKIGDFNRFDSPDKILAYAGFSPSTYQSGQLDGAYAHMEKRGSRYLRYALYNATKYVCHWDPTFAAYLAKKRAEGKHYNVAISHAVKKLVRVIYHLEKTKQQYIKAA

SEQ ID NO: 264514 - protein, 348 aa, unidentified
MQSTLNLPVIGLDLAKSVFQLHIVDVESGEIQRRQIKRAKLTEFFAKCTRSLVAMEACGSSHYWARTIRALGHEVKLLPAQHVKAFLLRDKTDAMDAQAIWVAAQQPHILPVPVKSERQQACLALHGMRRQMMKMRIMQTNALRGILAEFGIAMPVGHNQLLKMIQAEIADAQEKGHLPADLVICVQEQLKRIDGLQDDIDHIGQRLGAMIREDRQMQAIQQIPGVGDLTASALVAAVGDFCTFKSARQFASWVGLVPRHVGTGGKTQQLGISKRGDTYLRTLLVAGARAVIARSGKSDWIERLLQRRHYNVVVVALANKMARTASAVLARGVVFDRTRWNPLETTTA

SEQ ID NO: 264515 - protein, 391 aa, unidentified
MIYIGIDVAKDKHDCFITNSDSEVLFKAFTILNNLDGFNDLYQKIESVMDDVTKVKVGLEATGHYSYNLLGYLIDKGLPTYVINPLHTNLYRKSLSLRQTKTDKVDARTIASMLMSDVNLKSYSDTSYHNEELKSLTRYRFDKVKERAKLKTSVSRLVCILFPELEKLVPTLHMASVYALLSEFPSAKHVATAHLTRLTNLLSESSKGRYGKDTAITFRDSARASIGSNMPAKSLELKHTIKLIQELDSEINEIENEIKIIMDEINSPILSIPGINYRMGAMIIAEIGDFNRFDSPDKILAYAGFSPSTYQSGQLDGAYAHMEKRGSRYLRYALYNATKYVCHWDPTFAAYLAKKRAEGKHYNVAISHAVKKLVRVIYHLEKTKQQYIKAA

SEQ ID NO: 264516 - protein, 414 aa, unidentified
MEVKYQRCCGIDVHKQTVVACVMVSGEQPGEPDKETRTFKTMSDDLGALARWLKAKGVTHVAMESTGVYWKPVYNLLEGQFEILVVNAQRIKALRGRKTDAADAEWIADLLRHGLLSGSFIPTAQQRALRDLTRFRSSLVEDRARAVNRLQKVLEDANIKLASVATDVTGVSGRAILEALLAGQTDPQVLAELAQGRLRKKIDLLQKALAGRLKPHHRVMVTELLGQIDHLDETIERLNAEITEQMRPFEAEIERLDSIPGVSRRVAEVLVAEVGVDMQPFERAENLASWAGMCPGNNESAGKRKSGKTRKGSRWLRAALTEAAHGAARSKHTYLKAQYHRIARRRGAKRALVAVGHSILIIAYHLLTRQQTYQDLGENYFDERDHEGVKRRAVRRLEQLGYQVTLAPLMAVAA

SEQ ID NO: 264517 - protein, 383 aa, unidentified
MTKVITYVGLDVHKDSIVVSLAEAGLRGRRGEVREYGKIANTATAVARLARKLAERGNELKFCYEAGPCGYGIQRQLSGLGHHCDVVAPSLIPRKPGERIKTDRRDANKLAKLHRAGELTPVWVPDPTHEAIRDLVRARLATARDLRRARQQLSSFLLRHGHAYDRTPWTASHRRWMADLKFSQPMHYLVLEDAIAALEAAQERRKRLEAQIEAALPEWSLAPVVEALQALRGVALVTAATLTAELDDVTRFDNPRQLMAYIGLVPSERSSGGTRRQGGITKAGNSAARRMLIEAAWSYRFPARITREQLRQQEALPKPIRDIAWKAQDRLCRRYRVLARAGKIPTVICAAIARELAGFVWAIAREAGRSGGGKLAIHGVAAS

SEQ ID NO: 264518 - protein, 412 aa, unidentified
MQVLYPCCCGIDVHAKTAVVCLIKQGKRQTRTFSTMTDDLLRLSDWLTVEGCTHVAIESTGVYWKPVFNILESVLTVILVNARDAKAVPGRKTDVRDCEWLADLLRHGLLRASFIPPLEIRELRELTRYRQTLIKEHTAVANRIQKLIESANIKLGQVATDVLGVSGRLMLRALADGEEDIERLVELARGSLKEKKSELRRALTSRLTPAQRFVLNELLTRLGELEAATARVGEQIMKEVAENADPFVPEAVKLLQTIPGIGLRVAEVIISEIGVDMTRFPTDAHLASWAGVCPGNNESAGKRRSGQTTKGSPYLRAAITQAAWAASHTKHTYLAAQYHRLIKRMGKNKALVAVAHSLLVIVYHVLAQRADYRELGGDYFDRQHQQTQQQRLVKRLEAMGLKVTVETLPEAA

SEQ ID NO: 264519 - protein, 400 aa, unidentified
MDRVEQGWVGIDAGKGHHHVVLIDGNGRPLLSRRVINDELELAALIDVIRDRVTNLTWAIDLADGAGALMIALLLHRAQPVFYLPGMAVNRASAGYRGEGKTDARDAAIIADQARMRRDLRQLRLLDDAIVRLRLLTAYRADLAADRTRSINRLRGLLVGIFPALERVLDFTNQGPLILIGGFQTPTAIRRLGQARLARWLEKRRVRGAARLAAAAAEAAGRQTVEISGEAAAASVIARLAQTILELDRQLAVIDREAAAIFHTQADAAIITSLTGIGDVLGAQFLAAIGGSLAGFASADHLAGYAGLAPMPRDSGYRTGNLHRPQRYNRQLQRVFYTSAMISIQRSAASKAFYDGKRDQGKRHTQAVIALARRRVNVLWAMLRDHEPYQERLQTPALAA

SEQ ID NO: 264520 - protein, 391 aa, unidentified
MIYIGIDVAKDKHDCFITNSDSEVLFKAFTIFNNLDGFNDLYQKIESVMDDVTKVKVGLEATGHYSYNLLGYLIDKGLPTYVINPLHTNLYRKSLSLRQTKTDKVDARTIASMLMSDVNLKSYSDTSYHNEELKSLTRYRFDKVKERAKLKTSVSRLVCILFPELEKLVPTLHMASVYALLSEFPSAKHVATAHLTRLTNLLSESSKGRYGKDTAITFRDSARASIGSNMPAKSLELKHTIKLIQELDSEIDEIENEIKIIMDEINSPILSIPGINYRMGAMIIAEIGDFNRFDSPDKILAYAGFSPSTYQSGQLDGAYAHMEKRGSRYLRYALYNATKYVCHWNPTFAAYLAKKRAEGKHYNVAISHAVKKLVRVIYHLEKTKQQYIKAA

SEQ ID NO: 264521 - protein, 401 aa, unidentified
MNAVGIDVSKGKSKVAVIRPFGEVVAKPFNITHCPDKLAELADYIRSLPGESRIVMEHTGKYSEPVAKFLCEAGIFVCMVNAKLIHDYGGDTIRRDKTDKVDALKIAGYCLDKWVKLERHEPVPDTRKMLKTYNRQLSEYNKIKTMLKNSLISLLDQTFPGANDLFSSLARESDGHEKWIDFVAAFPHCHSIAALSRKVFAAKYEKWCRKNGYNFCVHKAEQVYAAALNCLPTLPYNDFAKALLLQTVSQLNNLCETVAAVKSEMTKLASALPEYDTVLAMHGVGKTLAPQLIAEIGDIRRYPKRSSLARFAGIEPPENQSGTYNQHSRRISKQGSPHLRKTLFLVMCCILRNKHSDEPTFQFLDRKRSEGKPHKVYMIAGANKFLRIYYARVNECYTQTA

SEQ ID NO: 264522 - protein, 344 aa, unidentified
MKYYAGLDVSVKETSVCIVDETGTVVREMTVASHPNDLIHALKGSQWRLTRVGLEAGPLSQWLFGGLVEAGLPAICIETRHAKAFLKAQVNKSDRNDARGIAQMMRVNLFRPVHVKTPTSQKRRTLLTARKLLQEKAIAIENDIRGLLRNYGLKVGVVGSISFDARIRTLVEGLPDLLEIMTPLLAARQKLRDEFARLHRKVVEIAKDDPICNRLMTIPGVGPVTSLAFTSTIDVPARFRNSRAVGAALGLTPVLNQSGESNRIGRVSLCGDAMMRSLLYEAAQVMLTRVRKWSWLKAWAVNLAKRNGGRKAVVALARRLAVIMHRMWSDGTEFRWAKAGPATA

SEQ ID NO: 264523 - protein, 319 aa, unidentified
MTITYPIAGIDIGKDILDISLLHANGSFEAFSFANEKASRKKLARRLKAKGVRLVVLEATGGYELPVMAALAEEGIAFARVNPARVRAFAKSMGQLAKTDRLDARCLSLYGERVRPKPTPMPSENESRLNALTLRRRQLVGMRQKERNRAHRTGEPDIAHSIERTIAFLSQEIDAIDAAVETLIASAPEMAERRDLIDSVPGIAANTANVLLAGLPEIGRMGTRKLRKLVGVAPLNDDSAERRGERHIAGGRAHLRQALYMAAQTGYRHNPALKALYQRIRAKGKSHKVAIIACIGKMLAILNAIIRSKKPFDPKFATP

SEQ ID NO: 264524 - protein, 337 aa, unidentified
MEQYVGLDVSQETTSISVRQDGRRVWRGKCPTDPKALSEVIRKHAPHAVRVVFETGALATWLYHVLQAENLPVVCIDARHAKAALDMAPNKTDANDADGLAQITEIGFYREVRVKGYGPMLMRTLVGARSQLLRISIQLSNQIRGIMKTFGLIVPKGAGRIFERNARALLETNEAVARVVLPLLETWRVVRARAAELDRQLIAAARTGPSYRLLMTIPGVGAITAVSFVAAIGVPENFKRSRAVGAWLGLTTRRYQSGETDYDGHISRRGDRYLRALVYEAAVAVLTRTRTDCALRSWGLKLKAKVGFKRAAIAVARKLSVIMHTMLKTGAAFAAAA

SEQ ID NO: 264525 - protein, 346 aa, unidentified
MMIIGCDFHPSWQQVNWLDTETGETGEQKLVHASGDAKQFYQRLAAPVLIGMEATGNSQWFVELVEDLGHEIWIGDAAQIRASYVRKQKTDKRDAAHIRKLVVEGRFPRLWSPDREQRDLRQLVLHRHKLVEIRSRVKNELQHLSMNKGMQRKGKLWSQAGQKLLRELPLKPWAACRREDLLGLLAMLNQQVGQLDAAVQHAAEQNPQARLLMTQPGVGPNTALAYLLTIGEVSRFQRGKQVASYLGLIPREHSSGGRQKLGAITKQGNRMLRSLLVEAAQIAVRFDPGMKKQYLHRCHQKPKGVAKVATARKLAVRLYWMLRTNVAYPEIVRIESGPRVPLVGAS

SEQ ID NO: 264526 - protein, 379 aa, unidentified
MVHLALLIGVIMRQNGDFYPINIETRRTMNKHIENTDIKVVAIDLAKNSFQLHGVDANGHKVMGKKLTRKKLKNFMVQLSPCLVVMESCSGAHYWGRLFQSYGHEVKLIAPQFVKPFVKSNKNDAVDAQAIYEASQRPGMRFVAIKSDEQLDIQAIHRIRSQLVKIRTAAVNQIRGLLLEHGIDIPKGRAHVLRKLPGILEDADNGLSGRFRSVLHDLQEELRHIDQRIQRYDTQIEQIVRDSGQARLLLSIPGIGPQTATALLSSIGDIGQFKNGRELAAFLGLVPRQHSTGGRPTLLGISKRGDVYLRTLLIHGARAVLRYVDNKPDHSSRWAKALMQRRGSNIAAVAMANKMARTVYALLSKGERYNINHVAVKSA

SEQ ID NO: 264527 - protein, 411 aa, unidentified
MHNRQNYLYVGVDLHKQHHTAVMINCWQEKLGEIQFENKPSAFSKFLLEVETYVSDGLSVVFGLEDVGGYGRALAKYLVDHERIVKEVNPALSFLERKSQVMIQKNDSWDAECVARILVNKFEQLPNVNPNDLFWSIQQLVSRRNALVKAQSALKNQLHIQLNHHYPSYKKFFSELDGKTALAFWEKYSSPSCLEGVSVKKLTTFLLDVSNNTCSVKKASDILKLVKGDGQTMKEYQETRDFLVRSIVRDIEFKKRELKYIERELKRLLNLLDYQLETMPGIELVTASALIAEIGDVRRFPNANKLARFAGIAPVYFGSGGKGKTHKSKQGNRALHALFYNLAVQQVQVAKGSKLPRNPVFHAYYQKKLKEGKTKGQALVCIMRRLVNIVYGMMKYKTAYELPIVEEKEVV

SEQ ID NO: 264528 - protein, 368 aa, unidentified
MIVIGVDAHKRTHTLVALDAVTCVSRGESRVQASDDGTLQALRFAAGVDPDRVWAVEDCRHVTSRLERALLGAGERVIRVPPSLTGESRKATRTAGKSDPIDARAVALAAIREGVDRLPVAFLDEQAHEIRVLCDYRDQLMQERNQLINRLRWLLVRIAPEIESQIGPAALKGPRIRARLARQLGQLPASVELRVVKSQLRRLNAIEKEQHELFDELTALLRAHAPQLLEQRSIGTVTAATIVGRTAGAQRFRSEACFARHTGTAPIPASSGKTIRHRLHRGGDRQLNRAIHIIALGRMVWDPETRAYIERRVTEGKTKREAIRCLKRHIARQIWHLLYTAEPASPLPIRPRTTRVTVGAPGLMPCTR

SEQ ID NO: 264529 - protein, 320 aa, unidentified
MQTPALVRNIGVDVAKAEIVVACSEGSFPVRQVANQRPALLAFLKGLPAGSRIGVESTGSYHELFAGLAHQLGFLVFLLNPKDTHHYAKAVGLRGKTDRVDAELIARMIAHEHTKLHVWIPPTPQQRELDRLIKRCATLISLREALEMSLHELDGFGADLKALRTRFNQLIARLDLRVKALVDASPERKQNLTRLCTITGVGPVIGTALVNTLERVPLKSADTFVAFTGLDPRPDDSGQHRGKRRLSKRGPGELRRLLYLAALSGIKTKTWRPLYEHYRAKGLSSTATLVILARRIARTAWSIYTHKTEFDPGRLTKSLT

SEQ ID NO: 264530 - protein, 343 aa, unidentified
MSHSVGLDVSQKTTTICVLDRNGGRVWRGVCASDPDLIEAAVRRHAGDDAEIGVETGAMTPWLVHELRGRGLRVVCLDARHAQAALKMQVNKTDQNDAEGLAQIVRTGWYRSVHVKSLDAHRTRALLGARAQLVGMSTRVSNNIRGILKTFGVLPGAVRGMRFDRRIEAHLVDRPDLEPIVAPLLTTWRLLRDQITAFDKMIRSVARENPDCRLVMSVPGIGPLTGLAYVSAVEDPRRFSSSRSVGAHFGLTPRQYQSGEVDRSGRISRCGDGLARTLMYEAAVVILTRLKRSCSLKTWALAIAHRSGIGKARVALARKLAVVLHSIWRSGEPFRWKESMEPS

SEQ ID NO: 264531 - protein, 399 aa, unidentified
MFVGIDWAKDAHEVCAVDASGKVRHRATVPHSQDGLDQLVGYLGRWATTEELLVGIERPEGRLVDRILEAGYPILLVPTFAMKDLRRRYAIGGAKSDRGDCYVLADVTRTDGHRLRRLEPLSAQTRALRAVVRTRDDLVDQRRALANQLRATLEAYWPGAAAIFADVDSEICLAFLERYPTPASAARLTEVRLASFLTKAGYSGRRPATQLLARLGAAPAGVLGVEAEARADAVRAMVRVLRALLRSIKDLDRSVVAHLGEHPDAEVFTSLPRSGQINAAQMLAEWGDCREAYPQADSAAMLGGLCPVTHASGTHRDVSFRWACNKRLRQAMTTFANNSRRASPWADEVYRQAIARGCDHPHAVRILARAWARVIWRCWQDRRAYDPALHRAARRLQAA

SEQ ID NO: 264532 - protein, 338 aa, unidentified
MEINAVGIDLAKSVFQVHCVDRRGRVVLMRQLKRAQVTSFFARLMPCVIGMEACSSAHHWARKLQALGHTVRLIAPQFVKPYVKSNKNDVADAEAICEALQRPGMRFVAVKTVEQQALLSLHRARQGFVKARTAQANQIRGLLSEYGLVMPQGIGHIAKRVPELIEDGSNDLPGMFRALINRLLGHLKVLDEQIAQLERQIRAWHRDSELSRKLEQIPGIGPLGASAFVASVGDAQSFANGRQVAAWLGLVPRQRSSGGKPTLLGISKRGDSYLRTLLIHGARAVIRAAQRKHQHSGWLHELLKRRNPNVAAVALANKNARIAWALLAHDRPYATLAT

SEQ ID NO: 264533 - protein, 340 aa, unidentified
MKLYAGIDLHSNNSYVVLLDETDKVIYQKRLPNDPKLILEAFEPYREQIVGIVVESTYNWYWLVDQLMEAGYKIHLANVAGIQSYNGLKHTNDKTDAIWLAKLLRLGLLAEGHIYPKEKRGMRELLRRRLVLVRQQTMSVLGVQAMITRYENVKISAAKIKGCKKDPEEILKHIKDESVKIAAQSQLKILHCVVEQIAILEKNILEKIQGMADFDALKKIPGIGTILAMTILLETGNINRFDQAGNYSSYCRCVESKRVSNAKKKGENNRKNGNAYLGWAFVEAANFAIRSYDPIKKYYQRKLEKRKRVIALKTIANKLSKATYFVLRDGAEFDMKKLFG

SEQ ID NO: 264534 - protein, 403 aa, unidentified
MNAVGIDVSKGKSMVTILRPFGEIVSSPFEIKHTSSDIHSLIKLIHSIEGESRVVMEHTGRYYEALAHQLSAADLFVSAVNPKLVKDFNNDSLRKIKSDKADPVKIARYALDKWQSLEPYSITDELRAQLKVMNRQFHFYVKQKTAMKNNLIGLIDQTYPNANTYFNSPTRSDGSQKWVDFVSTYWHVDCIRKMSLNAFVEHYQNWCRRKKYAFNKSKAEEIYTKTKELVPVFPKNEITRHIIRQAIDQLNSTSVTVETIRTLMNETASKLPEYSIVMQFKGIGPSLGPQLMAEIGDVTRFTHKGALTAFAGVDPGVNESGSYAQKSVPTSKRGSSNLRKTLFQVMDVLIKTMPQDDPVYQFMDRKRTQGKPYYVYMTAGANKFLRIYYGRVKEYLSVLPDPS

SEQ ID NO: 264535 - protein, 339 aa, unidentified
MYPFYLGIDLHLKRTYMVLMDANGEVVDKERISNQEIPQYLQEKVPQETYAVLEATRNWPFMYDLLHEHVQQVDLVHAKGVRAIANAAVKTDQIDASTLAHLARMNYIPKAYAATQEIRDLRQLLRHREWMVNQRSKAKNRIHAVLAAYNLVSPFTDLFGVAGREYLHEVMDHDLRTAACQVIEDHLTMIDLLTERIHVLEKNISLNEKQSHIVNLLKSMPGVGRLIALILLAEIGDISRFHSPKSLCSWAGLTPRVHNSDAVVQHGHITKEGSRYLRTAMVQAATVACRVSPKWYGVHEHMALHCGRRAARVAVARRLLTVLYFMWKKDQPYQDNYGQ

SEQ ID NO: 264536 - protein, 332 aa, unidentified
MKKFKEFIGIDISKLKFDIRIHSNQIASVFDNNNTGFKKMVNWVLKNVDCDKEEILFALEHTGLYSLPISVFLSENKFHFILLPGLEIKRSLGIQRGKNDKIDAKRIAEYAYQKKDKIVPSQLPFKNILQIRRLLKLRERLVKYRAGFLKDKSENKIFLNAKENKLLFEIVDKSIIELNKKIDKIEKEIDIIVESDTLISKQFYLITSIKGVGKQTALFVIAYTNCFSNFDNWRKFASYCGTAPFPYSSGTSIKGRNKVSPLANKKIKSLLNQCARSSIICNPEMKLYYKTRKEKGDNGMSIMNIIRNKMISRIFAVINRGTPYVDTYKFAA

SEQ ID NO: 264537 - protein, 311 aa, unidentified
MLIWRPAGFRGSGARTVEGAFSPVCNPVLGPDPINMMEVGMNSKGLEVVGIDVGKRMLDVAREGTRRGERHSNDAVEVTRFVRSLDPECDIVVFERSGGYERLLEGQLAAAGVRWAVVHSKRVKAFRIARGIKAKTDAIDCRLLRDFGRDQLDRGELRLGRLGDVTMAALAARRRQFNDMLHAERCRQETATIELVRSSIGRTITTLEVELTAIEAAIAAHIASDQELHLKEDVMCQRIGVAETTARGLLAILPQLGRASAREIAALAGAAPRVHQSGTLHKTRGLEPRRSRPLRSGCETVGNQARSSWWR

SEQ ID NO: 264538 - protein, 340 aa, unidentified
MTVIIGIDPHKASHTAVAIGGDEQQLAEIRVRATCQQTAKLLAWAEPLGPRTWAVESAGGLGYLLSQQLVEAGEYVLDVPATLASRVRVLGTGRSNKNDPNDALAVAIAALRSPGLRSVKPADHREVLRLLAKRNHEIGRLRNIVVSRLHAALANLSPGGIAKELNASDAVRLLGDFDPKTPVEQTRYDLALELLDDVRRLDVQLKASHKRIKTAVQASGTTLTELYGVGPILACELIGYTGDVRRFITRDKFASYAGVAPVELSSGGRIVHRLSRRGNRQLNHAIHMVAICQIRQTNSEGRAYFERKVAEGKTKREAIRSLKRHVANAVYRQLLLDSTK

SEQ ID NO: 264539 - protein, 407 aa, unidentified
MELIAIYKRVIGLDVHQAQVTACALIEEDDGSTRVEQRQFGAFKRDRRQLAEWAAALRPEEVVMESTGIYWKSPYAALEAAGIRAKVVNARHIKRVPGRKTDVADAHWLAMLARAGLLRASFVPPAKLRELRLIARQRQKLISQLASEKNRLHKVLTDSGVRLGVVVSDLHGQSARAMVKAIIAGQSPEQVLKLASRRLKASRDELFDALQGELTPSHRFVLDELMRHSEELEARIDRFDARLLGELASERPTLALLQTLPGVDLIGAAMLLIEIGTDMDVFGSADHLASWVGMCPGNNESAGKRKSGRTRKGNPYVRRLLCEFAHAASHTRSVFHAKFHALVIRRGYKRSIVALGHKLLRTIFFMLKRREPYRDSTADYEALSVQRNAPRWIKALTRFGFLSPAQA

SEQ ID NO: 264540 - protein, 397 aa, unidentified
MIAVGIDVSKSKSTVAILNGDGSIRAKPFDVHHVADELQALVDYIKRTSEPPPILMEPPSHYHYPLLKAFTEAELPVCLINPYQMKKYGDTELRKAKTDKRDSLRIAQYALEKSYSLIPYTPQDQKYEDLRFLSRQYSQRISTLTVAKVQLLSLLDETMPGITTILPLKSRDPDNCVLLRFIKRFKSFDVIRKMGKTRFLDSYQVLVKKTKDRFAGSKGLAIYELVLNSVTTRGENPLSAMTQDQCVDLVSTSQKAADEINLQMRIIAETMPEYKVLRSMAGVGNRLGPIILGEIGDIRRFHSGKALNAYAGNDAPPYQSGQFESRNRHISKRGNPALRKACFEVMQALKLTKPQDDPVYLFLLKKEQEGKPYNVAKMAAVNKFLRIYYARAMELYK

SEQ ID NO: 264541 - protein, 358 aa, unidentified
MQRNKISFKGQKIFVGIDVHAKNWEVAIAPEVGIAKRHSQKPSAKELFDFLKKNYPDGEYLAVYESGFSGFSTYYALKEVGIDCMVIHAADVPTTQYEEVMKTDRVDAVKLARSLKAGLLKGNYVPEKQYIDDRSVVRIRKTIQKQLSGYKSRVKHLLHCHGVEFPERFSKKQTHWSRAFITWLMKDVRLMSDTRASLDLLIRQVEVLRDTLLEATREIRKMSQTERYKHRHDLLRTIPGIGIIVTMCILTEVCDIKRFHNENEFAAYLGLIPTSHSSGEKTVHGEKTFRGNKQLGPMIIEAAWITIGKDAGLGTQYFQYKQRMEPQEAIVRIARKLSNIIFSVLKNDKEYAPYQTGN

SEQ ID NO: 264542 - protein, 362 aa, unidentified
MQKSTKTQTAQRNLRHFPAGSTVGLDIGDRWTHAAVIGPDGELVAEERIASKEPEVRRWLSQLPAAVVALEVGTHSRWMAKVGRECGHTVLVANPRQLRLIYGSDNKHDRLDAQKLARLARVDWGLLKPVQHRPEQEQADLARIAVRESLVGMRTQAVNLVRGMVKAAGGRVVECAPEAFPGKAKDQIPEALLSGLAPMLEQIQELNERIRECEEMIEHVAREQYPEVKLLLQVDGVGWLTALTFRLTIADAQRFERSRDVGCYVGLRPRRDQSGAQDPQLGITKAGNVRLRRMLVNCAHYILGPFGADSDLRRWGLKLAEQSRRGGPSSGRWWRWRGSWRFCCTSCGSAGKFMSRCGIAEK

SEQ ID NO: 264543 - protein, 347 aa, unidentified
MKKIVKQVAGIDVAKDELVVCLGRMYDDWSPELYAARTFPNTAKGFTACVDWVNKLTEDTLAVRYVMEATGVYHQSLAYWLDEAQLEVTIVLPNKISNYHRTLQTKTITDKTSSETIARFGLERKLDRWQRPKQLYKQLNQLTRERSQLIDERTVLKNQLHAEEAEAQPNKKSIERINKRIALLSSQEKEIMQEVRALIKTDTEMQQLVVLICTLPGVGLLTAATVLGETNGFDLIRNKRQLTSYGGLDVIEKQSGTSVKAKPRISKKGNRHLRKAMHLPALAAIRHDERFKAVFARLVARHGIKMKAAVAIQRKLLEMIYIIYKTGTPYDKNYLTKKESKLEDTVS

SEQ ID NO: 264544 - protein, 342 aa, unidentified
MNNIYIGMDLHKSTSSFCVMDKEGLILREQRIPTTVSEVTKFINSLGKKQSISVALEPVSQWYLYADLLEELGTDVHLANPRRLKAIATSSSKTDKIDAKVIADHLRTNHLPEAYHAPKEVRGWKELVRSRSALVKLRTETKNRIHAVLFKNGLESPVASLFTSRGIIWLKSLEMESHFKLSIEKYLSVIEYLTKEIKDMEKVVREKVSETKEMKLIKSIPGIGDILSATIMAEIGDIKRFKSPKQLQAYAGIVPWVHNSGDKQHNGRITKIGSAWLRYAVIESVVGMARTRRSSDLKDYFLKVKERRNYQTATVATARKLLAIIWSVLRNDREFIARYPAI

SEQ ID NO: 264545 - protein, 401 aa, unidentified
MESPIVSIDVSNGNSHYMCFIKNNKRFGKVKKIDHDIEGFKRLLEDIQKLEAETNEKVCAVFEATGVYTKPLERFLSKNSIKTYIINPLESARKRKEEIHNKKTDKLDPISISKVYYDKEKMMELKKKDETYNWLRKKNRLYEDQLNHLRKYKVTFQNQLSICFPGYLDLFKDGYSDIPMTILKKYPHPDLLKNKKAETVARYLEKNTCHTHKVSLEYALKIIEFAKKTYPGCEKDDVEVEIFKILLDKVIETQRECEKTLNEMITVASTLEEYRYILSIDGIGTNLAARIIAEIGDIEEFKSREALVAYAGLDPHIYQSGDQDGKHLKISKKGNKYLRCLLFLAVGCSIRGAKDNPVNRFYQKKKQQSNPLNSKAAKTACTAKLLKIIYGICKNKTTYER

SEQ ID NO: 264546 - protein, 323 aa, unidentified
MVYAAIDIHKHAFQAAVLDPETGVVVEERFAADRGSLARWAEPWRGRVAAVAIEATTGWRWVWRELVDRGFEVRLAEPVQTRDRLDARWLARLLAKEMLPESWIPPAQIQELRDRTRLRKALAEERRRWGQRLHAYLLHEGWPCSRSNLLRPPGLRWAAALQLSEHARLQVDSLLSVMAALEAQLDTVDAELRRFARADERCRALQSIYGIGPILACHLLAEIGEARRFRRAEQITRLAGLDPVVDESGETRRRGHLAKAGSPHLRWALVEAAVHAHRTTAPDLALYQATRARRDTTVARLTIARKIGKRAFHALRELELTTT

SEQ ID NO: 264547 - protein, 417 aa, unidentified
MFKIFRKNCCGLDVHKTWIYACIGVTDTNGLTEYKQARFSSFSKGLRELAVWLTKYNCYEVCMESSGKYWIPVFNILEKTCFVTLAHPKYTKPQKGNKTDRKDAKWICDLFMCDMIKPSFIPSFEIRQLRDLIRYRAKLTNMMTGEKNRALNCLTVSNLKLDDVFSDVFGKSSRSITNYMLEHPGETFDVAPFVDSRCKTPVEEIQAAVDGAISPEQAVKLRQCLTHIDELEAHRNEIEQELLLIAEPFAAVLDFLYTIPGLDKNPMTAIAILSEIGPDMSVFPSSKNLVSWAGCCPRNDQSAGKVKSTRISRAGCYLKPLLVQIANALLKSKKHPEFKERYHRIKSHRGHKKAIIAVCKMLLTAIWNVLSKLEPYNPKGFLEHHPVNESKVLTKSQALDLFRKRGYTIIDDTVVNS

SEQ ID NO: 264548 - protein, 352 aa, unidentified
MSIIAFDSHKRYTWARVEDENGKNVQECRIEHQRGNIVTFLRRQQPGSAVAIETIGNWYWIVDEIEKAGMRPVLVHAGKAKLMMCCINKTDKLDAKGLNMLQRVGRLPTVWIPPADIRDKRELPRVRMVFGVGRTRLKNRIHSVLDKYGLQDEFEDISDIFGVKGIQRLNRVIEQLPEQTYCTTVLLLEHLEQTQQKIDCIEGRMKELFEETPQSILVETLPGVGFILAVVIIQEVGDIGRFRSAGCLASYCGATPRVHASGGKVRYGRLRPDTNHYLKWAFSEAGNSVALNSKRLPDRHVSQLYNRIRHRRNHGKAIGAVARHLAEATYWMLTKGEAYRERGLLEVSSTGA

SEQ ID NO: 264549 - protein, 403 aa, unidentified
MEAFAGIDWASEENALCVVDEGGRSLAGELYANDEAGIRELVARMRALGVSRVAIERPDGLLVERLLEAGLCVLPVHPNKLKATRSRYEAAGGKSDSFDAFCLAELARTDSHRLRRLRPDSDETKALRALTRTREDLVGARVRLANELRAQLDAFWPGAARVFADVDSPIALAFLERYPAPADARGLGEKRVAGFLARNRYPGRRSAGELLDRLRSAPAGRAGALEAEARRAAVLGLVAALRPIVSQIRELTSQIAHAVRAHPDGEIFLPLFKDPKSVVTAARLVAEIGDDRSRYPTREALAADAGMAPVAKESGKRKVAAFRWACDKRLRDAVSCLADSTRKWHPWARQVYADAIARGLEHPHAIRVLGRAWLRVLWRCWQDGVPYDPTRHGNLNRLLTEGG

SEQ ID NO: 264550 - protein, 408 aa, unidentified
MKETGKRYIGLDVHKHYLMAIGVDGELNVVLPVRRVEFSYLEAWMEKTLTKQDDVVLEMTTNTWQLYDELCQHAGSVLVVHPPHVALITRSQVMNDKIAASILARLLAKGLLVGVWVPPQDIRELRGLVAQRKKMTGLATQAKNRLHAVLQRHHWLPPKANPFHEGQKKWWLALPMGSLEKVNVQSDLETLQFAENQLQQLTSMMAEIANQDEEVTRLLQLPGFGVVTAVTVWAAIGDIQRFADAQHLVGYAGLGTKVHDSGMTSRSGRITKAGRRDLRVVLIEAAQVAANSHPHWKAELARLQARLGRNKAIVAIARKLLVAVWYILAQHKTDRFAQPEAIAQKLLKFAYQLGKENRPAGQSAAQFVRQRLDALQLGQELTRIAWGSKKPIPLPPSTKKVSDVPNTK

SEQ ID NO: 264551 - protein, 359 aa, unidentified
MGSIALQRADVIVGVDTHKAEHVGFAIDGLGGDLGDLQVLAVPSGYAELLAWADSFGPVHAFGVEGTGSYGSGLAKFLRRHGRKVIECSRPPRAGERRGNGKSDAIDAEHAARQVLAGKATTTPKLADGAIEALRLLKIARDSAVKVHSQSIITLKAVLVTATDDLRADLEPLTDHRLVVACAALDATGDLADPEVAMRHTLRSLARRWLEVHEEIKIHTAALKRLTRAVAPDLVDAFGIGFDTAAEMLVTAGDNNDRIRSDAALAKLCGVCPIPASSGQTSGRLRLNRGGNRQANAALYRVVIVRMRWHPPTIAYVTRRTAEGLSKKDIIRCLKRYVAREIYNLLPPVTTTREEPLAA

SEQ ID NO: 264552 - protein, 411 aa, unidentified
MRLFAGDDWAEDHHDVELMDAAGRVLAKRRLPEGVAGMARLHELIGQQLGEDAGDAEVVVGIETARGPWVAALIAAGYTVYAVNPLQASRYRERHGVSGAKSDGADAHMLTDMVRTDSHQLRAVAGDSADAEGIKVLARTHKTLIWERTRHIQRLRHQLREYFPAALEAFEDLAAPDVLELLGKAPDPGRAAKLTRAQVSAALKRARRRDIPGKATAILAALRSPQLGRPPAVTAAYAATIRSLIAVIATLNEQVKTLQGQVEEHFGQHPDAEIYLSQPGLGTVLGARVLGEFGDDPHRYADGKARKNYAATSPITRASGKRKVVAARFIHNDRLVDALNAQAFAALNASPGARALYDDLRARGIEHNDALRRLANRLVGILHGCLKTRTLYDEATAWSHREQTPQSDVAA

SEQ ID NO: 264553 - protein, 426 aa, unidentified
MICAAIERCAGIDVGKKFLAVCLMTGALDTEPRVERRRFGTITAELESLRDWLQTEAITHVVMESTGSYWKPVFNVLEGSLNVCLANPQEVKNRKGHKTDDKDGWWLAHLLRHAMIYPSFIPPRAIRELRDLTRRRKRLLSDATAEKNRVQKILEDANVKLGTVLTDVFGVSGQLMLDALLEGKAPPAEIAQFARQGARRKIPEIIRALEGHRMSDHHRQMIRYSLKHMTFLEAQIAEMDADIKAKIHEAGLDEASQLIQTVPGIQDRSAANILAETGADMKQFASAKHLNSWAGVCPGNNRSAGKNKSSHTTGGNPWLRSALTECAWAAAATKNCSLKDKFWRIAGRSGGHKAPALIAVAHLMLTLIYRTLETRQPFQDRKAPPLGEQQKQRMIRHHIRRLGKLGISIHRISSVPAGSQPTTSTD

SEQ ID NO: 264554 - protein, 459 aa, unidentified
MDTRIIGIDLAVTAAHKAVVLDQASNRFVTPVLTFRTDPADMDRLLAAARAGAAPDLRLVAVLEATAMSWFPVSAYLERQGVEVYRVNGQQVADLRKVYQRHAKSDRIDVRVLARLYVTHPEQLQRVFLPSGPQMALQRACRELNRQTRLIAASKQRLLATDQFAWLGLADIVPPYEAAARWLREHWYDPWRVCEAGETALANAWEAASPVQPADTAWIPAFCERARQVVALYDDAHRPDYALLQASVAREQTRLKTAEEQEHFLRLKVVRPLYRQLHPTRHLETLRGVGQDSAAVYIAFVGDILRFPSIHDFRGWSGMIPFSRQSGEAQARGLHITQAGPDLIKATAFMDANVARLYDPQIAAIYYDQMVNRGKHHLQAVCACATHLLDRIYVILKEERPYELRDVDGRPVTKRQARAICVAQYRVPDEIRRRNNVRQRKARAEERTERRYQRRHKNE

SEQ ID NO: 264555 - protein, 344 aa, unidentified
MVTTIGIDPHKATHTAVAIDGSEIVVGEFTIRADNDQTRKLIDWVGSVDGDGRVWAVEAATGLGHLLSQQLVATGETVIDVPPVLASRVRVLSSGRSDKNDENDARSVAVAALRRDGLVEVRREDDAAVLRMLAKRHRELTALRTQAVCRLHAMLAVLRPGGMGHRLSAKQASRMLGGIRGLDAVGEQRRQMAKAHLADVRRLDRDLKANKTQIRRAVAAADTSVTDIYGVGPVVAAFLVGYTPPIDRFTTADRYAAYNGTAPIEVSSRGKVRHRLSRRGNRTLNHAIHMIAVTQISHHTEGRVYYDKKLDEGKTNKEALRALKRRISDAVYRRLVADAQRHSN

SEQ ID NO: 264556 - protein, 429 aa, unidentified
MQPGDIDVWLGLDVGKSSHHACALDHDGDTILDTPVDQDEKQLRRTIAKLQRRGTVLVIVDQPNTIGSLPLTVARDMGARTAYLPGGAMRKAAQLLPGGSKTDRRDARVIASTALRMPETLRDCEPDDETIAALRLLSGWDEDTAHELTRTVNRLRGLLLHLHPALERALAGDRIKSDTALGLLEHYKGPDGLRRAGAARIREYARRHGLKGTAITDAVADAIAEQTVTVPGTRAAESLIPQLASDIRRLRDRRTDISRQVEELLADAPLLTVLTSMPGIAARTASQILLAIGGDISRFKDAAHLAAYAGIAPVTRQSGTSIHGERPARGGNKRLKNALFQTAFVAIRLDPESRAYYDRKRAEGKRHNAAVMCLARRRCNVIYSMLRNGTLYQPGGTHTTTTTPPRTETTPAHAPRPRQDTTHPRIRRT

SEQ ID NO: 264557 - protein, 355 aa, unidentified
MTSIQYIGMDVHKESISIAVMNAAGKIVMECVIETKASIILQFVHGLRGDLHVTFEEGTWAAWLYDLLKPHVTEVVVCNPRKIALLKDGSKSDRIDARKLAEQLYMKKLKPVYHGEHGLRTLKELARSYLTITKDLTRVMNRLKALYRSWGIPCAGNEVYAPRHRSEWLSKITEAGVRRRAEHYYQQLDVLRLLRQEVRRDLMVESKKHKAWKLLRQIPGIGPIRAALLVALIQTPHRFRTKRHLWTYSGLGLETHDSAQYRVVEGQLQRSKKPVTLRGLNENHNHDLKDIFKGAAMRASTAAGPLRDFYEALLAKGRKPTMARLTLARKIAAITLIVWKKEVRFDANYLKQQAA

SEQ ID NO: 264558 - protein, 356 aa, unidentified
MSQKSSNAIAVVGIDIGKNSFHVVGHDRRGAIVLRQKWSRGQVEARFANLPPCLIGMEACVGAHHLSRKLQRLGHNARLMPAKYVRPYSKGQKNDFRDAEAIAEAVQRPTMKFVATKTADQLDLQALHRVRERRVSQRTGIINQIRAFLLERGIAVRQGLRFLRTELPGILATRSDVLSPRMLRLVEELAGDWRQLDARIEGLSGEIETRAHQDQHCERLMTVPGIGPIISSAMVAAIGTGDVFSRGRDFGAWLGLVPKQISTGDRTILGSISRRGNRYLRALFVQAAWVVLVKLGPKHWERYGLKSWIEAAKKRLHHNVLAIALANKLARIAWAILNKGRAFACVNTDAMASRPT

SEQ ID NO: 264559 - protein, 458 aa, unidentified
MNKRKSKKSNGERFLPMMVVNSNAAGIDVGDKIHAVAVPMGRDDLTVRTFGTMSCDLKLIVEWLDKCGVDTVALESTGVYWKPLFSYLTQHGFEVYLVNARHVRNVTGKKNDQKDAEWLQQLHSCGLLKSSYLPEDEQDSLRALVRYRRTLTQDSSRCVLRMQKALELMNIKIHTVISDLVGKTGTAIVEAIIKGERNAENFLPFIDGRIKADHQSIIKSLEGNWRKEHLFMLEENYKCYQFYLQRVDACDSAIKEQLLKYSADQNDGEIIMEAAFAPDKPKERSKKINRNAPVFDVKKFLRDILGVDVLNIYGISDIGALEILAETGTDMSKWKNEKHFVSWLNLCPNNKISGGKLISSMLMKKKPNPASQAFRMAANATQRSDNWLGDFFRRMKSKGGNRYAIVATANKIATIYYKMVSGKLEFNPLDLKQYQEKRKSAKIAYLERKLTELKTQIA

SEQ ID NO: 264560 - protein, 355 aa, unidentified
MKQLCAGVDVSAASLEVAWRGKDGRIVRRTVRNDVTGHRALIKELRRAGSGAPVRVAMEATGIYGLDLAVALDGAEGVEVMVANPRVIANFGKALLQRSKTDVLDAETILMFVERMPFIAWHSPSAAALQLRAIARRIAALTKMASGEKTRRRHAAASEVIGTLLERSARQTAALLEREIAKLRKAALALIAADTQLARRMSLLTSIKGIGEVSAVQILAELMLLPADMTDRQWVAHAGLDPRLFESGSSVRARTRISKAGNHYLRASLYLPALVASRYEPNVKAFREHLSARGKRPKSIIVAVMRKLLHAIHAMFRNDALFDGTKFYRSTPARVAATSGIPPSAIFEGSSALSS

SEQ ID NO: 264561 - protein, 403 aa, unidentified
MNMNAVGIDVSKGKSMVAILRPFGEIVSTPFEVKHTVSGIRSLIEHIKAIDGESRIVMEHTGRYYEPLVRELSQADLFVSAVNPKLIKDFGDNSLRKVKSDKADAVKIARYTLDSWTELRQYSLMDEIRNQLKTMNRQFDFYMKHKTAMKNNLIGVLDQTYPGANTYFDSPAREDGSQKWVDFATTYWHVDCVRKLSLNAFINHYQKWCKRRKYNFSQSKAVEIYEASNEIVSVLPKDDLTKLIIKQAVEQLNMASQTVEQLRTMMNDAASKLPEYPVVMAMKGVGKSLGPQLMAEIGDVSRFTHKGAITAFAGVDPGVNESGSYEQKSVPASKRGSGTLRKTLFQVMDALIKTKPQDDPVYLFMDKKRSQGKPYYVYMTAGANKFLRIYYGRVKEYLSSLPK

SEQ ID NO: 264562 - protein, 401 aa, unidentified
MEKGITWVGIDAHKKTLAVAVMSDAHALDEFTIDNDERSIRKLVRRLEREARGGEIRVCYEAGTCGYALQRRLEVAGRVVCDVIAPSLIPRKPGERIKTDKRDARKLAELYRAGVLTTVSPPTPEQEAIRDLCRCRETVRADLGRCRHRLVKLLVRRGYVFRSTSRLWSEAHRRWLAAIKFESVVDQVVVAEYTLAIEQAERRLRALDAELEKAAQLPLYREHVAWLRCFRGVDTIVAMIFVAELHGVDRFESPRALAAYLGLVPSLYASGESATRGGITKTGNGHIRRALIQTAWHYRHHRAVVGPKLRARRQGQPERVVTIADEAQRRLTVRYRRLSERGKMPTKVVVAVARELVGFMWAALHEGAKASAAPRPSLAIKPLSKTAVGQRREARKEKRAI

SEQ ID NO: 264563 - protein, 332 aa, unidentified
MYYIGMDLHKQDLVMAVEDEHGPVGRVRRIACRDTGAIRAAVGRWRPFRAVVEASAGYRWLYDLVSRQGEMVLAHPLRLRAIATARAKTDKLDAALLARLLRANLIPAAYVPPERYQRLRDLTRTRARLSYGATLAKNQVHALLARANVHPPLKTLFGPRGRRYLAGLDLGLSGNLARDELLRRLEHYGREIAAFDAHLEAVASEFPQAEALQVLHGIGRYSALLVVAEIGEPERFRNARQVGAYAGLTARVHQSGKTEHRGNISKQGSRWLRWILVQAAIKLVRRDERLANFYQRVRRRAGRNVARVAVARKLAGICWVRLRRWHREQTAA

SEQ ID NO: 264564 - protein, 463 aa, unidentified
MRTIGIDLSVKGEHKAVIVDESGRFVSPLLRFRTEPASMTRLLELAQEGNADGQVQAVLEPTGMAWFPVAVFLSRHEVIVYLVNSQQVADLRKYFKKHAKSDRIDARVLAKLPLVDAEKLHRLELSDARTLACQRGCKQLERLMKQRTACQNRLIALDRFAWPGLEDAVFSDLFCPAARWFREHWYSPRRVQQAGAEAIRQKWLESGLDSKDSGEWTHYLVQLAEQILAIYGEEGVYLDYELLQAEASREQAYLAFVDEMHHRLLLKTVRPLYRQLHPSRNLETIPGVGQDGAAIYVSFIGNPRRFGSLRQLRGWSGMVPNSKQSADSQATGLKITQAGPSLIKKFAFLDAESARQSDPQIAAIYYNQMVQHGKHHVQAICTCSAHLLDRVGVVLREDRPYQLRDVDGTPISPERARRIIAERYTVPEDVRRRNRKATRRERTDARLEQRYKRGKAAPSGSGT

SEQ ID NO: 264565 - protein, 349 aa, unidentified
MTTLPQLFVGIDYHLKFSTVCVLTMDGELLFHENCESSAEYIDKYVRWRLECGQKVRLRAAVEACSGTAKLAEDLRQLGWEIELAHPATVARLRKNLDKSDKQDAHVLADLVRVGYLPRVYLAPERQRQLRSLVRYRQQLAKQRGQIKLRIRGLMREAHLCITGSSAWTIMWVTTLRERIDELGEERSWICERYLDELKHVKKQLCEAEKRLLPVARAAPGCDRLLAQPGIGLITAAMLLAEIGDFSRFRNGKQLSRYCGLAPVNCSSGERQRQSGIGKACNGDLRRILIEASHRLSRYVPRWRQMKQHLISQGKRRPVAAVAVANRWLRRLHFEMTRPADVVQEDVAV

SEQ ID NO: 264566 - protein, 325 aa, unidentified
MKCINVGIDVSKNKLDICLLGDNLEEYLTIINRKSSIKDFIDFLLEDHPNSSIYVGYEATSTYMIPLQEVLKEYPNIKSKMINPYYLHHFFKFQGIKEKTDKSDAYGIALFISKQPDEFFSEEKRHYRNIFQPYITALEHLKKHRVQLKNLMHSQKGLLDDDLKEQIRDIERKIKELEYEIEKRAKEKMRQEIPEYEDIQKKIEGVGFITLLYVLPYIADSYKTKSFKHFQSFFGLNPIRYESGISVKKNPKISKRGNANVRKILYMSTLSSLRCNKIIQEKFNRLINQGKKKKVALIACSAHLLRAIYKTFVHLKSPEICLKVT

SEQ ID NO: 264567 - protein, 348 aa, unidentified
MNLKRIGLDTSKAVFTLHGVDQDEKAVLRRNLRRAEMEAFFAKLPPTLVALEACGGSHHWGRRLASLGHTVQLIPPQYVKPFVKRGKNDRNDAEAISEAAARPGMPSVAVRSAEQQAEAIVLSARELLVRQRTQLVNAVRGHAAEFGIVAAKGTSQLPALLEVVAAGEAVPDAAKEMLAFLGGQVAQLDERIGELERRMKQQHKANPVSQLLAEVPGIGPIGALSLALTIDPGRFQSGRHFAAWLGLTPKEHSTGGRQRLGGISRAGNERLRQLLVLGATAVIQYAKPGSKTASAWLLALLERKPRKLAAVALANKMARIVWAMMATGEAYRGNKTIATQAAGAAVIA

SEQ ID NO: 264568 - protein, 366 aa, unidentified
MNYCGIDLHSNKFTCCFLHEEGSREKITFDVSVDGIEKFKSMVSSSTSVIIEASTNTFKFAESIKDLVNEIVIVNTYKMKLIPMSGKKTDKVDAEKLAIYLKMCSASGENLISPVYIPDDSIQDLRSLFTTHNLIKRHIGAIKNRIHALLKQHLQPFTKEYIFGKKTRALVRAININIVTDYQLNLLFDELEAKERLVEDIENRIKLEGAKYIKEIEILTSMTGISVITALAIIADIATVERFPNAKHFTSYLRTAPEVDSSNDSVIIKGTNKNGRKLSVTLISQSLNHFRDSNPRLKYWYNKKEEFHFKKGKLRMALCRKVLAEIYHMLDKQEYHYYRNVELHNKKMKEYYQFLEANGVVLKKTA

SEQ ID NO: 264569 - protein, 310 aa, unidentified
MSPDVVYLGVDVSSQSLDVHFLSQAFAEPNCPRGVRRLLKRICQHTTTVQVICEATGGYERALVAALHAQSIAVSVINPRLARDFARAKNQLAKTDRIDAAVLAAYGAAMRPAPTPPPDAATARLALLVSQRDCLVEERARHKTRLRQAVDAWLGSQIKRLITHLNAEILKLEALMRKTAAASTAFASKAARLDEVAGIDWRSALCLCAHFPELGTLKRGQAAALAGLAPFNRDSGKWRGQRRISGGRAPVRRTLYLASLTAARNNAVLKAFYQRLRRAGKPAKLALTAVARKLLVLLNAAVKNPQISLA

SEQ ID NO: 264570 - protein, 332 aa, unidentified
MSVYVGIDVHRKRSQVAVVDQDGAMLANRNVTNGVAPILSVIGGLPAGTPAAFEAAFGWGWLLELLEDYGFEPHMVHPLQCKAIASARLKNDKVDAAILAQLLRADLLPEAWIAPPEVRRLRALLRHRAQLVRLRQLLRNRIHAVLADHGHDRPAGYWSGPGREWLASLDLPAVSAEVTGDALALIDAVDAIIGRLDAEIRSHARFDPRVKILTGLPGVGPYTALVLLAEIGDITRFASARKLASWAGLTPTVRGSDRTVRHGHISKQGSAWVRWILCEAAQKAKRSPQFAARYQSIAKRRGTKIATTAIARKLLTRAYHLLTDASTAGAPS

SEQ ID NO: 264571 - protein, 335 aa, unidentified
MIKENFIYVGIDLHKETHTAVMIDCYNQKLGEITFPNRPADFPKLVTKVKKCNTDGKEVVYGLENAYGYGRALAVWLIDKGYLVKDVNTAISHRQAKHRGAMYRKSDSDDVEAIALATLNMLDKLPDACPNDAYWSLGQLVHRRDNIMKQRTRLVNQLHEQLCIAYPSYKSFFNDISRPTALYFWEHYPSKKYLKGKSVKDLRAELVPVSHNKCSTKTCEKILDAVASDKVKNNAYQDARDMVTLSIVSDLQHYDSQLTEVDKMLEQMYKMLGCTLTTIPGVNVITAVKILAEIGDIKRFANANKLAQFAGIAPLHLSSSGKGKDVATKQGNRRL

SEQ ID NO: 264572 - protein, 433 aa, unidentified
MEEAEDEPLFRERAVGIDIGKQTVMVTIRVPSETRKGGRAQETREFGTTRRQLLELADWLRSWGVERAGMESTSDYWKPVYFLLEQQGFDCVLYPASKVKALPGRPKTDKLDSVWLAKVTERGSLAGSFVPPEDIRRLRTCTRYRRRLTQARTAEKQRAEKLLEDAHLKLSSVISDIHGVSGRAMLAAVIAGERNPRVLAEMARGVMRRKIARLEEALDCSFFTPEHAFVLSMMLENIDHYSAQIAVLDEKIAALCEPYQRQIDQLDQIPGFGVKNAQDLLGEIGIDMTVFPTAGHLCSWARVAPRTKESGGKRKGGSATGKGNPYIGATLGEAAASAGRTQTFLAAKLRRLYRHMPKKKAQGAVMRTQLAIAHALLSDPEAGYRELGPGYYDQRAGTQRQARGHIRGLERLGYKVTIEPINPETGELTAKAC

SEQ ID NO: 264573 - protein, 365 aa, unidentified
MCYRIAAIDVHKKMLAVVVTDVAGEGEYQFERRRFGATPDELQQLAEWLIQQEVEEVVMESTAQYWKPVWAALERYWKPARQQREGATKMSGTLHLCQAKSNHGPRGRKNDFADAERMIKRLVAQELVLSFVPDPSQRLLRTVTRRRHQLTRAKVSFRNQLESLLEQGHLKLSSFVSDLLGVSARRMLQALAEGETDPAVLAAMADRGLRATPEQLRDALGASAQLNGVYRRLLKMALEELQIIETHIEQLDREAMELLGEHQEVVQRVAEVPGFGVDSAMQMIAEVGLQAATFHAPKKLCSWVGVCPGNEESAGESQSTRSPKGNRQMRRLLNQAAQSAVKTKGSVFEVTFSRLLPKLGYKQAA

SEQ ID NO: 264574 - protein, 310 aa, unidentified
MGKEVYVGIDVAAATLEVACHGSDETATFANDDEGIAALVSTVASWQASLVVLEATGGWELGAAVALAGAGLGVAIVNPRQMRDFAKATGRLAKTDKIDAFVIAHFAQAIRPKVRPLADEQARALSELVTRRRQLVDMLTQEKNRRHGASKPMRVHLQKHIDWLESELQAAEDELARKVRETPLWRDRDDLVQSVPGVGPVLSLTLLSELPELGTLGRKQIAALVGVAPLNCDSGKSHGKRRVWGGRASVRAVLYMATTAAVRCNPVLRDFFAKLTAAGKIYKVAITACMHKLLIILNAMVRDNRHWQAA

SEQ ID NO: 264575 - protein, 349 aa, unidentified
MKKLSKMPKQVGETIGIDLGDKVSRYCIVDPNGDVVEEGSFRNQASSIEKHFAGEPRRIALEAGAQSAWISRELKGLGHEVIVANPRQLKWITSSDTKNDLGDARKLALLARADVRLLAPVEHRTAEQQTELAVIRARDAILRARTLLINSARSIAKGFGLRLPKSITNTFGRRAIDALPEFLRTALTGLLEQIDAISREITGYDQKISELAEQHPELARLESIPGVGRLTAMTFVLTLGRAERFAHSRDVAGFLGLRPKQRQSGARDPQLGISKSGDPYMRKLLVQCAHHILGHYGKDSALRQWGLAKGEGGKKATLRAIVAVARKLSVLLHRLWVSGEFYKPFPKMV

SEQ ID NO: 264576 - protein, 449 aa, unidentified
MREPQEIEDEEHEQTWERVAAVDVAKASGTVCTRVAHPSRPGRRLTKVWEVPATTGAISELAGQLVGLGIQKVTVESTSDYWRPFLYLLQAGGLSVQLVNAREVKNVPGRPKTDRLDAVWLAKLTERGMLRPSFVPPAEIRRLRDYTRLRADLTEERARHYQRLEKLLEDALIKVSSVASKLDGLSVRDMLEALIAGERDPRVLAGLARGKLKAKHGALAEALAGRFDDHHAELARMLLDQIDALSGQIGTLTARIEALLAAIPAAQGVDADGTTGPGAGSGPDAVVLPAVARLDEVTGIGRGTAQVVIAELGLDMGVFPTPGQLVSWAKLSPRTLQSGAKTRGGKTGRGNPYLKGVLGEAAAAAAKTDTFLGERYRRLVKRRGKRKALVAIARSILVIVWHLLADPTARYADLGAGYYASRIDKDKRARNHIRQLQALGFTVTLTPAA

SEQ ID NO: 264577 - protein, 417 aa, unidentified
MTPDEKQAYARQFPVHVGVDTAKQFHVLVAQGPDGRRSKPFKVIVCRAGFAATHAHLQDLFPGLTPAQMLVGLEFAGHHGFTFARFLADRGYPVVNVLPAHTNRSKELEDNSPLKTDAKDAAQIAKLVGMGIFVRFPFLTTPYVELRLLSVQRHRLTVEATRFRNRLQGVLDLAWPEFLGQFSGLHKRTPLAILARWPLPQEFAAATPQAVWRHIHAASRGHVSKERVATLIASAKETIALTQATPERRLEITKLLARWALVREQLAVVEARIVALVDQCPEARVLLSVPEISAACAATIVAELGTPADFQHPRQVLKLAGMNLTGRQSGQTEGRRRQSKRGRPMLRRQLFLLAGRWCQPRGLYRPEYEAMRVRGIPGTKAVCALARKLVPLLLRIMQTGEPFDEGRWRGNRHQVAA

SEQ ID NO: 264578 - protein, 339 aa, unidentified
MRKISTVGVDLAKGVFQVHGVDESGEVVVRQALRRSKVLAWFTCLAPCLVGMEACATAHYWARELGKLGHDVRLIPPAYAKAYVRRNKNDPADAAAICEAVGRPSMRFVAIKTEQQQAMTGLHRVRDLLMKQHTMLINQLRGLMAEFGIVAPKGVPHVEELVAILADSDDRRIPTPLRDGLRATVALLGTIDAKLEDIDRQLVAIGRGDATYRHLITAPGYGPIVASAISAMVVDPSAFRSARDFAASLGLVPRQDGTGGKLKLGPISKRGNGYLRRLLVNGAMAVLRGKRAKHDPWLVKLLASKPRKVAAVALANKMARIGWALMMRQEDFRRPPAAA

SEQ ID NO: 264579 - protein, 422 aa, unidentified
MISLEWLEPVVGIDVAKNKSDISILGPDNVQWGKTLTVRHSYSELSRFLIYLGEVEKHFGHKPVLVCEATGHYHRVLLHFFSRKGFKMVILNPIQSASTKNINIRKVKSDQIDSLRIAYVYRLKQFRPVIDVSSEILGLKEICHHHTKLVELLTTIKNQTLAILDQFMPGYQGIFYDTFGHASLRILLRFPSPEDILTAGLEELMLILKTCPGLSLNRMQAKAEALLQMATESLAMFNSSSIFPSILLSNIKLIFAINEQIRESEVQIEKLAQSLPDYHLLRTIPGLGPTNATQILCEIGSIHRFQSPKQFVAFCGIDPSVKRSGQFNGTRNAMSKRGSPMLRKALYMAALKAICQQKDGSKVNPVLFEYYQKKCKGKPKKVALGAVMHKMANIIFAVLRDQKPFELRLPEEHRKLMLQKAV

SEQ ID NO: 264580 - protein, 362 aa, unidentified
MTSSPSPTPGIVAIGVDTHKDVHVAVALDWRGGRLGDLRISTTHSGYQELLEWSLLFSSGSLGQITFGIEGTGSYGAGLSRYLQAAGAMVREVNRPDKTARHRLGKSDEIDADLAARALLSGSATNVPKSGEGVVEMLRMLKSTRDSATEARVKAINQIKAILVTAPDALRDQLRELSNPLLVRACSRLQSMEMASPLAAAIRSLRLLGRRCLWLTEEIEQLSHDLDALTLQAAPQLRELHGVGVDAASTLLIAAGDNPERIRSESAFAALCGVNPLPASSGKTNRHRLNRGGNRKANCALWRIVLVRLRWHEATKNYMERRTLEGKGKREIIRCLKRYVAREIYKVLLAEIGMPGAKQAPC

SEQ ID NO: 264581 - protein, 426 aa, unidentified
MRYFGVDVHLEFCEVAVAEGGKVSQVGRIASTPEAIREFAAGLGSEDQVALDASGSVMAIARILRESNVGRVVVSDAAQTRAISHARVKSDRFDAAMLARLLSSGMLSEVWVPDEATLALRRRVARRAALVRARTRTKNQVHGVVMRCLLGRPPVSDLFGRKGRVWLSEQQLPEEEAETVQGCLRQIDFLNGEIAQLDQKIAEQALAWPGLCRLLTIPGVDIGTAAAVIAAVGDISRFPSAGQLVAYLGLDPKVRQSGSEPARYGHISKRGNAQARSMLVEAAWIAIRSPGPLRAFGERVRARRGAQVAAVAVARKLVVLCWQLLSKDEDYAFARPSLTRQKTRRLELTAGASHLPRRHDGLTVSPTTGQRAAERELQAQAELAYRRLVADWRAAAPKKDGAGATPGRASSHRPSKGKAARQATSP

SEQ ID NO: 264582 - protein, 343 aa, unidentified
MDHFAGLDVSVKETSVCIVDDTGRIVLEVKVASEPEALLPVLKSNAYHFKRIGLEAGPLSQWLFSALAEAGLPVICVETRHMRAVLKAQINKTDRNDARGMAQMMRVGLYRPVHVKTLRSQKLRMLLTHRKLLQSKAIAIENDLRATLRNFGLKVGMVGKVKFEARIKELVENLPDLGLLVEPLLIVRRALREQIAILHRRLLAIVRDDEVCRRLMTVPGVGPVVALTYRATVDVPARFQNSKAVGAVFGLTPAKYQSGEVNRTGAISRCGDNMMRTMLYEAAQVMLLRSAKWSWLKAWAMNIARHRGVKKAIVALARRLAVIMHRIWVDGTEFRWTREVAAA

SEQ ID NO: 264583 - protein, 370 aa, unidentified
MKELSKKRVPTSDSRKGRSSVPRRPTVVGIDVSDKHLQVCEIDADDVVPGGRFVNTESKIRQQFEGKDPRRIIIEMGSNTRWIAELLKSLGHEVLIVDPRRIKLISGSLYKDDKVDALTLALLGTEAPRLLKTVPLRDLEHQKALTLVRARCCAVTGRTRVVNSIRGMLKPYGYRIPKSATSTLVTYLSENVDREILRLIAPLAELLETFDEQIAHYDREAKVLLPKLAPEAVRMCDIPGVGPISALYFAALIGNPQRFEKARDVGAYLGLCRRRNDSGDYKSELRITKAGDRYMRALLVNCAAHIIGPFGKDSDLRTWGLKRMGGGTKVEKRKAKVALARKLSVIMLTLWKTGQKYDRFHRPQDVAKAA

SEQ ID NO: 264584 - protein, 424 aa, unidentified
MKFKMQDKQNQLIERISDNHLVVGVDIAQQLHVARAVNFRGIVVGDPLAFENNEDGFASLLKWMDKLQKLNKLEAAIVGMEPTGHYWINLSKWLFKQGIEVVTVNPHLVKRNKENRDNTQSKSDKKDALVIADMVKNGYYAFVRNTSESFEILRVLMSNRDVVVKRLVGTINQLNRWVDIVFPELRQVFKDITGKGAIATLRLFPSPMELRSLKPHDVVSGWKSIMKRQPGLKKAQLLLQLGRKSVGTRQALEAYKFHLEQLLEEYDLAVLQLERVEQEVKDVLKQIPFAKKLLAIKGISEISLAGILGEAGDLSGFSHGNSLLRHAGLHLAEASSGKWKGQIVISKRGRSRLRRFLYLATMSLVMNNTEFRAIHTHNVKVKKMKKMKSIMKLVGKLARIFVGLARRNESYCADKVQPITELVA

SEQ ID NO: 264585 - protein, 341 aa, unidentified
MGEVSTIGLDLAKTIFQAHGADASGAVVFRKKLRREQVLAFFASQPRCLVAMEACAGGHYWAREIGALGHETRLIPPAYVKPFVKRQKNDMADAEAICEAAQRPTMRFVIPKSAEAQAAGTVFRTRDLLVRQRTQLINALRGHLAEFGMVVRQGAENAPKLVELVMDPTSDLPQEARLVLETLAQTLQLLQTKIAVLDVEITRRAKTNVLAKRLMTIPGVGAVIATALVALAPAPQTFRRGRDFAAWLGLTPLQYSSGGKERLGRTSKMGERTLRRLLIIGASSAAKAAAIKGAPIDTWLGRMLSRKPRMLVVVALANKMARIAWALMAHGGTYRAPVAAA

SEQ ID NO: 264586 - protein, 362 aa, unidentified
MRIIGCDLHARQQTVAMLDTTTGEVLSMTLKHEGNNVREFYSSLPRPVRVGIEATGSMQWFVNLMEELGIECQVGHPAQIRAAEPRKQKHDRRDADLILKLLVENRFPAIWLPSQELQDLRALLRHRHQWVRMRTRIQNALQSIALANGLRRGTALWSQDGQHTIAALPLAPHTAYRRSELQAMYAKFEAEIEKLNQRVEEQACGRVGARLLMTHPGVGPVTALATEVFLGDPARFADSKAVASYVGMIPREYSSGARQRLGGLSKQGNPLLRFLWGEAGAHAVRRDPELGRFYRRKLNQKGFGKASVAVARKLGIRLWIMLRDQIEYNEFCRRGQKQQNGSEACAGMPETRNGAKCHRPVD

SEQ ID NO: 264587 - protein, 382 aa, unidentified
MRHGGILLEANDSEGESMKKNTTTNQYVPTDVLKCTVIAVDLAKRVFQVAGQDAAGLTVYEERINSRESFHAFLRKLPTSVTVLVETGPGAQAWAQLLKTQGNPVRILPAQHVANHRSGPKNDRNDALAILRAGRDSSISSVPVKSAAALAMQALHRVRQGYVRRRTAMSNQMRGLLLEHGLAMAQGDSAFSQGVPRILQDATQPLPDMLRELIDELLGEWSQLGERINVLTGRLEAAAKNDETAKRLMTVRGIGPIISTAVIAKQTEPERFANARQFAAYFGLVPKQNSSGEKVRLGKMSKHGDAYLRSLAIQGAHAVLRQVKANSEDPDDRRLQRWVSRLGRKEAAVRLANRNLRIIWVLLQNDQTYRRQVNNDLEKAMS

SEQ ID NO: 264588 - protein, 410 aa, unidentified
MTQSTTKTDILHTSQALYIAMDLGRDSWQLAISDDRRAKREVSVKRADVDDAKAEFLQEVEKSREKFGLAPDAPVFALYEAGRDGFWIARWLQACGISCIVVDPCSILVDRKAKQRKNDAIDARALLDLLVRHVTGDREVQTVPMPPADVEDARELGRLITKLGQTRRILTSRLRSILWRMGIDVAYREDLPKEIPLMRTGDDRPLGVVTRMELETLCGQIAGLDRDIHRLEDERVAQMKKPETLPQQQAQQLERLVGIGPIGAWTLAHEVFGWRTFANGKKLGSYVGLAPTPHCSGQMQREQGINKAGPGRIRALMVQLGWLWLHHQPQSGLAKWYKERFGPTAKRSRRVGIIAVARKLLIALWKFVTTGEIPDGAELKAASHKITSPRQPGSLTGRRRVNGPQLKQAA

SEQ ID NO: 264589 - protein, 413 aa, unidentified
MDTLFRRCAGLDVHKKNVVVCARIITDDGKLQEQFRTFSTMTSSLLGLKGWLTSLGVTHVAMESTGVYWKPVFNILEGAFEEVLLVNPQHIKNVPGRKTDVKDCQWIAQLLQHGLLRGSFVPARPQRELRDLTRQRAQLINEQTRVVNRLHKVLEDANIKLGSVASDILGVSGRDMLDHLARGEEDPQVLAQLARKSLRKKIPQLEEALRGHFTPHHRFQLKMLLDHLEFLERQIGELSVRIEECTRPFVTSEQKERLDGIPGVNATTIEAVVAEIGSNMDQFPTHQHLASWAGLCPGNHASAGKRKGGKTTKGNPWLRRALAEAAWAAARTKDTYLAAFYRRLAARRGAKRALVAVSHALLIVIYHMLKHGLPYQDLGPDYFDKLHSAGMERYLVRRLERLGYQVSLRPAAA

SEQ ID NO: 264590 - protein, 420 aa, unidentified
MKNGNTKKVRRLNEKTLLVTVDMGMIRHTGYCRCPNGMEVKPFDFANNRKGFEEFWFRVLQTQKSHNLQEIVVGFESTGAYAEPLLHFLRRKGIKLVQVNPLHTKRLKELQGNSPGKTDHKDPKVIADIIELGHALTVVIPEGTSAELRRLTSARERSMQRRTVLLNQLHVLIFILFPEFLQVLKNTGSKTSQYLLKHCPTPEGIIEKGVVALARILKTVSRGNMGNERAEALYKAAKETVGVKEGQKSIVFEITEIVFAIEATERFIATVEAEMKKYLKEIPYSLSILSIKGIGTITTAGLIGEIGDFGQFNTISEVMKQAGLDLYEISSGKHKGKKRISKRGRHLLRKILFFAAINTVRKGGMMHEHYQKYLQRGMLRMKALIAIARKLLRIIFAIVRDNSVFVSDFSGTQYQLKEAA

SEQ ID NO: 264591 - protein, 456 aa, unidentified
MLRIIGIDLAVSATHKAIILDPASNQFIGKQMTFRARPAELERLLARAKVGAEETVKVVAVLEATGMAWYPVGVYLHQRGVAVYRVNGRQTKDLRQVYWQHAGSDRIDSRVLAHLYQVAPDRLSLWQPPSGELLALQRSCREFVRWREMTVAIQNRLQAYDHWAWNGLSKLVPSAARDWMRRNWYNPWRVQQAGVAPLQAEWQTSPAAEKCGTVWIAAWVERAEEMTRLFGSETMVGYEALQTTISRNLDLLAQSQSMQQQLSQQEIHPRYQQLFPDRWLETIPGVGADSAAIYMAFIQTLDRFPSIEQFRKWTGMVPKSHQSGQAESKGLSLTQAGPNIVKATLYINAQVARQWDVQMAAIYHTQMVTYGKHHTQAVCACASHLASRIYALLSQRRPYQLRDLDNQPISPQLSRQLCLTRYHVPDAVRQRNNVRHRRQRAAQRTEQRYLRRQQLA

SEQ ID NO: 264592 - protein, 346 aa, unidentified
MEYIALDVHKKYTWARVENTEGEKLYESRLQHAHGSIKNFISRWERQSPVAVETVGNWYWIVDEIEEGGGKPQLVNARLAKLMMGSVNKSDKLDAKGMNRLQRTGTLPTVWIPPSSVRDARELPRTRMVFSRQRTQLKNRVHATLAKYGFVVEEASDAFGKKGRAIVEGILVKLPPYTEQAVRRVLGQLDHVNENLKVIEAQMMEAFAPWAETNLLKSLPGVGDILAVVIWTEIGTMERFARAEQFASYCGLVAREHSSGGKFHYGAVRRDVNVYLKWAFVEAANSSILNRERCGYDHISRLYQRIKSRRGHGKAKVAVARHLSEASFWMLKKGESYREPVSSTQR

SEQ ID NO: 264593 - protein, 408 aa, unidentified
MQVYIGIDWSEDKHDVVFMNQVGVDVARLTIPHSLDGFVQLDAARRKLGLAQDECTLGLETAHNLIIEYLWSQAYQQVYVIPPSVVKSNRNRFRQSGARDDQSDGYLLADILRTDRGRLQPWHPDSLLTRQMRAKVSWIHHLTRASTRLSNRLRAVLLRYYPAALQVFSDLGTQIALEFIRTYPTPQAAARLTLPEFVGFVQQQGYSHPKKLPSRYAQLKGDYPEASLETVMIYQGEAVQLASLLLQMTRTKLDALRELQALFRQHPDYPVFSSLPGAGDLLEPALLVKFGDDRARFPTPASVQALAGTCPVTDKSGKRKVIRFRKACDREWRSLSQAWAIALVNSAKSPLAIAYFEQIRPRCHNRHHAYRCVANRWLAIAWKLWQTHQPYDEAYHFQQRMARSKAKI

SEQ ID NO: 264594 - protein, 325 aa, unidentified
MKHERIVSVGVDVCKSTLDVAYLTETNTAIMASYDNTVEGITTCIEELKTQKTAKTVPCVIESTGNVHFLVALMVSRAGYSVKCINPLITKKYQRSSIRNAKSDRVDARRLAEIGILEHDLRPYTATQESLATTKIIASLAKCETLKQQLTMHKRQLEESLTAIGTSLDYTNYDAALEAITKQIDALKAQLIAEAPNEATELAAHTKGLSTEQASILLTALADKQFDSRDQLVAFVGLDVMSRKSGAWVGKQKLSKRGNAYLRKILYRIAWGLKMHNDTYSAYYTHLREKGHHYTTCLIAVARKFLRFLFAYYYKRSVSFPQAGV

SEQ ID NO: 264595 - protein, 307 aa, unidentified
MNKAVVYVGVDISKAYLDVAWTERSRRFANNKSGLNALMKWIRQSPVHLICEASGGYERGLLEAAEQNAIKLSLVQANRVRQYARAAGILAKTDKVDARVLCAFGTAMQPKPLASLSMQQKQLRELEAQRRHLSRMVVSEQNRLAQLKNKQLQRLTRSLLATLKRQMAAIDARIAAVIVQDQTLDEKAQKLTAIVGVGTRTAVLLLAQMPELGTLNRAQAAALAGLAPFNRDSGTLRGKRTIFGGRRALRCGLYMAALVAAHRNRILRDFYQRLRAKGKPHKVALTAVMRKLLLALNHTLKPTPSCA

SEQ ID NO: 264596 - protein, 340 aa, unidentified
MNVEYDGRRIVGIDLHRRRSVIVQQTEAGERLGTTRIDNDPFALAEQVAGWGEAPQVVLEATYGWYWAADVLAEAGAQVYLAHPLGVKGFAYRRVKNDERDAADLADLLRMGRLPEAWIAPPATRELRELVRHRAKLVALRSGLKASVHAVLAKCGLSVPVSDLFGVGGSRLLDQLRIPDVYAGRITSLRRLIDAFGFEIDTYTKLATTRLAAHPGYRAIQAIDGVGPVLGSVFVAEVGDPHRFPGPAQLCSWAGLTPRHYESDTKVRRGRITKQGSTLVRWAAVEAVQRVRSGHLGGVRARIGERRGANVAKVATARKLLTLVYYGLRDGHIRCLARPA

SEQ ID NO: 264597 - protein, 450 aa, unidentified
MEESKDDHDDGSVARVAAIDIAKATGMVCLRIPHDTIEGRRVQQVWTVASTTNAILELGDRLVCQGVQRVVMEATGSYWRPFFYLLEARGLECWLVNARDVKNVPGRPKTDKLDAVWLAKLAERGMVRASFVPPKPVRQLRDLTRTRTVFIQERTRHKHRVDKALQDAQIKLSDVVSDLFGLSGRAMLDALAAGERNPRALADLARGSLVKKKPALAEALTGQFEEHHGRLLGVLLGTVDHLTTQVQELDRLIADLMKQTTAPYDTGGPSDGDDTGGPSVRDGVTAQELAERLDAVPGIGPATAQIVLAEIGLDMSRFPTPEHLVSWAKLCPRTIQSGAKNTAGPAGKGNPWLKGALGEAANAAARTDTFLGARYRRIVKRRGHAKALVAVARSILVITWHLINDPDARYQELGTDWHQRHLNPARKTRDLVRQLQALGHHVTLAPTIVA

SEQ ID NO: 264598 - protein, 344 aa, unidentified
MMPHFVGLDVSQKMTAICVVDNAGRRLWRGQCPTAPEQIAAMVRRHAGDDSRIGIETGAMTPWLVHELRALGLEVICLDARHARAALKMQINKTDQNDAEGLAQIVRTGWFRSVHVKSFDSHRARALLGARAQLVGMTTRLSNHIRGVLKTFGLLPGAMRGLRFDRKVEVLLEERSDVAPIVRPMLVAWRQLREQISAFDKAIRVLVRSNSPCRLLMSVPGIGVLSALAYVSTVEDPARFSQSRSVGAHLGLTPRQYQSGDVDRSGRVSKCGDTLARPLLYEAAVVIMTRVKKASELKDWALAIAKRSGIGKARVALARKLSVILHSVWRSGKPFRWTEQAITG

SEQ ID NO: 264599 - protein, 362 aa, unidentified
MEYFAGLDVSIEETAICVVGDDGKVVLETEVPTEPELIAEALERFAGRLRRVGHEAGSISPWLHAGLTEMGLPAVCLETRHVRAALSAQRNKTDAADALGIAHIMRTGWFRQAHIKTEECYRTRLLLVQRRNLKRKFLDIENAIRHSLKVFGIRLGKVGRGSMAKAVREAVADDAMTAGLMDCMLRARAALWEEYLILHKLVTQLAMRDELCRRFMAIPGVGPVTALTFKSAIDDPARFRRSRNVAAYFGLTSRRWQSGSSIDVKGRISKAGDPDVRRALYEAASAMLTRFKGRDTIKTWGLKLAKTKCHAKARVAVARKLAIVMHAMWRDGTFYVGDPDAEGHEIDTAYAAKMQRLSYARS

SEQ ID NO: 264600 - protein, 370 aa, unidentified
MKKDTLFVGLDTDKKHIDVAVAEPLPRGEVRYWGRTANMPASVDRMVKKLGHGGRELVVCYEAGPCGYGLYRQLTGKRGVRCLVVAPSMTPQRPGDRVKTNRRDALKLAKLLRAEELTEVWVPDAAHEAMRDLVRARSSVVSALTRCRQHISSFLLRQGIPYAGKPWTNKHRAWLGTLKFEHAAHRLLLAELLLALDQAQARRDRLTDHIRELVPTWSLAWLVEALQALRGYDLINAAVMVAELGDPRRFAKPRQLMGFVGLNVSEASSGETVRRGRLTKTGNKRARKALIEAAWTYSRPAATTSKPAAARLPAAVQQIADKARHRLSRRYRHLVRRGKLKQVAIAAVARESLGFIWAITHAAAPLPAQS

SEQ ID NO: 264601 - protein, 391 aa, unidentified
MTYFIGLDLAKFKHDCFIMNEHGEIIRNSFSFTNDQPGFNTLRDVLNSLDPSQEKRIGLEATGHYGSNLKIFLEDNNFSFMEFNPILISRFSKATTLRRTKTDKIDAHLIALYLSTVDYKPYPIKSYHIRNLKSLCRARDSLVKERSLQLVKLTNVLDLIFPEFKPFFNGNLKSSTALYILENYSSVNKITNMNIDSYNKMKSKLRKTISYARFSELKMLARNTIGNNDKILNFELRLYLELFKELDSKISDIESLILEEYLIVNSHIHSIPGIGMISAAGIYSEIGNFSRFNNPDQLLAFAGLDPSRCQSGESDFKGHMVKHGSSFLRQYLMNVAETSLIYNPKLYEYYLKKRNEGKPHRVALSHVAKRLVRIIFYLEKNNSDFDENKMR

SEQ ID NO: 264602 - protein, 311 aa, unidentified
MYYIGIDVSKKDLSVFDGKDLKFINQEGLKSFKKYLKKKYSLSEIVIIFEPTGIYSQYLKEFCAENSIKAYIINPKRSHNFARSLGIRPKTDKIDARTLYQFHKLIDLKDIKIPEIDQQAKTLSSYLVSYEFAVKQRVALSNHLESLRDKKLIALIKKELKRAQELEDKIFNDIKVYVSKNQNLKEDYQRLLTISGVGEKTAIALLALFKTYPGTNRAQITALVGLDPTRRESGTSVKGKVKISKNGKGIYRKVFYLPTICATVHNQKIRIFYQRLLTNHKVKKLAIIASMRKILLIAHAMYRDKTEYVAA

SEQ ID NO: 264603 - protein, 314 aa, unidentified
MVAQTVQDIGIDVAKRWLDVAVFQTQEQAHFDNDKDGWAKLVRWLRGRTVRAIGMEPSGGYERGVAKALRSADLPARNVNPHKLRHYARALGRLAKNDRIDALLIARYTAELPTRPVRCDPIAEQLADLVVARRQLSDDKVSLANQLEQLREPMVRRIFTQRLHRIELDIALLAKRMAQIVASQPAFAAKDRLIQSFHGAGPILSHTILALAPEIGQASRREIAALVGLAPYDFDTGTFKGRRIIWGGRHALRRVVYMAALTASRSNPVLKAFHQRLIANGKQPKVALIAVARKIITILSAMIRNNQPWNPAQP

SEQ ID NO: 264604 - protein, 403 aa, unidentified
MKTIIGIDWSEKKHCVHAYNDAGAQLLRLEVAATVAGFRKLTQQVNKLNPEPANCLIAIETAHNLLVDYLHEMGYTLYILAPSLVSSNRGRQGSSGAKDDDRDAQLLAQILRTDLGQLIPWQPDGPLVRQIRTLLTWVDQLTKSIVRQRNRLRANLLRFYPQALDAFEKLQTQFSLRFLTAFPGPASLETLDFEQFAAFCQQQGYYEYERYPEIWNALRASPTCINQQLSPAFCQQVAWQAERLLAMLLQKRDLIAQVQPLFQQHPDTFIFASLPGAGKLLAPKLLVMFGDHRQRYPTRSWLPAIAGTAPVTVASGKSRYVKFRKACNHEYRQTAQQFAKCSIRESSWAATYFYRAIDRGMSKSHAYRCLANRWLHIIWSLWQHREAYDEAYHLRQVSMHRRV

SEQ ID NO: 264605 - protein, 340 aa, unidentified
MSAVYDGPQVVGLDLHRRRTVMARLAASTGELLEMARFSNDQLGEQIAKAGHNPQVVLEATYGWYWAADLLTEAGAEVHLAHPLAMKRFENRRVKNDEFDAYDLADTLWMGRLPEAWIAPPEVRARRELVRYRHKLVQVRTSFKDQVHAVLAHRGISIPASDIFGAGGLELLDQLTLPEPFAVKMASARRMIDELNGEVDRFDKLIRAACAADPGYRAIQQIPGVGPVLGAVFVAEIGDVQRFPDPHKLCCWAGLTPRLRASDTKVHRGKISKQGSRLVRWAAVEAIQRVRGDNLIGRTKSRVAANRGRNLGKVAAARKLLTCVYYGLRDGHIRCLPATR

SEQ ID NO: 264606 - protein, 504 aa, unidentified
MDETVWVGIDVGRHEHHAAAVDEAGVVLWSRRLPNDQPAIEALVDRVADMKLVVWAIDMTAPESALLRGVLAARRQHIRYVPGRVVHSMTGAFAGEGKTDARDAVVIAQTVRLRGDLATITVPDDVAIELDLLTGHRNELVAERTRGINRLRGLLTRIFPALERCFDYSTLTGLAFLTRFATPAAIAVASDEEIYDHLRGHGVRRPTIPKMITKARVAVAAQTVTLPGEATTALLLQQAAASLMALTRQIAELDKQITEVFRRHRHARILESVPGIGTRSGAEVVAITGGDLTSFGSAAKLAAYAGLAPVPHDSGNRRGTLRRPQRYHRGLRKVFYMAALNSSQRDGPSREFYQRKRREKRSHVHALIALAVLTREVGYAAGWWLSSECCVTAVVIVVMQPDRELCAAFGIAGVEPVVGPFVGQGAVKPFDLAVGLRPIRPGSTVDDRWPERAGEYMRLVAGTVVGQHFPHLDTALGEPLLGAQPELSGGLFAFIGQDLRVRQP

SEQ ID NO: 264607 - protein, 412 aa, unidentified
MTSISFGWYVGIDWATQAHQVTVLDAERRVLGERSVAHTGSALAELASWLTEICGGEVDRVAVAIEIPRGTVVETLLERGFAVFALNPKQLDRFRDRYTVAGAKDDRRDAFVLAASLATDQPAFRRVRLDEPLVIRLRELSRLEAELHQEEGRLTNRLRDLLHRIYPQVLRLAPAADEPWVWELLELAPTPAAAQRLTRPALSKLLRAHRIRRLAADAVLAHLHAPPVSVAPGTVEAVSEHIELLLPRVRLVHAQRVRCLGRIERVLQAMAGDPPGQGEHRDVEILRSLPGVGRLVAATMLAEASQLLAQRDYHALRAQGGIAPVTRQSGTRARVDMRYHCNHRLRNALYHWGRVSAQCDLLSRQHYEALRRRGHSHGRAVRGLIDRLLVILMAMLRSQTVYDPTRRRAYAA

SEQ ID NO: 264608 - protein, 290 aa, unidentified
MSNKSTATVATMGIDIGKNSFHVVGLDERGAIVLRQKWSRAQVEARLANIPPCLIGMEACVGAHHLSRKLQAHGHDARLMPAKYVRPYSKGQKNDFRDAEAIAEAVQRPTMRFVATKTADQLDLQALHRVRVDERIQGLSDEIEAVAHQDLACERLMTVPGIGPIISSAMVAAIGNGAVFTKGRDFGAWLGLVPKQISTGDRTILGAISRRGNRYLRALFVQAAWVVLIRIKDWDRYGLKAWIDAAKKRLHHNVLAIALANKLARIAWAVLNRERNFECARTRATSPRPA

SEQ ID NO: 264609 - protein, 325 aa, unidentified
MEKVFIGIDVSKLTLDFYVKSNSLQQHYQIENNVKAIKKLLKPFQNNENTIIAMENTGRYNFALYEFLAGNNFSVFVVNPLHLKRSIGLLRGKNDKVDAQRICVFIEKNHMDLELWNPSNIDVQKIALLNTERRHRVKLKSGLLRQIQDLELLKNIADKEIIKLNQQLIKTIEKQIKVIEDKISLLIFSNQELKEQFNRMISIPGVGKVLATLMIIKTKGFSEVKSARKMACFAGVVPFEHRSGSSIYYKPRISTMADKELKKVLHLAALSTIRLKNDMAAYFNRKVNEGKNKMSVLNAVRNKIIHRIYAVIKNKSVYENCFVMS

SEQ ID NO: 264610 - protein, 413 aa, unidentified
MVKTASKGGLMDFYAGIDVSKFKHTVAVIDQNGEIRKRSFDISNSREGFDSLLNELGLLGQKEQIKIGMEATGHYMNCLVRCLISNGYQVQIYNPSLIARFRESEAVNLAKTDNLDAMLIAKYAATHPFASSPQLSYLIGEVRKITRAKYFLFGDKTACYNHLLRYLDEIFPEFVSFFKKNEDGSRKNMGRNLFESPTIRWLLSNYPSAPKMAKMRVETGEALRRMSKGAISFNRFNQLRELAKNSIGHSTEIDEQIIRNLVGQARMIDDEIDSLNELLEPLMEELDSPISTIPGIGINLAAMIIGEIGDISRFDNPEKLIKYAGLDVKIYQSGTINHKGHIRKRGSPILRYALALSVQKLRIHSPVFSEYYYSKLRQGKATNVAIIATTRKLIRVIWKMMTTNQVFENIKRD

SEQ ID NO: 264611 - protein, 337 aa, unidentified
MMYVGLDVHKQVCYGTVMDEKGKVTKQAKFTNAPEGLEEFMEGLDEALVAMEAGYCWQPLYDRLEETGCDVRLAHPLKVKAIAQAKVKTDKIDSETLAHRLRADLLPESYVPPRDIRELRDRVRRRAFLVGMRTMLKNRVQVELAKRGISTGVPLWTREGRALLDGLKLEAVDHVLPVMDALDRQIKEISWGMKRMCGEDPRACLLTTIPCVGYYLALLLVSEIGDVRRFLDSEKLCSYAGLVPRVRRSGGSTHHGGITREGSKWLRWGLSQAVHVHLRSETNLTRFYRRLAGKKPKQVAIMATARKMLKVVYWMLRNNEPYHPGPGVVDPVVGRGL

SEQ ID NO: 264612 - protein, 318 aa, unidentified
MNSPSMTVGIDVSKQRLDFARFPQGDTFSVAYTDTGLAKLLKRLRGWSPQIILLEASGGYEYGVVAALVAASLTPVLINPRQVRDFARALGILAKTDKIDAKVLAEFAFRVQPEPRLLPAAQQQELNHLLSRRRQLLEMIQMECNRREVSPFLRVRQSIDHNVDSLRRQLTDLEREINDFFNQSPLWVQQDALLRTVPGIGPQTVLSLQAWLPELGALNRHQIAALVGLAPFNRDSGVLRGRRMIRGGRHKVRQALYMATLSAVRYNPAIKALFDRLAGQSGKPGKVALVACMRKLLIILNAMVKNQTTWRPMTPLTS

SEQ ID NO: 264613 - protein, 346 aa, unidentified
MTIVETRAITGGVDTHADVHVAAALDPIGGLLGVQEFPATTAGYACLLGWLGGFGTIALVGIEGTGSYGAGLARHMATAGVRVVEVDRSDRQDRRRQGKSDPLDAVSAARAAQSGRARGAPKGRDGAVEAIRALMVARRSAAGERTRAINQARALILTGPDDLRARFTRHTPAALVTGLASLRPRPGDVTGYAVRIALRELGRRAQFLDGQLERLDELIVPLVTAHAPGLLTVYGLGPRTAALLLIAAGDHPGRLRGEAAWAHLCGVAPIPASSGKVTRHRHGPGGDRQANHALWRIVFTRLGSDPATRAYAERRTAEGKSKAEIIRCLKRYVAREVYRHLRPAAG

SEQ ID NO: 264614 - protein, 349 aa, unidentified
MDITTIGIDIAKRFFQIHGVNANGKTVLRKKLIRDQVLNFMSNLPKCLVGIEACGGSNYWAREITKLGHKVNLIAPQFVKPYVKTNKNDRADAEAICEAVSRPNMRFVAVKSTTQQDILSLHRVRERLVKNRTALANEIRGLLLEFGYIIPQGIHKITTKLTEILDEGSLTQISHQTFSDLKEEFIENDKKIKDIEKRLKEIANNLNMYQKLKSVPGLGLITATALIASLGNVTNFKNGRQLSAWLGLVPKQHSSGGKEQLLGISKRGDVYLRTLLIQGARSLLNAKFRYTTEEQRSNKDFSKFTAWMLILEEKRGHNRTVVAIANKLARVVFALLSNNYDYDENKVCI

SEQ ID NO: 264615 - protein, 403 aa, unidentified
MNAVGIDVSKGKSMVTILRPFGEIVSSPFEIKHTSSDIHSLIKLIHSIEGESRVVMEHTGRYYEALAHQLSAADLFVSAVNPKLVKDFNNDSLRKIKSDKADSVKIARYALDKWQSLEPYSITDELRAQLKVMNRQFHFYVKQKTAMKNNLIGLIDQTYPNANTYFNSPTRSDGSQKWVDFVSTYWHVDCIRKMSLNAFVEHYQNWCKRKKYAFNKSKAEEIYTKTKELVPVFPKNEITKHIIRQAIDQLNSTSVTVETIRTLMNETASKLPEYSIVMQFKGIGPSLGPQLMAEIGDVTRFTHKGALTAFAGVDPGVNESGSYAQKSVPTSKRGSSNLRKTLFQVMDVLIKTMPQDDPVYQFMDRKRTQGKPYYVYMTAGANKFLRIYYGRVKEYLSVLPDPN

SEQ ID NO: 264616 - protein, 403 aa, unidentified
MIYAGIDIAKSSHVIGATDERGRDAAKPMQFANSTAGFDRCAAYLDGLVESKSDLLVGMEATGHYWLPLFCRLQAEGYAVVVINPIRTDAMRRFKGSSRVKTDMIDCVLVAETLRCGDFEPSRLGDEAMIELRQLTRLHQELKESVADLKRQVIVALDQVFPEYDSIFSDTFGESSKAFLKRCPTPEECLAVRADSLARTLERASHGKLGREKADEIKGVARNSCGIDVATSAFSFQIKLLIEQIDFIEGQIAEVEVKIREGIEAVEPLILTIPGIGYTLGAQIVAEIGDVKRFHSAAAIVKYAGINPSISQSGQFSSEENHITKQGSPYLRRALYLAAMAQLQLKTPFYGYYAKKRADGKSHREALIAVSRKLVHVIYAVLSKQEPYDPEVTRNPELASRSE

SEQ ID NO: 264617 - protein, 429 aa, unidentified
MSGTETVQPELEFVAFVGIDWADQKHVWCLQEAGSRQREYGELEHKPETVEAWVGQLCRRFGQGPIAVAVEQVKGALVCMLRKYECLHLFPVPSTMSAAMRKALYPSGAKDDPRDADLLLDLLWQHRDRLRHLKPDDEGTRRVQNLVEERRKLVEEKTAQVNRLIGYWKIYFPQMLEWFARLDTKLVCEFLERWPSLEELQKVSPAELRKFFRQRQGRHHELTEDRIHGIVQAMPAIQDRAVIEAKGAVVQVIAQLLRSLLEGIATLDRKIAEAAGSHPDFFIFQSLPGAGAALAPRLLAALGSQRDRYGSAAEVQKHSGIAPVTETSGKKKWVHFRWACAKFLRQSFHEWAGHSIAQSMWARAYYQQQRERGQDHHAAVRALAFKWIRIVFRCWQDRVAYDENKYLAALAKRGSPLNSILLAATAATV

SEQ ID NO: 264618 - protein, 349 aa, unidentified
MVIIGADTHKRSHTVVAVDANGRSLGERTVAATPAGHLELRRWAERFVERGWALEDCRNLSRRLEADLLRAGERVVRVPPKLMAGARVGGREPGKSDPIDALAVARAALREPDLPTAQLDGPEREVRLLVDHREDLVAERTRIQNRLRWHLHELLPGSEPAPRSLDRRVVLDDLERRLSVESGTIARLAMELLGRVRELTAAINRLEREIAALVRPLAPSLLELTGCGSLTAAKLVGETAGASRFHSRAAFARHNGTAPVPVWSGNVTRHRLSRGGNRQLNAGIHRIAITQLQRPGAGRDYVEHRRAAGDTKTEAIRALRRRISDEVFRRLRHDEHESNRQPAGLLAAA

SEQ ID NO: 264619 - protein, 483 aa, unidentified
MIRSVGIDLSRSGVHQVRCLDEQARPCDSFSFDNTLEGLKKFEERVFSDGATPTIVFEPTGLAWIPMAVYLRACHPECLLVKARLQKVAALRRYLRSRAKSDRVDGMTLAKMPFIDAEQLDEAYLPPAEYHALQRLTRQRERLMKSITIRKNRIGSIINGYLPGLRQAFSNEWSDRARAFYRQRLNPFTVVRDGKRALETFLATVKSRGALTESHRVYQTCQKLADFYERSKTAGMINEDFFDDLQDEIACELRLMETEEVEVERVSRRIEELYRHLHPHDHLRTIPGIGVRTAQVFLAVIGDPHRFRSQAAFANWTGVVPGASQSADTEGKGLRMTKAGPSMMKRALFQAGDIARRYDPQLAHLYYREMVHHGKTHLQAMGAVMSHLGARIMAVLREDRPYELRDTQGKPISNKGAMELIRSEHKVPEETRQARRRRNPNEGRLTHHRTHEAAKAPHSGLLMPPRRTVYCTGELQSIGELRT

SEQ ID NO: 264620 - protein, 313 aa, unidentified
MMASQDVFVGIDVSKDRLDVHVRPLGVGFSVGNEAAGYAALIARLRPLRVKRIVLEATGGYERALWLALSEAGLVAAVVNPRQGREFARAAGRLAKTDRLDVAVIAHFAETFAPRIGKPDAVADRLGEHVLYRRSLQDELVALEHQRRRLATPALRERADRRLAALRAEVKEIEREMRAIVDSDPAKKALFACLTALKGVGLVLACTLIANMRELGSLSRHQAAALIGVAPLNHDSGTRRGYRAIAGGRRRVRNVLYVATLSAVRSNPPIKEFYRRLSASGKPPKVALVACMRKMLVMLNGRVRDELAAVTIP

SEQ ID NO: 264621 - protein, 348 aa, unidentified
MNATTVGVDLAKNVFELAVADEHAAIRERHRIGRARLGGFFANRARSRIVMEACASSHHWARTFSAQGHEPLLLPAQHVRAYVRRNKTDAADAAALIEAARCPELRPVPVKSVAQQAIQQLHRVRSQWLHTRTARINLLRGCLREFGIVIPLGARRGLTAVRAQLARDDGLPQALTPVLAELLSEITTLEQRVAVLERELQALTRNDPVVQHLLAIPGIGLLSATALRAGVVDIGRFPSGRHFASYLGLTAREHSSGERRRLGRISKRGDVYLRTLLIHGARAVLLASQRAARTGRPLDRLRAWALATATRIGHNKATVALANKLARIVWATWKHQRPFDGNWVAAMP

SEQ ID NO: 264622 - protein, 340 aa, unidentified
MRIIGCDLHAAQQTIAMLDGDTGEVVERTLTHEGEAVRAFYASIPGPAVVGIEATGSMGWFLRLLEELGIPCRVGHPAAVRKAETRRPKHDRRDADLLLRLLVEDRFPAIWLPSTEQRDLRALLLHRHQWVRMRTRVQQALQAIAMSHGLRRGPTLWSRDGQAALAALPLPPHAAHRRSELVALYQHLAAQVDHLDARVEEAVLPRSAATRLMTHPGVGPVTALATEVFLGDPDRFADGKALASYVGMIPSEYSSGSRQRLGALSKQGNPLLRFLWGEAAMHAVRRDTELQRFYRRKLAQKGLGKARIAAARKLGIRLWIMLRDQIGYEEFCCRSPRRPS

SEQ ID NO: 264623 - protein, 401 aa, unidentified
MSKKNTRNALDTSLSYAVIGLDLAKADCAVAAVPCSDDELGLIDRMDYESLFEQAEKLGPTLFAMEPCCGYSQISLRLQNMGHEVKVISGHAVKNWIATHKSNQKTDLNDATALAKLALYDHDLQPIRVKNVEECRIASVQAIRIQLRTQATKSLVCFKSLCQCWGIVIRRGSLNTKKMAEAVAAVEKLLGAEVASSLMILRDAYKFTMKQINALDKLLDALVEANEQARTMKTVLGIGTQTAARLAVTTGDIKRFPMPRSYVAYFGLAPRNIITGHSGTPSPSKRGALKPVSSRGQGKVSRRGDRVARSFIIQGAATIYMLYCKDMLPECQLRRWLHEQIKRGKPYGKIIVSLAAKLLRIVWALLTYGEKFDSHKAGVPRSVLAAMEKPLKHDAAAESAA

SEQ ID NO: 264624 - protein, 352 aa, unidentified
MNATTVAVDLAKEVFELAFADADGRVVERKRLTRRAFARVFEQRPPLRIVMEACGSAHYWARRFMQQGHSVRLLPASDVRPYVRGNKTDRNDAAGILEADRCAAIADVPVKTPEQQGIQAQHRLREHLKCERTATINLLRGVLREFGIVIALGAAKVPLQVREALEDGDNDLPMALRHSLGEQLQRLVQLQADMHMIEQRLDEYAHRDVAVQRYQRVPGVGLLTATALRAGAGDLSRFKSGRQLSAWLGLAPREHSSGQQRRLGRMTKRGDAYLRTLFIHGARAVLQGARMKLKRGQPLDPLQSWALGVQDRHGHNKATCALANKLARRLWAMEHHGKGFDAYHISRQPIAA

SEQ ID NO: 264625 - protein, 312 aa, unidentified
MSIPSMYVGIDVSSQRLDVAISDDRVESFANDDAGVVALCQRLRVVSCELIVLEATGGYEALAVATLAGAGLPVRVINPRQVRDFAKATGLLAKTDALDARLLRQFAERIRPVVLPHKSQATQELAALVARRRDLVQMLTAEKNRLKLATRVVGRDISAHIRFLEKRINDSDDELKRRIESYDDFRITDELLRSVPSVGPVSSSTLIALLPELGVLPHRQIVALVGLAPLNDDSGKRLGRRRIWGGRAEVRAVLYMATICALRSNPVIRTTYQRLVAAGKPKKVAIVACMRKLLTILNAIVRDQTPWNPAIA

SEQ ID NO: 264626 - protein, 341 aa, unidentified
MGEVSTIGLDLAKEVFQVHGADAAGAVVFRKRLRRTSVLQFFAAQAPCRVAMEACASSHYWGRELSRLGHEVLLIPPSYVKPFVKRQKNDAADAEAICEASQRPTMRFVQIRSEAAQAAAVVFRARDLLVRQRTQIINALRGHLAEFGLVVAKGPAHVGRLIAQAEDYTRSLPHFVRPTFDALIEVLHSLYEKIALLDGEISRRAEEDEDARRLQTIPGIGPVTAAAISALAPPAQSFTRGRDFAAWLGLTPLQRSTGGKQRLGKTSKMGERTLRRLLIIGASAVVRWAARKGAPAGSWLERMLVRKPRMLVAVALANKMARIIWALLAKGGIYRASIAAA

SEQ ID NO: 264627 - protein, 387 aa, unidentified
MPQPNDLSRSLVALDQDSTIIAVVEMSQSSWLVGGVLPGIERQPRKKLEPSPERLLALLHRWRDEAVKAGRTITRITVAFEAGRDGFWLARWLEARGVEAHVIHPSSVAVSREHRRAKTDRLDTELLKRGFLGWLRGERGHCSMARVPTLAEEDAKRPNRERECLVKERTRLVNRMKGTLARLGIRNFRPTLRNAAEHLAALSTPEGSPLPPNVAAELERDIARLRLVIGQIKQIEEARRQRLEEQPESGRHAMVRLLARVVGIGIETADMLVNEVLSRPMRDRRAVARYAGLTGAPDESGAKRREQGLAKAGNARVRRGMIQLAWRFLRFQKNSTLAQWYQARTADRRGATRKTMIVALARKLLIALWRFVTIGEPLDGVTLRPAS

SEQ ID NO: 264628 - protein, 408 aa, unidentified
MKTTYILGIDAAKHKIRVALRGAREQLLFEKDLPVSRAGLRDLLAGLEGQSQEPSRFLVLIEATGVLHLHWGAALAEAGYAVAVINPLMARRLYTVENSIRDNKTDPIDARGLCSIGALHGEKLLAHYRFCLKPEQFALQRLQTVRKALRSALTNCKKTYQSVLELSFPELGTLLEVDGVGIRTLLRQAPTPAAIARVRRSTLEKNWMLRPKAAKLKALAADSLADPQLSAASAPALQAILEALGAMQARLRDLDQQIETLTGQSVDPQTKALVESMPGFGPTTAAKVLAYLPDTILHSGTNRMAAARLQAFMGNEPRLQESGQWKGQTRMSKRGVETLRIAFFQAAFSAAQHDPELKAFYQRKRTQGKTHHVALSHLMRILTRRLVAVLRSNKPYQPNHHLPLKNAA

SEQ ID NO: 264629 - protein, 307 aa, unidentified
MSEKIYFGVDVCKESLAFCGANVAGQVPNNAPGVRRLLARLPQGAHLIIEASGGFERELVKVAQQSAVLLEVVNPRQVRDFARGVGRLAKTDPIDAEMLARFGAEVNPPPDAVPTTAELALQELVSARQQLVEQRTVLLQQQSQQLNNVVRRLDRARLKLLQRQIGQLELAISSILEEQSALKQKVERLQQVKGVGFITAVTCVALCPELGSLSKRQTAALVGVAPYDEDSGARKGWRHISGGRPKLRRALYMASISAVRSNPILRRFYQQLRQRNKPPKVALVAVIRKLAILLNRLLRNASFLPAS

SEQ ID NO: 264630 - protein, 365 aa, unidentified
MQKISTVQASGKRNLRKQLTIGLDLGDRSSSYCVLDEAGEVVLEQKLPTTPEAMRKTFGRMLRSRVAMETGTHSPWVSRLLTALGHEVIVAHAQKVRLIVQSRRKDDRLDARTLARLARIDPELLSPVQHRSAQAQLHLAEIRARAALVSTRTALVNAARGLVKSYGERLRKCHTQQVGREMTGELSMELREALEPLLREVESLNERIPEYDRRIEKMAKERYPETALLKQVKGVGDLIATTYVLTLEDPHRFRKSRDAGCFVGLQPGRRNSGESEPQMRISKEGDEYLRTLLVQGAHYILGPFGEDSDLRRWGQKLAARGGKNAKKRAVVAVARKLAVLLHRLWVSGEVYEPLRNSQKAMNAAA

SEQ ID NO: 264631 - protein, 343 aa, unidentified
MQKITTIGLDIAKSVFQVHGIDAEGNVIIRRQLKRRYVLPFFQKLPPCLVGIEACASSHYWSRELQALGHTVRLMPPAYVKPYVKRQKNDTADAEAICEAVTRANMRFVATKTPEQQSCLMLHRTRHLFIRQQTAVINVIRAHLAEFGIVAPVGRNGVEQLLDVVADAGDKRLPELARACVAALGVQLQTLKAQILNFDRRIMAWHRSNATSKRLDEIPGVGPALATALVASVADPKAFRSGRDFSAWIGLAPKQHSSGGKDRLGSISKQGDRYLRSLFTAGALAVIRYAKIHGTKRRPWLTALLARRPTKVAAIALANKMARMAWALMAKGERYKEPVAVAA

SEQ ID NO: 264632 - protein, 409 aa, unidentified
MEVLYPRCCGLDIHKKTIVACVLLTEADGTPQRFVRTFGTMTADLLALGDWLDFHDVRQVGMESTGVLWRPVFNVLEEGRTLILVNAQHLTAVPGHKTDVKDSEWLADLLRHGLLRPSFVPPPTIRVRRDLTRYRKSLVQLRTQEINRVHKVLDTANLKLGAVASNVVGVSGRQMLRALEHGESDPAVLAELAKGRLREQLPALRLALTGRVQPHHRQLLGELLDHIAYLEQAMHRVEVSLAALLAEEEAAVQLLLTLPATGPVTAAAILAEIGTDMTRFPSARHLASWAGVCPGNRRSAGKQLSGATTKGNTQLKTILCEIAASIARSPGTYLHALYHRIARRRGKPRAMLAVAHSLLVSIYYMLRDQVPYQDLGPDYFDHLQAHRLEHHYVQRLEALGFQVRLTPAS

SEQ ID NO: 264633 - protein, 312 aa, unidentified
MHELFVGIDISKDKLDVHVRPSGEYITLGTAPAGLHDLVARVQAWGPALIVLEATGGYEVVVAAALASAALPVAVVNPRQIRDFARATGQLAKTDALDAAVIARFAEAVRPPVRPLAPPAAQALGELVTRRRQLLEMLGAERNRQAQARDRQVQRQLGTHVRWLTKALADLDRDINDTIRSSPVWRATDDLLKSVPAVGPVTAHTLIAQVPELGQLGRRQIAALIGVAPLNRDSGTLRGRRMIGGGRASVRQVLYMAALVGVRYNPRLAAFYSRLTGAGRPKKVALVATMRKLLTILNAIVRDQRPWQPQNA

SEQ ID NO: 264634 - protein, 384 aa, unidentified
MEKMSSNVACAGMDVHYKFSNVTFRDAGGRIVSRQRLDHPDRQDLARRLERWPRGIPVVMEASFGWGWLSDVVEDAGLAVHLSNCFKVEQMRQARGWVKTNKKDADLVSLLPFEPCDWWKVWRAPPEVRNRREQMRFRGDLVASQTEVKNRIHAVFHRHGIFHEFSDLFGGRGRRFLVELCIGGSEYLSPEALQALRGQVKLLDHLRRQLADVAWVLRKQLAKTPLIRRLDHIDGFGLILSHVLTAEIGQIERFRSHKALASYCLLAPRSNDTGQEDPSQSPKGRHLGLRGNRTLKWAFLEAARGAVRSGGRWRAMFDRVTAGGTKDRNRGYIKVARELVKVVYVVWAKGVDYQADPPARPGRRTPKNKSRSGTGQLYHPMVHA

SEQ ID NO: 264635 - protein, 368 aa, unidentified
MKDYSMFVGLDVHKDTIEIAVAEEGRDKEVRSWGKIGGDLESFEKAVRKLQSKGRTLRFVYEAGPCGYTIYRYLVSKGLDCTIVAPSMIPKKSGDRVKTDRRDAEALARLHRAGELSSVYVPRREDEAIRDLIRARKDAKNSQMVARQQLKAFLLRNGISYEGKTSWTPAHMRWLTSVTLPSSAQQIAFQEYLDAVTSASLRMERLTWEIARHVELWRMKPVVDAFQALRGVQMITAATMVAELGDISRFENPRQLMSYLGLVPSEHSSGGSTHRGSITKAGNIHARTALVEASWQYRLKPRMSKAILLRQENLPKKITEIAWKAQLRLSHRFRLLSAKGKPHQKIVTALARELAGFMWAIAREVPVS

SEQ ID NO: 264636 - protein, 399 aa, unidentified
MFVGIDWAKESHDICVVDPAGKIRGRATIAHSQEGFDELAKHLGRWAEQGEVLVGIERPEGRLVDRILEAGYPIVLIPTFAMKDLRRRYAVGGAKSDPGDAYVIADVARTDGHRLRRLEPLSEETRALRSVVRARGDLVDQRVALGNQLRACLDAYWPGAAVIFADVCSEIALVFVERYPTPESAARLAETRLGSFLKKAGYSGRRSAAELLDRLRAAPEGVVGVEAEARADAMRSMVRVTRSLNRSIKDLDRAIAAHLGEHPDAEVFTSLPRSGRINAAQMLAEWGDCREAYPEPDAVSMLGGLCPVTHASGKHRDVAFRWACNKRLREAITTFADNSRHASPWAADIYRRAIARGCDHPHAVRILARAWVRVIWRCWQDRRPYDPALHGAAVLLEAA

SEQ ID NO: 264637 - protein, 410 aa, unidentified
MDVLHDRVAGLDVHKKTVMVCVRTPGEGRQRRAEVREFETFTGDLEHMRDWLAVEGVTHIAMEATGVYWKPVWFVLEDLEVELLLVNARHVRMVPGRKTDVKDAAWLAELLEVGLLRSSFVPDPVIRQLRDLTRYRKRLTQDRTREGQRVEKVLEDAGIKLGSVASQTLGVSGRSMLDALIAGERDPVVLADMSLKVLRRKRPELQRALVGRFNDHHARMLKLLLAHIDYLDVMIVELDDQIEAQIAPFAEQVVRWQTVPGVGRVGAQVLVAEFGPDMSIFPTAAHAGSWAGVAPGNNESAGKQRSGRTNHANPWLADALVQAAWAASRTKQTWLRARFWRLARRIGRKKALIATAHSIVIAGWHMHTNRVDYQDLGENWWDDRAGRDETERLVRRLQQLGNRVTLEHVA

SEQ ID NO: 264638 - protein, 406 aa, unidentified
MKQIVSVGIDVSKGKSTVCAMIHPNTIIKESFEVLHTVEEMSMLADYIGSLDGEIRIVMESTGHYHLPVAQFLYQKGFFVCVENAYIIRQFSRIMLHGAKTDPLDAKKLAKYGLAYWSELKPYKFHPSCYTELSLLSKQYQTYIKLLIAAKQNVIHLMDEMLPGFKEALDTASSVQFSKVKYVDFAKEFYHVDMIKSMGKEIFRENYKQWCKEKGYRFQSEKADELFHLAEDGIPTLPTEFPSTRLCMEVATEQVSQLGYALEQILSQMQNLAKTLPEYQTIRQMGGIGEKLCVRFIADIGDVRRFHNGKALVAYAGIDAPPYQSGQYTGTKRRISKRGNSALRKTGYEVMKSLKSHPPKTDTRVYDFIIKKENEGKSKKQAKIAGLNKFLQIYYARVIEIYKNIV

SEQ ID NO: 264639 - protein, 314 aa, unidentified
MSIPCGVGIDVSKATLDVAWSSDPSARWQTTNDEAGWTALVAHVRTLQPTVIVLEATGGYEIGAATALSMAGLPVAIVNPRQVRDFAKALGLLEKTDAIDAAVLAAFAARIQPTPRPLPDELQADLQALVTRRRQLVDMLTAERNRVPVARGAVRKNVLAHIAWLEKQLSHTDRDLRTQIEASPLWRVRDHLLQSVPGIGPATSARLLASLPELGTLTHRQISKLVGLAPLPDDSGRRHGYRRIQGGRGDVRSALYMATVTAITYNPTIRAAYRRWRAAGKLPKVALVAAMHKLLIHLNAMLKHQTVWHPPATT

SEQ ID NO: 264640 - protein, 388 aa, unidentified
MTQTPVSLPHPAAPDHNNTLVLAIELSNKSWVLAAQVPGLTRVKAKQTIEPTAEALLAALQGYRERAKAAGRHVERVIAIYEAGWSGFWLARLLATHGVEPYVVQPSSVLVDRRARRAKSDGIDAELLLRTLLAWLRGEPRVCSMVPIPAESDEDARRSVRERTELVAERVALVNRIGAVLATMGCGDYDPLLRNRRQRLGELRTALGTSLPPHAHAKINRMLDRLDLVRTQIAELEQDRDAVLQEEIPDKAGEMIQQLAKLRGIGVQSATVLVREAFVREFANGKALGSYAGLCATPYSSGGTDREQGISKAGNRRLRTVMIELAWLWQRYQPGSAEVNWFRARVSGAGARMRKVMVVALARKLLIALWRFATQGVIPEGAVMKPAS

SEQ ID NO: 264641 - protein, 398 aa, unidentified
MEVMDAAGRRLSAAKLPEGIAGMARFHAMIAAQLDPDADLDAQAGQVLIGIETDRGPWVQALIAAGYRVYAVNPLQAARYRERLGVSGAKSDPADAHLLADMVRTDSHQLRVVAGDSDLAEAVKVVTRAHKTLIWERTRHTLRLRSTLREYFPAALAAFEDLTDADTLELLAKAPDPASAARLTTTQIMAALKRARRHHRDRRAGEIQAALRTEQLGQPAVVARAYAVAVRAQVAILGVLNEQINLLQEQVEAHFGQHPDAEIYTSQPGLGQILGARVLAEFGDDPTRYGDTRARKNYAGTSPITRQSGKKKVVLARYVHNDRLLDALGGQAFAALTRSPGARAYYDKQRDRGLGHRAALRQLANRLVGILHGCLKTRTRYDEATAWSHTQQDQQVAA

SEQ ID NO: 264642 - protein, 432 aa, unidentified
MRSIGMDVHRDFCEIAIAESGDVRRAGRIATDPEALALFAGSLVDSDEVAIEATSNAVAIARIIEPHVRRVVLANPRAVREKARRAKTDRIDAKLLARLLAVGFLDEVWTPDDATQTRRRLITRRCALVRARTRAKNQVHAVLGRNLLGRPPVSDLFGRKGRAWLTAQVSGLPLDERLSVDAGLRQVDFLAGEIEQIDRILGADALSNPDALRLMTLPGVSVVTATALLAAIGDIARFPTPRHLVAYLGLDPRVRQSGNEPAKHGRISKQGASEARSLLVEAGWQTTRTPGPLRAFHERVAERRGRKIATVATARKLVVIAWHLLSRGEDYAFARPALYREKLRRIELLLGAERHQGRSPTGRQLLKTDQRRAEREIATQHERAYQRMVADWKASLPPADKRAGTAQPMGAGVTAGRASPRPSRGKAARQTP

SEQ ID NO: 264643 - protein, 345 aa, unidentified
MSAEYDGKQVVGIDLHRRRSVIVRMTEAGERLDSVRIDNDPIRLAAEIAKAGEDPEVVLEATYGWYWAVDVLQDAGASVHLAHPLGVKGFTYRRVKNDVRDATDLADLLRMGRLPEAYVAPPRVRELRELVRHRAKLVALRSGLKAGVHAVLAKQGVHLAVTDLFGVGGRDLLAGAGLHAPYQARVGAYCRLIDAFGFEIDAVAGQLRARLCDHRGYTAIQALPGVGPTLAAVFVAEIGQVDRFTDATRLVSWAGLSPRHRESDTTVHRGPITKQGSGLIRWAAIEAAQKIPASAGWLVSTRARIAERRGRNIATVAVARKLLTLVYYGLRDGHIRALANAKAAA

SEQ ID NO: 264644 - protein, 340 aa, unidentified
MKLYGAIDLHSTNNVTVVIDEQDGVVYQKRLPNDLALILKQLSVYQSELEGIVVESTYNWYWLVDGLMEQGHKVHLANTAAIQQYEGLKYTDDHSDARWLAHLLRLGVLPEGHIYPRAERPVRDLLRKRSQLVRQRTMNLLSIQNLMTRNTGSSLSANRVKGLDVPQVDELLTNPDLALAVKANLSVMGSANEQVEVLERTVTQRIKRRPQFSFLKTVPGIGEILALTIMLETGDIKRFCSVGNFASYCRCVGSQKISNGKKKGKGNTKNGNKYLAWAFVEAANFAIRPNSQIKSYYQRKKAKSKGMVAIKAVAHKLCRACYYIMRDRVAFNITKAFGQQ

SEQ ID NO: 264645 - protein, 335 aa, unidentified
MQIKHFIGIDVSKDTLDLSVVVNGNALSHYCIGNNYKEIKSIVNNILKTLSGSLDDTIFCMEHTGLYNLPIVKWLNNNQGKMWLESGVHIRRTLGLVRGKNDKIDSCRIAMFAYTNRHKIKLWTPPRQVIERIAALLSQRTRLVKARKQLTTANNEQKKFLDKDIMHSLNKYTNRATSVIDKQVKAIESEIIGLIKEDEKLKRMYQIITSVNGIGLVTASYILITTNEFINISDPKKFACYSGVVPFEHTSGTSIRGRNRVSHIANKSIKALLHLSAMSTLNTPGEIQDYYNRKIAEGKNKMSIINAIRNKLILRIFACIKQNRLYEKNYCYKFA

SEQ ID NO: 264646 - protein, 476 aa, unidentified
MEKKNALRNWTSNKKNVTQDTSKTFMEMPVVNLKAAGIDVGSRSFFVCVGQGADDVREFGIFTCDIHEIAMYLKNTGIETIALESTGFYWKPLFVMLQDYGFEAILVNARHIKNVKGRKTDVVDSRWIQLLHSLGLLSASFQPDLMTEELRTYTRHRQYLIQHASQQVLKMNKNLTLMNLQLKPVLRDLVGLTGCRLIEAILSGKRDPYELVTLIHPNCKHNSMDFIKALDGNYREEYLFELQQSYDSYNHFQHQIAICDEKIELLLQRCIGVKEAFSSPEHSSQAKQASKYKPPKNISYKNCPPTSIAENVYHLCNVELLNIPGVNTGTILTLISEVGLDLSKFKTAKHFTSWLGLAPNNKITGGKVISSHTDSKKNRVALAFRDAANSIERIIIHNQLKAFFIRIAVKKGRSVAITSTARKIAVIIWNMLTKQENYNPEATIRNEEYFRKRKMKSIQRIINEYGIKKCELEFEL

SEQ ID NO: 264647 - protein, 316 aa, unidentified
MFVGIDVAKAELVVSILPAAERFTVANDERGVRTLVERLRGLAPTLIVLEATGGYELLGVAGLAAAALPVVVVNPRQVRDFARATGQLAKTDRIDADLLARFADVVRPAVRPLADDAAQELDALLTRRRQLLEMLQAERNRTGQIFGRGKRIVKKSLKNHISYLERELRMTDTDLGAMIKASPVWRERDELLQSVPGVGPVLSRTLLADLPELGQLSRRQIAKLVGVAPLSRDSGTLRGRRFVQGGRATVRAVLYMAALVATKRNAVIRAFYLRLVAAGKPKKLALVACMRKLLTILNVMVRTAQPWTTDVALIPA

SEQ ID NO: 264648 - protein, 412 aa, unidentified
MDNTAYYVAGIDVHKRMLAVVVANARDRELQFEGRRFGTTISELQKLSTWLQERAVQEVVMESTAQYWKPVWFELEGQFQLWLAQARSNRGPRGRKTDFRDAKRSVSRLLSDELILSYVPDAEQRGWRTLTRTKYQLRRDRVRLQSQLESLLEECQIKLSSVVSDLLGASGQRILRAIAAGETDPARLRGLGDRRLHATDEELSDARNGQPLPLHRKLLRLYLQRLDLIEGQIAELESMIAEAMKAHQDAVVRLSQLPGLGVDSAQQIIAEIGPRAESFPSAGQLASWVGVCPGLQESAGESSSNRSAKGNRAMRRLLNQLAHAAVRKRDCYLQIVFKRLSPRLGYAKAVWAIAHRLCRLIWKVLHEAVQYVEYGPAVSALTLKRRKQRLVTQLAKLGYSAQLTPILARAGS

SEQ ID NO: 264649 - protein, 409 aa, unidentified
MDLLHPLCAGLDVHKDTVVACLRRVVDGRVKRELRTFGTTTRDLLELSDWLASQGCRHVAMEATGVYWKPVWHILSDGDVELVLANARHVKNVPGRKSDVSDAAWQSDLLAHGLIRASFVPDGATQELRGLLRTRKQLVQERTRHIQRLQKTLEDANIKLDSTISDLLGRSGRAMIEALIAGETDPDKLAALADGRIKASQARLREALRGRVTKQHCFLLRLHLRQIDGLSEGIADIDREVETRIEPFRKAVELLSSIPGVSTLSAQVIIAEIGLDMSRFPTVGHLLSWAGLCPKSDESAGKRRSTRMRKGAPWLKTNLIQCAWAAKNAKRTYLQAQFYRVRARRGDKKAAGAVAASILTAAYHMLQRGVFYQDLGPEHFERSKAAQAKRLVKRLKNLGYAAALTPIAA

SEQ ID NO: 264650 - protein, 459 aa, unidentified
MKILALDLGKFNTMCCFFDTKTRKHSFLNATTDRNYLSTIFKKHKIDLVVMEACGPSGWINDLAIGLGLKTLVCSTNEEAWKWSNVKRKTDKDDALKLARMAAMGELTSVHMPSEEHREFRSLVKYRKTLDWRINKTKCTIRAWFVNHGIAIDRGDKAWHTGRALINSFRKPLAECSANELWKGELDIELTQLDSLSQQMDVVVKKLEAIGKNDPRIVRLRTIPGVGPRTAEILVACIDDPHRFKSGRQVSAYFGLVPRQFQSGETDRNGRITKRGNPLARTILVECAWASLRYNPWAKGVYERICGKQKTRKKKAGVALARKIAVIAWAMLRDEKDWDPVTMIETTKSFGGRLPMDEETFQTMRPKENSDQRKSRLRREAREAHSVTTCRTEKNTGKSSGVSKSPSKAKSLSKRPTKLTAKQTNKPTAAQRKTSDSKPKQSTTKTATTRRARKPVCAA

SEQ ID NO: 264651 - protein, 350 aa, unidentified
MKITTSGIDVAKTVFQVHGVDERGKVLLRRQIRRSQLVLFFSKLEPCLIGIEACASSHHWARKLGALGHTVRLMAPQFVKPYRKNDKNDGNDAEAICEAVQRPSMRFVPVKSPEQQAELAVHRIRRRLIGRRTALINQLRGLLAEYGLVLGQGANQVRSKLPALLDASSESLPPLAVELFRDLYEELVELEQRIGGYERRVERLYRGNPVCQRLGQVEGIGALTATAFVATVAHAAQFKNGRQCAAWLGLVPKQDSTGGKTRLLGISKRGDVYLRTLLVHGARSAMRHTPKGNDPKSRWVEQLRKRRGENIAAVALAAKHARILWALMVRGESSPQPPICSTEPREQTTV

SEQ ID NO: 264652 - protein, 336 aa, unidentified
MSKKATLKQCLGIDVSMKKIDCCLSFYTEDLKIKVVATSGFENSPDGFIKLREWLNRKQDNGLALYVNMEATGTYHEEAAYFISGVGYRLSVIQPTKGKQYAKSLDEKNKTDKIDAGMLARMGLERELTLWSRPNETLRILKRMSRERIGLIRDRNALTNQLHALNHSFDAFADSVERLKERIALATKQLGDIELQMRKVTESDPELSKKTKHAITIPGINFVTAITVIAETDGFANVGNRRQLVSYVGLDVVMKESGTLTWRPHISKRGNAYIRAGLYMAAVSSIIHNKTLKAYFNRLKDNGKPGKTGIVALERKLLVLIYTLYKNGQDYSPDHR

SEQ ID NO: 264653 - protein, 356 aa, unidentified
MTTQSTALPNLFIGIDIHKKSWAVHLRTDIGEHRPMTIPARKELLFDYVQSNFGDHCVHVAYEAGCCGFSAARYFLSLGWRVSVVNAADIPRSDKQQYQKTDRYDCRNISKQLSAGQLHGIYVPTEDQDELKSLVRQRASLTRLLRKTKTQIKALLLYHGIEIPQEFDNPNWSKAFKTWLANLAWETEAGKLCLHSKLDLLATMHYQYLSIANSLRAYCRKHFKKDYYLLKSIPGVGGYLASCILAEVGDLRRFDNEAQFASFIGLVPVMYNSGGNEKIFGVTPRCRSLLRSYIIESAWVALRRDPQMQAYYRKHVGRNPKSIIIKIARKMLNRMLSVIKREQIYKINYSPSTKSL

SEQ ID NO: 264654 - protein, 349 aa, unidentified
MEQNEVILGVDTHLDMHVGAVINDIGRLLGTRSVSTDTAGYLDLLSWANSFGHLRRAGVEGTGTYGAGLARLLHDHEIEVLEVNRPDRAMRRSKGKSDPTDAENAARAVLSGRATAIPKEQSGAAEAMRAVSVARRSAVKAKTQAINQLRALLVSAPQEIRDRLLKVKTAECIEGCIRLRSLGKTPMLQTLTTTLRLLAKRWMTLAEELKSLDAMLDDLTSQHAKRLRERFGVGPQTAAVLVAVAGDNPERLKSEAALAALCGTSPLQASSGKTVRHRLNRGGDRSANNALWTIAMVRMRSDPRTRAYVDRRTKEGMSNKEIHRCLKRYIVRELYPLILADLADSTRAV

SEQ ID NO: 264655 - protein, 469 aa, unidentified
MCGVLEKESAQSKQKVIPVRKKRTYRAKEINAVRVSEIVAGHDGCPATVGIDVGKDDLFLMLRWGAEMFSGPWHAENRTGIRGVVEFLATLSHGRKLTVALEPTGTYGDALRYALTQAGLNVHRVEGKASHAYAEIFDGVPSQHDRKDAAVVAELAAVGKSTPWPYDAESMENQERRHWVQRLEAAQGTMQVWTGRLEGLLARHWPEVTQVLQLNSVSLLKTLAHYGGPEELAEDSEAGVRLAGWGRSLLTPEKIQALLKTAEETVGIPQGKYDREWVRECAQQILDARRTKQQGKRELKRLGAGNEVLSRLGAAVGYATASVLWAYLGNPQDYHSGAAYRKAMGLNLKERSSGKWIGQLRITKRGPGAVRRWMYLASMRLLKKKRVRDWFETKKKRDGDRGGKALIGVMRKLSMALYRVAIDKVAFDARKLFPGKPLKQKATSARARQKGPPHRALAVTSTSEGRRPR

SEQ ID NO: 264656 - protein, 415 aa, unidentified
MSEQYRWFIGIDWATERHEVCIVDGGGQVVDRRSIEHSGAGIAQLIGYLKELTAGQPWELAAGVETPRVAIVESLIEQQFHVYTLNPKQMDRFRDRHTVAGAKDDRRDALVIADSLRTDRHLFHRVRLDDPWVIRLRELSRTEQDIQQQQTRVGNQLRDVLWRYFPQWVKLSPTLDEPWVWDLLEVAPLPEQASKLRRSRIEKILRSHRIRRLSAEEVCSELKAQPLQLAPGAGAAASEHVLLLLPVLRLLQRQRKEIISRIEAVLREMGEREKAGEHRDVTVLLSMPGAGRMIAATMLAEASQALAERDYHALRSYTGVAPVTRQSGKRKLTGMRRSCNQRLRNAVYHWSMGSIQHDERSREHYAALRKKGHSHARALRSVADRLLAVLTAMLRGGKNYDPRLRAAAPALVEMS

SEQ ID NO: 264657 - protein, 334 aa, unidentified
MENIALIGIDLGKNSFHIHCQDHRGKAVYRKKFTRPKLIEFLATCPATTIAMEACGGSHFMARKLEELGHFPKLISPQFVRPFVKSNKNDFVDAEAICEAASRPSMRFVQPRTESQQAMRALHRVRESLVQDKVKTTNQMHAFLLEFGISAPRGAAGISRLSTLLEDSSLPLSLSPLLLKLQRHSPYLGAQINALESQLKRKLDEDEVGQRLLSIPCVGTLTASTISTEIGDGKQYASSRDFAAATGLVPRQYSTGGRTTLLGISKRGNKKIRTLLVQCARVFIQKLEHQSGKLADWVRELLCRKSNFVVTCALANKLARIAWALTARQQTYEA

SEQ ID NO: 264658 - protein, 400 aa, unidentified
MIDTSTIDVFLGLDVGKSEHHATAVTPTGKKAFDKRLPNTEPKLRELFAKLQAKHGTVLVVVDQPASIGTLPLAVARDMGCPVAYLPGLTMRRIADLYPGEAKTDARDAFIIADASRAMPHTLRAIDGEDETIAELEMIVGFDDDLAGEATRVANRLHGLLTQIHPSLERVLGPRLQHPAVLTLLERFGSPAQIRKAGRRPLVTLLRPKAPRMAERLVEDIFAALDEQTVVVPGTEAAALIVPSLAGSLAAVLDQRKLLAGRIEELLESHPLSKVLTSMPGVGVRTGARILIEVGDGRTFPTAGHLAAYAGLAPATRSSGSSIRGEQPSRRGNKQLKRAFFLAAFASLADPASRTYYDKKIAQGKHHTQALLCLARRRADVLFAMLRDGTFYESRPATSG

SEQ ID NO: 264659 - protein, 445 aa, unidentified
MDVVFPHCAGLDVHKKRITACRVSPDPTGQDADGVLEVQDFGTLTIELLALSDWLSQVGVTHVAIESTGEYWKPVYNLLEGTFTVFVVNAAHVKNVPGRKTDKADARWLAKLMRYGLLQASFIPPQGQRDLRDLTRYRMKLVQERSREVNRVQGVLERANIKLASVATDIMGVSGRAMLEALIAGRADAATMAELARGRLRTKIPVLEQALTGVVRAHHRRLLAIQLAHIDFLDEQIATLSEEIQHVLSTLCPSAPPGSTTDDAGSTPTVPEASSSAPPMTFLRAITLLDSIPGVNQQGAELLVAEWGIDMERFGAAPRLAAWSGIAPGNHESAGIQRSGKTRKGNRALRTGVVQMAHAAAHTKDTYLSALYHRLAARRGKKRAIVAVAHSIVRSAFHMLSRNEPYHKLGGNYFDEHRREHLVDRLTRRIERLGYRVALEPVVTS

SEQ ID NO: 264660 - protein, 353 aa, unidentified
MKKIVKQAVGIDVAQDELVVCMGRMYEDLTLELYSHKTFGNTAKGFELLTNWVSKLSNADVELIYVMEATGVYHESLAYYLSDRGDRLSIVLPNKISNYSRTLDVKTVTDKTASEAITRFGLERKLDNWEPPKGVYRSLRQLTRERDQVVVTRTIAKNQLHAEEAEAYPNKKSIARTKKLIAFLDKQEQEIKEELAQMIKEDEEVKRIVVLLCSLPGIGLLTAATILGETNGFDLIRNKRQLASYAGLDVKEKQSGTSVKGKPRISKKGNRYLRKAMHLPALTAIRHDERFKAIFARIVSKHGIKMKAAVAIQRKLLEMAYTLYKKQEKYNHEYLTKSEGKIAIEMQDLSIKN

SEQ ID NO: 264661 - protein, 356 aa, unidentified
MSKIIRIGVDTSKSVFQLHGVDENEMPVLRRKLRRHQVLAFFGKLEPTVIGVEACGASHYWARRLAGLGHKVVLIPPQYVRPYVDRGKNDAADAEAICEAMSRPKAKKRFVAAKTVEQQAAQMLIGAREALLRRRTQVSNAMRGYGAEFGLVAPNGLVQIEPLAEQIALDVTIPELAREMFLVLLGHYRHANAQLKEIDARLMAFHRSNEQSRRLAEVPAIGPVTAAALAAKVTDARAFRSGRDFAAWIGLTPKNHSTAGKVRLGVITRAGDETLRTLLVCGAMAVIQQAKYRTPSPWLAELLRRKPPKLAAVALANKTARIAWKLMASRERYDARNVAPQQHAAAEKPETLKEAA

SEQ ID NO: 264662 - protein, 430 aa, unidentified
MQIVGMDIHRSFAQVAILEDGTIIRQLRVDLIHDRLVAFAKTLSLEDEVVIEVTGNSAAVERLLRPHVKRVAVANPRLVRAIAYARVKTDKVDAATLAKLHAAGFLPEVWVADEGTYSRRRQMAERAGVLAQIIRIKGRMKAILHANLIPPYKGYLFGKRGQHWLDSLPLPPEERVMLRRLIAELERVTKQLAEVDKVVAQQALDDPRALKLMTIPGVSSVVASSVLASIGDIARFPSPDKLSSYFGLTPRVRQSGEHPARHGRISKQGNRDARKMLVEAAWSAKTAPGPLRAFFNRTQKKHGAGVAAVATARKLAVMIWHVLTTEKDYAYARPAFTAMKLRKVALKAGAPRAYGKAGPGRDYWIKEIREREAGYVARVEQAYERMVAAWKEKPKKLPRTEGKDFSTPSVVKQILPSSRKRAKSCQRLSM

SEQ ID NO: 264663 - protein, 466 aa, unidentified
MQNETSAQASRRAKKELARRLRSADPGLEVVHPDAAGIDVGNESHYVAVRPDRDSEPVRRFACFTADLYRMAEWLRSCGVKTVAMQSTGVYWIPLYDILEECGFEVFLVNARHTKNLPGRKSDVQESQWLLKLHTYGLLNNSFQPPSDIRVLRTYWRLRAEHGTGMATCIQRMQKALTQMNIQLANVISDLSGTTGQAIVRAILTGERDPQKLAELSDRRIHATKEEIAKSLQGNWRPELLFIVRQQLEMYEAYQRRIAECDQQLREHLAKFASAPSTSVDTCNPPQSKKSKRYRYMPQFPLSNELMRISGVDLTQIDGVDAMTAQTLISEVGLDMSRWKTESHFASWLGLCPDNRISGDKVLTRGTRRVINRAATALRIAASTLIRSKTYLGAQYRRLRTKLGAPKAITAMAHRLARLVYRILKYGQKYVDKGADYYEQRSRQQQIDFVRKKAAQLGLQVTLAQA

SEQ ID NO: 264664 - protein, 408 aa, unidentified
MTVVGIDVSKSKSMVAAMKPGGKLVAAPYEVRHSDIELSHLALDVLCMEPDTRVVMEATGRYHEPVAALLHSEGIFVSILNPLLIKQSGAGSLRKVKSDPKDALKIAKYGLDNWSTLREYTPMEAIRQQLKLCARQCDLYNKNIVMLTNNLISLSDKTFPGVNELFSSPEKADGHLKWVDFYRSFWHCDCINRMSPDAFEERYKKWCKRKGYHFSTDAADALYAASCGLYTTLPRDNNAKLLVTVAADQLIALRENQSKLEAEMLNLCKQLPEYETVMAMYGVGKSTGPHLMAELGDVRRFPHRSSIVAFAGVDPGVVGSGKMQLSSVTTSKRGSPQLRKALFQVVSTYVKCKPENEAVYQFYAKKRDEGKPFFVCTTAAANKFLRIYYARVKECLNAAESATQVEEG

SEQ ID NO: 264665 - protein, 402 aa, unidentified
MNAVGIDAGKKNSVVAIFRPHGEVVRKPFKVQHTKSDINDLIQTVRSLDGDTKVVMEHTGHYNEILAHAFHEAGIFVCVVNPKLIKDYGDGETLHTIKTDKADAKKIANYTLDKWHVLKEYTSMDEQREKLKAMNRQMAFYINQRSAQKNNLISIIDKTYPGANELFSSPSRPDGHQKWVDFVGTYWHVDCVRTKTLNEFIDHYSKWCQRKGYNFSRCKAEEIYLASKELVPVYSKDDQAKYLVTQAVTAVNDISVAVESLRIHMDELASTMPEYSAVMEMDGVGRTLGPQLIAEIGDVTRFHNKKALIAFAGLDPGANQSSDYESKHNRTSKKGSPYLRKTLFLVVESIIKRQDQDSKVFQFIEKKRREGKPYYVCTTAGATKFLKQYYGKVNSYLESLQS

SEQ ID NO: 264666 - protein, 442 aa, unidentified
MNEEDRSRLEEFRQFRREVRGSKEYLLVGIDVAKDRHHAFFGTATGKTVFRRLVFDNNLEGFQKLLAQAEAMRGQEGLKKVVFGMEPTGNYHKPLGEHLIRCGREVVLVSGAAAHENRKTLDGRWDTNDTRDAANVADLMSQGKCLFYEFPVGALQDLRNLLSLKRRMKKEEQGYRVRIRNHLLAKYFPELDRYYEQSETTALAIVRWCLDPSEIAGLEYKRFFQLVSLSLARERSSQERRLQAIWKMAVDSVGCEAGPTVELEAQVMVEGLRRVRESLRQIDEKIHEICCQFPEYEVLLSIPGFGRDLAAKVLGAIGDPDRFQNGRQVLKTAGFDLNAERSGKSSERAVPVISKRGKADLRFALYQAALIASVKNRDFIEYYTEKLRGREREPGIKIKMRVKLAAKMLILAWTLMKKREPFDPSYLRAAGQAFSAGGRRER

SEQ ID NO: 264667 - protein, 377 aa, unidentified
MHSENIAAYVGLDVHKETLAVAIAAPERLGEVRYYGTINNEAQAVRRLFQKLQGLYGNILSCYEAGPCGFGLYHQLTAMNIKCQVIAPSRIPKSPTDRIKNDHRDAISLARLLRAGELTPVWIPDLTHEAMRDLIRARAAAKRDSRVARQRILSMLLRTDKHYAGKHWTGKHRTWLANQSFSQPSQQIAFQHYCQSLEQIEDRILQLDQEISRLLPEWSLCNLVCQLQALKGVGQLTAITLVAELGDFSRFSNPKQLMAFLGLVPGEYSSGNSIRPRGITKVGNSELRRLLYEAAWSYRTPAKVGAWLIYYRPDSVTQYSKDIAWKAQQRLCSRYRSLTAKGKKSQVAITAVARELTGFMWDIALAAQSSFSQQKQN

SEQ ID NO: 264668 - protein, 317 aa, unidentified
MTRLSEVLRFVGIDVSKERLDIHLLPDGQAYSLPNTRRGLWRLIAELGSGDTALVVLEASGGYERACADILAESGFDVAVVNPRQVRDFARSLGQLAKTDRIDAAVLALYGERLRPACRHLPDAARSQLSALVARRRQLVAMHGAEARRLDQVADKQLQRDLKRHLRWLVKEIAGIEARIAQAIAAHPVWAELAARLASVPGVGAKTVAILIAELPELGTIEHKKITALAGLAPLNRDSGKMRGKRTIWGGRRQVRTALYMAALSAARFNPALKDFRNRLVDSGKPKKAALIAVARKLLTILNALARSGQNWCPNHS

SEQ ID NO: 264669 - protein, 407 aa, unidentified
MDAIVERCAGLDVHLDTVVACVLYGKLDIKPKKEVKTFSTTTKGLLELLDFINQKECTHVAMESTGIYWKPVWNILESGAFDLIVANAKKIKNVPGRKTDVKDAEWIASLLRCGLIEKSFVPPERIRDLRDLTRLRKELLGEVNRNKNRIHKVLQDANIKISSVLSDVFGETGKSILNQIIGNQCITEEFIYSLYEGRGKSKLKSTPMEMYEALNGKIRGHHVILLGMHNSNIVFLEKQINELEKEIDILLQKERDSLELLETIPGISKISASSIIAEIGTSMDVFKTEKHISSWAGLCPKNNESAGKKKRSGIKSGNNWLRSMLCECAWSATKKKDSRFKNKYWSMVPRMGRKKALIAIANMMLRLIYHLLKTKSTYKELEIQYFIDKDKRREDRIIKELKSKVIL

SEQ ID NO: 264670 - protein, 397 aa, unidentified
MYIVGIDIAKRKHEAAVIDGEGAVIIKPFSFTNNCSGYNRLLAMLAKAKLPLDEVSFAMEATGHYWLALFTRLQKEGFRVQVINPVQTNSIRSFYIRQAKTDPRDALLIAEVIRFGHFSESTLHPENIYELRELCRGRHAIVSMQADVKRKVVALLDQVFPEYETAFTNLFGDTSMAILQTCPTPKELSEMPFEELCHLIEVSSHKRFRMAKAQELQELARNSFGFAMAGDVFSTMIRLYAKHLDFLKQQVREMDRKIAEIMDTLDTPITTITGIGPTLGAYILSEIGDISRFSSAAKLAAYAGIDPTMRQSGEYNGVRNRMSKRGSPYLRHAIWLAASSAVLHDPALKLYFQKKRDEGKPYMASVGHACRKMVSIIYAVMRDNKTYTPHIPNEISA

SEQ ID NO: 264671 - protein, 371 aa, unidentified
MSEKKIVYVGLDVDNAAFHGQGLLLETGECFVFKCKPDHGALLKKLTDLFKGQYTIRLCYEACYIGYSLCRFLLKKGIHCDVIAPSLIPVKTGTRVKTDRLDAAKLAQYYAKDLLTPIYIPDETDEEVRDILRSRIFLVKQRKMLKTHILSACTRYDINFQDETGAKTNWTDHHISWLKSRVTTLSRSVCQSDIEILLAQYSSLSESIEKLETAILKVAESARYKKAKDALNTFRGIDTLSAMTIIAEVGDMRRFAHPRQLTSYVGLDVAEYSSGGKEHKKGITKTGNKHVRTILIESCQTATRPPILSKRIKQSRADQPQAVIDVADRCMNRLHKKATRMLYAGKHKNKIKTACAREMLGFIWEVLRLAA

SEQ ID NO: 264672 - protein, 361 aa, unidentified
MADAIRWVGLDVHASQTTVAVLDQGTGELSRARLRGSPETVVPGFLAGFGGRVIGVYEAGPTGMGLARTARAIGIDMRVCAPGLIPRKPTDRIKTDARDAERLVRQLAAGGLSFVRVPTEAEEALRDLVRAREDVRQDLARARHRLSKMLLRRGLRYETGTTWSARHIDWIVRLKFDDLASRMVVGEYVNAVQQLHQRRKDLEQTIEQLLPSAPFAHTAYRLRCFRGLATLSAVGLCCEIGNFARFSKPARLSAFVGLVPAEYTTDSKRRLGSITKAGSSHARRLLVEAAWHYRRLPATGSTLARRQDGIDPRIIAIAWRAQVRLHQRYTRMKARNKPAGVINIANARELACSCWEAATLD

SEQ ID NO: 264673 - protein, 326 aa, unidentified
MDDAGKIVREVKVASEPEALLAVLKNPAYHFKRIGLEAGPLSQWLFSALAEAGLPVICVETRHMQAVLKAQINKTDRNDARGIAQMMRAGLYRPVHVKTIRSQKLRMLLTHRKLLQSKAIAIENDLRGTLRNFGLKVGMVGKVKFEARIRELVENLPDLVVLVEPMLIVRRVLREQIVILHRRLLAIVRDDEVCRRLMTTPGVGPVVALTYRATVDVPARFRKSKAVGAVFGLTCAKYQSGEVDRNGRISRCGDEMMRVMLYEAAQSMLRSKKWSWLKAWAMQIARRRGMKKAIVALARRLAVIMHRIWVDGTEFRWTREQATAAA

SEQ ID NO: 264674 - protein, 323 aa, unidentified
MQGKVSPERSACDRVYVGVDVCKEWLDVYLHPVGLSLRVANTPTGLKRLKRELARHAIACVAVEATGKFHRLTQRHLHAAGIPVAVVNPLRSRLFCEASGQLAKTDAIDARLLAVMAESLNLRVTPPTPEIVEDLQELVRARAAAVADRTALINQRAAARLGAVKAELGRRIRALEGSITRLEQEIEATIARDLALARRFEILLSIPGVGPVAAAGLLADLAEMGTRSGKEIASLSGLAPVACDSGEAKGQRHIRGGRAHVRTAIYFAALSAARYNPHLARVYRRLLAAGKKPKVALTAVMRKLVVLANALLRDNRIWQANPA

SEQ ID NO: 264675 - protein, 361 aa, unidentified
MENTRIVNNYVGIDVGKRRLEVVRIKSDGTLQRHQTGTNQKSLSGLIRWLSADDMVVLEAGNLSFMIAKRIRGERNLPVEVLNPGDVATIYQSLKKTDKEDALKLARLAQRHPLDELPTVRIPSDEEESWRRLCSEQTFWSREVTKGKNRLHSLFVSAGLTHIEKKDLAGKNNRDGVVSILPPQQNCEALRITRHLDMMEENLRVLDGNIKAILNEQRGYANLVMSMPGIGPIAALTFLAFVGKCERFSHGKQLGYYAGMVPRVDISGDSVRYGRILSRGCGPLRRIIIQCANALVRSKCSGELGVFYARLKERKGHNKAIVAVARKMLEAQYAMITTGELYRYSTAEYIDKKRKKYGIAA

SEQ ID NO: 264676 - protein, 316 aa, unidentified
MNEKQVDSFVGIDVAKNTLDIRLEPAGESLHVVYDDVGMAEIRQRLIALAPTLIVMEATGGLETRLACELAACGLPVAVINPRQARDFAKATGQLAKTDRVDAAVLCAFARAIRPAVRVLKDTDTRDLDDLVTRRRQLIAMRVQETLRLGTAESKALQKNLKKHIAWLDKQITSLDGDLTKRLRTSDAWRTKDDLLQGIPGVGAVTSVTLLAKCPELGQLNRREIAKLSGVAPLANDSGTHRGKRFVWGGRADVRAVLYMAAVSAIRCNPIIKAFADRLKQAGKPAKVVIVACMRKLLTIMNAMVKNNEPWTAKTA

SEQ ID NO: 264677 - protein, 352 aa, unidentified
MKITTIGIDLAKEVFQIHGVDEYGKAVLRKQLRRGQMTEFFANLGPCLIGLEACGSSHHWARKLGGFGHTVKLMSPQFVKPYVKTNKHDMADAEAICEAVTRPNMRFVPIKTVEQQAILSVHRARQGFVKARTSQANQIRGLLSEFGIVIPQGIQSIGKRMPDILEDAENGLPGTMRRLLERLNDHLKELDRQVKELELQIKLWHKESEASQRLEAIPGVGPITASAIVATVGNATEFKSSRQLAAWLGLVPKQHSSGGKQLLLGISKRGDTYLRTLLIHGARAVIRFAEKKAEPESWLRKLITRRNKNVAAVALANKNARIIWALLTQKATFHPDHTMATYCCGSLIVRVD

SEQ ID NO: 264678 - protein, 338 aa, unidentified
MKAYAGIDLHSNNNFIGIIDEQGQRLFSKRLVNEPDRVIEALNPYKKDLAGIIIESTYNWYWLVDALEAQGYRVHLANPSAIKQYEGLKYTDDQWHSFWLAEMKRLKILPEGYIYPKEQRPTRDLLRRRILFVKHRTAHTLSLKSMIARNLGITLGGKVVQRLKNTDVADMFTSPDLYLTAKHHISAISSLGKIIKEIEKEVKSKVELKEEFKMLLTMPGIGDVLGVTIMLEVGDITRFPKVGNYSSYCRCVGTKRMSNNKKKGVGNRKNGNRYLSWAYAEAATFAIRFCPAAQKYHQRKKAKTNGFVATKALSNKIARATYYMMRDQIPFDVKKLFS

SEQ ID NO: 264679 - protein, 315 aa, unidentified
MQTGLDIGIDVASKTLVAACAAGSFAPCTLRNERGALRKWLGELPEGSRIGMEATGSYHQLVADLAHAAGHSVYVLNARDLKKYAEGVGRRGKTDRVDAEIIARFIAREHDRLHVFAPLGEAQRHLEQLLKRRGKLVAARVALELGWSGVAGIKAELTALLKAHARLLRQVDTLIAQAVAAVPEVKARAERVRTIPGFGEVGSVTLAQALSHLPFTSADAFIAHTGLDPRPQDSGNRRGRRRISKRGPAELRRVLHICAMSAASTKVWRPYYMAQRAKGLSGTAALVVLSRKMARTAYGICKRQVEFDPARISNA

SEQ ID NO: 264680 - protein, 380 aa, unidentified
MKIVGCDFHPAWQQVAWVDMESGEIEERKLVNGDGEAEEFYRQLESPALIGIEACGNSQWFIDLVERLGHQVWIGDAAQIRASYVRRQKTDRRDAGHILRLLIEGRFPRLWVPSAEQRDLRQLLIHRHKLVEIRTRVKNGLQHLALNRGLQKKGSLWSAKGRACFEKLPLQGWTARRREDLLKLLAELDRHLDELDAAVSGAAEEDPQARLLMTQPGVGPITALAFVLTIGDVSRFRHSKQVSSYLGLIPQEHSSGGKQRLGSISKQGNGFMRMLLVEAAQSVNRLDEGFRKQYAARCHHKAKGVAKVAAARKLAVRLYWMLRTKVGYPEIAHIESSPRVAPGRPRRRTRLAFTGLAGRRKPDRWIDWALSHPAIGRMSG

SEQ ID NO: 264681 - protein, 346 aa, unidentified
MKITTIGLDLAKVLFQVHGEDERGRVAARKQLKRAEMLKYFANLEPCLIGMEACGSAHYWARKLAGYGHTVKLMAPQFVKPYVKTNKNDAADAEAICEAVSRPNMRFVAIKNVEQQAILSVHRARQGFVKARTAQANQIRGLLSEFGIVIPKGISQIMKQVPEILEDGENGLPGVMRNLIDRLTENLKEMDRQVKELEAQIQLWHRENEASRKLADIPGLGPITASAIVATVGDAGEFKNGRQLASWLGLVPRQHSSGGKQTLLGISKRGDTYLRTLMIHGARAVIRHAENKADPDGWLRKMMARRNKNVAAVALANKNARIVWALLAKDRMFRPDYTPAAVVAAM

SEQ ID NO: 264682 - protein, 355 aa, unidentified
MNQEKYIGMDVHDATISAAVKNAQGKLLMECVLETKAATILEFIQGLRGTLALTFEEGILAAWLHDLLQPHVSRLVVCDPRKNALMRDGNQNDRADARNLAELLRTNQVRAVYHGKHGTRALKELGRSYLTLTKDSTRVMNRIKSVYRSWAIPCGGTSVYSRRHRAEWLAKLVEPAVRIRAEHLYQQLDSLEPVRQAARRELLGESRKHAAVKLLRQIPAIGPIRSALLVAILQTPHRFRTKRQLWAYSGFAVQTYDSGEYRMVRGKRQRNRERITVRGLNRNHNHDLKNLLKGAAISAIQRPGPLQDFYAALVEKGMRTSMARLTLARKIAAITLIMWKKGVSFDPQQLQRQAA

SEQ ID NO: 264683 - protein, 318 aa, unidentified
MERNTIEFEQVIERGCGIDVHKETAVATINGKGIKEETKTYDTFTSSLKEMKEWLMSNGITHIAMESTGVYWKPIFNILEDSFEILLVNARHLKNVPGRKTDKADSRWICKLLLSGLLKGSFVPPENIRELRDLSRYKTKLTREVASEKNRIQRILEDANIKLSSVVSDTSGTVATKLIDGLVSGRKDLIALINECYHGKLTASKEELREALTGRLTPHHVFMLKQMKAHIAYLESQIVLIDTEMDKKLEEYNDELELLQTIPGVAKDGAKRILSEIGANMDVFPDEHHLASWAGMCPGNNESAGKKKVHGQDTETNT

SEQ ID NO: 264684 - protein, 352 aa, unidentified
MAKNDFDELMSVGVDIGKDVFHLVGFDRDGQLVLRKKIKRMALVATFEELPQCIVGMEACMSAHFVSRTLRKMGFEPRIIPAIYVQPFNKGQKNDYNDAEAIAEAALRPNLKAVSEKTQEQLDLQALHRVRSRLVSRRTATMNQIRAFLVEQGITVRKSVAALRTSLEAILDNRDDEMSLRMRKLILGLQQDWIWADKRIEMTTSEIEAVSKSEASCQRLMTIPGIGPIISTAVVAAVGNGEAYDRGRDFAAWLGLVPRQHSTGGRTILGRITKRGSRYLRMLFVQAAQVIMMRPKNWPKFSFGPWLEAASTRMQHNKLGVALANKLARIAWSVLNSGKDFDWKEKEFATAI

SEQ ID NO: 264685 - protein, 416 aa, unidentified
MNAAGIDVSSRKSTVAVLRPFGEVVRLPFDVAHNAEGLTSLAEQLKGLDGETRVVMEHTGRYYEPVAKALHDAGLYVSAVNPLLIKEYGGNSLRRVKTDKADALKIARYALDNWTDLRDYTPMDTIRYDLKTLNRQFQLASKQRTASSNNLIALLEQSFPGIRKCFDSPVRSDGTQKWVDFAHTFWHVDCVRKQSLNGFSERYRKWCKHHGYLFKQSNAEEVYLLAKNAIVLVPKSKVTKVLVQEAANQLTSISRSVETYRAEMERLASMLPEYPVVMEMYGVGKSFGPQLMAEIGDVRRFQRKQALVAFAGIDPMPNQSGDKNVRNNKSSKRGSPYLRKTLFNVMGIYLKCAPQDEPVFQFLDRKRSEGKPFYVYMTAASNKFLRRYYAKVRDYFATLENLPPVDMDSTGLQENN

SEQ ID NO: 264686 - protein, 400 aa, unidentified
MNPVVGLDVAKGESQVQAFLDKSKPFGKSYSMKHTKEELDRFIGFLKEIEGMTGQMPMVILESTGHYHSPVIQYLEDHEVLYILLNPIISYQAKRSSLRKVKTDAIDAYQLCVLYYKEDFEPHKKRGIQLLNLRNLSRQQEIVTNMYVEAKLQFHTILDQVFPEYRKVFGDLYSKVSLLMLKKYPTSEDVIAAGESKLAECVMEFCPRRSSLWALDKAKKLMDSASRNPFQKVVYHSHLINLQMYIEMLFQYQGHLSELEIRIVTLANELEDYEIVQSIPGIGEKIAATIISEVGEIDRFSHPKKLVAFAGVDPSVHSSGKFTATTNRITKRGSSRLRHALYLAVLCGIRSSRNKKLKEFYDKKKSEGKPAKVAIVACINKLLHWIYALLNRKESFLDIA

SEQ ID NO: 264687 - protein, 348 aa, unidentified
MMIIGCDYHPSWQQICWLDTTTGETAEQKLEHASGEAEKFYRQLSGPALIGMESTGNCQWFVEMVRTLGHDLWIGDAAKIRASEVRQQKHDRRDAALILKLLLEKRFPRIWVPSGEEKDLRQLLIHRYKLVRIRAQVKNELQHLAMNQGVTRKNKLWSQKGERVLRELPLAPWASRRREDLLKVKGMLNEQIAPLDQAVADAALKDEKARLLMTQPGVGPITSMAFVLTMGDVSRFPRGKQVASYLGLIPREYSSGGKQRLGPISKQGNRFLRMLLVEAAQVAVRHDPGFRNEYLHRCHAKPKGVAKVAAARKLAIRLYWMLRTNRGYPEVVRVESSSRVPLVIRHGG

SEQ ID NO: 264688 - protein, 428 aa, unidentified
MSIQPRCWYAAVDWASEKHDVVVTDYEGKRLGRLQVEHSGEGLARMADWLVATTNGTPDAILIAIEVPHGPVVDTLIERGFSVHSINPKQVDRFRNRFTVAGAKDDSRDCDVMASALRTDRHCFRRLATRDPTLVELREWSRMHEEHGGDRRRYVSRLREQLIRYFPAFLQLEGDLDADWRLELLECAPTPRSATALTKLRVSEILERHRARRRDAGQILAVLQQQPVTTSPGTTEAAAAHVTALLASIRLAKQLEKEAKDNIERITDQLLDPNSDKSESPCDAGKPTSEQTAPLRDAAILLSFPGIGPLNLATLLTEATDGVRDRDYQALRCQGGVAPVTKQSGKSRYVVQRWACNKRLAHALLHWARVAVQHDPASRAKYRALRARGKSWGRALRGVADRLLYVACAALRSGTLYNPELANKKSAC

SEQ ID NO: 264689 - protein, 313 aa, unidentified
MNEKPCYVGIDVSKESLEVALRPSGKQQTFGNDDDGIARLVHFLHAEAPSLIVLEATGKFERPLARALAEAGLLFNIINPRQSRAFAKATGVLAKTDRIDALMLARFAEVLQPEARPLKTEQTEALSDLVTRRRQVVEMITAEKNRRVTASKRVSRDIQAHIRWLEKRLEDLNDEIDDLIRKSPLWREKDKLLQSVAGVGPVTASTMLGALPELGTLNRKQIAALVGVAPFNRESGRHRGKRTIGGGRGAVRSVLYMGTLAAIQHNPVIRTFYWRLFDAGKPRKVAITACMRKLLVILNTMLKNGTSWQYQPA

SEQ ID NO: 264690 - protein, 421 aa, unidentified
MLTDSPDDGVIIERVAALDVGKAEVVCCVRVPGAQAGHRAQEVRTWATMTRALSAMTDWLHGLGVTRVVMEATSDYWKPAFYLLEAAGFETWLVNARDVKHLPGRPKTDKLDAVWLCKVAERQMLRPSFVPPEPVRRLRDLTRYRVDLVAERGREKNRVEKLLEDAGIKVSVVVSDIFGVSGRAMLAALVAGQRDPLVLAGMARSSMRRKIPELGQAFEGRFSEHHAFLLSRMLAHVDALDRDIAAVEDRIEELIVPFADAAARIDEIPGVGRTAARIIIAEIGTDMARFPSAAHLASWAKFSPGTRESAGRSLGTGSTGHGNVYLARALGEAAVGASKTDTFLGERYRRIARRRGKKRAVVALGRSILVIIWHLLNDPDAHFSDLGTDFYDRHRSTQRAVRSHIRQLQALGYQVSVQPAA

SEQ ID NO: 264691 - protein, 343 aa, unidentified
MVHYIGLDVSLKKTSICVVNQAGSVVREGVVDSEPEAIAAFVRSKAPGAVRVGLETGPTATWLWSELKQLGLPVICIDARHARAVLKMQINKSDRNDAAGIARIMQTGWFKEVRVKGLDSHSVRALLASRALLVKIKRDLENQIRGLLKNVGLVIGRAKFNVFAVRAEELIEDRPELIAVVGPLLKARQAIEQQTDDLDRKVLKLARHDAQVRRFMTVPGIGPITALCFKATVDDPTRFKRSRSVGAYVGLTTRRHASGEIDWTGRISKCGDAMLRSYLFEAAGVLLTRVPKWSALKAWGMRLAKRNGLRKATVAVARKLAVILHRMWIDRTEFNWSKKEVAA

SEQ ID NO: 264692 - protein, 357 aa, unidentified
MLSSNVKYIGLDVHKEAIAIAVVNGAGKLVMESIVETKSSTVLDFLHGLRGELHVTLEEGTWAAWLYDVLKPHVREIVVCNPRRNALLKEGSKSDKIDARKLAELLRAGLLRAVYHGENGLQTLRELARSYLTISKDLKRVKNRLKALYHSWGICCAGKQVYAARHREQWLSKIAQVGVHRRAELFYQQLDGLLVLRNTVRGELLAESRKHQAVKILRQVPSIGPLRAALLLALMQTPHRFRSKRQLWTYSGLAVVTHDSAQHRYVDGQLQRSKKPQQIRGLNQNHNHAMKEIFKSAALNASRCAGPLQDFYARLLAKGMKPDMARLTLARKIAAITLALWKKGGSFDAEHLKSQAA

SEQ ID NO: 264693 - protein, 322 aa, unidentified
MSQPNPLCVGIDVSKATLDIAASSDVAQFTVSNDSDGFNAIITGLRRHSVALVLMEATGGLEVAVTCSLQAEGFEVAVVNPRQARDFARAMGYLAKTDRIDARVLTQMAEVINRHPERKRFIRALPDAERQALAAMVVRRRQLIAMLVAERNRLHPFHPQNKKSINTIIKALEDELVRLEKEMDSHIRNHFKEIAERLSSIKGVGTMTVSAMLAEIPELGTLSRREISALIGVAPVNRDSGTMRGRRTIFGGRAGVRSALYMAALVATRFNPVIKTFYVRLLAAGKAKKVALVACMRKLLTILNAMLRKNEEWDESYHHVAP

SEQ ID NO: 264694 - protein, 351 aa, unidentified
MPRTSSVHAVTTIGMDMGKNTLHMIGLDSRGAIVLREKVSRGRIALRLANLPCCLIGIEAGLATHYVARELAALGHDVKQVPPTYAKPFRQGHKNDFRDAHSVAEAVQRPTTRFVPAKTDEQLDLQALHRVRSRLVSERTAVINQIRGFLLEHGIIVRQGLRFLRQALPDILAKRTDVLSPRMVRIVADLASDWRQLDERIEPVTDEIESLAKSDDGCRRVMTVPGIGPIISSAMVAAIGNGAAFARGRDFSAWIGLVPKQMSTGDRTILGRITKRGNGYLRTLFVQAARVILLRPASWPKHSFGVWLARAAQRLHRNVLAAALANKLARIAWTVLARGRGYEARITKPAV

SEQ ID NO: 264695 - protein, 294 aa, unidentified
MNSPDGWRHLLDWLITQKVQRVHACLESTGRYSLGIACALYEAGHVVSIVNPAQIRDFARTKLGRNKTDGVDASHIREYCELFKPQPWAPPSEAHRRLGELQTIRAGVIAGLTEWKNRKNSGMVDAVAQSLADVTISHFNSQLKAVDEAIAQTIGNDSGLRRKRDLLLSISGVGEILAGVLLAELPGPDVLRSSAAVVAYAGLNPRQHQSGTSIDRVTRISKIGNAVLRAALYMPAMSAMRHNPAIAALVARLKSRGRLNPKQIVVAAMRKLLVLCFGVLKTGKPFDPAIAMGC

SEQ ID NO: 264696 - protein, 350 aa, unidentified
MIIIGCDYHPGFQQIAFVDTETGDYGEPRLEHSEGAEKFYRDLAALGKKVRVGMEASGHARWFERLLGELNMELWIGDASEIARKRERKQKTDLEDARHILQLLMENRFPKIWVPSGENRDLRQLLWHRHRMVQARTRIMNQLQAVALNEGLRCKKKLWRQHGREQLESFRLAPWASRRREDLLQLLDRLNPTIAELTQAIEQEVEKCPEAGRLRTHPGVGALTALAFVLIIGRPERFQCGKQIAAYLGLVPLEDSSGSRRRLGHITKQGNSMLRFLLVEAAQVTARSIPEWRNKYFHLAMRRGRKIAKVAMARRLAIALYWMWRKGWNYEQSRKFGSHAGQLGPGHGVQ

SEQ ID NO: 264697 - protein, 372 aa, unidentified
MGNDSVAYVAFDTAKLHHAVAIAEEGRSGAVRFLGEIENNEAAAVKLVKTLEQRYRGLTFCYEAGPTGYELHRLIGRLGHECMVVAPSLIPKKAGDRVKTNRRDALSLAKLLRAGELTAVWVPDARHEAMRDLTRAREAAVADLTSKRQQVLSLLLRLGRHYEGKRHWTRMHMNWLLSQKLAHAEQRIALEEMLLAVREAQGRVARLEQAIRTALPDWSLAEAVTALMAMRGFDLVSASAFLAEIGDLSRFATARELMGYLGLVPSEQSTGETTRRAGITKAGNRRARRILVECSWSYRHPPRLGKEKLGKVAAAPRAVREIAWKAQHRLTGRYRALTRNGKKPTVVVTAIARELSGFIWAIHRAVRPAMAR

SEQ ID NO: 264698 - protein, 351 aa, unidentified
MSRKSAYANVATLGIDIGKNSFHVIGLDRQGAIVLKQKLSRLQIGQRLANIPRCLIGMEACVGAHHLSRQLSALGHDARLMPAKYVRPYSKGQKNDYRDAEAIAEAVTRPTMKFVATKTIEQLDMQAMHRIRDRLVSRRTSVINQIRAYLLERGIAVRKGAAPLRTALPTILATCTDVLSPRMLHLIEDLALDWRRLDERIEILTGEIEDLANQDTACRRLMTVPGIGPIISSAVVSAIGNGAVFSKGRDFGAWLGLVPKQMSTGDRTILGKISKRGNRYLRKLFVQAAWVVLIRPENWERYGLKSWIEPARKRLHHNVLAIALANKLARIAWGVLSGERNFEARVEPHVA

SEQ ID NO: 264699 - protein, 362 aa, unidentified
MSKDYKKRISLKNESESFIKYSVGNDISKEKFDCCISLIDNQQQVGIIATRSFSNTPSGFKSFEVWVTQKCKHDIPIVFLMEATGVYYEHLAWFLHKAKKNVSVVLPSKAKKYLQSLGYKSKNDKIDAKGLAQMGAEQRIEKWDPPTSEILQLRSITRHRQALQETRTRLNNQLEGHIHAEHVNNEVVDHLELLIETIDNQIKQTEKMIKETVKKDEDMYRKISNITQIKGVGLVTAATVIAETGGFHMIKNQRQLVSYAGYDVVENQSGNRVGKTKISKKGNSRIRRILHLPSFSVVRNGELQFVNLNQRVFERTKIKMKGYVAVQRKLLILIYTLWRKDETYNVKHPVMQSRSLSFRMAS

SEQ ID NO: 264700 - protein, 359 aa, unidentified
MTEHHHHVAGADPHKLSITLAVIDALGRELDVVHATNDAAGIESMITELRTRNVVRVGVEGSAGHGLQFATALVEAGFDVREVPARRTAQRRRQRRRPKTDREDALAIARATAADDALGPARAACRNDVVDELAVVHAWRADLVQRRKIALNQAEAVLAKLPIDTLDKIGRRGTTLRRLKRAATHHDDTHPVTRTRLARLAELLDDYNDLTRRIKQLDIDIGRLVTKTGTTLCDEVGISFTNAAGLLIEIGDPFRFRDEAAFARWCGVAAVAVSSGEGASQPVRHRLDLGGNRRVNSMIHTMSVTQARFHPEARDYLTRKRSEGKTAKEARRAHKRRLADRIIRRMWNDTRQQAQPIAA

SEQ ID NO: 264701 - protein, 398 aa, unidentified
MVFVGIDVAKDKHDCFIISSEGEVLAEVFTITNNRAGFECLLLRIRSCAGKSEKIKVGLEATGHYSYNILGFLLDNGLDSVVINPLHTNLYRKSLSLRKTKTDRVDARTIAAMLMSDVDLKSYTDTAYHNEELKSLTRYRFDKVRARAKLKQSVARLVNILFPELEKLVPSLHVASVYALLSELPGAYQITTCNLTHLKTILADASKGRYGRDKSIEIRNSARQSVGSRMPAKSLELQHTIRLIQEMDMEINEIEVQIEAMMVEINSPLITIPGIGTRMGAMILAEIGDFSQFDSPDKILAYAGLSPSIYQSGQYISGHAHMEKRGSRYLRFAIYTATKYVCLWDPTFATYLAKKRAEGKHYNVAISHAAKKLVRLIFAMERSGQAYRAVLPFHLLLL

SEQ ID NO: 264702 - protein, 428 aa, unidentified
MKKSEYLSTLFVGIDVSARENVVCILNFEQEKLLEFAAPNSQPGADEIADKLSVLLSSCNFTRIVIALESTSFYGIHIANFLSSCALLAPYNTYVYCLNPKMIANYKKSFIGIGKNDPIDAFVIADFARVGRITSEPWRGSQFLALQRLTRHRLHLVECLTREKTYMLSNVFLKFSEFATLTKGNHPFTNKYGATASAVLTDFLSNEQIAEASIEGLIAFVCEKGKNRFSNPQEVASILQAAARNSYRLDKCLYEPLTIAIASSLNCLKAFEAEIKSIDKAIEKTVSGLNPAEYLCLRSIPGIGPVFASGILAEIGSIQAFDSHSALAKYAGIVWTENQSGDFQSDDTRMSKAGNKYLRYYLIEATGSVVRHLPEYNAFYQKKFDEVKTHKHKRALALTSRKFIRLVFGLLAKNQLFVPQGVDHTPNS

SEQ ID NO: 264703 - protein, 408 aa, unidentified
MKTLHRRCAGLDVHSDTVVACARLTARTKASHEVRRFSTATRDLLELADWLAGHGVRHVAMEATGVYWKPVWHILEGRFELTLANAAHIRNVPGRKSDVNDAVWISDLLAHGLIRASFVPPAPIQDLRDLTRTRTQLTREVTQHVQRLQKTLEDANIKLVTVVSDIMGVSGRRILKAMMAGETNAAKLAGLGSSRLKAPRSDLAAALDGRMTAHHRFLISHHLGLIEELERRISAFDERISEALAPFRDAMERLITAPGVGRLAAEVIMAEIGPDMSPFPTAGHLVSWAGLAPRLDESAGKRRSTRVRHGAPWLKPVLVQCAWSAARAKGTYLQAQFFRLKARRGPKKAAIAVAASILTAVYHMLKHGTFYEDLGADHLIKRDAATTVAKLARRIKELGYDVQYQAAA

SEQ ID NO: 264704 - protein, 344 aa, unidentified
MGINEEKEVIMLYRGIDYHKRWSYFTCEDEGGRVKWSKKVRNDREEIEGLLNLEERYKAVLECGRNWGVMYDTLEDIGCIEKLVLANPFKTKAIAYAKIKTDKIDSKVLCDLLRANLIPLVWVPPKDIRWKKYIARNRAFLVSLKTMIKNRIHVIIDRNHLNSPSVSDIFGRYGRQWLYSISLPEEERRLLDNHLKMLEFLEEEIKGVERWLKDLFRGDRYVELLNTIPGIGKIFGVMIALEIGDINRFPDAKHLHSYAGLVPSTYASGNKVYHGRLIKYANKWLRWAFVEATLTAIRVSPFFRSYYERRLENKSTQASIISTARMLASVTYHVLKENREYREW

SEQ ID NO: 264705 - protein, 427 aa, unidentified
MQYNQNEKILQITDETLIIGVDVASETHFARAFDYRGIELGKLIKITNDAQGFLIFKVWLNELKQNHDKNTVMIGMEPTGHYWFNLAQYLKDLGIKIVLVNPFHVKRSKELDDNNPTKNDRKDPKTIAMLVKDGRYLVPYIPEGIYSELRTAMETRWHIVKQLNGIRNRVKRWISIFFPEFNKVFKDWEGQGALIALKEFPTPDKVLGKGTDAIAERWQRAKLRPLGKKRAARLTAAAEASIGVREGLLAAENNLMMLLDDYEMKMRHLQQVMALVGQLVCQIPGIDRILNIKGIGLVTVAGFIAEVGDLDRFDHPKQIQKLAGLNIKENSSGKYKGKTTITKRGRRRLRALLFQVMMPMVAKNPEFRALHQYYTTRANNPLKKKQSLILLCCKLIRVIYALLKKQIAYDPEKMMNDIQRPVLPIAA

SEQ ID NO: 264706 - protein, 348 aa, unidentified
MKQITMIGVDLAKNVFQLHGVDAGHRPVLRRQLSRTQMLPFLAKLPPCTVVMEACGSAHHWAREIGALGHEVRLIPPAYARPFAKRGKSDAIDAEAVCDAASRPSMRFVPVKSIESQALSTLHRARALLGKQRTMLVNALRAHLAEFGFVAGKGIRKVPDLARFVEDAPPSRLPEVARGVLRSLLHMIEQVNQQLGAMEKELGVFHRDNASSQRLASTPGIGLITATALASLTPDAATFKNGRHFAAWLGITPRQDSTGGKTRLLGISKAGDGYLRRLLVIGATSLLRSLQGKTTRLALWVQALLARRPKKVVIVALANKLARIAWAIMAKGEPYRTATIEAQAGPLA

SEQ ID NO: 264707 - protein, 343 aa, unidentified
MDHSAGLDVSVKETSVCIVDDTGRIVREVKVASEPEALLSVLTNPGYHFKRIGLEAGPLSQWLYSALAEAGLPVICVETRHMRAVLKAQINKTDRNDARGIAQMMRVGLYRPVHVKTLRSQKLRMLLTHRKLLQSKAIAIDNDLRGTLRNFGLKVGVVGTVKFEARIKELVENLPDLAELVEPLLVVRRVLREQFVIQHRRLLAIVRDDEVCRRLMTVPGVGPVVSLTYRATVDVPARFRKSKAVGAVFGLTCAKHQSGESERSGKISRCGDEMMRVMLYEAAQSMLLHSKKWSWLKAWAMQIARRRGKKKAIVALARRLAVIMHRIWVDGTEFRWAREVAVA

SEQ ID NO: 264708 - protein, 350 aa, unidentified
MTIIGCDYHPGFQQIAFVDTETGDYGEQRLAHSEGAEKFYRELAAQGKKVRVGMEASGHARWFERLLAELNFELWIGDATEIARKRERKQKTDRQDAQHILQLLMENRFPKIWVPSGENRDLRQLLWHRHRMVQTRTRIMNQLQAVALNEGLRCKKKLWREKGRQQLEAFRLAPWASRRREDLLQLLDRLNPTISDLTQAIEQEVEKCPEARRLRTHPGVGALTALAFVLIIGRAERFQCGKQIAAYLGLVPLEDSSGNRRRLGHITKQGSSILRFLLVEAAQVTARSIPEWRNKYVHLTMRRGRKIAKVAMARRLAIALYWMWRKGWDYEQLRKFGSHAGQPGNRDGVK

SEQ ID NO: 264709 - protein, 394 aa, unidentified
MSQKFSSAIAVVGIDIGKNSFHVVGHDRRAAIVPRQTWSRGQVEARLANPPPCLIGLEAYVGAHHLSRKLRVLGHNARLMPAKYVRPCSKGQKNDFRDAEAIDEAVQRPTMKFLATKSADQLDLQALHRVRERLVSQRTGIIDQIRAFLLQRRIAVRQWLRFLRAELPSILATRTDVLSSHILRLVEDLAGDWRRLDARIEVLSCEIETFARQGQHCDRLMTVPGIGPIISSAMAAAIGTGDMFSKGRDFGAWLGLVPKQISTGDRTTVPGWCSWHSALRMRSGSSGHSLRRNRRLPRKRFNGLRCSTPMRIASAVCPAAHRAAVRQTDTRPLIEDFKSWFKARLLEVSKKSGRGKDIRYTLNHWGGLIDDGRIETDSKTVERSIKPIGLGRKN

SEQ ID NO: 264710 - protein, 421 aa, unidentified
MTPTSHTTFAAFVGIDWADAKHDGCLQAAGSAKRECFQLAHTPEAIDAWGTTLRTRFHGHPVALCLERTKGPLVSALRKYDFLVLFPINPLTLARYREAFTPSRAKDDPTDAALQLELLLTHRDKLQPLQPQSPTMRALAQLVEHRRRVVGDKVRITNRLTSALKNYFPQVLQWFQDKDTCIFCDFLSRWPTLKAAQLARRSTLETFFRDHHVHTADVLATRLHAIKAATPLTTDEGIIAPNVLLVQTLVSQLRVTLDAIEAFDQAIAQRALHHPDFPLFQALPGAGPVCASRLLVAFGEQRERYASAAALQKYAGIAPVTERSGKKAWVHWRLQCPKFLRQTFVEWTAESIRHSFWAQVYYQQQRDKGNTHQAAVRALAFKWIRILYRCWQERTPYDESTYLQTLMRRNSSLIPNRVKAS

SEQ ID NO: 264711 - protein, 319 aa, unidentified
MAQNDLVVAGIDVAKDKVDVCIRALSLRRTFAATAEGRRELASWLRRQKVGKAVMEASGGYERDWAKALRGAKIEVRIVDPKRVRSFAQSAGRLAKNDTIDAEMIAWFAETFDEARGQAYDATREQLHQMVNARQALKDMQAKLENQGEHAMPAAIQRMHARILKTISVELVKLEAAISAMIQATPHFAELAEIIESVPGIGRTTSAALIAAMPELGQANNKIVAALLGVAPYDDDSGRRRGERHIKGGRRRTRNVFYMACLGAATQHNPVLKAFYNRLVAKGKEKKVALIACMRKLISILNIMIERRQKWDASRYAVS

SEQ ID NO: 264712 - protein, 346 aa, unidentified
MKIVGCDFHPSFQQIAVLETSTGEIEQGRLCHGDGEAEQYYRQLEGPALIGMEAVGNSLWFEQLMQQLGHELWIGDAAQIRASYVRRQKTDKRDAGHILRLLVEQRFPRIWVPSAAERDRRQLLLHRHKLVGMRTRVKTELQHLALNQGMQKKRQLWSARGRTDLKNLPLKGWTQRRREDLLSVLALVENQVEKLDDAVKEIAADDRQAQLLMTQPGVGPVTALAFVATIGDVRRFKRGKQIASYLGLIPAERSSGDKRRLGAISKQGNVFLRTLLVEAAQSAVRHDAEFRREYRHRCHQKPTGVAKVAAARKLAVRLYWMLRTQTPYAAAVHNEGSPSHPVVSVS

SEQ ID NO: 264713 - protein, 360 aa, unidentified
MAIVGGLDIHRKQITFDYVDTGTGELVRGQIAPADRAHVRAWLARFGERDDGVAFGLEGCTGWRYVAEELAAVGFEAHVGEPADTAALRGRKRRAKTDRTDSRHIRELLDTGRLPECWIPPWRVLECRALLQAYHDLRVEHTGWVQRVHAVLFHQGATALGEGGLGSAQGLARLHEITDTQLSPAGQTQVAVALRMLQVCDEQLEIVRRQVLAAARRMRGARVLHQELYGVGPVTALALVCWLGGAGRFRSSRQAVRFAGLDVTVYSSAGKSSPGRLSRQGPAVLRWCVYEAGKTHARASAPDHAYYARVKERIDGKRAALSEARKITRRAVHLLAQLGDDAFDWAEAPTSLRPRVARAA

SEQ ID NO: 264714 - protein, 417 aa, unidentified
MEQQVKMEVWVGIDWGDQKHAVAIVCGDGEALEGFWVADSPEGYARLSERLARYETVGGIALEATRNMLVLYLKQAGYPLYLINPKMSKAWRDTDGVSGAKSDPRDGLTLARGLAFRHKRLASVSHADPAMERLALLCEKECAQIHKRTALVQELKSTLKQYYPAALAFFNDWTSPAAWDFLKAYPSMRRLAEAKAHTLIAWLKAHRLGWTRNWEEKVKTRANAAAWPIHPHEDIYQLQVQAVVGQLKALAATLKEFRVQIEAAFRALPEAAVIVSLPGAGPKLAPRVAAIVGSPEAQHGGLEALRGHTGVAPVTKETGQHRTVQIRRLCNKQWRNALHLFAWCSTRFSPWAHAFYQYHKKRGDTHSTALRKLGDKWLGIIMRMIETGQPYDEAKHLKVLERTHSPVWEYMQAQNGG

SEQ ID NO: 264715 - protein, 313 aa, unidentified
MTDTTRFVGIDISKSSFDVCVLPDGRSTSFANSAEGIADFLVFIEPFCGIERLVLEPTGGYERHVFAALQAAQLPVARVNAKQARQFAKACGQLSKTDKIDAFILADYARRMETRIVPQRSSQEGALVDLVRRYRQLSHMIVQEKNRREKQNETLKDWIEEILHVLLEQRQAVVDAMEACLKADLELARKADILMSLKGIGLRTACFILADLPELGRIGKGQIAKLVGVAPLNRDSGLMRGKRMIGGGRQPVRDALYVAALPAIRFDPAMKTFFMHLKQKGKPGKVALVAVMRKIIIILNAKMRDEYATVLDH

SEQ ID NO: 264716 - protein, 410 aa, unidentified
MHPKMQYTYVGIDSHKDTHTAVFMDCFFEKLGELTFANLPSKFDIFLQNAQKYLQNDTVFLFGLEDVSSYGRTLLAFLAAQNQQTKHVNALLVARERKNQNIVQKSDAVDAECAARVLLSKFGELPDAQTDDSYWVLRTLVARRSFLVRQKTAAKNTLHSLLTQHYPNYRSFFFSIESPTAMAFFAEYPSPNTLKYVTLEALTVFLQELSNFNCGEESAKRILESLQSTNVEFQEIRNKVVKSTIKQIQFNMEEIEQIEAELAALLKHFNCTLTSMSGISTATAAQMRSCIGDIKKFATPAKLARYAGIAPVTYASGKKDSQFSNQRGNRALNSLFFNLAVRLSFITGRTNRVYNSFFYDYYNRKLSEGKTKRQAIKCVERRLVNIIWTMMTNEEEYVNPPTYALPKNEN

SEQ ID NO: 264717 - protein, 427 aa, unidentified
MKEQSSTIVGIDWSADSHTCYDLQADKTFKITDSVEGYEKLLKNYPEAVFVIEEANNRIGDYLLINNREVYVLPPCRSKEARKYHFSSGAKSDNLDAKAIALTFRDHPSYCRRITYSELKATMIKLVTAYNIVSKMHSQQCNRLYSLLLRYSPDYLHIMEKQYKSDRSLKILSLCPTITELKKTSNEKLKKMLNKDNHRMTSSLRKKLDKLRSEGIFWGDTSCEGKLIMFLANIILSLREELEALKKEMVKTLESSPYKIILSIPGVGAVVGSYIVKAYLTHDFRSYQEMQKYAGTVPFLFQSGRKSIMSMRKKCDNKLRTMIHIAAFVSLKNCGWAKNYYRRKRNEGKTYGHALRALGNILLKIAFSVLSNMKEYDESLFLNAKGIKTTQLNDTTFSETSSYPEYSQDAHLSLAATKDVIDNLIVT

SEQ ID NO: 264718 - protein, 343 aa, unidentified
MEYGAIDLHTKESEIRIIDGAGAVVCERRIATTRTRLTDVFGSRAPLRILLESGTGSEWVAQHLEGLGHEVVVADPNYAPMYGQRTRRIKTDRRDVAALADANRLGVYRKAHRVSAPQRDVRRRLRVRDQLVHVRRQAINLLRAQLRSEGVRVPTGAAETFAARFRASEASAAVREAMAPLLELLAALAPLLGQAEQWTRQAAKSDPVARRLMTTPGVGPVVALAFQATVDDVSRFATPGAVTSYLGLVPREDSSGERQRKGAITKAGPSRMRVLLIQSAWHLWRSPAGSATLHAWARRLGERRGRRIAVVALARRLARILWAMWRDGRDFEPARVGRLAVAA

SEQ ID NO: 264719 - protein, 400 aa, unidentified
MVWYVGIDWATEEHAVCVLDDGGRVKKALSAAHTAAGINGLCRELGALGDRAQVRVAIERPTGLLVDTLVDAGFVVVPLHPNAVKACRPRYSAAGGKDDPGDAYMIADILRTDGHRFRELQPLSDDTRALRAAVRARDDLVAERVGVANQLRALLESFWPGAAEIFADIDSPIALSFLARYPKPQSAAHLGEKRLARFLAEHRYSGRRPVAELLERLRAAPAGKAGVVECDVKADLVRAYVAVLGPLVAQLTTLTALVEHLVGQQPDGPVVTSFPRAGKVNAAQILAELGDCRERFATEEQLAAEAGVAPVTHASGKHRGVAFRRACNKRLRQAVTCFADNSRHASPWAADVYRRARDRGHDHPHAVRILARAWLRVLWRCWRDGKPYDAALHGGAQRVA

SEQ ID NO: 264720 - protein, 317 aa, unidentified
MAEVSFPSQVLRGCGIDVHLKVVVATIKGEGIRKETRSFDTFTSSLTELKEWLLQNGITHVAMESTGVYWKPVYRVLEDAIPNVWIVNARHIKNVPGHKTDKMDSEWICKLLLAGLLKPSYIPPKEQRQLRDLTRYRNKLIQHVASEKNRIMRILEDCNIKLSSVVSNTSGTTATKLIDWLCEGKFITLQDVESIYHGKLSATPEELLKACTGFVESHHVYMLQMIRRDIAQTMVLIDELGVKIREVLSKYDNAIELLKEIPGFSDKVVEDLVAEIGFDMSKFPSEKHLASWAGICPGNNESAGKKKAEESPTETNK

SEQ ID NO: 264721 - protein, 401 aa, unidentified
MKRVCGLDVHKDTVFCATFNGKKHGPVVEYTTLTSSIRAMGESLRKEGVDEIAMESTGMYWIPVWNILEDMGFPLILVNPFLIKQMPGRKSDVKDAQWIATLLHKGLLRSSLIPCPQIRELRTYSRKYVKLQQRQTSVLQDMERTLEMCSIRITSFVSNTSGKSVLRVIEKIVQGETSPDVLVEVIHGRIIHSHTTKKIKESLTGFIKEHHRFMLELSLNEYEMLVIQSNLCLSKMEELCNEHYKKELKLLLSIPGINTIAAMIVLAETGADMKAFEHSGKFSGWTGLRPRNDESAGKYKSTATTKGNRYLRAILVQIAWGAIRTKGSFFKEKFNRLAMRKSRKKALIAIARKIGVLIWNVLYYEKGYDPKRLIVYDPGTLQAKILYHQKEYDRLQKLIQH

SEQ ID NO: 264722 - protein, 348 aa, unidentified
METYIGFDISLQTTHICVVDRDGGIVLESSAESEIPSLERWLCTHGCSWTIKRIVFETGQLSTHIYHGLKAAGHPVVCIDARHAHGTLKAQRIKSDRNDARGLAHIARTGWFKASHVKSDSCQALRTLVTGRKQLVHTRLSLENHIRGTLKTFGIKLGAVTSAGFSKKVRGLISGRDEVVEIALSAMLDARDGVWAQERALDRQSQKRARRDVVCKRLMTIPGVGVATALAFMAEIDDPGRFKHSRDVGVHLGLTPRRYASGEVDYTGRISKCGNGTLRTLLFEAAAVMLTRSAKWSRLKAWGVRLAQRSSFKAACTALARKLAVVMHRMWVDETEFAYGQAPSLQAA

SEQ ID NO: 264723 - protein, 456 aa, unidentified
MSKQRKSAMPAVHAKPTQRKHAAGIDIGATSIYVAVPVDRDPQPVRSFQTFTEDLHRLADWLQRCRIKTVAMESTGVFWVPLFQILEQRGFEVCLVNARHVKNVPGRKTDVSDCQWLQYLHSVGLLQASFRPAQQVCALRSLLRHRDSLVQTASTYAQRIQKALDQMNLQLHHVISDITGVSGVTILDAILNGERDPLKLASLRDHRIKATEETVAKSLVGDYRPEHLFTLRQSLDAWRYHRKLIAKCDDEVQRHLVQFASKADPKQNPLPRPRKVSSSKVYSSQPGYDLRTEHYRILGVDLTEVPGINTLLVHTLLAEVGPDLSKFRSAAAFASWLGLCPDNRISGGKILSVRTRHVQNRAALALRIAAHTLHHNQSVLGHYYRRMRAKLGAPKAITATAHKLARILYHLLTTGQPYQESIFAERETQYQKRALFSLHARARTLGYQLIPLTAST

SEQ ID NO: 264724 - protein, 343 aa, unidentified
MKYIGLDLHKKSIFATVLGGDGKILSRTKIGSNSRDIIYYLKSQGTKDELSVAMEASYNWQYFYRAAEEAADNIVLAHPLKTRIIGEAKIKTDKIDSEVLAHMLKADMLPAAYVPKRSTMQSKMLLRCRMSLVRIRTQIKNKIHAVIDKNKDSYTGLENLSDIFGKMGRQILRDTKINPIDYHILSGYLDLICQINDKIKDLESRIDKRSLNDKEIELLKTIPGIGTFTAFLIKTEIDDIARFLSKEKLCCYAGLVPSTHGSADKLYHGRIVKQGNKFLRWALTEAAQVSIRYSEYFRYYYNKVRSKKNTNSATIAVARRMLEVIYAMLKEDRAYIEKPVDIK

SEQ ID NO: 264725 - protein, 367 aa, unidentified
MAKIIKSESSKTMVDGGAVTVGLDLSDRKARFHAIDDEGKTIETGTVTLEAVPLQRWASSIPATAMVIEAGTHSPWVSRLLTACSHEVIVANPVKVALITKNTNKSDGVDAEYLARLGRFDRTLLHPIQHRGEQAQLDLQVIRTREIMVESRTKLIGHLRGAVKSFGARLPKCSTEAFVNKTRKVIPEQLRTALDSVYVQIEHLTTTIASYDKQLEKTARERYPEVERVAQIKGVGTLTALSFVLVLEDARRFRRSRSVGAFLGLTSKRDQSGESDPQRRITKAGDRLMRRLLIQSAHYILGAFGQDCDLRRHGMRISERGGNRAKKRAAVAVARKLSVLMHRLWVSGEAYEPLRNSGKLQELPTAA

SEQ ID NO: 264726 - protein, 418 aa, unidentified
MGKRKNRVCGADVHKDIIVATIQDSDDTEFQEKFGTTSIELGRFRDWLIAHNCEQVAFEATGVYWFPVYDALSPSIDTIVANPWMIKGIPRNKSDTLDSKWIAGNCLDGKIKRSRVLPKDGRDLRTLTRARSAYTKTRTQLRNRIHKYLALCGITLSSYISDIFGKSGRHILDGLIESKDIDTIMDGIPSGKVKNKREPIKASLGNGLDDVSRMLIKDTLELLDHLDEKVSDTSLEILGRLQERARDLAIVMSVPGIGFVSASIILAEIGDYHDFQKSEQLVKWCGLAPGLNESAGKKSPCGITKQGSKHLRTILVEIAQVVAKMSKNNLSSFFHRLRARKNYNVAITALARKLISIIFHLLINQELYQEDNCATVKTKPIKKDLLCLSKEEQFKDGVAAIVDAFYYFKKKSSLEGGG

SEQ ID NO: 264727 - protein, 346 aa, unidentified
MTIVEDACVVTGGVDTHADSHVAAALDPLGGLLGVREFPATAAGYADLLSWLSGFGTVALVGVEGTGSYGAGLARHLAAAGIRVVEVDRADRQDRRRAGKSDPLDAVSAARAALSGRADGAPKGRDGAVEAIRALMVAKRSARNERTQAINQARSLILTGPDDLRARFARRSAAGLAEAIAALRPRPGDAADYAVRVGLRELGRRVEFLDGQLDRLDDLIIPLVTTRAPGLLSLYGVGPDTAALLLVAAGDHPERLRSEAAWAHLCGVAPIPASSGRVRRHRLNPGGNREANHALWRIVITRMSAHPATRAYVERRLREGLTEKEIIRCLKRYVAREVYHYLRAGG

SEQ ID NO: 264728 - protein, 349 aa, unidentified
MHYMGIDHHKQYSHITVLDERGEVIKAEKVGNTSKEVNVFLNGLDGKIEGVIEAGYSHYTMMDLMESVGVRMKIAHPEQVKAIAKAKIKTDKRDSKILAHLLRSDLIPEVYCRDQENREAQRILRHRVTYVRMQTQVKNRIRALLAKQREEVRQIVELEENLFKVRGIEALGNLELPGRDQQMLGSYLDTLEHLKGKIKLSDALVREILRRSEEARLISTLPGFKEFFPVLVSVEIADINRFDSPAKLHSYAGLVPSTHASGEKLYHGKLVRQGNKWLRWAAVEAVWPAVRSDFDIRLYYQRRKKRKGANSAKVATARRLLTIIYRVLKEKRAYIPYKREKHTAAFSGI

SEQ ID NO: 264729 - protein, 341 aa, unidentified
MSLVMGIDQHRAQISAEWIDTITGEISRARVAPADRAGVRKFLAGFRGKGLEVALEATTGWRFLVEELERIGAEVHLAEVVQTAGLKGRGKRPKTDWADARHLRELLLIGRLPESWIAPAHLLDLRARVRCRHTLVHQRTEWQQRMQAVLFHHGAPHARGLLKLANRERVAALKLPAAAREQLSIALSMIDAIDLQLSPFDLSLREYARKQPGCRGLTHDIYGVGELTAVTILAELGDCRRFENSRDAVRYSGLDITVKQSDQRRAPGHLSRQGPPALRWALYEAAQAARRPSSPDRGYYEQLAERIGANRAHIAISRKLLKRSYHLLRALGDQALQPIAA

SEQ ID NO: 264730 - protein, 397 aa, unidentified
MSRLYVGIDVSKEFSTAQGIDKNGKKLFYLRFAMNSEGFSELLKAMLKCTRGVTEITTAMESTGCYHINLFSFLSSEGISCVVVNPLLVTNFTRLSLRKTKTDKKDALTIAQFLLSNEKSLSKIAFSQDIQDLKDLARERESLSILIAAMKNDIKRLLQGTFPELEKICSPCGETMLHFLKQFPSARLVVAAKKRDIEQALICPEEKRKRVVVSADDIIAAAKTSVASPSAAKELILSEKVSTLLYLQQKSDRITEVLIETCESQRVEELDIIRSIDGVSDITGSTFLAEIGDISNFVSYKHLIAFAGLDPSIHQSGQYEGRSTISKRGNRHLRRVIFLITLCAVRSKNVFREYFLRRKQEGLPPKKAILATAHKIVRTIFAMLSNKTLFRKGVAAE

SEQ ID NO: 264731 - protein, 320 aa, unidentified
MTILTSPTVVGIDVAKAEIVAYREDLNATQAIANDRDALGRWLNTLPANSSIALEATSTYHLDTAELAHEIGHRVYVVDAYRLSHYRESIGQRAKTDPCDARLLARYLSSEQKRLRLWSPPPQAYKLLKSLLHRRAELINLRVSLTLSWSGEPLLKDELAQQLKSFKQAEQVIQKLLHKVSKEAGITENIKRCKAIEGVGDLTATGLATAFMRGQFANGDAFIAFLGMDLRPKDSGKKAGSRHLSKKGDSELRRLAHNAAMAASRSATWKPYYESYLARGLAKTQALVILARKLCRVAFALMKNQSEYQPNLRLQGLPAT

SEQ ID NO: 264732 - protein, 447 aa, unidentified
MQIRWGVAPTAPVQGKTSIVAARPRRKGGVVTDDAQWFAGIDWASQAHRVCLVDAGGKIVGERAFAHGGAGLAELCAWLLTITGAAPTGIAVAIEVPHGPIVETLLERGFQVYAVNPKQLDRFRDRFTVAGAKDDRRDAHVLGDSLRTDRHCFRLLSAEDAMVVELREWSRMTEDLQQERNRLANRVREQLWRYYPQALVISDDLAADWFLELWAAAPTPAKAARIRESTVDRILKRHRIRRIAAAEVLPLLRQKPLTVAPGTAEAASAHIRTVAQRLILVNRQIKQAHRRLDELCARIAENEAESATGQKPEQRDVTILRSLPGVGRIVLATLLAEASEPLRRRDYLALRTLSGVAPVTKRSGKRCIVIMRQACHMRLRGAVYHWARVAIQHDELSRHRYAELRKRGHSHGRALRSVADRLLAVTCAMLTRRSLFDPEYAAKRMAA

SEQ ID NO: 264733 - protein, 410 aa, unidentified
MTVMIGVDPHKGSHTAVAVDAGERSLAELRVRSGPKQLERLLKWAEQFPERTWAVENATGLGYLLAQQLVAAGERVLDVQPKLAARVRLLATESTNKNDPHDALSVAIAALRSPAPKEVGTEDHAAVMKLWARRHRNLSSSRTQVACRLHAVLCDLVAGGVPDEIYAEKAADLLAGLEPEGAVAAARLELAHELLDDLRRVDSQLDESKKRLEQVVTASGTTVIDIFGVGPVVAATVVGVTGDIARFPTRDRFAAFNGTAPIEVSSGGRKTYRLSRRGNRTLNHAIHMAAVTQIRFRHSPGRGYYDRKIAEGKTPKEALRALKRRISDALWAAMVADARRAAASSPVSAPKAGPGGQPGNDSVASAAGSHPDTPALRPSHSRTRPKATTKTSPSRRAASRSTATTARRTA

SEQ ID NO: 264734 - protein, 370 aa, unidentified
MAKRSMFVGMDVHKESIDVSLAEEGRDGEVRHYGVIPGDLEAVAKVVRALRAPSRRLRFVYEAGPCGFGIHRYLTAQGEDCVVVNPSSMPKRSGDRIKTDRRDGDALARLHRAGELTAIYIPTADDEALRDLVRAREDAVGLSTQAKHRLKAFLLRQGRRYPGRAGWTRPYRRWLADLSLPLAPQHIALQEYRDTIDEAEQRVERVTDQLRQLTPAWRWAPVVDALQALRGVSFVTAVGLVAEVGDIRRFTHPRELMAYLGLVPSEYSSGPSVRRGGITKAGNPHARRLLAEAAWAYQGVPRIGRQMLYRQEALPKTVCEIAWKAQLRLTSRFRKLVARGKAKPKVATAIARELTGFIWAIAREVPPPAA

SEQ ID NO: 264735 - protein, 375 aa, unidentified
MEGAPMLDTTTFVGLDVHARSIKAVSLDVMTGEARCATFGYDAGAVAGWVRSVDPKARCVYESGVTGFDLQKRLSGLGVDCVVGAVSKMIKPSADRRRKNDRNDAEFLARMLSVGNVVEVWVPDDECEAARDLTRALEDARDDLSRSKQRLSKFLLRHGLVFDERTPTGRRKGNWTRAHWSWIESIRFAERADNDVLAYYVDAVRRAAEEKARLEGLVEAEARKPRWRKRVDSLRCLKGVDTASAADLVFEAGEFSRFRNARSFAAWVGLTPSEHSSGESDRRGAITKAGNKHLRKTLVEAAWHYLTCSGRPKDLARGQAPDRGARRHAAKGVRRLVERREALLARGVHGNKANVATARELACWVWAVGLMAEEA

SEQ ID NO: 264736 - protein, 347 aa, unidentified
MGQKQSAATAPGAATPWIGIDVSKDTLDVCLLRAGGKEKHKTFANDAAGHSKLLRWVEHLVPGEIYHFCLESTGSYSMGVAHFLAEASQRVSLVNPARIKYAGLAQGVGNKTDRADARLIADYCRKEEPALWRASAPEVRVLVALVRRLHSVQGLLGQEQNRLGAPELPREVQSSLRKMIRVLEAEIKRLQKQIKDHINGHPGLKADKELLLSIPGIGETTAHELLGELPDVTQFASAQSVAAYAGLAPREHSSGASVRKRTRLSKRGNSHLRKALYFPAVSAVQWNAPVKAHYERMREKGKGKMVCLGAAMRKLLMICYGVLKSRQPFDPNWQQNKRGCQIVCVNG

SEQ ID NO: 264737 - protein, 362 aa, unidentified
MTIMPTDTRNGRVIIGVDTHKQFHAAAVLDERGALLGTATFSADSAGYRLLIDWAGQFGMLARFGIEGTGSYGRGLAAAVRCSGHDVVEVMRPNRQDRHRRGKSDLLDAENAARAVLAGTADAIPKSDEGTVEMMRHIKIAKDAAVKARTAAMQSIKSVLVNAPAELRQALEPLPNMALLRRCAGLRPEELTSVSAAVKHTLRAIAQRWFTLDEEISVHEGLLSGLVDQLAPQLTAAVGIGPDNASELLLALGDNAERLHTEAAFAKLCGTCPIPASSGKTHRYRLNRGGNRRANSALHRIVVVRMKYHEPTRAYVTRRITEGKTKPEIMRCLKRHITREIWARTKHRRQQPNTDQTTTCHL

SEQ ID NO: 264738 - protein, 411 aa, unidentified
MDKVYDKCCGIDVHKKLIVACFRKGSKQELRNFGATTRELLELANWLQNGGCEMVAMESTASYWKPLYNILESSELKAMVVNASHMKAVPGRKTDTKDAEWIAELLQHGLLKASYIPDKQQRELRELVRYRKSLVSERTRELNRLQKMLEGANIKLSGTVSDINCMSARNILEYLLTGEFFDEAKYDEMYKQKIIAHNLKASKEQLIDDLNGVMTPLQRRMMKELLSHLDELNVHINNLEDEIDNFMKPEEKKATQAIQDVTGIGKNSSQAIISVIGTDMSRFPTAGHLAAWAGLCPGNNESAQKRKTGKMRKGNALLRSTLVVCAHSATRNKNSYFYAQFMRISSHRGKKRAYVAVAHSMLIAIYHILKDGVVFKDLGADYYNQFNMERKINAYLKKLKALGWEVPVVAA

SEQ ID NO: 264739 - protein, 486 aa, unidentified
MANRKQSTFERLSSGHLNRQQRKELARKLTAEHPGLEIVNRNVAGIDVGNESHYVAVGPDRDPQPVREFGSWTADLERMADWLKACGVEMVVMQSTGVYWMALYDILEARKFKVCLTNARHTKNLPGRKSDVQESQWLLKLHTYGLLRDSFHPPEEIRALRSLWRLRDRHVKEAGRAILHMQKTMTVMNVQLSNAISDISGATGQAIIRAILNGERDPWKLAKLRDRRIKATEEEIARSLEGNWRADMLFELKQAVDAYDFIQNQIAECDQRLQTLLAALPQREVKRTEVQAEAPLRESVKRKQKRKKSRADGNAPRFDLQAELKRVCGVNLTSIDGIDIMTAQTIVAELGTDFSRWKNESHFTSWLGLTPSREISGGKIVKQESRKIKSPVATMLRMAASSLIRSESYLGARYRSLRTRLGAGKAIKAMARYLACLVYRMFTHGQDWVDRGMKEFEGKRTQREISSLHRKAAALGYTIVPQPASA

SEQ ID NO: 264740 - protein, 412 aa, unidentified
MKDLLEISCGLDVHKEKIVACILTGPLGKPTRSEIREFSTLIPDMIALRNWIVSKNCHHVAMESTGIYWMPIYEILEDAFSGDITLLVVNARHMKNVPGKKTDMRDSEWISTLLRAGLLNGSFIPEKRIREFRDLNRHRKSVIRDITSQKNRIEKFLQSSGFRLSSFISDIFGASGGNIILHLIEHGQIDKTALDSCLKTKTRNRIDEILMSVNGTLPEHQKAFLRILMTHYDSLKKHLAEIETSLEEDMAPFALQVEQLNSIYGISTTASCAIIAEICIDMKPFKTAEHICSWAGLCPGNNESAGKRKSTSVTKGNPYIKSMLCEIAWVIAGKRNTYLSAWYWRIKQKKGAKKAIVALARKLLVIIYTMLKQGTLFDESCFETRRKHCEQKQLSRYIRELEKHGYHVEAQS

SEQ ID NO: 264741 - protein, 408 aa, unidentified
MNLTLFVGIDVSKESNHVFAMNLARDKLLSTHIPNTQDGAAIIESKLLELLNKHELSKVIVILESTGVYSAHLATYLSNSKHLALFDSKVYIINPKISKNYRKSFADMDKTDPKDAFILADIARVGRTSELTPFKGAQRLALERLTRHRLHIAELLSTEKVYALNNVFLKFSEFETLFSDNFGKTAVELLLEYKTIDDIIETPLEELASFITKSSKNRFDDSLDMASKIQAAARASYRLDKMAYDPINLSLASSINVINCYEAEMKEIDKAIKRQVVGFNQNHYTVLMSIPGIGKVYAAGILAEIADINQFESDDALAKYAGITWRKTQSGKFDADDTHLTKTGNKYLRYFIIQAANLARQNIPEYRDFYLKKFNEVTTHQHKRALALTSRKLIRLIYGLLSANRLFQ

SEQ ID NO: 264742 - protein, 347 aa, unidentified
MRFYTKPHQFYCGIDLHARTMYVCILKQDGELLVHRNMKASPDTFLKAVAPYRDDLVVAVECMFTWYWLADLCAQEGIPFVLGHALYMKAIHGGKAKNDKIDAHKIAVLLRGGMLPQAYVYPAEMRATRDLLRRRMHLMRKRAELLAHIQNTNSQYNLPEIGKKIAYKANRDGVAERFPEPAVQKSMEVDLTLIGYYDQLLSDVELHIVKAAKQHDAQTLYLLQTVPGIGKILSLVLLYEIHDIQRFPRVQDFLSYCRLVKCVKESAGKRYGTSGTKIGNAHLKWAFSEAAVLFLRDNLAGQKYLSRLEQKHGQGKALTLLAQKLARAVYYMLTRGTAFDMDTFLHQ

SEQ ID NO: 264743 - protein, 357 aa, unidentified
MVEGSWVGLDVHARSVLAGVLDAGSGELRTLSAPTLSERTVAWLQTLPQPVRVAYEAGPTGYGLARACAEAGIACTVAAPSKIPRASGDRVKTDRRDAQRLARLLRLGELVAVRVPDPVEEAARDLVRAREDARGDLMRARHRLSKLLLRHGLVYQASAWTIAHDDWLRRQRFQSRPLALAFDESYGVVVQVKARRDALDRAIAELADEPPFADVVARLVCLRGVSTLTALALTVELGNWERFRPHSLGPFLGLTPSEDSTGGRRRLGGITKTGNTHARRLLVEAAWHQRRPLRASAALERRRQGQPAPVRARADASARRLHTRWHALEGRGKRRTVVAVAVARELAGHCWALATME

SEQ ID NO: 264744 - protein, 330 aa, unidentified
MTHYIGIDVSKNKLDIAWLKDTDKLKFKTKVFKNDHSDYAALINWLIANITDDLNNIHITLEATGVYHENIAYYLFDKKLNVSIINPAYVKSYAASLGSRNKTDKKDSMLLARYTYSAKPKLWTPPPAEARHLKSLLSRLDALQEDLQRELNRLEKTEATDTAPIVKASIEQMIVSLQAAIVKLNGDIDDHIDGHPNLKQDQYLLQTIKGVGPVVSRQMMSLMHNKQFSQASQMAAFLGLVPKHSESGLFKGKSRLAKNGSSAVRAKLYMPALVAIKHNPDIKAQYERLLANGKCKMQAVCAAMRKLVHICFGVVKHQQPYQARVELIST

SEQ ID NO: 264745 - protein, 343 aa, unidentified
MEKLVIGIDFSKETLNFCCLQDASNRIVKEAVVSNNQSGCKEMIRMLRELCPKAHVSDFLFCGENTGCYSMEVSDYLFSKKYVMWLENPLQIKLSSGIRREKTDKVDARMIAEYAFRHQDKVKPYNPQTESIQELRLWLKTHDALKESRKSLINLSRSMKHVPHTLQKSIDELTEQLKRTDKKIKELLKEDQELASNAKLAMSVPGISYVTTAAILVDTRNFTRFTDARKYANHTGCVPHKHSSGTSVYRRPHVSKASNRYINSLLTEGSVSLMTHNKEMREYADKKRREGKSNGCIINNIRNKTLHRLFAVIRNNRIFEKNYRCELKKEHHDVLIHHNALFE

SEQ ID NO: 264746 - protein, 407 aa, unidentified
MQRYYLGVDWGDTMHAVWVCDQRGEKVTDMKVEQTPEGMSAFGRWLHERRAEGTELWAGIEKPEGRMVDFLLDHEVAVYPINPKAVDRYRDRFRTSRSKSDLFDAYVLSEFVRTDHAHLNAWKPNSEQAQELKILTRDYQRLVRQQTRLVNQLKVTLKEYYPRPLEVFGELTTKAALDFLRTYPTPESLKQLSRRQWQQFANVHALHKMHPKALWEVLRKPQLPIPAHVVRAKSRLVRVLVEHLEVTVRAGAEYREEVEHFFASMPAAKLTKTLPGGKSGTTVPTLWAELGDTQGRWKSFRHLQAQAGAVPVTEQSGKSQFVHFRFACNKRLRYAVDWLAFLSLRQSEWAKAYYQAQRNRGHSHHQALRALGAKWLKIIFVMGRDNVPSDENYHLANLARDHLRQAA

SEQ ID NO: 264747 - protein, 360 aa, unidentified
MAKARTLVGLDVHATKIVAAVLDGESGQLQSFAMGGESAGAAAFCVALPGPVRVAYEAGPTGYGLARELAGRGVECVVAAPGKIPRAPGDRVKTDRRDAELLARLLLAGKLHPVRVPGDDEEALRDLVRAREAVRVDLMRARHRLSKLLLRHGIRFDGGAAWTERHHAWLRTVSFEWPAAQATLLDARGAIDALCHRREQLEREIVALLPSSPWAVQVGRLRCLRGVDTLTAVGLCAEIGDFERFARAEQLMSYLGLVPSESTTGQQRRLGAITKTGSTHARRLLVEAAWHYRGRPNIGKALIDRQQDQPPEAIAIAWSAQRRLHRTWARLEARGKRRTIIAVAAARELAGFCWAITQIE

SEQ ID NO: 264748 - protein, 311 aa, unidentified
MEHSCVVGIDVSKDPLDVHLCPTGAAFRVAHDEAGLVTLIARIRPLSPTVVALEATGGYEVTVAATLAGAGLPVAVVNPRQIRDFARATGQLAKTDVLDARVIALFAAAVRPAARPVPDQQADALGELVARRRQLVDMLGAEHNRRRLLREPRLQGNVDAHITWLEDALRRLDDDLRTLIRATPLWRAAEDVLRSVPGIGPITACTLIADLPELGQLDRRRIAALVGLAPIARDSGAFRGRRMIMGGRSHIRRVLYMATLAAITHNPVIRAFHQRLVAAGRPGKVALIAAMRKLLTILNAMLRDRRPWLPA

SEQ ID NO: 264749 - protein, 424 aa, unidentified
MKLQSDAEFAAFVGIDWADTKHDICLQVATSEEREFAVVPHRADAIEAWVGSLRHRFEGQPVAVGLELAKGPLVYALQKYDFVVLFPIHPSTLAKYREAFTPSHAKADPTDAELALELLVRHRAKLKALKPQSVAMRMLLRLVEQRRRLVGDKNRISNRLTDALKQYFPDVLEWFADKDTPLFCDFLSRWPTLIHVKHARKATLQSFFHEHHVRSQSRIDERLHTIRSATPLTDDPAVIRPNQLLVLALVEQLRVTLQAIDRFDAEIATVSQTLPDYSLFRALPGAGPAFAPRLLAAFGEQRERYQSAAEVQRYTGIAPVTESSGNKHWVHWRLQCPTFLRQTFVEWAGATIPRSFWAAAYYRQQRDKGSTHQAAVRALAFKWIRILYRCWQTRTPYDESTYLNALKRRGSPLLTSIVGAAKNT

SEQ ID NO: 264750 - protein, 376 aa, unidentified
MGWSGRAPALPATNLARGAKDKEHPMSHNLNSTVTVIGIDIGKTSFHIVGLDDRGGIVLRQKWSRGQVEARLANMPACLIGMEACVGAHHLSRKLKALGHDARLMPARYVRPYSKGQKNDFRDAEAIAEAVQRPTMKFVATKTVDQLDLQALHRVRERLVSQRTSIMNQIRAFLLERGIAVRQGQWFLRAELPRILATPPDVLSPRMLRIISSLAADWRLLDERIEELSGEITAFAKQDSGCERLMSIPGIGPLISSAMVAAIGTGDVFSKGRDFAAWLGLVPKQISTGDRTILGKISKRGNRYLRTLFVQAAWVVLVKIKPSRWEGHGLKHWIEAAKKRLHRNVLAIALANKLARIAWSVLARGRAFEATKLQAA

SEQ ID NO: 264751 - protein, 352 aa, unidentified
MAEKPTSVTAVIGIDIGKNTFHVVGLDGRGAIVVRQKWSRGQVETRLANMPPCLIGMEACVGAHHLSRRLRALGHDARLMPAKYVRPYSKGQKNDFRDAEAIAEAVQRPTMKFVATKSPDQLDLQALHRVRERLVGQRTGLSNQIRAFLLERSVAVRQGLRFLRAELPTILAKRCDVLSVRMIRLIEDLAGDWRRLDERIESLSREIDALARQDAGCERLMSVPGIGPIISSAMVAAIGAGEAFGKGRDFAAWLGLVPKQISTGDRTILGKISKCGNRYLRALFVQAAWVVLIKPKGWERYGLKPWIEAAKRRLHHNVLAVALANKLARIAWSVLARGRGFEARSIVTVQPV

SEQ ID NO: 264752 - protein, 362 aa, unidentified
MFRPHTLYIRIRIVRKVSEPAFAMKDQDVTDVIRRKQQTAMRYIGIDVSKATFVVAYSSDKGGEIRTFNNTTTGIKQFIGALPKDGSIHCVMEATGNYSAMLLYLLNVAGIAVSMENPLKIKNFARAMLSTVKTDKIDARLIALYGEKMNPQPFKVQGEAILRLRQKRTVIRQLTKQITAMSNLRGSLACLPVPDKGATHTVDETIKFLEKRRDRLQSELTDLVEVEFSRQLALLTTIKGIGITLATALILTTGGFTYFQNAKQVSRYLGICPTYEQSGTSVNIRGHINRNGDAYTRGLLYIAAWPASRFNAQCKETYTRLRQNGKPGKLAMIAVANKLVRQAFAVVAHDKEYIDGFVSNRP

SEQ ID NO: 264753 - protein, 432 aa, unidentified
MSKFFNLPVVGIDVSADFSMVAILAPNGDIYRKAFKITNDIKGFSYLIQEMRKVEEEFSLKPVLFMESTGIYHLTLFHFLKHNEFEAFVINPLVTNSNKNFGIRKVKNDKKDALSIANIGKYQNIKMSDYLDVNIFALRALCRDYHGLVDNRSEYKKKLSADLRILFPGYNTVFSDTAGVCSLAILSKYPTSRDIIDAPKNDVVNVIKEASRKGITWSENTYIKLLSIAQDASQISFCSNTLKTTITISIKLINTLDEHIAAMLDEIETTIKSDDAPKGFRKNIELLLSLPGLGFISAITFMSKIGDFTRFNKPKQLVAFFGIDPSVNESGQFKGDKNKMSKRGTRFGRRALYAVALACTRKTKKGIPLNSILFNYKNSNLNGKKKKVALGAIMHKILKYIFAILRDQKPYEFREAKIHNQMFLTNLVKKAS

SEQ ID NO: 264754 - protein, 351 aa, unidentified
MKKILKQICGIDVAQKELVVTLGRLLDDLTQELYSRKTFPNTKKGFLALLPWVRKLTSDQSVVRFVMEATGVYHESLAYFLDSEGGEVSIILPNKISNYMRTLDVKTITDKTASDAIARFGLERSLQKWQRPHPVFKNLRQLTREREQVIQIRSMTKNQLHAEQAEAEPNEGSVARTKKHIAFLNKQVKELNAEIKTLSMQDEKVKGSMKVICSITGVGLITAASALGETNGFDLIRNKRQITSYAGYDVIEKQSGTSVKGKAKISKKGNKYLRKAMHMPALSAIGHDERFKAIYARLISKHGIKMKAAVAVQRKLLEMIYTVYKTNTPYDKNYLQRNDHTNQPEESRAVI

SEQ ID NO: 264755 - protein, 410 aa, unidentified
MTDTISVGIDISSRSNQICIIDPKGKVLKNFSIKNNSIGADTIISTTINYLNSLKLVEAQFAMESTSVYGDNLIMHLKNDLLINKFSIDVFKINPKQIKKFKDVYPDLQKNDNIDAWSIAEFMRLGGFNTTPVYFDERFYSLQKLTRARYSTVQNLAREKNRYLNILFSKFSEMAIQPLFSNKLGSTAVSVIEDFESLDELSNTPIEQLINYVVKKGKNRFSDPDKIATELQKAARSSYRLSKTVEDSVNQVLSINLISIKTYQEQLKQYDHAIENIMNAIPNTLTSIKGVGPVYSAGMLAEIGDINRFPNHAALAKYAGLAWTEYQSGSFKASNSRMINTGNRFLKYYLTEATNSAKKHDLELNSFFMKKKLEVPRNQYKRALALTARKFVRIVFVLLRDNKLYQPPRI

SEQ ID NO: 264756 - protein, 428 aa, unidentified
MEVIYQKACGVDVHKSFIVAVICDSNSITPKYLRKRFFTFNNDLIRFRNWLLDNDCQNVCMESTGKYYIPVYNALEGFISNVVVANPKWVKCIKGEKDDNKDAKWIADLFKLGIVRSYFIPQKDFRILREFTKYRYKLTCNRTSEKNRFTNALTVGNCKVDMVFSDIFGKSSQSIIDIILNNDTFSDEDIIGCLRKNCKSSYEDILSSVNGIQFTNEQKLRIKIVNEHIDYLNNQIDKLNKIIDVLVEPYENYISLLCTIPGVDRNSAITILTEIGTDMSQFSSHYRLTSWAGLAPGCNESAGKKKSVKISRAGVYLKPCLVEIAHSAIKDKSNTYYAKKFEKLSKRRGKKRSTIAIARKILVAVYHMLYTGEVWNPVDLASVETPVTDRIKYTKNDFKQSFKQLFSLGLTSEELITLVNQNANNLSA

SEQ ID NO: 264757 - protein, 341 aa, unidentified
MKKFIRIGVDLAKNYFQVHALESESGRPVTRKLKRSKMHEFFSQIEPCLIGMEACGSAHYWARELKAMGHEVLLMPPAYTKPYVKRGKNDAVDADAICEAMSRPGMRFVPIKSAEQQATLMLHKTRELLIKQRTMSVNALRGHLSEFGIVAAKGIGRVDELLDLAESDATLPNAARASVKVLAQALEGLDKAIGDLEKEITGAHAQNEMSRLLDKVPGIGKLIASVIVASVPDPSVFKSGRDFAAWLGLTPRQNSSGGKQTLGSITKQGNRYIRKMLVLGATSLLNVVGKRKGALRDWIVGLLAKKPARLVTVALANKLARILWAMMKTGECFRTEMFAKA

SEQ ID NO: 264758 - protein, 408 aa, unidentified
MEVIHARCAGLDVHKQTVVACFRMQQGQRVQREVRRFATTTRALLQLADWLRETGCTHVAMEATGVYWKPVWHMLDGEFELVLANPAHIRNVPGRKSDLNDAHWIADLLAHGLIRSSFVPPGPILELRDLTRTRKQLMREAAQHKQRMQKVLEDANVKLAAVVSDIGGESGRRILTALVAGVADPNRLAELGSKRLAASRATLAEALQGRVTAHHRFLLGQHLKTLEQLETTVAEFEAQIEAALQPFRAAIERLITIPGVSTIAAHVIIAEIGCDMGRFPSAAHLRSWAGLCPQLNESAGKILSRKLRKGAPWLKTTLVQCAWAATRNRRSYLHAQFLRLRARRGPNKAILAVAASILTAAYYLLRDEVPYRELGSRYFASYDQQRTLLRLTRRIQELGYHVEISKAA

SEQ ID NO: 264759 - protein, 352 aa, unidentified
MKAIKQTVGVDVAQKELVCVVGVLLEDLSVSLKARKAFGNHVSGFKAFLKWAKSFTDASPELTVVLEATGVYHEKFVHWLVEQEQQVAIVLPNKISNYMRTLSTKTITDNTAAEAITQFGLERKLETWTPPKPIFRTLKQLTRERDQIVSERVVIANQLHAEQAEAFPNANSLKRLKARKMLLNKQEKEIKNEIHLLVKSDPNLGENISYMTSIPGVGELTAVIALAETNGFELVINKRQLVSYAGLDIREKQSGTSVKGKPKISKKGNRHLRKSVHLPALCAIKNCSLYKNNFARLVGRHGIKMKAVVAVQRKILELMYILYKTKTNFDLEYKLKKEQQHEAATPLQSSLC

SEQ ID NO: 264760 - protein, 339 aa, unidentified
MENFIVTNDEKGITTLLDRIESYLVENKYLIKVAIESTGNLWINMYEKLEQYKRIEISLANPLKTKAIAEAKIKYDKLDASILADLARADLIAKCYVPDNKTREMRSLVRHRIDLAQRRTQLKNKVHNILDKYLIRYKGDLFSTSGLQWLDATTINNNKTSIIDKQILNSHLKEISTINDLIADTEIEMAKIAIKGKRVDLLLGFTGIDYYGALLLLYEIGDITRFSNPKKLVSWVGLSPSLYQSGNITRTGSITRQGNARIRWFLVEAALMSARYDPKMKMFYERILKKKGNQKARVAVARKMLVSIYHVLTRNELYHGHRQDVQLRKIKNMNRVSRK

SEQ ID NO: 264761 - protein, 356 aa, unidentified
MSHDVKYIGMDVHKEAIVIAVLNGSGKLIMETIVETKASSILQFLHGLRGELHVTLEEGTWAAWLYDLLQPQVQEVVVCNPRRNALLKEGSKSDKVDARKLADLLRTGMLRPVYHGENGLRTLRELGRSYQTISKDLTRVMNRLKALYRGWGIPCAGTQVYAPRYREEWLNKLPQAGVRRRAELLYQQLDGLQALRRNLRPEFLAESRKHKAAKLLRQIPCIGPIRAARLIALMQTPHRFRSKRQLWTYSGLGIETHDSAQYRYVGGQVQRSKKPQQIRGLNQNHNHEMKEIFKSTATRASCATGPFHDFYAALLTNGMKPEMARLTLARKITAITLTLWKKEERFDAEQLKTQAA

SEQ ID NO: 264762 - protein, 355 aa, unidentified
MTSTKYIGMDVHKESISIAVRNAAGKVVMECVIETKASMILQFIDGLRGEVQVTFEEGTSAAWLYDLLKPHVSKLVVCDPRKNKSMREGNQSDKIDARQLAELLRLDHLTPVYHGEHGLRTLKELVRSYLTVTKDLGRVMTRVKAIYRSWAIPCTGKQVYGARHRAEWLGKINEPGVRRRAEFYYQQLDALRVLRQQVRRDLLAESKKHKAWKLLCQIPAIGPIRAAVLLGILQTPHRFRTKRQLWNYGGLAIEMHSSADHRSVDGQLQRSRKNVLVRGLNRNCNHDLKNLFKGAAVVASSKPGPFAEFYAALVGKGLRPEMARLTLARKIATIVLIVWKKGVRFDAQHLKPQTA

SEQ ID NO: 264763 - protein, 392 aa, unidentified
MRFAGIDIAAETHFVAVVDEASNTVVKPSSFAENAAGYETLFSLLGGPEEVLVAMEATGHYWQNLFAALAAAGYAVALLNPLRTRRFAGEDLERTKTDAIDALGIARFAAQKRPAATRLPDSATQELRELVRFRDRLMQDFGDRVRQLHRLVDLGFPEFTRYVHSLDSELASAILHEYPTAEAFLGLPWKRLAKLCYDRVHKVGEEIAKGLVEAAKTSVGRHHGPAYRVQVRCACEDLDVLRRRLHEIDADIERTLGDHEVGTLLTTLDGIGPTTAARLVAELGDIASFRSAAAIAAYVGAVPALRQSGKRQASRAGLTPHGNARLRAKLWMPTLTAVRKNPWLRAYYEGLLARGKLPKVALVAAMRKLLIAVYFVAKHRKPFVPILAEAHA

SEQ ID NO: 264764 - protein, 384 aa, unidentified
MQASSVATPTVEHCGTVFVAIELSQKSWLVTLHSPDRGRISRHKLEGGDHAGLLALIDRERDRASRTAGGVPAVASCYEAGYDGFWLHRLLLAAGITNYVFDPSSIAVDQRARRVKTDRIDGERMLRTLMAYLRGEPRVVRIVRVPTPEQEDARRASRERGRLTKEQTAHTTRIKALLRLLGMAVGNPRRRDWLTWLVKQRDWQGQAVPPQIMAEIKREHARLMLVREQLDALAQAPADLTPAAAQMAQRSELLLRLKSLGPAFATTLTSEVFYKDFRNRREVASYFGLTPSPWQSGGIDRDQGISKAGNPRARCAAIEMAWLWLRHQPDSKLTQEYRRRTLNASKRIKRVAIVALARKLIVALWRYLTTGLVPEGAMLKTAEV

SEQ ID NO: 264765 - protein, 348 aa, unidentified
MLIIGCDYHPGFQQIAFVDTETGECGEQRLTHREQAEQFYGMLKERRVRVGMEASGHARWFERLLSDLQFELWIGDAAEIRTKRVRKQKTDRQDAQLILQLLLEERFPRIWVADAENRDLRQLLWHRHRLVQMRTRVMNQLHVVALNEGLRRKKALWRPAGRNELESLILAPWARRRRQDLLDLLDQLSPKIQELTRALEDEVEKRPVTRRLMTHPGVGPLTALAFELVIGSPERFHCGKQIASYVGLVPSEESSGDRRRLGHISKQGNSLLRYLLVEAAQVTVRSQPHWRRKFFHLAMRRGRKIAKVAMARKLAVHLYWMWRQGWDYGQFEKLGSYAGEPGNRQGVQ

SEQ ID NO: 264766 - protein, 338 aa, unidentified
MSYYVGIDLHSDNSYIGVIDKKDSRIFGKKLPNDLGVILKELKPFKKEIQGIVVESTYNWYWLVDGLQEAKYKVHLANPAAMQQYSGMKYTDDTWDSYWLAHMLRLGILPEGYIYPKEIWPVRDLLRKRTMLVRHRTAHILSLQNMVNRNTGKKLKVNDAKKLSEEEISKQLSDEHHIMAVQSDKAVIEFFHEQIDRIEKVVLKEVKLRYPYKELVTVPGIGEILGITIMLETGDINRFPTVSDYSSYCRCVSSKKVSNGKKKGEGNKKNGNKYLAWAYVEAANFMRRYSTPAKSWHQRKASKTNQIVAIKALSNKIARACYFIIKDQKPFDPKKLFQ

SEQ ID NO: 264767 - protein, 353 aa, unidentified
MEYVGVDYHTRYAIATRMNKDGDILSKDRIANIKDDIRSYFSALPTQSQVVLEATNNWAAFVEWTGDLPIEIKLANPSKTRAIASAKIKTDTLDSRILADLLRTDFIAESYLAPKEVRDIRELVRYRMTLVRLRSQLKTRIRSVLFKVGERILTANILGPLSKRTISKFSLRDIYREEINSCMTLAESFTKQIAVFEEKIEKQATLDEDTKLLMTVPGISFFSALLITAEIGDYKRFASGRKLCCFAGLVPSIHASGGKIQHGRIIKQGSANLRFALLQAIPHLVRKHQGLARHYQRISRKKGTKTARIAISRKLLAIMLTMLKTRQPFRVDTGAKRESIAHLPASARALNQL

SEQ ID NO: 264768 - protein, 374 aa, unidentified
MTIRQRSTSSSTDPPVPGEVVLGVDTHGEVHVAAVVSPLGKVLGTESFPATADGYCRLLVWARRLGTVRRAGVEGTSTFGAGLSRYLLAQQVQVYEVNRPDRTARRLLGKSDPLDAQAAARAVLSGRARARAKSGDGPVHSARMFKLAKGSAVKARTQAINQLKAVLVIADPALRERLSRLGNRELFRTCARLGQLDGEDAGGDEDAVAQATHITLSLLAQRIEQLTGQIDELNQRLTRLVERHAPQLLVPVGIGPDSAVTLLITMGGNPERLNSEASFAALCGVSPVEYSSGRRNSRRLNRGGDRQANAALHRIVFTRLCQTRAPRRTTNAAPRRARPDVRSSDASSDMPPARSSTWSGRYPASPRYRSLPPL

SEQ ID NO: 264769 - protein, 420 aa, unidentified
MKAYNVDNFAVLIGMDWADKKHDICEHPTGTNKYHYTVIKHTPEALHEWAMGIKQRYPEQKIAIVCELKKGPLIYALAKYDHLTLFTVNPCAVAKYRQAFTPSGAKDDPSDAFVQVEILTLHMDKLSVIELESAAMRTLSQLVEYRRSLVQDSVDLSNKITATLKNYYPQALEWFKEKDTYIFCDFIQKWPSLTAVKKARKQTLLDFFESHNSHYSTVNNARLDSIKNSMPLTLDEGVIVPNQMLVEVLITQFKVLLKGIEKLDKAIKSAYKAQQDKKIFDSLPGAGPQLAPRLLVAFGSNRARYNDAAELQKYAGIAPVIERSGQKMWTHWRYSCPTFLRQTFVEWAGFSIRYSFWAKAYYEQQKAKGKPHNSIIRSLAFKWIRIVFRCWKTNTPYDESTYLAALKRRGSPLLKFAINS

SEQ ID NO: 264770 - protein, 410 aa, unidentified
MEAIIERVGGVDVGQATVVATVLVGAAHERAKKDTRTFRTVTRELLEMRDWFISKGVTHVAMEGTGVYWRPVYGVLEDAFEMILGNAQHIKNVPGRKTDIKDSEWLADLARHGLIAKSFVPPKPLRQLRDLLRYRRKLVESRTAERNRLLKLLETANIKLASVATDVFGVSGRLMLHALIEGHATPAEMAALARGVLRKKVRDLEQALEGRVEEHHRFLLGVQLRRLDQADSDLGVLDARIDEALVPYQEPCQRLQQIPGVSRVVAAVVVAELGTDMGVFRSAQHAAAWAGVCPGNNESAGKQKGAGVRKGNVPLRTALVEAAVAASRTKGSYLRDKFYRLRARRGTKRAAMAIAHKILIAAYHMLSTGMPYKDLGATYLDGMEKRRTTRNLVRRLERLGYEVTLGHKAA

SEQ ID NO: 264771 - protein, 385 aa, unidentified
MTQAILQMEHNSIPRKLCVALELGGTRWKLIASSGGTKVTESSVAAGDVENLWEKIGAATARHGVPAGSSIVSCYEAGRDGFWLHRELERRGVRNMVVDSSSIEVNRRARRAKTDRIDGHKLLTLLWRHETGERTVWRVVRVPSVAEEDARRLHRELDRLTKERTAHVNRIRALLVLHGVGHRLGRRTVTARTVMAQLRSCTQRDGTPLPPHLRAELDREGQRWELVDAQIRAVETQRRQQLHAAQTAAARQVQHLTRLQAVGDTSAWLLVQEIFAWRHIRNRREAGALVGLTPTPYSSDGSQREQGISKAGNRHVRRVLIQLAWGWLRYQPQSALSRWFHRRFGAGRGRMRRVGIVALARRLFIALWRFVDFGVVPEGARLRAA

SEQ ID NO: 264772 - protein, 315 aa, unidentified
MQAGKLIVGADVAKAELVIHHDDRDEIIKVKNTKPEIEKWLKQQPLNTAIAVEATNVYHLDLVELAHSLGFEVYVIDGFQLSNYRKSVGVRVKTDPSDARLLSRFLKNEGEDLRPWTPPPAVYGKLQSLLRRRAALVTARTAMTQSWANEALLKAAFQTFVKSIDRLDLLIQKKIKEVLREAGLHEQVARCQAVEGIGFLTATALVMAFMRGEFKSSDSYIAFLGMDLRVIDSGQKNGRRRLTKRGCSEIRRLLHNAAMSASRTATWKGIYEQHRNAGKATTQALVILARKLARVAFALMKNQDEYVSKGGKPAC

SEQ ID NO: 264773 - protein, 346 aa, unidentified
MECVMSTSQSTGVYSLFVGVDIAATTATVSWMRPGEQASRPMTIEQTPDGYASLERKLRATGKIPGEVLVVMEATGSYWITLATQLVHAGFGVSVINPAQAHHFAKALLKRAKTDAIDAQTLAQLALMLQPAPWTPPPPIYYELQQRLAQRDALLDLQQQVRNQLHALEQLPEVIVTVRERFEHLLATFTAQLAAVEAEITTVWQQDAAWATAAQRLQSIKGIGWVTAAWTLVATLNFTTCDTVERLTAYAGLAPIPHQSGTSVWHRPTLGHTGNGRLRTAFYMATLSAAQHNPMIKAFYTRLRAAGKPEKVARCAAARKLLHIAWAVVTKAQDFDPNYVQPMQRA

SEQ ID NO: 264774 - protein, 453 aa, unidentified
MAQRNRSLRLKPGQSRVALTITHPNAAGIDIGSAAHFVAVPPDRDDEPVREFPSFTVDLNAIADWLQACRVDTVAMESTGVYWIPLFELLESRGFTVLLVNARHVKNVSGRKSDVLDCQWIQQLMTYGLLSGAFRPADQVCVLRSLWRQRGMLLRSQAREVQHMQKALTQMNVQLANVISDVVGETGQKILRAIVAGERDGQVLGAMKNVRIHASVDEIAKSLQGHWRVEHLFALKQALAAFDFIGTQLAECDQEIEAQLKRLEVHEGDPAKGKKRSRPRNAPKFDLRTQLFKMCGVDLTRIDGIDVTTALAVISETGADMSRFPTEGHFASWLGLCPGTKITGGKVMSGKTKRCANRAAQALRLAAAALRTSQSALGAYFRRLCSRMDKPKAVTAAAHKLARLIYTLLTKGQEYTDQGQDYYEQRYHQRVLRQLAQRAQKLGMKLVPTEQPA

SEQ ID NO: 264775 - protein, 370 aa, unidentified
MVFLGIDLHSNCFSCCFLHEDGSSDAISFSLTPLELGEFYKRLTPDTFVMIEASTNTFQFADLIRDKVKQVFVANPYKLKLISLVKRKTDKIDAQKLAMYLKMQVVSGCELVKPVYIPDETIRDLRSLFTTYRLLRRQTGSVKNRIHSLFKQHLLPFTREYIFGKARRRKLLTIAQDDILNFQLALLFEELEYLEKRIADVKEQLYRTAACYEKEIDILTSMKGISVLTAIALISDIATVTRFPNAKAFASYLRSAPGVDASNETQRPLGTNKQGRKLSVTLLSQSLNHFRDGNPKIHTWYDKLVNKNRKRVGIVRMAICRRVFTELYQMLKKGEYHWYRDEKNHTQKMEQYRHFLQKNDLYKQGGTKSA

SEQ ID NO: 264776 - protein, 392 aa, unidentified
MYIIGIDIGKNHHEASIVSPEGKQIGHSLRFATTHKGADSLMSFIFNNIGNSSCIFGMEATGHYWYPIYSFLKARGYTIYVINPIQSDSLRKMYIRQTKNDSIDSFLIAEVIRFGQFTTTSMADENILAMRQLCRYRDSVISSRTEIKLRISTIMEQIFPEYEKQFSSLWLSTSMGILEKYLTPENIENAPIDELFEIIKDKSHNKLTMKKAISIRDAASDTFGIKIAQDAFSFQLKQLIDRMNFLDKQIEALDCQILEYYEKFDCYLHTIPGIGMIAAATILAEIGDINRFKSSSALVAFAGIDPTVRQSGEFSSTHNHMSKRGSPYLRHAIFLAATTCSFHNSPLNAYYKKKRDQGKHHLTATGAVARKLTTIIYAVLRDSKPYEPKSFC

SEQ ID NO: 264777 - protein, 425 aa, unidentified
MTIGYVGLDVSQADVHVCLIRADDDATGTCWTVPNTQTGADALIARVTDRCAQAQITDLRLGVEATGLLWWHLACALVQAPPLQPLHPRLYVLNPHLVSRFRANYGALPKTDRLDAFLIAERVRFGRNLPTPFQLDLRYAPLQRLTRFRCHLMENLAREKNYFLSFLFLSFSSFGQISPFGDPFGATSCAVLEEFTTEELAQQSLDDLAAYLQQHGRGRFADPEALAATLQRAARDAYRLDKVLDEPLRVVLSTTMASIRSLQQQVKTLDKTIAREVAGIPQTLDSVPGLGPVWTAGLLAELGDIQRFADEEAIAQYAGLTWTKYQSGTFQAEDTRMSKRGNAYLRYYLIEAANSVRLHCPEYGAYYRTKQAETTKHAHRRALVLTARKLVRLVDALLRQGTIYRSPAERPAAQPGTSQPVAGSG

SEQ ID NO: 264778 - protein, 451 aa, unidentified
MKKTKKFDTLVVVNPRAAGIDVGSKSHWVSVGQGKDDVKEFSFYTESLHEACRWLKEKDITTVAMESTGNYWVALFTLLQSYGFEVILVNGKFTKNVKGKKTDVLDCQWIQKLHSLGMLEGSFIPDNDTQQLRQLCRHRQSMLEDGASYIKKMQKSLRQTNIRLDNALNDITGVSGKAIIEAIISGHRDPKYLASLVKFRTKKTHEEIAKALTGDWRDEYIFELKQSYEVYQFIHQKIKECDKQIEIILQERIKKNDDDSSNNLSTSEIKIKKYNKNDPQINLQVLSFQLTQGIDLSAIDGVSHNTLLSIFSEVGMNFNKFPTDKHFASWLRLAPNNKITGGKIISSRTPKGKSRLADALRHVAVVIGHNLKSGALHQFFQRIAYRKGIPAAITATARKIAVIIWNMMTKKMPFSYMNEEEYLKGIRVKQINSLKKKMKSLNIKPNEIGLE

SEQ ID NO: 264779 - protein, 342 aa, unidentified
MYYIGLDVHKKTISYCVKDAAGCVYGEGRIGSTRQELDAWIRTLPQPRTIAMEATIFSGWIYDHLLPHAEAVKVAHPLMLRAIAAAKKKNDRIDASKIADCLRCDFLPECHMASTEIRDRRRVLRYRHLLVRQMVQTKNRVSGLLMETGVEHNKSRLHKAGYFRRLMRTSSEIDDSIRPLLRISRENIERCQKTEYALVSSLERDPLLKERIRRLRTVPGVGPITALNWALEMGDISRFRSIKEAVSYCGLCGDERSSADKVMRMPLSKQRNKHIQHVLVEAAKLAPRQSPELALIHQKAMEKGNRNRATLAVARKMVAWLLAVDRENREFIPAEQRETRAA

SEQ ID NO: 264780 - protein, 318 aa, unidentified
MNTNTLQNINVGVDTGKSQLDIYIRPLDIYFTVPNTDKGISDAIKTIKKHKPQRVVIEATGRLEMPFILACDKAKLPYVVANPLRIKRFAEAIGQRAKNDRLDAALIAHYAERVQPELTKLKSEDIRLMSDLVSRRNQLLTMQTMERNRLQILPKNISSTITPILTALKNQLEKVEAKIAKLIESSPEYQAKSTILQSMPGVGKVLAASLISNVPELGFITNKQASSLIGVAPITRESGRFKGKRMIKGGRPQVRTVMYMAMMSAIQCNPVFKATYERLLAAGKPKKVAIVACMRKMVVILNSMIRDGVMWDKGSAKN

SEQ ID NO: 264781 - protein, 309 aa, unidentified
MDAIVVGIDVSKDRLDVHVLPTNEAFSVRRDAAGVEAAVSRLLPLAPQSVAVEATGGYETVVAASLAAAGLPVVVVNPAQVRAFAQALGKRAKTDPIDAAVIAAFVPATRPEVRPLPDAETSALADLVTRRRQIIQMIVAERQREKRAAAKTRRSIVRLVKALEKELASVDHDIDDAVRGSPAWRAKEDLLSSVPGVGPTIARTLIAELPELGTLDRRQVAALAGLVPYTRQSGQWRGRSFIGGGRATVRSAVFIGAMVAARCNPKLRAFHQRLIADGKPKMVALIAVARKLLTILNAILRDKKPWQPA

SEQ ID NO: 264782 - protein, 395 aa, unidentified
MFIVGIDIAKRSHEAIIIAEDGQVVRKAFSFRNNCTGYNLLLEQVRRLTLVKRQIVFAMESTAHYWLALYARLLKDGYAVMVLNPIQSHSLRELYIRKAKTDARDSLIIADLVRFGRCKASNVPQDKILALRELCRSRAYLVDMAADLKRKLIALLDRIFPEYESLFDSVFSKASIAVLRKYSTPQKVKNAHLGKLTDILMESSNGHFGEWKAHQLKEAACSSFGIDDSGGVYSTLLGMFLEQILSLTAQADSLEKQISVFFQEFNNPLTSIPGVGTVLAATILSEIGDITRFSSADKLLAYAGLDPSVKQSGEFKSNQNRMSKRGSPYLRRAIWLASTVAVHRDPMFQTYYEKKISEGLHYMNVIGHVSRKMTAVIFAVLRDGQPYQPILQSAG

SEQ ID NO: 264783 - protein, 340 aa, unidentified
MEKRYIGIDLHRNHFTCCVRLNNGRSYLSQWRLEDLPRFVKKLRPSDELAVEITGNTRLFVDAGASQVGRIAVVDTNQFRVISRSVKKTDANDARLLALYLSKDLLPEVRMKDKQHGQLASLTQTRETLVKLRTALKNKVNNILSARGINLPKEALSSEKKLNEILALPFDELVQIELRIIVEQIRSLNKSIVELEKTIAEEASKLEGHKNLISIKGIGKITSAILLSVIGDISDFPDESRLASYFGIVPRVANSNETERSGHIHKRGTKLGRTALIQSALIAANYSPYLKNFYVRVKVRRGAGKAIIALARKFLGIIYRTLKNKWVFEDFTTFTLAEAA

SEQ ID NO: 264784 - protein, 345 aa, unidentified
MDHFAGLDVSVKETSVCIVDDVGKIVREVKVASEPEALLAVLKNPAYHFKRIGLEAGPLSQWLYSALAGAELPVICVETRHMRAVLKAQINKTDRNDARGIAQMMRAGLYRPVHVKTLRSQKLRMLLTHRKLLQAKAIAVENDLRATLRNFGLKVGVVGTVKFEARIKELVEDVPDLAVLVEPLLVVRRVLREQISVLHRRLLAIVRDDDVCRRLMTVPGVGPVVALTYRVTVDVPVRFRKSKSVGAVFGLTPSRHQSGESDRPGAISRCGDEMMRSMLYEAAQILLVRSTKWSWLKAWAMKIASHRGMKKAIVALARRLAVIMHRIWVNGTAFRWTQEQAAAAT

SEQ ID NO: 264785 - protein, 348 aa, unidentified
MTIAMIGLDTAKNLFQVHGVDEGGRAVLRRKLNRSELVGFFEQQPRCTVFLEACGAGHYWGRLLGGFGHEVKLIAPEAVRPFVKKGRKNDAADAAALCVAGTRPETRFVPIKSVEQQAVLALHAGRSLLVKQQTMLANALRGLAGEFGVTVPRGLHKLEELAALVSAEEGIPAAGRQAMAELHAHGRAVAGRVATLEERIVRHARQDATARRLATIPGIGPITASLIAATVGDHIGAFRSARHFAAWLGLVPRQHSTGGRTRLGGITKAGNAEIRRLLVLGATSMVWRATCWDSKAGLWVRGVLARRPVRLVAVALANKLARIAWALMTRGEVCQAQGRAPAAAAAVA

SEQ ID NO: 264786 - protein, 331 aa, unidentified
MLQTIDVGIDVALASLTVVVLDPAGQPGPPFEVPNTAAGCRRLRRRLERLELPVRACLEPTSTYHLRLARELFASARVTVCLVNPRAVRDFARGAMGRGKTDAADALVLARYGRALEPRAWQPPGPVERELRAISRRIDDLTGRRTALKNRLHSLAAAEPPGVVVADLQSELRGLATRLRKLRAAACALIRTQPQLERRYQLLLSMTGIGAVSAIRLLAELGGLPAELGKKQWVAAAGLDPVPRESGKSLNGPRRISKQGNARLRMGLNVPALVAARYCPPVRAYYQRLQDRGLAKLAALCAVMRKLLQAIWGMFHSDQPFNPELLCQSPR

SEQ ID NO: 264787 - protein, 359 aa, unidentified
MVMIGVDSHKRTHTLVALDEVGRRLGERTVAATGEGHLALVQWASQWDAAQFALEDCRHLTRRLERDLLSAGWRVVRVPTRLMAGARQGARQPGKSDPIDAEAVALAALRHDGLPVAELDGPTREVKLLVDHRRDLVAERTRIQNRLRWHLHELDPALHVPSRGLRRYCLIDELAAKLEAFDGVVARLARDLLRRCRELTAEVNALEAELRPLVRSLAPAVLELPGCGVLGAAMILGETAGAGRFRNKDAYARFTGTAPIPVWSGNTRGKVRLNRGGNRTINTALHMMAVTQSRGIGPGKVYLDKRKATGKTRTEALRLLRRHLSDAVFTALRQDEAKRAANPPTVQQPTPQPVLAAAA

SEQ ID NO: 264788 - protein, 340 aa, unidentified
MKHIGMDVHNTTTEVCVRNGRGVIIQRCRIPTAKTELQKLVLGIAGPKRVALEESQSADWVTRVLLPGVDEVIRCQPQYNKLISSSEDKCDRRDAESLSELLYLNRLKRVHHPAMTYRTLREAVRAYWIASRELTRAKNRVKGWYLFNGVHKSGDQVYSARNRNRQLTELQGEGRNTELARLLYERMDHCRQLKAKHIGVMREAAKPVQELVRLLKTMPSVGPITAYTMVGLLEEGQRIPNKRKLWRYAGLSLRQHESNDKGVQGASNSGNRLLKHVVMSAAITVVSRGERNALLKLWERDIRQNVNPKRARRNLARRIVVIAQHLLRSREEYKDERIKI

SEQ ID NO: 264789 - protein, 387 aa, unidentified
MPQLNDLSRSLVALDQNSTIIAVVELSHSSWLVAGVLPGIERQPRKKLEPSPERLLALLHRWRDEAVRAGRTITRIALAFEAGRDGFWLARWLEARGVEAHVIHASSLAVSREHRRAKTDRLDTELLKRGFLGWLRGERGHCSMARVPTIAEEDAKRPNRERDCLVGERTRIVNRIKSTLVRLGIRTFKPTLRKAAERLATVHTPEGIPLPPNTLAELHRDMARLSLVVSQIKEIEDARQKRLEQQHETGPYAIVRLLARIVGVGVETADMLVHEVLSRPMRDRRAVARYAGLTGSPDESGAQRREQGLARAGNARVRRGMIQLAWRFLMFQKESALALWYRARTADSRSGTRKTMIVALARKLIIALWRFVTTGEPLEGVVLRPAS

SEQ ID NO: 264790 - protein, 402 aa, unidentified
MNCVGIDVSKGKSMIAVMRPFGEVVVSPFEVRHTANELSELAGLLKSLDGETRVVMESTGNYHAPVAWLLHDAGLYVSVVNAMLVHDYGNNSLRRAKTDKKDAVKLANYGLDHWLTLPRYIPEEDTRLMLKICYRQYQQYSKVQTMLKNNLISLLDTTFPDANRLFTSPPRADGSEKWVDFVATFWHCECVCGRSEKAFTTQYQKWCRKHGYNFSEDKALDIYASACRHFGVIPKTDTAKLLVEQAISQLQTTSSALAARKQEMQSLAASLPEYPVVMGMFGVGPTLGPQLLAEIGDVRRFHSKKALVAFAGIDAPPYQSGQIDVRSRSISKRGSASLRRTLFLVMSVILQCAPIDEPVYQFMDKKRSEGKPYRVYMMASANKFLRIYYASVKAYLESLEHD

SEQ ID NO: 264791 - protein, 425 aa, unidentified
MSLVQPTQPPTVLVAIDIAKLRHDVLIEAPGWKNRKRLILPNTAAEFRLFADFLHNLKHPVRVAFEATGNYHRPLAHFLLAEGFHLELIASLAVARTREAMHNSWDKNDPKDAQVLLHLLKTGVTQHYHDPLANHIHDFQELSLTYAQISLEKTRTQHRLLTHYLPLYFPEIERYYHASRSEWLLAFLQVFPTPALIAHLSMEEFAKQAWPIVGRKVSKQRLLEDIHRTAQSSIGIPVEEDSEAVAMFRVVLSEMIRLCQLRDQLEKRAALHLQDNADFQRLQQIPGIGPILALTILAEAGDLRRFSHHRQFLKFCGLDLSTQQSGQFRGATKLSKYGNARLRCAFWIAATVAVRLRENSFRDKYERYLRRDPLSADRKRMAYVAVAAKMARVAHGIIKTGTDFRCFYEAAAPRGRAASPVPSRP

SEQ ID NO: 264792 - protein, 374 aa, unidentified
MKVYVGIDAHTTNYTLATAVTFDKPPVYVNSYSPKVSNIVAYCKDLRKQFGKDSEIVTGYEAGTLGFSLRRDLEKHGITCIVMAPSTISGTELNRKRRRKTDKRDAAAIAKALLTHSYSEVHMPDEEDEAVRDYIRMREDIKLEQKRAKQQIGALCHRHGFHYEDGTYWTQKHIGWLRSLPAEGYLKEALNGYIRVLDYCADRINECDIRINEIAETDKYRESVHKLICFKGIKTLTALALIVEIGDFTRFIKAKNFAAFLGLVSGENSSSDGQQLLGITKQGNRFLRRLLIEAAQCFSRSAAKKSKELLKRQSGNTEEIIAYADKANERLRKRYYRLVIHNKKCANKANTAVARELACFVWGMMTGNTHTVIS

SEQ ID NO: 264793 - protein, 408 aa, unidentified
METLHRRCAGLDVHQKEIVACRRIVSGRKVRSELARFATTTQGLLALSAWLAETKITHVAMEATGVYWKPVWHVLCHDFSLVLANASHIRNVPGRKSDANDATWIADLLAHGLIRASFVPPQPIQDLRDLTRTRRGLTREIVRHTQRIQATLEEANIKLASVISDILGWSGRRILKAIVSGQSDPRRLAELGHPQLACTREELAAALEGRLRDHHRFLIGQHLKTIEQIEATIAEFDARLEAALAPFRGDAERLNDLPGVSDNVAQTVIAEIGVDMKAFPTAGHLLSWAGMCPRLDESAGRKRSRRLRKGAPWLKPVLVQAALAATKVKNSSLRARYFSLRPRLGHKKAIIAVAAAMLRIIYHMLKDGTFYQDLGPDYRRPRNPERAARSLANRIRSLGFDVEIKKAA

SEQ ID NO: 264794 - protein, 443 aa, unidentified
MSFDRLKRTQRRKRLPGHKLKPSRATLFVQNSKPHLSMKPTYFLGIDAAKHKMRATLSNRSEHVLFEKDLSVEATGLRQLLAAIKRQVNDPEQLLVLIEATGLLHLNWSAALTKAGYAVAVINPLIARRLYTLQNSIRDNKSDPIDARGLCTIGALHGEKLLVHYRFSLRPEQFTLQRAQSVRKALRSALTNLKKTYQSLMDLSFPELGGLLQLDGVGIRQLLIQAPTPAAIAGKRLSTLENNWMVRPKAAALKVLAADSMADPGLAAASGPALVALLQSVAAMEGRLHALDQQIAKLACTSVDPQTKALIETIPGFGPVNAAKTLAWLPTEILHSGSNRKVAARLQAFMGNDPRLRQSGQWKGHTKMSKRGVEMLRTAFFQSAFSAAHNDPELRAYYQCKRAQGKTHEVALSHLMRILTRRLVAVLRSGKPYQSHYNLKNAA

SEQ ID NO: 264795 - protein, 315 aa, unidentified
MNTDVFVGIDVSKASLEVGVLPSGESWRETNDHKSVVRLTQSLLEHAPRIVVIEATGGLEIPLAAALAGAGLPAVIVNPRQVREFARATGRLAKTDKIDAFILALFGERVRPELRPLPDDLAQAFDALLARRRQLVSMLAEEKTRLQQARSRPVRNGIQRHIRWLERELQDVERNLTDSVRHSPMWRAKDNLIQSVPGAGRVLSFTLLADLPELGRLNGKQIASLVGVAPHPADSGSIRGKRIIWGGRASVRQVLYMAALAASRFNPVFRAFYQRLVTSGKPPKVALVACMRKLLVVLNAIVRDGIPWNPGVANF

SEQ ID NO: 264796 - protein, 401 aa, unidentified
MDNTTMFYVGIDVSKDKSDICIKDEKGNDLINRFEITNKKADLEMLYETVESIKRNIPGNSDVVFGMEATGIYSLPLYSALKRDGYKVKLYNPIQTNGYRKINIRKTKTDTIDSAIIAEMLRHSEAPQVSDIQDMHLFQLRELVRVRHRLIEKQALCKVQIVRNIDTIWPDYGGVMKRVFGAASLAILKKYSVPSKLRSESFGQFYELVKKKSRSKISRSKAEEIYANAGNVLTIPELDSVIAIEIKTLITQLELYDEQIQSVEGNIDRMMKQTDTKIMSIPGIADILGPTILGEIGGIERFSNVKKLVAFAGLDPVVSQSGRFENKSGKISKRGSPLLRHALFLAANSAIQNDENLKRFYSKKRSEGKHHFSALNAVAAKLLRIVYWVLKNNKEYQIQLN

SEQ ID NO: 264797 - protein, 316 aa, unidentified
MNPEPVFVGIDVAKASLEVAVHQPADRWAVDYTDPAVATLVARLTALTPALIVLEATGGLEVPLVGALAAASLPVVVVNPRQVRDFAKATGRLAKTDTLDAAVLAHFAEAVRPPLRPLPDAATQGLAALVTRRRQLVGMLTVERNRLGAAPTVVHKELQAHIRWLERRIVALNTDLDQAIRTSPVWRAQEDLLRSAPGVGPIVARTLLAQLPELGTLSHKTIAALVGVAPLNRDSGCFRGRRMVWGGRAAVRAVLYMGALAAVRFNPVLRAFYQRLRAAGKLPKVALTACMHKLLTILNAMCKHQRRWDPTHAQTR

SEQ ID NO: 264798 - protein, 402 aa, unidentified
MNCVGIDVSKGKSMIAVMRPFGEVVVSPFEVRHTASELSELARLLKNLDGETRVVMESTGNYHAPVAWLLHGAGFYVSVVNAMLVHDYGNNSLRRGKTDKKDAVKLANYGLDHWLTLPRYVPEEDTRLMLKTCYRQYQQYSKVQTMLKNNLISLLDTAFPDANRLFTSPPRTDGSEKWVDFVATFWHCECVCGLSKKAFTAKYQKWCRKHGYNFSQDKALDIYASACGRFGVMPKTNTAKLLVEQAISQLQTTSAALAALKQEMQSLAASLPEYPVVMGMFGVGPTLGPQLIAEIGDVRRFHSKKALVAFAGIDAPPYQSGQIDVRSRSISKRGSASLRRTLFLVMGVLLQCAPMDEPVYQFMNKKRSEGKPYRVYMMASANKFLRIYYASVKAYLDSLEHD

SEQ ID NO: 264799 - protein, 419 aa, unidentified
MKNITTKKLKSISEETLLVTIDMGKVKHTGYYRFPNGTEGKPFEFFNNRKGFEEFWWQVCQAKKSLDLAEVVVGFESTGPYAEPLLHFLRKRDVRLVQVNPLHTKRLKELQGNSPNKTDQKDPKVIADIIELGHALTVIIPEGTVAELRRLTQARERSIQRMRMLMSQLQDLIFLIFPEFMPVMKDITIKSTQYLLKNYPRPQDITEQGVDRLAQILKKVSRGRLGKERAEALYEAAAESIGIGEGRESIVLEIKETISVIENIERFTKELEKHMSKHLKDVPYSRFILSMKGIGEITTAGLIGEMGDFEKYRTISEVIKHAGLDLFEISSGKHKGRRRISKRGRSLLRKLLFFASINVVRKGGILHKQYQHHLEKGMPKIKALIAISRKLLTIIFALVRNHSMYITEYSQTQQLKEAA

SEQ ID NO: 264800 - protein, 360 aa, unidentified
MKENSSTKKRQRVQIVGVDVSDKISHYCVLSPDGEIATEGKLRTTPAGFSAQFPAAIRCRIVLEVGTHSPWISRLLRSLGHEVIVANAGRVRMIYQNDNKNDRVDARTLARLARVDVRLLHPVRHRSAEAHADLAVLHARDCLVSVRTKLVNTVRSMVKAVGSRLPGSSPECFPQRVRSHIPESLQPALLPLLEQMETVTSQIRAFDKQIEQLARTRYPQTQLIQQIRGVGALTSLAFVLTLDDPHRFQRSRDVGSYLGLRPRRDDSGQSRPQLSITKAGNHFLRRLLVGCAHYTLGHFGADSDLRRWGQALMARGGKNAKKRAVVAVARKLAVLMHSLWVTGEVYEPLRKHAAAQEAAA

SEQ ID NO: 264801 - protein, 414 aa, unidentified
MEVKYERCWGIDVHKKTVVACVIVPGAKRGEVEKETQTYATMADDLGALGQWLQRKGVTHIAMASTGVYWEPVCNLLEGQFAIVVVNAERIKALRGRKTEVADAEWIADLLRHGLLPGSFIPSAQQRALRDLTRFRTSRVNDRVRAVNRLQKTLEGANLKLASVVSDVTGVSARAILDALLAGQTDPQALAALARGKLRKKTEQLQKALAGTLRSPHRILVVELPCQIDYLEEAVARLDSEIATLRQPFQAELAQLDSIPGVSLRIAEVLIAELGVDMTPFGRAQRLASWAGMCPGNHESAGKRKTGKTRQGSPWLRRALTEAAHGAARTKKTSLSAHYRRLAARRGNKRALVAVGHTILTISYYLLTRHTTSQDLGPNYFDERDREGVKRRAVRRLEQLGYQGALSPSVSTPT

SEQ ID NO: 264802 - protein, 339 aa, unidentified
MKITTIGLDIAKKFFQLHWVDMTTGEVHRKQLKREQMVEFFANCERSLIAMEACGSAHYWARKLAGFGHEVRLVAAQFVRPFVKTNKTDAADARAIWESVQRPEMKFVAVKTEAQQSVLTLHRLREQMVKFRTMQTNQLRGLLYEFGVVLPPGRAKGIPAALEALGELEDTLPAMMIDALRQQMTRIQKLSDDIADIEKKLTLWKKQERSAVKIMEIPGVGILTATAAVATMGDAGAFKNGREFAAFLGLVPKQSGTGGRVRLQGISKRGNVYLRTLLIHGARARINFQKQREPWIEQLLARRPFNTVVVALANKMARTIWALMAHDREYQKNYATSIA

SEQ ID NO: 264803 - protein, 483 aa, unidentified
MRIIALDVHRSFAQTAILEKGKIRDAGRIDLERSRLLQFATKLKPDDEIVIEATGNTSAIVRLLSPFVGRVVIANPILVRAIAWAKVKTDKIDAAVLAKLHASGFLPEVWMPDEETETRRRVVAERTQLVSQMTRLKNRIHSVLHANLIPPYKGTLFSKRGRTWLEAQPLAEDQRRVVLRHADELDRLGGELAQIDKCLAQTALQEPRVKRLMTITGVDVTVALSIVAAVGDIERFSSPEKLVSYFGLNPRVRQSGDKPAYHGRITKQGRAHARSMLVEAAWVISGVPGPLRAFFMRIRDKRGKHVAAVATARKLAVIVWHMLSKDEDYTWSRSALLDWKLRKLELTAGYPSHRGGRAKGSAAAYSNKSASPIHPVAANDSDVLAPSRPSRAYRAMACRPALTLLRATLSVPPAGTERLRARFQDTGAERPLSNTSVKYWLRRIRIGFSRRQARSCKRFVVSQERIASWLVWLPSMTTRSGRP

SEQ ID NO: 264804 - protein, 313 aa, unidentified
MTEHSIGIDISKSHLDVFHLETQTAKRFENSASGFRALRKWLSPLAVARVVFEATGPYHRAFEKAFSSKLPLVKVNPLQARRFAQACGTRVKTDAVDARLLARMGDALALVPDVPVSEKTHDLRDLQVARTALTKERTRLRNRGQVQTSAVLKRQTKARLALVERQIAELNDEIAKRIADDRSTARKRDILCSIPGLGPIVAAAILAFLPEIGSLGRKQAGSLAGLVPHCRESGQWKGKSFISGGRKPLRDALYMPALVAMRFNPDLRAKYTALRAAGKPAKVALVALMRKLIETANALVKADRFWVEKHACA

SEQ ID NO: 264805 - protein, 341 aa, unidentified
MYSIGLDVSKASLSVHVPLNSLDFEIKNTLKDLKSLYAKLKKLYKKDIDKLVFVYEPTGSYSALLTKFCALKNIKSFIINPKQSSNFAKALGYRSKSDKIDAHMLSQAIAIAKEREIKVPVINATAEDIKELMSYYMFTVKQRVAVNNHHEALNAKDGNTYALKDLKKRIKESKLKENEILSKIKDIIQEDENIAQGYSNIKTIVGIGEVAGIVLIHLFIKYPDANQKQIVSLTGLDPVVKDSGTSVKSRPRISKSGSKLYRAVLFMATMVSIKYNDEMREFYDRLKENGKHSTVAQIAVMRKLIVIAYSLYKNNTQYEKEIYNKACGRIETIEAEKELVA

SEQ ID NO: 264806 - protein, 421 aa, unidentified
MQEEASGFAAFVGIDWADRKHDICLQVAGGDSVELSVIEHRPKAIEDWAHKLRERFPGRRIAVCLELSHGPIVSALLEHDIFVLFPVNPSTLARYRRAFTPSRAKDDPTDAAIALELLVRHPEKLKPLRHESPNMRALRRLVESRRDLVQDRVRLTNRLTFALKAYFPQALDLFRDKETEVFVAFLERWPSLPDAQRARRETIVDFFHAHSVRRAAVIDRRIDTIKSERPLTSDAAVIEPARLLVELLLPQLRAVSAGIARFDEEIASRCQQLPDLRLFADLPGAGRVHSARLLAAFGEQRDRFADASAFQKYTGIAPVTERSGNKQWVHWRWSCPTFVRQTFVEWVASSVPHSFWARAFYESHRAKGASHNATIRALAFKWIRILFRCWVDRTPYNESRYLDALQKRQSPLLKFAAQAPS

SEQ ID NO: 264807 - protein, 351 aa, unidentified
MQYIAFDSHKHYTLASVESVQAPGVIREQRIPHTRGMIRQFLAQCDVGSPVAIETIGNWYWIVEEIEQAGMRPQLTHARKAKLMLGSINKTDRLDVRGLNRLQRNGTLPVVWIPPAAVRDARDLPRTRMVLVRQQTQLKNRIQATLAKYGLAVEGVSDVFGKRGLALVSQHLPALPDHTRFATERLLAQLHALRQEVRAFEQRIQQVIPHTPEITLVRSLPGVGQILATVLALEIGEVARFPSVAQLASYAGCTPRIHASGGKTRFGSLRSDVNRYLKWAFIEAANVCARLSRRYPDRHVSRLYARLVRTKGHPKASGAVARHLAEATYWILTKQTAYHDPQSPTVSSTTA

SEQ ID NO: 264808 - protein, 461 aa, unidentified
MSRRKSKRTKGIEEAHPFAGMSQVNANAAGVDIGAEEIVACVEGAENMQIVKGFGNYTVDLQAIGQWLGEHHVKTVAMESTGVYWIPLFEVLEGMGFQCLLISSRSLRRVPGRKSDILDAQWIQTLHSYGLLESSFRPQADLVALRTLLRHRAQLLEHRAPHILHMQKAMLQMNVQLSQALSDITGETGMAIIRAIVAGERDAEKLAAYRDRNCKKSAEEIGRALTGTWRAEYLFVLKQSLEMYDSYTRQVEVCDAEIDRLYALTRPDWDGGELKPLPMKKRNSHSKNAPKNQEAIRAHLKRISGVDVCAVEGIGVGVAQTVIIECGTDLVQFPKEGNFSSWLGLAPKHEISGGKVLKNRTLKTKNRAGQAFRMAAQSVKRSDCVFGMMFRRFRARMDNRQATVATAHAIARVVYRMLKYKVEYDQIDVTEYEKQYEEQQIKYLKKKAGKFGFQLVPTASA

SEQ ID NO: 264809 - protein, 393 aa, unidentified
MEWAQCITIKVPCFFFSLRKSKEEKVIQRFHGIDRHKKFSTISVVNREGQEIQFLSACWDLRKYIEDLGPEDAVILEASSGAFWWADRIEAKGADCYILDPHRFRIIKDSWKKTDKSDARNMVKALWVHLVTGEFGVPSVYKPSGLTRELRKLFSQYELLNRQIRMLKNNIQAILLENGIVISSKEVLHLISPQEGAELLKALDISEASRTGIEVSQQVLWVVLEKKAGLHREILHTGAPLQQEVKRLITIKGITPLTALAFLSDVGDVTRFKSLRKMNAYLGLVPRGKESGGKNRCGHINRESRKLTRTILTQSIHHVSNSSPYLRRFYCDLTEKRGCGRARVALIRKVCSIMRRMLLTGEEFRWIEHSLFERKLKAYDKTLEEMREEKKSA

SEQ ID NO: 264810 - protein, 320 aa, unidentified
MQSENVVVYAGVDVAKATLQVHLQGRQSEFANSPTGLCLLTKHLQKVAGVHVVCEATGGYEQTMVKVLHAAQIPVSVVNPAQVRAAAQAQGQRAKSDPIDALGLSDYGRRYEPKTTPPVSQTQERLVALTQWLKQLVSGLAMAKTQAEHHQNPFVRRQHAKLLVHLESQTKAVETEIQKLLQEDNALQQRVDCLDSIQGVGARTAWLVQAHMPELGKINRQQAAALAGLAPWTRESGTMKGKRCIGGGRSEVRVALYMAALSAARSNPVMRDLYKRLRAKEKPAKVALTAVMRRLLTFMNHKLKNLNAQTAAKEIVEAIA

SEQ ID NO: 264811 - protein, 356 aa, unidentified
MNQLTTVGLDLAKDVIAACVLDLHGAVVERRVLKREAFQRWAEQLPVCTVAMEACGSAHHWGRWFAARGHTVRLIAPQFVAAFRKGGKNDAADAEAVAIAARQPTMRFVPIKTIDQQTILAWHCAREGWKEERTALMNRVRGLLTEFGIVIARSSDRLLAELPRLTEDPRLPDAMQGLLLEAREQLASLHARLARCEAQIANHARSNAAAQRVSALLGIGPITSSALAATVPDSTTFRSGRQFGAWLGLTPKQHSSGGKTRLGRISLRGNVYLRTLLIQGARSTLQSALRADLSRASRLQRWIIELYGRRGYHKTLVAIANKHARIVWAILAKDERYDASAWQRHPLAQALPAASS

SEQ ID NO: 264812 - protein, 419 aa, unidentified
MAQAHDKPIISVVHPICCGLDIHKASVSACCLTTVADGGEDMEIAEFDTFTDALLRLRDWLIERDCPVVAMESTGVYWRPVHNVLEGFVKVVLVNARHTKHVPGRKTDLADSQWLAGLLRHGLLRGSFIPPQQVRQWREMTRLRKAYQESLADFKRLIHKLFEGANIKLGVVVSDLFGATGRYVMNLLATRAGELSADDIAAGAHGQLKQKINELCRAVQGFFTDHHRYQLRLLLATVTELEHHIEQIGQNVKKLMADHHPVLSRLQEIPGVSEVAAATILSEVGPTLEEFPRSAALTSWSGLCPGNNQSAGKRKSGRSPVRGHRLKTIMVEVAWSAVRKPGSYYKDKFQRLRARRGAKRAIVAIAHRLLKAVYYIIKEGRHFRDLGAEYLTHKHQTGKLGSLKKQAKLLGYELTPLAA

SEQ ID NO: 264813 - protein, 343 aa, unidentified
MVVIGVDAHKRTHTLVAVDELGRMLGERTVAATSDGHLQAVQWAARWPGARFALEDCRHLTRRLEGDLLRAGFAVVRVHTRLMAAARRGGRQRGKSDPIDALAVAHAALREPDLPVACLDGPARTVKLLSDHRQDLVAEQTRLCNRLRWHLHELDPGVDVPSRGLRRYHVLDGLAARLAVMDGVVARIAAGLVARCRELTGQVNALERELGTLVRRLAPALLAIPGCGVLSAAVIIGETATASRFRSRDAYARFTGTAPIPVWSGNTVRVRLNRGGNRAVNCALHMIAVTQARGIGPGKDYIAKQLAAGKTTTEALRLLRRQLSDTVFRALLADEHRQAHGTA

SEQ ID NO: 264814 - protein, 358 aa, unidentified
MITQANGKVDKSIRTFATTTAALLALADWLASLQVSYVAMESTGVLWRPIYNVLEDQFELILANAHEIKALPGRKTDVRDCEWIADLLRHGLIRPSFIPAKPVRVLRDLMRYRKSLVYQHTQQINRLHKVLETANLKLTSVVSDVWGKSGQSMIKAIIQGESDAQALTELARGTLRGKLPQLQEALEGRIQPHLRVLLQQIFAHLQFLESSMQQVLKEIEAQMDPYQEVVELLMTHPGVQAVAAMGVVWEVGIDLSRFPSAKHFASWIGVCPGNHGSRRQTQTWENHQGQCVSARVIGRNRLGDKSYQRQLLIGEVTSVSSSHWQNQSDRGGLSHRCRELLSYDHQASSVSGAGSELF

SEQ ID NO: 264815 - protein, 373 aa, unidentified
MNNTITYVAMDTHKKEHKVALHYPCHEEIVRFAVKNTAREIKKMVNKIKKQASADVNFCYEAGVCGFTLKRRIEALGCKCVVIAPSLTPIKPGDHIKTDRRDALKLLTMFKAGLLTEVHAPNAQQEAARELTRCRQSAQENLKRIRHQLLKFLTRHGYVYTNGNHWTQKHITWMRNLEFDQPLLTDVFDNYFTQMNHCLQRLDSLDKQVKKLAESNCYKEIVGFLRCFHGIDTLTAITIITEIFDFGRFSSPGELMSYLGLTCSEDSSGQKERKGPITKAGNKRVRRLLVETSWHYRHPCKLSNTLRIRRKNQPQWVIDIADRARQRLRKRYRHLINNGKMPCKVTVAVARELAGFIWSVFNEYQIRTTKAAR

SEQ ID NO: 264816 - protein, 343 aa, unidentified
MYFIGVDHHKQVSVMTVLDDNGKELKRGRVSNLRKDVARFLEGFRPFTAVLETGRSSYVMADLLRELGGEVKIANALQVKAIAHARIKTDKRDSRTLAHLLRAGLIPEIYQREAWNRRAQRVMRMRAYWVSKQTEVKNKIRALLAQQSEEVRLEVEKRQDGLFSPKGLDFLGQLSLETREKEVLDDLVEGYQEVQSHIRKSDGLVRALYGEIEEAARIDTVPGFATMLSVLMAVEIADIGRFSRAAELHSYAGVIPSTYSSGERCFHGHITKQGNAWLRWAALEAVYPAIKKDFGLRVLYSRLARRKGANVAKVAVARRLLTIIYRVLTEQRDYIPTMKQSAA

SEQ ID NO: 264817 - protein, 364 aa, unidentified
MHYVNNTELSSHEETRSQFNGGTGAIKLGIDVHQDFYVVVMQVGGSNPKPPQLFQKEAFLHWAGRLKQKSGAEVHAVYEACGFGFALQRKLSALGIRCYVVCPQKLDEHNRRVKTDGLDAKALCLRLDRFVQGNRDALAIVRVPTEEEEQLRAIHRQREQLVKARKQLEAQGRSLLVNYGLEPVQSWWKPRTFAALQVSDWIKELLQNSQPILIALQEKISTLTAQLQSAAAPDQPRGLGKMTSVIIDREIGDWKRFSNRRQIASYTGLCPGEYSSGNSRLQSCVTKHGNPRLRAALVELAWRLVRFQPNYHPVRKWRAVLAKGALATGAARKKAIVAVARQLAVDLWRIKTGRLSAEELGLIN

SEQ ID NO: 264818 - protein, 360 aa, unidentified
MRIIGCDLHSRQQTLAMLDTTTGEIEKTTLKHEENVVREFYSNLPRPACVGIEATGSMQWFLSLMEELGVECLVGHPAEIRAAEPRKQKHDRRDADLLLSLLVEERFPTIWLPTKELLDIRALLRHRHQWVGLRVKIQNALQAIALANGLRRGPSLWTQAGQQAIAALPLSPHAAYRRNELQTMYVKFEEEIEKLNQRVEQQARERCGARLLMTHPGVGPITALATDVFLGDPARFADSKTLASYVGLIPGEYSSGKRQRLGGLTKQGNPLLRFLWGEAAIHAVRRDPELKRFYNRKLIQKGLGKARAAVARKLGIRMWIMLRDRIEYHEFCRRGQMQQTSGDACAGMPGRVMVRKSPAD

SEQ ID NO: 264819 - protein, 347 aa, unidentified
MRFYNRQHRHYCGIDLHVKTMYVCILDATGQVLVHRNVPSTPEALLEVVAPYREDLVVAAECMFTWYWLADVCAAEGIAFVLGHALAMKAIHGGKAKNDKLDSFKIASLLRGGLLPQAYVYPAGMRATRDLIRRRLHLVRKRGQLLAHIQNTRAQYNLPAFGRRLAYPANREGVREHFADPSVRKSIEVDLTLVAQYDTLITDLELTIVREAKRHDADAFHRLRSVPGIGKVLALTILYEIHDITRFDRVQEFASYARLVKGQKQSAGKTFGTSGAKMGNVHLKWAFSEAAVLFLRHTKDGKRMLAAIEKKHGKGKALSILAHKIGRAVFYMLSRGTVFSTEKFLAA

SEQ ID NO: 264820 - protein, 457 aa, unidentified
MSQRSQKKKSRKFQVTQLPAQLQHINLNAAGIDIGSERHLVAVPAGRADVSVREFGTFTADLEALADWLKKCGVTSVAMESTGVYWIPVFEVLERRGFEVKLVDARHVKNVSGRKSDVLDCQWLQQLHTYGLLAGAFRPPDEVCVLRSYLRQKEMLTQAASMHIQHMQKALQQMNLLLHNVVSDITGVTGMKIIKAILAGERDPKVLARNRHGLCKNSPSTIAKSLIGNYREEHLFALRQAVELYEMYQAKIADCEQAIIKQLEKQPNVSDDEPPPADKETQARSRMRADVDVQELLYKKTGIDLFAIPGLAADTLLTLASEVGFDMSPWKTEKHFASWLGLCPGTRRSGGKVLNSKTKRNPNRATQAFRMAASSLSRSKTALGAFFRRLKMRTGGPQAITATAHKIARIYYAMLTKRTSYIELGQQAYEQRYQQRRINSLKNQAKLLGFQLVPYTT

SEQ ID NO: 264821 - protein, 294 aa, unidentified
MANDVAGIQTLVQRVRAQAPTLIVLEATGGYERAAVAALAAAQLPLVVANPRQVRDFARATGQLAKIDRIDAGILALFAERVRPGPRALPDDAAQALDALLTRRRQVLEMLIAERNRLEHAAPTVRRGITQHIRWLERQLRDVDRDLDNTIQTSPVWRAKEDLLRSTPGVGPILSRTLIGELPELGTLPRKQIAALVGVAPLARDSGTLKHKRLVWGGRAPVRAALFMAALVGTRHNPVLRTFYRRLLAAGKPKKVALTACMRKLLTILNAMMRTNTACATSIHHHPLDTGDSC

SEQ ID NO: 264822 - protein, 357 aa, unidentified
MNKSKQLDFKGQDIFIGLDTHLKNWMVSIMVNESPFKTFSQDPRPETLRNYLAKNFPNANYHSAYEASFCGFKIHRDLLNLGIKNIVVNPADIPTTDKERKQKEDSRDSRKIAKQLSQKDLTAIYVPEIEIEGDRSFIRYRKTLTKEIARTKHRIKSQLYYFGIEIPTKFSEKSYWSKNFTSWLQEIDLPTESARMTLNGHLEMAEMLRKKQLSTNKEIKKLSEKKIYKENYNLLISVPGIGGLTAMIILTEIGDINRFKNLDKLCSFIGLVPMTNSTGENEKTGDITVRKNKILRKALVESSWIAIRNDPALILAYQKLIKRMESQKAIIRIAKKLVNRILYVLKNKKAYVQAVVK

SEQ ID NO: 264823 - protein, 412 aa, unidentified
MYYVGIDIAKRTHVAVVMNEDNSLKVKPFSFNNDKSGFKKLLVHLQTLCCDLSDIVIGMEATGLLFENLYRYLQSLDYNVVLLNPYQTAKFREMDTMKRVKNDNIDSVMIAALLKSGRFSEGYVSQEQLQSLRELYRHRAAIENQLKALKRQTSTILTVVFPELESVIRDPFNVTGLALLDKYPTAKHYTNASVDRILKTFRGIKGNNFNRTKAQALLDAAKRTVYSGVAKDARAFNIRTNIEQIRLLQKQLERTLEMMQLLFTSKEVKQEDKEVMEALIDNLRTIPGVADKTILALLAECGNLDRFYAPKALIGFLGLYPTLSQSGDSTRNGRLAKRGASLAKKAIYLASISAIRHNDEMRTIYMNYRSKGRAKKEAIIIVARKLLTIIYTIYTRNVPYDPQRVFVAKPNQ

SEQ ID NO: 264824 - protein, 398 aa, unidentified
MTESSDYESVQVFIGVDVGKDTHHAVAINRSGKRLFDKALPNDENKLRSLISDLKQHGQILLVVDQPATIGALPVAVARSEGVLVGYLPGLAMRRIADLHAGEAKTDARNAAIIAEAARTLPHALRTLKLADEQIAELSMLCGFDDDLAAQTTQASNRIRGLLTQIHPAPERVLGPRLEHPAVLDLLQRYPSPEKLASLGEKKLAAQLCKLAPRLGKRLAADIAQALAEQTVVVPGTNAAAVVLPRLALQLITLRKQRDEVALEVEQRVLAHPLYPVLTSMPGVGVRTAARLLTEVACRAFASAAHLAAYAGLAPVTRRSGSSIRGEHPSRRGNKALKRALFLSAFTALRDPLSRAYYTRKMSQGKRHNQALIALARRRCDVLFAMMRDGTFYTPQGS

SEQ ID NO: 264825 - protein, 458 aa, unidentified
MYRELQPFREALSQELKASLFPVVAGIDPNKLLETYLDRLTMYTGVDVADQTFTALAQDAGQEILGSIEGCANEPDGFRRFVTWARTLRDRHGLRIIAIAGETTGIYYWGLWDSLGEQSDIARVLYNPRTTEHMGEVLSKKVRNELVDALLLAEQLRLGSTPEVLLQEDADLLTARYYSRAARDLAQQINRKKNQLRALLRAYCAPLCKVFSGGKLHHPAVYALLQESLFPDEFVQAGAEALATTLVTHCRGAFGLAEAQQVVEASRQALTRPIGRDAIRHLVRAHTEDITTFQQRKAFYLKTGYALIQDRQEAELLRTVKGAGVSNTLALVSEIGDVQRFPSGEHLASFLGLTTSKHISGTTLFRTKGITKQGSPNGRYAAVNVALHLTRYVPRYQAMYQRIKGRKPPRKGHFIALVAVARDFVANVLYDMWRNQRPFFLEVSDYRDYRRKHQHTAD

SEQ ID NO: 264826 - protein, 319 aa, unidentified
MSYLHFFGLDVSKGWFDVAIAGSMSRPKRFANSAEGIAAFLQEFADQLPCSLVVLEATGGYETALIVALVTDKIAVHRAAPWQAHSFSRSLGKQAKTDGLDARSLARMAAERHESLRLFVVASQEQGQLSELLMRRADLLAMQVAEKNRAGHPRYTEATETVRQSLAASLDFLAGQIALFDDQIKALVATAPELHARFKIMTSVIGIGDKTALLLQGLLPELGYLTRRQAASLAGCAPHARDSGLTRGHRSVFGGRALVKRALFTAAMSARTHDPAMREFFERLTKAGKPKMLALVAIMRKIIVQINAKLRPPAIAPSW

SEQ ID NO: 264827 - protein, 501 aa, unidentified
MNHMAGWATSAALAMSGGVGSILELLVERERGVLPVNSVAGIPAEQRCKPHLGWRCPPVGRENPSMQVNTNRARVSIGIDAAVVAAHQVAVRGEVREDFKIRPTLAGLAELTQRLKPYAGAMVVAEPTAGTWLPLAHAVADSGCGIGFVANRDSARLRSAIVGASKSDVIDADMLAHCEEILGVVPVPVPPPGQIALRRAMRRRHIATVDAHRAECRLWALAAWAFPDLWRATGGHTLAQPLLGRWPHLESLSRARLASITDLVAAHSRDQDPHRRAERIRDAGTGWARFWQGHLDLDALAWEVAAMLDDVAFADQRQADATRQAIRLWQQHWPDDPLVSIPGMGPVSSAAIRGWWGDATQFATAKAAVAHTGLNPSMWSSGLTESPSRRITKQGPAELRLALYQAANVARRHDPQLAEHYRRLMTERGHNHISANTAIARKLACRAWAIATTDRAYQPRDLDGNPVSYDQATALAAGLAVDDDIRARRRGHARRGRLSPI

SEQ ID NO: 264828 - protein, 414 aa, unidentified
MIFMIKENYVYVGIDLHKETHTAVMIDCYNQKLGEITFPNRPADFPKLVTKVKKCNTDGKEVVYGLENAYGYGRALAVWLIDKGYLVKDVNTAISHRQAKHRGAMYRKSDSDDAEAIALATLNMLDKLPDACPNDAYWSLGQLVHRRDNIMKQRTRLVNQLHGQLCIAYPSYKSFFNDISRPTALYFWEHYPSRKYLRGKSVEDLRKELVPVSHNKCSTKTCEKILDAVASDKVKNIAYQDARDMVTLSIVSYLQHYDSQLAEVDKMLEQMYKMLGCTLTTIPGVNVITAVKILAEIGDIKRFSNANKLAQFAGIAPPHLSSSDKGKDLATKQGNRRLQTTIYFLAIQMVQLSSKGTPRNPVVRAYYEKRKAEGKTSQQALICISRRLISIIYGMLKNGTEYRMPVVENAGENR

SEQ ID NO: 264829 - protein, 341 aa, unidentified
MTVYIGTDLHARQQTVAYMDTADGEIKRRELHHQKDDIRKFYSQFVGDVIIGVEASGSTNWFEEMSEDLGHTLLVGDAAEIRRLARRRQKNDRRDAELILDLLMHDEFPRLFRYSAESREVLRQLRFRHKLVKLRTSVLNSLHALSIGAGLSLQAKLATAQGRAKLLQLRLSPALVSQRDEWLKMTDELSQRILAVERWLKRQAKHDERVQRVQTHAGVGLLTSLCLVHTLGDVGRFPAARKITAYVGLDVTEHSSAERKVYGGISKAGSRLLRYLLVEAGQSAVKSDEHLKGFYSQVMKRRGKAKAKVAVARKLLVRLFIMLRDEIDYAEFLRRGKRAGE

SEQ ID NO: 264830 - protein, 373 aa, unidentified
MKKRSSSEKSQKRTAKTKRTQERVTIGMDLGDKTSRYCMLSNEGEILREGQVTTTKAGMVEAFGSLGRARIAIEVGTHSPWVSRLLQKLGHEMVVANPKQVKLITESSRKDDRLDAQTLARLARIDPQLLRPIQHRSDKAQGALMFIRVRAALMGVRTSLVNTARGLARSMGERLPKCDADQMGVPQAVSLPPKLRQVLEPLLKEIESLTEKIKDSDREIEQIARKDYPETALLQQVGGVGPLIALTFILTIEDKDRFQKSRDIGCYVGLRPRRSDSGQSQPQLRITKEGDPYLRTMLVQGAHYIISRRGPDTDLKRWGLHLAKHGGKRGKKRAVVAVARKLGILLHRLWVTGEVYEPLRNHNARQEQKKIAA

SEQ ID NO: 264831 - protein, 489 aa, unidentified
MSKSKRKQPISFAGPRFFGIDLAKRESQLCVMDAEGNILEERRFPTTVKELEQIAAELTTRDTVTFEMTTNSFAIARLFREKCRARVIVSNPMKTKLIASARVKTDKIDARVLCELARVGFLPEVWLPDEETESLRRLVSRRTNLVRRRTAIKNDVHSILQRNLVEYERPKVFASGPSFKSLDISRLPALEKLLVDDYRDEIASVDARIEQTERVIAAFVCADQKMLHDMDLLMTIDGINIVSAAGILSAIGDISRFSSPKKLASYFGLCPSTYQSGDLRSFHGRITKQGRAEARWFLAESAEALIRTPSPLASLYQRIARKKGHNIAKIAVARKMAELIWHVLSKQTPYLYQKHRLTQEKQARLRYLAKLSGIMATSASPTKRSNDTALKGLKLPVAGRDLKTQASRIAAIRASNIYQAVTEGRLNNNIASLNKNDPKVSPGNIALADLCNTRLSGFNPFRPTQHDYEALLRDVLKDLISHHIEDRTA

SEQ ID NO: 264832 - protein, 457 aa, unidentified
MSTRKKVKKKATSKANVQLPTLHPHAGGIDIGATAIQVAVPGDADPRPIRTFATFTDDLHALRDWLLKCGVKTVAMESTSVYWIPLFQILEAAGLEVCLVNARHCKNLPGRKTDISDCQWLQYLHSVGLLRASFRPPEHICAVRSLFRHRAALTRYAGSHVQHIQKALTQMNLQIHNVISDLTGVTGLAILEAILAGERDPQKLAALKDHRIKASRDTIARSLRGDWRTEHLFVIQQALDTWRHYQKLIAQCDEQLQQQMTQFDSKIDLAQHPLPANRRGNKKPQRNEPKFDTRSELYRLNGVDLTQVPSIQVSTSLVLYTELGPDFATRFPTAKCFSSWLGACPDNRITGGRVLSVKTRNVNCRSARALRLAAQSLWHSKDYLGDCFRRWKARLGTPKAITAMAHKLARIIWHMVKFRTPYDPSVWDQAIAHSNQKKLKRLQQNAAALGLTLVSAS

SEQ ID NO: 264833 - protein, 416 aa, unidentified
MQVLYPRCCGLDVHKRSITGCCLWFNNTRQLQEETRQFGTHTTELRRLATWLREHEVKNVVMEATGSYWRPVWNLLEMEGFEQTLANPQHMKAVPGRKTDKKDARWSADLFQHGLIAPSFVPTQQMRHLRDLTRIRTKVMQDHTRVVNRIEAVLEDTNIKLSSVVSDIMGVSAQAMLQGLLNGERNTAKLAELAQGRMRPKVPQLKEALEGNLQPHHEFVLKRLFMQSRFLQQQQRAVDREIEHRLDDEMRQAIALWDTIPGVDENIATTMAAEMGIRTEQFADGPHLASWTAMCPGNHESAGKRKSGKTRKGNRWLRGALTQAAWAASHTKGTYLSGLFRRISARRGAKRAIVAVGHSILISAFYMWKNKQPYKELGDAYLDKIKPEKTANRLLKRLAKLGYVVAVTQVPTPQAQ

SEQ ID NO: 264834 - protein, 377 aa, unidentified
MKRVKFVGLDVHAETIAVAVAEREGEIRSLGVIPNREDSVRKLVRKLGPVEELRFCYEAGPTGYALYWQLTKLGAQCEVVAPTLVPVKAGDRVKTDRRDALKLARNYRAGDLTAVWVPDADHEALRDLVRAREAAKKDQLRARHRLNKFLLRHGRRPPMGVKPWTVKYLEWVKRDVHFQARAQEVTLLDYLHEVEHAATRIARLDGAIEEAVKLAPPKMRAVIAALQALRGIAQVSAVTIVAELGEITRFSKARQLMAYGGIVASEDSSGERTRRGSITKTGNAHLRRVVVEAAWAYRHRPSVGATLRKRQEAVSEEVKEIAWKAQHRLHARYGKLLAKGKNKGVVVTAVGRELLGFLWAIGVQVEAEKKEPLQQVA

SEQ ID NO: 264835 - protein, 356 aa, unidentified
MPETNPAEVIIGVDTHKHTHAAVALTALGTRLGTITVPASRTGYQELEAWAGSFGPVRAYGVEGSGSYGAGLSRFLQASGHAVIEVNRPNRQLRYQHGKSDPLDAEGAARAVLSGQADARAKPGTHAVEMIRHLKVARDTAVKSRTQAMITLKALIVSAPAALREQLEGLAGKMALIRHLAALRPGTLTSPTASAKAALRALAQRWLALDAEIKAHEAHLDALTAACTPILRTAYGMSTGTAAEMLILVGDQPDRIRSEAAFAKLCGACPIPASSGKTIRHRLNRGGNRQANAALYRVVIVRMRSHPPTLAYVRRRTREGKTKLEIIRCLKRFVAREIFGYLCGAKTLPTAPMTAS

SEQ ID NO: 264836 - protein, 422 aa, unidentified
MEEGLDSLDLNLCINKGGQNKMNATSVICIGIDVSKDKSDICIKDKLGNDLVKRFKITNTKADLGILYETIERIKSKIPGKSDVVFGMEATGIYSLPLYSALERDGHKVKLYNPIQTNGFRKMNIRKTKTDPIDSAIIADMLRYSEAPEVNPIKDLNLYQLRELVRIRDRLVDKQTISKVQLIRNIDTVWPGYSTVMKRDTGATSIAILKKYSVPSKVRAESFEKFYELVKKTSRSKISRTKAEEIYAHAGNILTIPELDSIISVEIKTLIIELELFNEQIRSIEKKIDTIMGLIDSKILSIPGIGETLGPMILGEIGDANRFSTVKKLIAFAGLDPIVSQSGRFENKSGKISKRGSPLLRKGLFLAANVAIQNDENLKRFYDKKRSEGKHHFSALNAVAAKILRITYWVLKNNKDYKTQVN

SEQ ID NO: 264837 - protein, 400 aa, unidentified
MKASKQYLRFCGIDMGKHKYVACIVEKNGQYLLQPKSIRNDAHGFETILNCLKQTGRTKSVLTGMEATGHYWYSLHDFLTRQGYNVVVLNPIQTAQQAKQAIRKCKTDRYDAFHIANLLRTSQYKAAVVPDELAMTCRQITRLRYRIVKQAAMIKQLLNSRLHPVWPEYEALFSSKFGKTSMELLKKAPTPKELMELDPDELSELIHRVSKGRFGPAQTQKILQSARNSVGMQRGHYGISIGIKFLIEQIVALEPVRKKMDAEILKLSAKLPQYLFTLPGATELTIVSLYGEVSPIEAFEKPSQLVAFAGLDPKVFQSGQYDAPRRCISKRGSPYLRRSLWQMAYRALITEGDLRDFWRRKHRQNKHHLVATTAVANKLCHVVWRIMTDRRDYIRKGYNP

SEQ ID NO: 264838 - protein, 423 aa, unidentified
MKVTFLTCCGVDVHKSFLVATIIKTTSGIEPSYQKKRFSTFNNSILEFKQWLLDNDCHDVCMESTGKYWIPVFNLLEDEINVTIANPKWVKAVKGNKDDTKDSKWIGDLFRLGLVKGSYVPCKAIRILREYTRYRYKLVSCRSSEKNRYQNALTVCNVALDSVVSDIFGKSSTSIIDYLLEQPGTSVNHEEIASKLLKSLKSKEDAVIESIEGYQMTDSQKYRMRLIRTHMDYITAEINDIDSSIEKMISSNPDYENAVRLLCTIPGVKRDSAIAIISEIGTDMTQFCNSKRLCCWAGLTPGCNETGGKKKSVRIMRAGVYLKPALVQCAHAAVKSSKSPYYKKKYESLVKRRGKKRAIIAIARMILTAIYQMLSTGEEWNPCDLYKVDMPAPLIEKQKTKAIKQAKKLLLREGIISESQLVS

SEQ ID NO: 264839 - protein, 419 aa, unidentified
MAFKILRKNCCGLDVHKTWIFACIGITDANGRTEYKQARFSSFSNGLRDLADWLAKYGCSDVCMESTGKYWIPVLNILEKTCWVTLAHPKYTKPQKGNKTDRKDAKWICDLYMCGMVKPSFIPPPDIRQLRDLMRYRTKLTNMLTSEKNRALNCLTVSNLKLDDVFSDVFGKSSRSIIQYILEHPGEQFDVAPFLDRRCKHSVEEIQAAVDGAVSREQAAKLRECLQHIEQLTEHRENIEAEILRLVQPYPHQLELLRTVPGFAAAPLTAVALISEIGADMSVFPSAKHLVSWAGCCPRNDQSSKTVKSTRISRAGCYLKPLLVQVANAVIKSDKYPECRERYRRIKARRGHKKAIIAVCRMLLTAIWNVLSKLVPYSAKGYLEDKLTEHSVVISKAQGLELLRKRGYIFKDELVAESG

SEQ ID NO: 264840 - protein, 367 aa, unidentified
MNEPTAFVGLDVHADTTAIGVAEPGRAAARFAGTVGPQFAELTKALSKLGAPSKLMIVYEAGPCGYALVRDLIAAGYRCEVVAPSRIPRRPGDRVKTDRRDALTLASLARAGELTFVNVPDERDEAVRDLSRARIDGVRARLKARQQLKALLLRQGRRYTGKSSWTAAHERYLAKVSFTHRAQDVAFVEYRQAVSESQARVQRLSEALAQEVECWRMRPLVQALTSLRGVDQLVATTLVCELGDFRRFAHPRELMGYLGLVPSEHTSGERRRLGAITKTGNSHARRVLIEAAWNYRFPPRITPALQKRQEKQAAHIRTIAWRAQLRLNHRYRRLKARGLQHNKICVAIARELAGFVWNIGQHVTTQA

SEQ ID NO: 264841 - protein, 373 aa, unidentified
MYVGLDLHKDSITVAYAIDAGEVELLGKTGTTGADIDRLCTRLQSKAPHVRVVYEAGPCGYGLYRQLVQKGFDCMVCAPSLIPRKPGERVKTDRRDAIKLARSLRAGDLSAVYVPGIEDEAFRDLARAWAAAREDLRHARQRLKSFLLAHGVRYTGSANWGEVHRRWLGRCSFPSAWQHLAFDEHRRTIEDRLAQCARLETALREAVISWRFYPVVLAVQAMRGVQFVTAVGMVSEVGDLSRFEHPRQLMAWLGVTPSEHSSGGKRRQGSITKTGNSYARRLLVEAAWSYRHPARVSPEIQARLEGLPKAIIERAWDAQVRLCRRFRRLTARGKPINITVVAIARELAAFIWDISRLAMALAIPRSKLPAPCT

SEQ ID NO: 264842 - protein, 411 aa, unidentified
MEVVHARCAGMDISKKDAKVCVRVARAGRRKTVESVTTWGSMTNQILTLRDHLVAEQVTCVVMEATGDYWKPFYYLLEDAGFELLLVNARQVKTLPGRKSDVSDATWLAQLGAHGLVKGSFVPPEPIRQLRDLTRARTAITRERGREAQRLEKLLEDAGIKLSAVASDILGVSGRAMLEALIAGDRDAVGLAELAKRRLRSKIPELTEALNGRFTEHHAFLARVHLDLIDRHTAAIHKLTARIEVMIEPFQGFRDLICTIPGISTLTADVIIAETGADMTRFPTAKHLASWAGTTPGHHESAGKVKSSRTRPGNPYLQGALGAAAMACSQNPRTYLGARYRRIAARRGPKKANVAIQRSMLIAIWHMGTTGTLYDDPGADFFTRLHPDRAKKRAIHQLEAIGYRVTLDNAS

SEQ ID NO: 264843 - protein, 407 aa, unidentified
MAWIGLDWGHQTHAFVLQDGSGPPEEGTLPHSAEALHAWLRNLEKRFGARPVALALEASRGAVIHALVQYPWLTIYPINPVTSARYRSAFTPSGASDDLPDARVLLDLARDHAAKLRPLETQDPQTLKLAGLVEARRDTVDRRTQVLNQLTSLLRAYYPQALALVGELDTELAVDFLSRWPDLISLKATKPGVLKRFYHAHHLRRPELLAERLQLIQTAVALTTEEARVSVAVLQLRCLLDQLRAFRKHVAILDTEIKTVFAAHPEAALFRDLPGAGPALAPRLCVAFGTIRPLYPEPASLQKHASVAPVREKSGQSLWTHWRWLAPVFLRQTLVEWAGQTVCYSAWAKVYYQRMKAKGKGHHAILRALAFKWIRILWKCWQTRTPYDEVRYLKQLVHRKSPNAAPA

SEQ ID NO: 264844 - protein, 391 aa, unidentified
MEARTVNNLPPAGTDDDAVRCLLAIELSKKSWIVAVNTPLSDKISRHTLKPGDGKELLDLCERIRTRVARETKKRVEIVSCYEAGYDGFWLHRLLEAHGIRNYVIDPASLQVDRRARRAKTDRVDVERLLRSLMAYLRGEPKVWSVVRVPSVAEEDDRRLNRERGRLINERIQHVNRIKGLLAIHGIYDYQPLRRDRMQQLERLRTADGRTLPPRLKAEILRELQRLVLVVGMIKTIEAERDAIASAKIETEQQHSSAKRIQDLAKIKSIGPEFATTLVGEVFYRSFDNRKQLGSYVGLTPAHFQSGAMCRDQGISKAGNGKARTVMIELAWLWLRHQPDSPLSVWFRDRVGKLKGRIRRITIVAVARKLLIALWRYLETGLVPKGAALKV

SEQ ID NO: 264845 - protein, 372 aa, unidentified
MFSERTSIGLDVHARSVVAAAIDGVTGEVTRARLTPSYEHIQSWIADLPGPAAVAYEAGPTGFGLYRALTDAGVRCEVVAPSKLQRPAGDRVKTDARDALHLARLLRLDEVTSVSIPSVNQEACRDLVRAREDCRGDLMRARHRLSKLLLRHGIVYYDGAAWTDAHDRWLRGRAASQLPTVATRMAFDSDYEHVLMLQARRRGLDSAIENIAADSEFTPVVRRMSCLRGVGTLTAFALAVEIGDWNRFTGNTIGAFIGLVPSESSSGSTRSQGPITKTGNTHARRLLVEAAWHHRPKYQVRAVMRARWDQAPAAARARGHEGNRRLHNRWVGFLARRKRSTVATRDPTMSRPSGSRSTLDPRMRSSRNPVLR

SEQ ID NO: 264846 - protein, 339 aa, unidentified
MKYTPFGVDIAKHLIQVHFINEHTGEVVDKQLRSKDFLTFFSNREPCLIGMEACGGSQHWARELKKLGHEVRLLQARFVKAFVMGNKNDVMDARAIWMAVQQPSKEIAVKTEEQQSVLVLHRSRRQLVKFRTAQINVLHGTLLEFGETLHKGRAAMDRELPAALERMKTKLPPYLITVLEDQYTRLSELDMLIDDLEKQLNSVARQSEICKRLMEIPGVGPLIATAAVATMGKASAFKSGREFAAYVGLVPKQTGSGGKVRMLGISKRGDTYLRTLFIHGARSAALLTKEPDPWITELKKRRPTGVAIVAMANKLARTVWAIVAHDRKYDKNHVSIRPY

SEQ ID NO: 264847 - protein, 287 aa, unidentified
MASIAFDPADVIVGVDTHKDQHVAVALDGLGRRLGERFVSAAPAGYADLLAWAAGLGRVAAFGVEGTGSYGLGLARFLRRHGIVVLEVARPPRKGQRRLQGKSDPVDAEHAAREVLAGTSVVTPKTGEGAVEAIRLLKVARDTAVVAHSQAMITLKATLVTANDTLRAELEPRTDFALVTACAALEVSGDLADPEVAMGHALRALACRWLALHEEIKAHTRHLKRLTSRTAPALVATFGIGFDCTAELLCAAGDNAGRIRSEAAYAKLCGACPIPASSGKTTRHRLM

SEQ ID NO: 264848 - protein, 313 aa, unidentified
MFQCNVIGIDTAKSSFEIFEWKDEKVQMQRSLPRKKIAEFFQKMEKNTLIMEACGGSHYWGRLFTKMGHNVKLIAPQKVTPFRMAHKNDKNDARAVALAGVCPNMKFVPIKESWQQDILSIHRIRERLMGNQTSLINEIRGLLQEYGIVIPVRANNLRSHLADPATLADQNISPLMRRQVVALHDELLQITTRIEQCDKDLESFHKESDASQRIAKIEGIGLITATAIASSCPNPDVFKNGREFSCWLGLVPGHTQTGGKDSKPKMLGITKKGDKYLRKLLVQGSMATIATMNKAIRIKTLNPMTLSAWQSLQ

SEQ ID NO: 264849 - protein, 346 aa, unidentified
MDRQQHYVGLDVSLETTAVCVINDKGTVVWRGKCASTPESIAAAVRTYAPAAVRVGLETGQLSNWLTLNLRRRGVPIVCLDARYAKATLSLQINKTDANDAFGLAQIVRTGWFREVAVKSMDAHTLKILLVARAQLVSQRQMVANTVRGLLKTFGLVIARGAQRLFPIRVREQLVGNDVLAAIVEPMLVVWHALREQIDTLHRQILVRARADAAARLLMTIPGVGVVVALTYTAVIDDPARFRRSSSVGAYVGLTPRRYQSGEVDHGGHISKCGDGLLRAYLFEAATVLLERSSRASTLKTWGLALAKRIGMRRAKVAVARKLAVIMHRLWSDRSQYRWGDAPVAA

SEQ ID NO: 264850 - protein, 456 aa, unidentified
MQEQESQESIAMQVVHPHAAGIDVGSRSHWVAVGQADTDIREFGVFNEHLFALAHWLKEKHIRTVALESTGTYWQSLYAVLIAHGFEVLLCNGKFTKNIKGKKTDIKDCQWIQKLHTLGLLSSSFLPDAQTEELRTYCRHRENLLHNAASTAKKMQKYLRLLNLRLDVVVNDICGLTGLQIIRAVCAGETNPQKLASLRHGNCHKSEKEIASALQSNGRKDYLFALRQELEAYDFLQSKIKTCDAEIAQKLQEIIEKDDNKREHHLDPKPHKRINKNTPDGIDLNLRSYQMFEGNDLLAIEGMSFSTVLSLMSEVGVEGIRKFKTAKHFASWLRLAPNNKISGGKVLSSKMPKGSNRLKIALRNAANAIGNLKDSTPLRDFFQRISFRKGRTSAISATARKLAVIIWNIVTKNQPYQNPAGYLFLDEKRKLGLVKRIRKQIDKFGLTNEELQIVTV

SEQ ID NO: 264851 - protein, 430 aa, unidentified
MYEHVAGIDVHKDMIKVAIRSPGDKPWTRKTEILEYRTFYGVLQEMARELRRRGVTHVVMEASGVYTEPVYYALCEQDFTEVAVINPVHAKALKGHKTDAKDCARLAELFECGLLRGSCIPSAEQKEVRDLTRYRIKTVQARTSEIQRLGKALESAGIKLGSVASEITGKASTAMIEALIDGERRGGVLADLAIGRMRSAGKLADLSMALTGRFTGHHATLCRLHLDRINVFDDAVDGLDDRIAAGAARWQREAGLLKSVPGFGDVVSCAWLAEIGPAPHKWFSRHEKLASWVTLCPGNNISAKKRKHGRTGDAGIYIKPMLIQAAWSAIRVRGRLQARYNRLVRRFGGDKNPAAKKKAITAIAHTLLKIAYQVLKSGTPYQDLGADFYTRRNSPEEQQKYLERQLQKLHPGCTITITISPPEAALPPGA

SEQ ID NO: 264852 - protein, 458 aa, unidentified
MSRRNAKISLAKTNLKPRKSRAALTITHPNAAGIDIGSASHFVAVPPDRDDEPVREFPSFTVDLHALADWLRASGVDTVAMESTGVYWIPLFELLESRGFTVLLVNARHVKNVSGRKSDVLDCQWLQQLMTYGLLNGAFRPADAVCALRSLWRQRGMLLCSQGRHVQHMQKALTQMNIQLANVISDVVGETGQKILRAIVNGERDGQVLAAMKNVRIRASQDEIAKSLSGNWRAEHLFALKQALAMFDFIVTQLAECDREIEQQLQSLQAHDGEPAKGKKRGRARNAPKFDLRTQLFRMCGVDLTRIDGIDVTTALAVISETGADMSRFATVGHFTSWLGLCPGTKITGGKVMSGKTSRVANRAAQALRLAAAALRSSQSALGAYFRRMCSRMDKPKAVTAAAHKLARLIYTMLTKGEEYTDQGQDYYEERYRQRVLRQLAQRAEKMGMKLVATEQPA

SEQ ID NO: 264853 - protein, 389 aa, unidentified
MKSSQHADAPAAGTECGTLYVAFELGKATWKLGIVVSGSSRLSQYVVDGGDIEAAWQLIGKAQEKAQKRLGQPVRIVSCYEAGYDGFWLHRELEARGVANRVIDPASIQVNRRARRAKTDRLDLEHLIRVLMRHEGGEPRVCSVVRPPSVAQEDARRPWRERDRLIKERTAHVNRIKGLLHGQGVRELQPRHKDFLEQLATARTGDDRALPPHLLEEIRREHERLELVQKQIVRLEAQAKAARAAAEEGTMAAKINQLIELKSLGPVGAQLLVGEVFWRDFQNRRQVGAYFGLTGTPYDSGQSAREQGISKAGNSRAREMAVELSWLWQRNQPDSALSRWFMERVGSHKGRIRRIAIVALARKLMVALWRFLEHGLVPEGAVLRAAPQR

SEQ ID NO: 264854 - protein, 355 aa, unidentified
MTVTIVEEARPVTCRTAITGGVDTHADTHVAAALDPVGGLLGVREFPATAAGYARLLGWLGGFGTVCLVGIEGTGSYGAGLARYVTAAGIRVVEVDRSDRQDRRRQGKSDPLDAVSAARAAQSGRARGAPKGRDGAVEAIRTLMVARRSAAGERTRTINQARALILTGPDDLRARFARHKPAALVTALAALRPRPGDVAGHAVRIALRELGRRAQFLDGQLERLDELIVPLVTARAPGLLAVYGAGPRTVALLLIAAGDHPGRLRSEAAWAHLCGVAPIPASSGKVSRHRLNPGGDRQANHALWRIVFTRLGSDSATRAYAERRTAEGKSKAEIIRCLKRYVAREVYRHLRAAAG

SEQ ID NO: 264855 - protein, 457 aa, unidentified
MSKGTKNEPAGKAAVSLPIVHLDAAGIDVSATMHMVAVPEGREKESIRQFGCFTRDLHELATWLKRCGITTVAMESTGVYWRPLFSVLLEYGFDVALVNSRQIKNVSGRKTDKADARWIQKLHSCGLLTSSYLPDEPTEKLRTLVRHRRRLREDASTYVLRMQKSMELMNIKLHSVISDIMGKTGKAIIEAILGGERNPKAFLPLVNGRIKASADTIEQSLTGTWNEEQLFLLAQNYDLHRYIEHKIEVCEKKIEEQLQLQAAMMEEGIIESCPTKLPTEKASRKRYTAKNAPNFDAHAYLKRIHGVDVTEIYGVSQTSAMEILAETGTHLRQWENEKKFVAWLNLCPNNKITGGKVISSMVMKKKAGNATQAFRAAANSLQRSDHYLGHYFRKMKSKGGNKYAIIATARKMAIIYYKMITEKVAFNPIQMEEYKEKMQADKIAYYQKKIAQLQQVA

SEQ ID NO: 264856 - protein, 416 aa, unidentified
MLLFIGDDWAEGHHDVVVQDDAGKTLARRRLPEGVDGLARFHELVASCLGEDAEPDPARVVVVIETDRGPWVKALAAAGYRMYPVNPKQAARHKETVANSGKKDDFFDAGCLADMGRTRRHQMRELAADSDVAEAVKIAARAHQTVVWERTRHLLRMRSALREYFPAALEAYAELTLAGKDALELLAKAPDPASAARLTVTQITAALKRAGRRGDLAQRARDIQAALRAPHLAQPDVIAEAYAASVQAAAAVITALNEQVKIMEAKVSGLFRRHPDAGTYLSQPGVGDITGARILGEFGDAPGRYASAKARKNYAGTSPLTIQSGKKKTVHARYIRNRHLIDALHAQALSALSASPGARGYYDGLRARETGHDDAMRRVASRLTGILHGCLKTGREYDEATAWSHRAETPGAAEAA

SEQ ID NO: 264857 - protein, 418 aa, unidentified
MSNRIAKNLSEVKSETLLFGIDLGKDQNISVVLNTQAQQLDRFGFPHNRTGYDYLYRQIDRLKEEHEKVEVLMGMEPTNFFWKLLAADLEKHQIPYRLVNAYTVKKHREGDYLDSSKDDPRDAFTVGDLLRTGKFTQTQLLHGPYAELRNYSSLYYRLRSDLGRQKSLIYVAAKQLFPELEGVFKDFTGETVRAMLKHHGAAAVIEEMPLEEFIAAVRSDFQGQHLWRKNLTKAHLLARSSVGFREGIKSLQHTLTAHVNTWETLSAQYAGVKKAMIEIFNHLPESKYILSIPCFGPITGALVLGEIGNPEHYTHIKQWTKLAGSQPVPDTSGKKQSGRTPMSRKGRPRLRTTLFYAVLYLIRRDERFIRKYQYLQQRKKNPLTKMEAIGVLMNKLLRILWSLIKNQACYDPTYSSSC

SEQ ID NO: 264858 - protein, 418 aa, unidentified
MNKHNNSGKKSELTSKRAKPRGPMRRDTKEVLAELVGKLKEKLDPKKPAATSTGEKHKRGELRPNLDRLTVGVDLGDQWSHYCILGLEGETQAEGQLRTTQEDLAEFFQALNAARVVFEVGTHSPWVQEVIGGCGHEVLVANPRMMDGSKRRKRKNDRIDANKLARLGRVDPQSLHPIQHRSREVRQDLVILRARDALVAARTELINATRGLVKSMGTRLPKCSSPSFAEKVEGTVPAELRDALLPLMRMATALSDCIQEYDEKIEKLGREKYGHTELLRQVKGVGPITALAYVLTLENPDRFVKSRDVGPYLGLVPKQEDSGESQPQLGISKTGDTMLRKLLVGSAHYILGPFGPDTDLRRYGLRLCERGGKNAKKRAAVAVARKLAVLLHCLWVSGEVYEPLRQGTSATIAPAVAA

SEQ ID NO: 264859 - protein, 391 aa, unidentified
MIYVGIDVAKDKHDCFITNSDGEVLFKSFSISNNREGFNELYRRIESVSDDLTKVKAGLEATGHYSYNLLGFILDKGLTTFVTNPLHTNLYRKSLSLRKTKTDKVDANTIASMIMSDVNLKSYSDTSYHNEELKSLTRYRFDKVKERAQLKQSISRLVAILFPELEKLVPTLHLASVYALLSEFPSVRAIAAAHLTRLTNLLSITSKGRYGKDTATTLREAARASIGSHMPAKSLELKHTIKLIRELDNEIDEIEAEIKIIMDEINSPILSIPGINYRMGAMIIAEIDNFSRFDSPDKILAYTGMSPSTYQSGQLDNCYSHMEKRGSRYLRYALYNATKYVCHWDENFGAYLAKKRAEGKHYNVALSHATKKLVRLIYQLEKSGQQYVKAS

SEQ ID NO: 264860 - protein, 327 aa, unidentified
MIEHYIGVDLHQAFFQACAVDGVGTRLWEDRFPRTDAGLAALRARCDRRTAMAVEASTPTWHFADAIQDGVGELRIVDPVRTKLKAGYAAKTDRLDARRLADALRRDSVVGIYYPPLAIRELRELCRGRHALVHVRTATINRLRAVLLRQGIVDRRGLDRSISDAWLDQLTLPPRASATVTALRRVLSSVRTQVLVADAEVRAVAAQDAVAPGLQQIHGVGPVLALTIRAEIGDIGRFPTPAHLASYAGLVPSVDASARRVRYGRITRRGSPWLRWALVEAAMHGTRRTDRIGRWGRRLAIRKGALKARIALARALCADVMRYWPHS

SEQ ID NO: 264861 - protein, 359 aa, unidentified
MARKIMPQPEPLYVVMGVDTHKDLHVARAKDQVGRLLGELTVPAETTGYRKLQAWAHRFGEVDSWGIEGTGCYGAGLSRYLREHGEEVIEVIRPNRKERRDNGKSDPADADAAAMAVLSGKAKARAKAGDGTVEMIRVLRVARASAIKARTQTANVLQALVVTAPAPLRESLHTVSTINLVSICARSRPGQMSDGTSATKSALRSLAVRYEHLDAEIAALERELNRLVPKAAPELIARFGVGPETAGQLLVTAGDNPDRLDSDASFSMLCGSSPLDASSGKQKHHRLNRGGDRHANSALYHIVICRMRHDPRTKQYVAKRTAEGKTTKEIIRCLKRYVAREIYGVLKNMQHTSAVTTAA

SEQ ID NO: 264862 - protein, 347 aa, unidentified
MKILALDLGKYKTVSCDYERESGAHRFRANLTTPAALQQLVKEVKPDRVVIEVCNIAGWVCDLLRGMGVEVQVANTSDDAWRWRKVKKKNDRCDALKAAQLSAVNQLREVHIPRIEVRQWRSLIAFRQQLVRRRGRSKNHIRDLLLSEGQILPRGGKSWTQLGVAHLEALAKPLNECGLDELWRGQLDIELRQLREVQQEITAAEEKLDAIAAADPRIALLRTIPGVGPRLSEAIVALLDQPDRFQHVREVSAYIGMVPKELDSGETQRRGRITRHGSRLVRSLLVEVAWAGLRYNPWVRETYQRISGGKKSRRKIAIVAVGRRLLVRCWAMLRDGTSWRPPLAHAA

SEQ ID NO: 264863 - protein, 352 aa, unidentified
MEIIALDCHKHYSVASVQSPEGRCLAERRIEHRRGNIRAFLTPYSDGCPVAVETIGNWYWIVDEIEQAGKVPRLVHARKAKLMLGSINKTDKLDVRGLNRLQQTGTLPTVWIPPAGLRDQRELPRTRMVFATTRTRLKNRIHSVLDKYGMQDQFIGVSDLFGTAVRERLEGCFQQLPPQAAYTSDLLLEQLEAVQEIIEALEERMAEVFKPTEELQWLDTLPGVGLILGVVLMLEIGDIQRFRCAERLASYAGTVPRVHASGGKTYYGRTRPDVNHYLKWAYTEAANAVAVHRDSLAQRHVGQLYNRIRSRRGHASAVGAVARHLAEATYWMLTKKESYQERGITEVSPQGL

SEQ ID NO: 264864 - protein, 362 aa, unidentified
MNYVGVDIHKKYSVLCAVDERGRKLREARIEGNSGCGFAQFFASLEGPSKAVVEACWNWGLVHDELEEIEQVEEVVLAHPYKTRLIADAQIKTDRLDAYALSTLLRGNLVARAHVPRRETRMRKNLLRQRLYWARLRTMLRNRIHALLDRQRSLELPQCSDIFGVRGLSFLRRLELPETDAALLREQLALHDLIAQQMKAQEKRIGLEFGSEAMHRQLLSVPGIGPTLAAVIACEVDSIERFSSAEKLCAYAGVVPTTHSSGGKTRHGQLLPFCNKWLRWALIEASWVAIGCSPYFGALYKQHRARGKKANSAVLIVARRMCRIIWQLLHEKRDFEKRPLRPNFNFPGCSVVRLTAATAARP

SEQ ID NO: 264865 - protein, 335 aa, unidentified
MQIYGIDLAKEKFDVSFFDLTSKKVSNQPSHKVVKNNFKSIGRFLETLPSDAVLVAEHTGVYGDTLLKCCMDSNVKIAFVGGYVIHRYRATPDRAKTDVLDCALLREFGERYPDKLKYRKFPEEALYELRQLARHREMLVEQRKQLMTADKSEDCRPIRSLAVKRSMDRIKEMLDTEIAETEKEMLKVIDGHDSIHHNYEIVKSVKGVGLVTAVELLVKTDNFTKITTARQYAAYAGTAPYEKSSGKMDKGAHISKIGNRRSKTLLYICAESARLHNKEIKLYYERRTLIDKKPRHYVLNAIANKLLRIIFTLVEKGEYYDANFIRQDPRLVKHN

SEQ ID NO: 264866 - protein, 376 aa, unidentified
MGHDSTVYVGLDVHKESITAAYAVGIGEVELLGKIGTSKTDIDRLRQRMQSKATHVRFVYEAGPCGYGLYRQLVQKGSDCMVCAPSLIPRKPGERVKTDRRDAIKLVRSLRAGDLSPVYVPGVEDEAFRDLARAWAAAKSDLKHARQRLKSFLLSHGVRYAGSANWGPAHRRWISAFAFPNNWQQLAFDECRRSIEDRLAQCDRLEVALREAVVDWRFYPAVLGLQAMRGIQFTTAVGMLAELGDLSRFEHPRQLMAWLGVTPSEHSSGERRRQGSITKSGNSYARKLLVEAAWSYRYPARVSPDIQRRHEGLPKPIIDRAWDAQLRLCRRYRKLAARGKNVNIGVVAVARELAGFIWDISRMAMSLALPKDARPG

SEQ ID NO: 264867 - protein, 338 aa, unidentified
MNSSVIGLDIAKHIFHLFTLGIDEKTTKKKLKRNELLAFFANYPVSIIGIEACGSAHHWARELTKLGHEVILLNARYVKSFVVGNKNDFNDAAAIFDAVTRPNKRVVAIKTVEQQDIQLIHAIRKELVDKRTALVNQTRGLLSERGIIINKGITQVRQQLPLILEDAENGLTVLSREMFAEQYEKIKALDDEIKAQDLRINRLCNANELSKRFLEVPGVGPLTATIVAADIGSTGKGYESSRDYAASLGVVPKQHSSGDKQVYLGISKRGNRYIRTLLIHGARAVLKNCSKKTDKLSLWLQALVNRRGFNKAAVALANKNARILWAMASKNMAYEALA

SEQ ID NO: 264868 - protein, 315 aa, unidentified
MVIGIDVAKDSLVVAVHPSGETWTTGTTAKELRALAKRVRRLAPTLVALEATGGYEIPVLGALAAAEVPLSLVQPGRVRKFAGAHGQLAKTDVIDARIIAQFAAQMAPAPYTLPDAVQRGLMLLVARRRQIDEMLVAERQRLDQQQLFPDSPVRADVEETVAYLEAKRQDFDQQLHAYVAAHPRWTESAALLRSVPGVGPITVATLLAFLPELGTLSRQEIAALVGVAPMAADSGAWRGQRHVRGGRAMVRRVLYMAALAATRHNPWLRPFFAQLCARGKTGKQALTACMRKLIVLLNSILKTKTPWQAPAPATA

SEQ ID NO: 264869 - protein, 412 aa, unidentified
MEVFCGIDWAEDHHDIALAGRDGQLLARRRISDDAAGLAQLLGLLAGHGDTAEDPVPVAIETPRGLLVACLRATGRAVYPINPMAVARYRDRHSAAGRKSDHGDAVVLAGILRTDSHAHRPLPADTELAQAIAVLARAQQDAVWARTTAHNKLRSHLREYYPGFLAAYAHARGGITRPEARVILAAAPAPAAAAKLTAAQLRALLRKAGRSRGIDAEAARLREAFAAPQMRQLPLVEDAMGRQALALLRQLDAACATAADLEQATAESFNQHPDAGIITSFPGLGPLTDARVLAETGDDRSRFADANGLKAYAGAAPVTRASGKTGAVLHRRVKNNRLAAAGYSWAFSALSASPGARHHYDKRRNDGDRHAAAQRNLFGRLLGCLHHCLATGQHYDEDTAFPPPACRQQDAA

SEQ ID NO: 264870 - protein, 433 aa, unidentified
MQEAEDEPLFADRAAGIDIAKAGIEVTIRVPSDTRRGGRQQETRSFRTTRKELVALADWLRCWQVTKVGMESTGDYWKPVYFLLEAEGLDCVLYHAAQVKALPGRPKTDKLDSVWLAKITERGALPGSFVPPEEIRRLRTHTRYRRHLTQARTAEKQRVEKLLEDAHLKLSSVISDIHGVSGRAMLEAIAAGQRNPTTLAQLARGTMRGKIARLEEALDCSFLTGEHAAILAMMLATIDYYTARIGELTAKINVLCEPYLHQIEQLDAVPGTGVITAQDVIAEIGTNMTVFPTAAHLVSWAKWCPQVAQSGGKRKGANATGRGNRYLSAALGEAAVSAGRTQSFPGAKYRRLVKRMPKKKALVATGNSLLTIYHALLSDPAAAYADLGTDYYERRANIRRQARNHVRGLERLGYKVTIESIDPATGELEAAAS

SEQ ID NO: 264871 - protein, 342 aa, unidentified
MEHFAGLDVSVKDTSVCIVDDTGKIIREVKVASEPEALSAVLKSPAYHFKRIGLEAGPLSQWLLSALAEAGLPAICVETRHMQAVLKAQINKTDRNDARGIAQMMRVGLYRPVHVKTLRSQKLRMLLTHRQLLQSKAIAVENDLRGTLRNFGLKVGMVGKVKFEARIRELVENQPDLAVLVEPMLIVRRVLREQIVILHRRLLAIVRDDEVCRRLMTTPGVGPVVSLTYRATVDVPARFHKSKSVGAVFGLTCAKYQSGEIDRSGRISRCGDEMMRVMLYEAAQSMLRSKKWSWLKAWAMQIARRRGMKKAIVALARRLAVIMHRIWVDGTEFRWTRQAAAA

SEQ ID NO: 264872 - protein, 326 aa, unidentified
MSKFIGIDISKQTFDVSFLKNNTDFHLALSNDDKGFKQLKKQLTTESVVIMEASGTYHIRLATFLYENGIKIIVENPLKIKRFSQMNLNRAKTDKKDATVIRKYGELMQEELRFWQPAPKQINELKQLNTSVELFYKQLSQINNQLSSFESSGFVCKELEKELKMMLILIQRRIDKLETKMLAIVKEYYSDNLELLKSIPSIGNKTAIMLISITDNFTKFENYKQLVAYVGFSPRIYQSGTSVNGKGHICKMGKSQIRKLLYMCSLTAIKYNKKCKEMNDRLLEKGKTSRVAKIAIANKLLKQCFAIVSSGKKYQENYIDERFKTA

SEQ ID NO: 264873 - protein, 502 aa, unidentified
MVPGRRLYIGEALRSSPLDQNPQTASLGGRAQKGWGKEMTGKHEVESSEGSRRQLQGLPVVRRNVAGIDLGSERHWVCAPTVDGSGREITSFGATTPELIRLAEWLKQRPVESVAMESTGVYWIAPHEVLEAQGLQVLLVDTRQLARVPGRDKKTDPRDCEWIQRLHSCGLLRSSFRPEEAVCMLRTLVRDKANLVAECGDWLRRMQKSLDQMNVRVHRAVSDLDGVTGMAILRAITGGERDALKLAKLRDPRCSKTEQEIAEQLSGHWREDHLFSLQQALNMYDAVQERIAAYEKEILRKLGDMEREEQRGQTAPPLQNANKTKAIKKRGQEPKRQALYRMSGVDITHIDAIGVETVEVVLSEYGPDLSRFPTEKQFVSHVTLAPHVPTSGGKPLRKRKRNSASTRVAAALRMAALSLRHSQTALGAYYRKMAQRLGGDIAVFATARKLATLIYRLLRWGQPYVDEGAKAYETRYRQQRIGRLAATAKALGYELAPMLESA

SEQ ID NO: 264874 - protein, 362 aa, unidentified
MHKTAKSSTSQRSSSSLQLGKKERCHVGVDVHKRTYHVAVWSEERGLVATWVQPANAALLVEKLRPYRKQINEIVYEAGPTGFSLARILREAGFSAEVIAPSKMLVQPGPEAKSDRLDCRRLAMFSAKKLLRPVRVPTKQEEADRQVIRLREQFVRKSRSVQQQIKSFLLQHGIADPVGMKTWSVAAIIALRGLDLCRELRFCLDVLLDEYKHVKAELTRINKEVKQLARSERHEASVNVLKTVPGVGLITTMTFRTELLEPERFNDSRQVARMIGLAPHVSQSGETRREGRLLKSGNARLRTVLVEAAWRWVASDLSAAKRYHRLVANTGNGKKAIVGMARRLGILLWRLSVRQEPYKEGT

SEQ ID NO: 264875 - protein, 335 aa, unidentified
MKALSKPERLVGSKSRIEHKEGSNNMDQFVGIDVSKAWLDGEAVPQSRPMRHGNDSAGIAALVSTLVAEQPALVVLEATGGFETEVASALAAAGVPTVVVNPKQVRDFAKAMGILAKSDRLDARVLALFGQRIRPQVRPLPSPEQRDLAELLDRRAQLVSMRAQERTRLATALAVAKPSLREHIQWLDARIGEFEIELTARLRSSAAWKVKVDLLKPVPGVGKVLLFTLLARLPELGHLNRCDIAALAGLAPFADDSGKRRGQRFIRGGRAEVRKALYMATLSATQHNPAIKPFFARLTAAGKPFKVAMTACMRKLLTILNAMLKTNQPWQPRVA

SEQ ID NO: 264876 - protein, 336 aa, unidentified
MYVMSKFKHFLGIDVSKNFFDAVIILDSQKNKGLHSQFENNTKGMSKLIKWMKTYGADNSNTLACLEHTGLYGKIIINQLLVFDFSVWVEMSLKIIRSIGVQRGKNDKIDAQRIAYYAMKNADEAVIYTAPREPVEKTRKLLSLRDKLVGIRAAMKKQIKELEGFDKELSKLSSKSLKHTLKAIEKDLAGIEKQIDDLILCDENLSRIFKQASSVPGVGRITTLYLICFTNEFSWYSTPRQLACYCGVVPFEYTSGKSVRGRPRVHNMANKTMKKHLHLCAMTAVTYDSEMKQYYTRKVEEGKNKMLVINNVRNKLVHRICACIRENRTFEKRISA

SEQ ID NO: 264877 - protein, 325 aa, unidentified
MKEKQILAIDVSKRSLDICVRPTGATFKISNDLSGFKELTAAINPDLEPLVVMEHTGLYSFKLEKYLEEQGVPYCKIPALEIKRSNGLVRGKNDKIDSVRIAEYAWLRRTQLVATPKTKEKVTRLNQLLSLRAKLVKDCGGYKTRIKEMLDTELISKSDLIYKTQKAVITALNGNIQKVESEIETLIETDPELKNNFDLIRTIKGVGKIVAARMLAVTSNFKKFSNARKFNCYAGLAPFKHESGTSIRGRSRVSHLANKEIKTVLNLAAFCAIRFNQELKLYYEKRVSEGMKRMSCINIIRAKIVGRIFAVVKRQTPYDAQTLAA

SEQ ID NO: 264878 - protein, 369 aa, unidentified
MPTVAADRGVIHLGLDVHKNTITAGVLEPGSDTPVIDTISSDEDSVRRLVGRFDAPGLVRACYEAGPTGYELARLLGSLGVRCAVIAPSLIPTAPGDRVKTDKRDARRLVRLYRAGELVAIRVPTVAEEAVRDLCRARADMVIDQTRARHRLGKFLLRHGRVWRGGDNWTGKHQAWIAQQGFDDPALTATFGHYRATLTAREAAVTAIDAELAGWFTRAPFTDSVARLAAYRGITHLGGLTLASEVCDWRRFASAGAFMGFCGLVPSEYSSGERIRRGHITHAGNLHLRTQLVESAWAYKSRPAIGVQIARRHHNLPPEVIARAWKAQLRLCARFRRLDARKTSRNIVVTAIARELAGFVWAEMTSPPS

SEQ ID NO: 264879 - protein, 341 aa, unidentified
MEKLYYIGLDIHKKTISYCVKQIDGKIVQQGKITADRKTLLKWMEGLPGVWFGAMEATLFTGWVYDFLKPYAVELKVAHPEMLKAITAAKKKNDRADAEKIADLLRVNLLPECHMLSEELRELRRILRYRNMIVRTAVKMKNKMSGLLMEVGATYNKEKLHSRKYFNNLLERVDDVPDSVKDMLKLSRSSLEMFEAVQKKLVRTLREDKLIHERVKRIMSIKGVGEVMALTWVLETGDSSRFHSSRQAISYCGLCSAQRESAGKDQRGPISKKRNKHLQTMLIEAAKLAPRWNPQLAALHEKELSQGNRNRATISVARKLVEYILAVERQQKDFVPSELAA

SEQ ID NO: 264880 - protein, 356 aa, unidentified
MSRDTKYIGMDVHKEAVVIAVRNSTGQLVMESIVETKASSLLQFVHGLKGELHVTWEEGTWAAWLYDLLKPHVHEVLVCNPRRNALLKEGSKNDKVDARKLSDLLRTGMLRPVYHGEHGLRTLRELARSYQTISQDLNRVMNRIKALYRGWGIACGGTQVYAPRYREEWLQKIEHAGVRRRAELLYQQLDGLQALRRTLRPELLAESRKHKASKLLRQIPCIGPIRAARLLGLMQTPHRFRSKRQLWTYSGLGIETRDSAQYRFVRGQLQRAKKPQQIRGLNQNHNHEMKEIFKGAATRASCGVSPLRDFYVALLAKGMKPEMARLTLARKIAAIALTLWKKEERFDAEQLKPQAA

SEQ ID NO: 264881 - protein, 348 aa, unidentified
MTHSTITTVGLDIAKNVIQVHAVDAKGTPIIRKSLKRHQVLPCFANLPPCLIGIEACGGAHDWARRLMALGHTVKLMAPQFVKPYVKANKHDAADAEAICEAVTRPTMRFVPVKTPEQQALLALHRARQGFVTARTAQANQIRGLLAEFGLVIPKGMAALKQRLPDILEDAENGLPDACRELMQTLSAHLNELHRQVEAITQRIAMAHQANPLSRRLAQIPGIGPVIATALLAAIGDIREFASGRQLAAWLGLVPKQSSTGGKTRLLGISKRGDTYLRTLLIHGARSALSAAQRSKEPGATWVTRLADRRHPNIAAVALANKNARIAFALLAHDRDYQPGHSPVRATA

SEQ ID NO: 264882 - protein, 412 aa, unidentified
MDVFCGIDWAEDHHDIALTDRDGRLLARRRISDDAAGLASLLALLAEHGDTAEDLVPVAIETPRGLLVACLRATGRKVYPINPMAVARYRDRHSIAGRKSDHGDSFVLASVLRTDLHAHRPLPADTELAQAIAVLARAQQDAVWDRTTAHNKLRSHLREYYPGFLAAFAGARDGILRPEARTILAAAPTPADAARLTLAQLRALLKKAGRSRGIDAEATRLRDAFRAGQMRQLPLVEQAMGRQAVALLGQLDAACAAADDLERAAVESFNLHPDAGIITSFPGLGPLTGARVLAEIGDDRSRFQDAKGLKAYAGAAPITRASGKSRSVTHRKVKNNRLAAAGYTWAFSALTASPGARRHYDRRREDGDRHAAAQRNLFGRMLGCLHHCLATGQHYDEATAFPDPRKNLSQAA

SEQ ID NO: 264883 - protein, 312 aa, unidentified
MENYVGIDIAKNKFDMHTLADGRWYLDFKYTKKSIRLVVKQLQALNPVLIVMEASGGYEAPLVSALHAAGLPLAVVNPSRIRNFARAVGQLAKTDKIDAYIIAWYAAVMKLTPQTAIDKTTGCIKTLNARRRQLVAMRTSESNRKEHAIDKCVARSIDAVIKTIDREIAKVENEIASLIDRTPHLKRKEDVIHSFPGVGDRTTSMLLGDLPEIGELNRHQIAALVGVAPMNRDSGQFRGKRMTGGGRVVIRTQLFMPTLVAIQHNPVIRDFYHRLVSSGKPKMTAVVACMRKMLVILNTMVKNDELWIPINP

SEQ ID NO: 264884 - protein, 402 aa, unidentified
MNCVGIDVSKGKSMIAVMRPFGEVVVSPFEVRHTANELSELAGLLKSLDGETRVVMESTGNYHAPVAWLLHDAGLYVSVVNAMLVHDYGNNSLRRAKTDKKDAIKLANYGLDHWLTLPRYVPEEDTRLMLKACYRQYQQYSKVQTMLKNNLISLLDTTFPDANRLFTSPPRDDGREKWIDFVATFWHRECVCDLSEKAFAAKYQKWCKKYGYNFSEGKALDIYAAARGHFGVMPKTDTAKLLVEQAISQLRATSSALAALKQEMQSLAASLPEYPVVMEMFGVGPTLGPQLIAEIGDVRRFHSKKALVAFAGIDAPPYQSGQMDVRSRSISKRGSASLRRTLFLVMSVILQHAPMNEPVYQFMNKKRSEGKPYRVYMMASANKFLRIYYASVKSYLDSLEHD

SEQ ID NO: 264885 - protein, 362 aa, unidentified
MKEVYYVGLDVHKDTIQMAVLSSKGKEPVMAKGLPNNAIKIVKELRKYNEKGKVQVAYEAGCMGYTLHRTLTEFGFDSRVIPPNKVFHHGDDKVKTDKRDALDIAWMLRRDEGESIAIPTKEDEAVRDVIRCRGDLQENLKSMKQRLLKFLLRKGMNYETNRYWTGQHYKWLSGLQLEEKMEQLTLEEYFDEIRRLEDKMGRIDKIIEETAMWSIYAEKVKKLRAFRGIDYLTALSLVVEIGDFKRFPCAQSFMSYLGLVPCESSSGKKRKQGGITKTGNGHLRRLLTESSWHYARPNQVSKRLSKRRECVDEGTIRYADKAMKRLHEKYTRMVFRGKPKQTAVTAVARELSGFIWGVMNAV

SEQ ID NO: 264886 - protein, 449 aa, unidentified
MASSRKKGTRKTAPLAPLNRRAAGVDIGSTFHVVAVPADLDPEPVRSFRSFTADLTALADWLVSLGIATVAMESTGIYWIPLFEILEARGLEVVLVNARDAKNVPGRKTDINDAQWIQQLHSYGLLRASFRPGAQVVALRAYLRHRERLLEYAASHIQHMQKALMQMNLQLHHVVTDVTGVTGMKILRQIAAGETDPDALAEYRDVRCKASVETIRDALTGHYRPEHVFALRQALELHDFYQLKLSDCDVEIERALQALPRGSDAVTPLRARKRGKNEPRFEIRAVLNSLLGVDLTEIHGLGPYSVLRIFAECGSDMTRWPTAKHFTSWLTLAPGNKISGGKVLSAKTRRSANRATVLLRLAAVSVSRTATALGAFFRRLAARVGKAKAVTATARKIATVLYNTMRHGKAYVDPGASYYEERYRERTLNNLRRRAGAMGFDLVAASVVE

SEQ ID NO: 264887 - protein, 345 aa, unidentified
MQAEYDGRQIVGIDLHRRRTVIVRMTEAGDQLGCVRIDNDPLVLAAEIAKAGEHPDVVLEATYGWYWAVDVLQDAGAQVHLAHPLGVKGFAYRRVKNDQRDAADLADLLRMNRLPEAYVAPPAVRELRELVRHRAKLVALRSGLKAGVHAVLAKQGVLIPVTDLFGVGGRQLLEAAGLDGPYRARVHAQLRLIDAFGFEIDTVTGQLRARLCQDHGYQVIQRIPGVGPVLAAVFVAEIGEAARFTDAAHLVSWAGLTPKHRESDRTVRRGPITKQGSGLIRWAAVEAAQKIPASAGWLVSSRARIAERRGRNIATVAVARKLLTLVYYGLRDGHIRALARAEATA

SEQ ID NO: 264888 - protein, 439 aa, unidentified
MIEKILPGVAAIDLGAEKLFVGLAEEPVRAFDTCTEDLRELAAWLKENRIKRVAMEATGVLWVIPHDYLQKEGFEVTLFHGAHARNLPGRKTDVQDCQWHAMLHGHGLLQPCFVPAEPIRELRTYCRLREDHLSIAAQHIQHMQRALDLMNVRLHNVLSQLNGVSGLRVVEAIVAGEREPKVLAALCEAQVRKHKEAELVASLEGTWQEHHLFALEQALKAYRFCLELAAECDKKIEKQLYTINAGVEAAERPEDRKVKQTRHNKPQIEDLYGQLLTACRGHDAQLIPAIGPLSWLKLVSETGTDLSHWKDEKHFTSWAGLAPTRHRSGKMRRRVPRGKTKVGQIFREATMSLAKTKDCVLGQFYRTVRGRRGAAVANVATARKLAALYWQAMTHGLEYVETGLAKHKEQMTERREKYLRRQAAKLGFTLTPLKPSTPL

SEQ ID NO: 264889 - protein, 339 aa, unidentified
MTTKFIVGADISKATIHFCLFIGSQNYLQREIANEKSSLKNFILEIISLKKSYEKSNSCTVDIVFACEFTGIYNYILTTTLAELKIETFVIHALNIKLSMGMTRGKNDAIDAIMIAEYTLRFSDKLRVWNPDDATIGELKHLETLRARYVKSKIQLSQCEDDYKKFTELSIYQTIKGINDPVIEALENAITLIEKQMLILIKNNEALKNTYEILNSVPGIGPVIARSIICITNNFTKFDSAKKFGCYCGVVPFNNSSGSYKGKNKVSKLADKGMKKLIHLGAMSIINSENQFGKYYKRKIAEGKHHTLVVNNIRNKIIITAFACVTKGKKYKEDYVYAA

SEQ ID NO: 264890 - protein, 342 aa, unidentified
MRIIGCDLHAAQQTIAMLDCDTGEISGRTITHEGEQVRTFYAGLPPPVVVGIEATGSMRWFLGLMSELGITCHVGHPAKIRQAETRRQKHDRRDAALLLELLRDGRFPAIWMPTPELRDLRALLLHRHQWVRIRTRVMNGLQGVALAQGLRRGAGLWNRAGQATIAALPLDPHAADRRSALQDLYEHLNIQIDELDHRVRVQARERPQSVRLMTHPGVGPVTALATEVFLGDPARFPDGKAVASYVGMIPSEYSSGARQRLGGITKQGNSLLRLLWCEAAIHAERRDPILRRFYRRKLQQKGVGKARIAVARKLGIRLWILLRDQIDYDEFCRRGCARATER

SEQ ID NO: 264891 - protein, 360 aa, unidentified
MQKLSVTRYNVGVDFSYKKFDVKLAANYQDNTRKVIGSRKFENNEKGFKELENWTRDKCKEKEAEVRMSGEATGVYHERCCHYLHGQGRYVTIAVPSQVNAYKKSCGYKSKDDNIDATALAYMGLEKNLDKWEPMNSFYYELRSLTRHYQSVQEMETVLRNQLHAEQAGMFASKAVVQQLKAGLKLFSTQIDLLTTAIEEKINSDAEVKRKASAITDKLKGVAILTVATIIGEVNGFAFFNNRRQVASFAGYDVVRDQSGTREGKTKISKKGNSHIRRALYFPAINVVRWKMKPFQNKYERIFERTKIKMKGYTAIQKDLLMMIYTLWKYDRKFEPDYVYTQTKKATVISGDCEAVSSFG

SEQ ID NO: 264892 - protein, 337 aa, unidentified
MKKTYFLGIDVAKDSCDWAVLNAKASKLWSAQFANNPTSIQVWLKGLEARGLDLPKILFGLEATGVYSQALLLSLQQANLAVCLLNPARIKYFGVSILRRTKSDRTDALLIARYLLERQPMASRPLRPEEHQLKELVHQREALSMDLTRERNRAEKLRTLSFQDLPAVLLSQSKERLTQFKTWLGELDLAIKELIEADGPLRAQARLLCSIPGIGSCSAAKILAQLAGKDFQSAHQLALYAGLNPMQNQSGRSSGKTVLSKIGNAWLRKALFMPACVALRHSAPIKLWAQQIESRRPDLTKLQIRGAVMHKLLRIIFGVLKHHSPFNPNLASTFNPA

SEQ ID NO: 264893 - protein, 437 aa, unidentified
MKLQTLEMKRHYVSDKFVVGIDPAKYKHQAMVLDPSGLPLGKSFSFSNSYNGFHFKFWQKLNDLPFEMTPENTAFAVEISINFWQKICHYLSEKGYTVLMVRPVTTKHERPRLNNFSRTDPKDALCIASSARQGYFNFYKNYADQIQGIHRLGITYDKLKKQIVIAKQRLRSEVEMLFPEFPEILKIDTDTARYLLSKYLTARDFSDLNIFSESINLVAVSRNHHGASTLKSLKEAASKSIGLPLEPLSYSAHRMSVDMWLEQISMLKKQQYALLKQMSDLAQKTSHYKILTSIKGISEITATRFIAEIPQLDQNLHFKQLEAFAGLNLRLSDSGQYSGRRRISHWGNHRLRAVLYKMTEETKNHIPEVRIRFLKRQIKSAKYTKTITACTSNLLRLITALLRDQRTYRFDPERVKEMEALDEQYQELKQKRQRKVA

SEQ ID NO: 264894 - protein, 488 aa, unidentified
MKLKKEGREKNTNQTEPITHGRKFISWHEMNRAQRREMTRKIQAEDLSLEVVHPHAAGVDIGNESHYVAVPSTRDDKPVRCFGCTTAELKAMAAWLQQCRIRTVAMQSTGVYWIAVYDVLEAAGLEVYLVNARETKNLPGRKTDVQESQWLMKLHTYGLLRNSFRPCQEIRTMRTYWRQRHDLVQAAGRHIQRIQKALTQMNIQLANVLSDISGKSGEAIIQAILEGERDPYELAALCNPNVKASEEEIARSLEGNWQEDLLFLLKQEREGYGFCQKQMAECDQRLQQYLAQRKDRSAGASLPEEKRRGRRQKNKKNNPQFDLRQQLFHAVGADLTRIDGIDVLTAMTIISEAGWDMSKWPSEDHFVSWLRLSPDNRISGNRIIGKGRLPTNNRLSVALRMAASTLRNSDTYLGAQFRRLKRRLDTPVAIKAMAAKIARLVYRTLRYGLQYVDRGAEVYDAAHRQREIQYLKRKAANFGFQIIEAPAF

SEQ ID NO: 264895 - protein, 395 aa, unidentified
MEDPIIACDVSKGKSHIQGFIGLSNPVGKPFVVRHLKSDLKLIKELAKSLEKQAHKKPKFVFEFTGIYHECIAKYIRTLGLELYAISPLESAKVRKSQIRVTKTDSKDCLNIATVYYTRCIRKFESDNNNIKSLSRRKRDIREEGVRQRCVYHRYLDLIWPCFDEYFDAESKVCDIIVSTYKHPYVIKRRSVNMVVEILLNNGHFSKNRAFDIAYKIKDYASNCVSGVDEKSDYVNALISSYGKIKSLTNEMEGINLELDNLLRKSIVYQLLKTVPGIGENLLIQMSAEIGDYTRFKTAKQFVAYIGLDPSILQSGTNDGEHYSITRKGNGILRSCLYLVINQMLTRKLDNQITRFYFKKKSSGLSHKVAAVASCRKLACCVFGMLKNGTCFETI

SEQ ID NO: 264896 - protein, 335 aa, unidentified
MEFTYFIGTDVSKNKLDFAVMRGNTLLFHKEIANSQQDIILFIKELIKLPEFNLANAVFCMEHTGIYNNHLLACLYKKKANIWLEAALQIKNSWGNLRGKNDKVDAIRIADYAYTKRDKVRLWRPKREAVQQLSHLTAARTRLIEAKKMLKTPLQEHDSFSSKKIARQSNSMCSHTLKAIDADLEKTEKSIDKIIAADAELKRLFNLITSVSGIGKVTATQILITTNEFKDIRNPKQYACYAGVAPFTDDSGKIKKKARVSHIANKKVKTLLHMSALIAIQHNKDIKHYYERKVNQEKKNKMSVINAIRNKLVLRIFACVNHNSPYQNNYQKLVA

SEQ ID NO: 264897 - protein, 408 aa, unidentified
MKLFVGIDVSSKKLDVCFLDSEDNRLKETTFPNDIHGAGQIKDAILSYNKQFHYEQIVVGMESTSVYSFHPAHMLGNDKDLYRIGVEVVVQNPKAIHRFKGLFDEDKTDRIDAFRIADFLRFGRYSKSVIKEEKYIALQRLTRSRYQVIRQLTESKQHFLENLYYKCNTLTKDVDTSVFGSAMMELFADSFSLDDIANMELEELALFLQKKGRGRFSDPEQLAKSIQKATRDSYRLGKVMQESVDIVLATYARLIQTLKNQVKELEKGIKALFEIIPEAQCLKSIPGIGDVYAAGITAELAQIDRFEDQAKIAKYAGLYWKKSQSGEFESERTPRVRTGNQYLRYYLVEAANSVQRNEPVYREFYLKKYNEVPKYKHKRALVMTARKLVRLVDVLLRNHQLYTPERSV

SEQ ID NO: 264898 - protein, 362 aa, unidentified
MQQTSKWVGLDVHARQSRVAVLDQRSGELWGRRFGLPPVELTSFLAALGPGMRAVYEAGPTGFGLARAAAECGLDVRVCAPGSIPRAPGERVKTDRRDAERLARLLAAGQLSFVRVPSREEEQLRDLVRAREDVRVDLMRARHRLGKFLLRRDLRYPGPHGAWTERHLSWLARLRFADPASRATFADYLAAVEALLERRSALERALAELLPASPWADTVARLRCLRGVETLTAAGLLAELGDFGRFARPALLSGFLGLVPREATSGERRRQGSITKAGSSHARRLLVEAAHHYRLPPRISPALRRRQAGQDPRVCALAWRAQQRLYARWRQLAGERRKPAPVVAVACARELASFCWEAATLE

SEQ ID NO: 264899 - protein, 314 aa, unidentified
MRTQVFVGIDVSKAQLDVAFRPEGRFSAPNDEAGCAQVLERLRAVPPTLVVLEATGGLEIPLTGVLAAAGVPVVVVNPRQVRDFAKATGRLAKTDTLDAQTLAHFAEVMRPELRPLPDEQTQALAAILARRRQLVEMLTAEKNRLGSAPKPVRKSLRTHIAWLERELSHTDSNLAHAIRESPVWREKDALLRSTPGVGPVMTTTLLANLPELGTLTGKQIAALAGVAPLNRDSGTWRGKRTVWGGRAQIRATLYMAALVAARFNPVIRAFYQRLCATGKAKKVALTACMRKLLIILNAMLKHRTPWRTELVQCA

SEQ ID NO: 264900 - protein, 337 aa, unidentified
MTLFSAIDLHSNNSVVVVIDEQDRILLQKRYPNDIQLILSALEPFKNQLHGVAVESTFNWYWLVDGLQAAGIDACLVNTVAVQQYIGLKHTDDHSDAFWLAHLMRLGILPTGYIYPASERPLRDLLRKRLQLVRHRVTFMLSAQCQIWRCTGVKVENTLIKQADGQLLRYHDNPELRMALHSNLAILRTLNAQIEAIEQRVKEQIALKPEFQSLLSVDGIGDILGQTIALETGDIKRFSTVGRYASYCRCVDSKRLSNGKSKGQNNRKNGNVYLGWAFVEAAHSIIRHNKTAHRFYQRKRAQRNGALATKALAHKLARACYYVMRDQVPFQAERLFG

SEQ ID NO: 264901 - protein, 342 aa, unidentified
MYYIGLDVHKKTISYCVKDAAGCVFSEGKINASRRDLDVWIRTLPQPRMMAMEATLFSGWIYDHLLPHAEQVKVAHPLMLRAIALAKRKNDRIDAAKIADCLRCDFLPECHMASTAIRDRRRMLRYRNLVVKQSVQMKNRISGLLMETGVTYNKRRLHKVGYFADLMATNAEIHDCIRPLLRLSREHIERAQKLYYALVSSLERDPLLKERLRRLRTVPGVGPITALTWALEIGDFRRFHSIKEAISYCGLCGDEKSSADKVMRMPLSKQRNKHIQRVLVEAAKLAPRECHELAVVRERELERGNSNRATLAVARKIVCYLLAVERGQRDFVPAEQFSRTAA

SEQ ID NO: 264902 - protein, 339 aa, unidentified
MSKIIRIGIDLSKSVFVLYGVDEHEQCCLKRTLKRAEVLSFFATMEACCIAMESGSGAHYWARELNKLGHNARIIDPKLVAPYRHQGRSGKNDTNDAEAVCEAMSRPQMRFVPVKDEQQQTALVIHRIRKGLVNEQNRVANRLRGLLAEFGVVIPKGLRTLHRDWAQFRQEKSEWVPACAWAEFDSLYARLGELHQQILAYDRKISAHVRQDRRAARIAEISGVGTTTASAIVATIGNGHDFKNGRQFAAWLGLTPSQSSTGGKTTLGRITKRGDRYLRTLLVHGARSELKYVHRRRDAKSLWAHKLREEKSWNKAAVALANKHARMIWAILTREPATD

SEQ ID NO: 264903 - protein, 338 aa, unidentified
MKKYVGVDLHRNCFTARTRYEDGREERREWYIRKLEEFAKTVDEDDEVAVEATGNVRLFAGALKERGCRIVVVNPHQFLVISRSVKKTDENDAKVLAEFLFKDMLPEARMKDEVHARVTSLTQTRDKLVKLRTTLKNKVNNLLAARGVLISKESLSSEKGLMRALASPVTDLERMELEILIEEIRHLNESIKKLERLLREQGPKLPGWENITSIKGIGETGVSILLSTIGNIEDFANEGKLAAYFGIVPRVSNSNETEHSGRITKRGCKLGHTALVQCALITSRYSPYLKEYYSRIAATRGTGKVIIALAGKFLSIIYKTLKNNWIFEGFPQFVLANG

SEQ ID NO: 264904 - protein, 318 aa, unidentified
MEVLRTHVAGVDVHKEELVITVMRGSLDELPEVIQFTCDTFTEDLMACGQKLLELGVTEVAMESTGVYWKPIHNVWSPMGIKIAVAQAAHVKNVPGRKTDMVDSHWLAELHRYGLIRPSLVPEDIFQRMRLLSRHRTNLVSDLSRVKNRVQKTLEDGNIKWGTIVSNVFGKSGLAVLRLLADGVTDAGQLSSAVTTKIKRREEARKSLTNCFTREHCFLIKELMYQYDQLEAMIVRIDNELFDLVKPYRHLVDKLIEIPGIEEVLAIGILAESTDDMTNFDDERKYAAWAGVASGNNESAKKKKEPSAARATRTSGAS

SEQ ID NO: 264905 - protein, 357 aa, unidentified
MLYLAIDQHRKQLTVSLRNEAGDVIERRQVSTEWPRVRAFFADLAARASTEGGWMAIVEVCGFNEWLLALLAESGAAEIVLVQPERRSRQKTDRRDANQLGELLWTNRRRLPAGQRVQNVRRIVPPSAEVAADRQLTALRQRLGELRTRTLNKIQHLLLKHNWQQQCPTKGLDTKRARRWLEELRLPEVDRLELDLLARQWDLWDEQLSHVNDRIAERQKACPVATLIATAPGAGAFSSLALASRMNDIQRFPRPGSLANYWGLTPGCRNSGDATARLGSITKEGSKLARFVLGQMVLHALRRDPEMKRWYARIKHRRGAKIARTAVMRRLTTILWHMVKHNEPYQLGGVKALRSTA

SEQ ID NO: 264906 - protein, 424 aa, unidentified
MLGVGIDWAEAFHLVALGRPGEEVIQIRRVEHPPAAVAGLLAHIATLEPDPAEVRVVLETRHGALVERLVDTGFTVLPVNPDLVARRRGPARKKDDAEDARICCVLALDRYTSLRPLIPHGELAAELRAIARDDERAARDQRRLLNRLRADLLATFPAALQVAGDDLGAPTILKLLERWPTHQTLATASWEELLDFARAAHHGWPERFADQVAQALAADHFTPRDYLVRAKADTIRLAAVQLLAIGTQRRAWERRMGALLLGAPRRGRANAPRPEELDQGQAFPGGKVYLSFPGLGDRLAARVAGEIGDHPNQFGSPNALACYAGKAPVTRRSGKSELVVACRLACNRYLAGAVQQWAFCSLQESVWAREFYDAQRTRGKTHQAALRALGNRWLEILWHCLMRGQLYDEPLHIANRNRALGRAA

SEQ ID NO: 264907 - protein, 373 aa, unidentified
MKTSITHVAMDVHKKQHDVALVYPDTGELQRFTVRNTQEELARMVKRIRKQAPGEIHVCHEAGVCGFVLKRRLEKLGCVCKVIAPSLVLRKPGDRVKTDRRDAKKLLDQFIAGQLTEVYAPDPGQEADRELTRCRESAQVDLKRARQQLNSLLVRHGYVYSGGRLWTGKHQEWLNSLEFDVPRLGTVFEEYTSEVQHCVQRLASLDKQLEALAQSEPYRQTVAVLRCFRGIDTLTAITVLTEIFEFGRFDSPRALMAYLGVTPSEDSSGERRRSGGITKTGNRRVRRILTETAWHYRHPHRVGKALKARRQDQPAWAIDLADRAGVRLYRRYWHLVERGKAAPMAVMAVVRELVGFLWAMLRQLHQQTQSQQT

SEQ ID NO: 264908 - protein, 355 aa, unidentified
MTVTIVEEARPVTCRTAITGGVDTHADTHVAAALDPVGGLLGVGEFPATAAGYARLLGWLGGFGTVCLVGIEGTGSYGAGLARHITAAGIRVVEAARSDRQDRRRQGKSDPLDAVSAARAAQSGRARGAPKGRDGAVEAIRTLMVARRSAAGERTRTINQARALVLTGPDDLRARFARHKPAALITGLAALRPRPGDVAGHAAHIALRELGRRAQFLDGQLVRLDELIIPLVTARAPGLLAIYGAGPRTAALLLIAAGDHPERLRSEAAWAHLCGAAPIPASSGKVTRHRLNPGGDRQANHALWRIVFTRLGSDPATRAYAERRTAEGKSKAEIIRCLKRYVAREVYRQLRPAAG

SEQ ID NO: 264909 - protein, 345 aa, unidentified
MDHFAGLDVSVKETSVCIVDAAGKIVQEVKLASEPDALLAVLKNPVHRFKLIGLEAGPLSQWLFSALAEAGLPVVCVETRHMQAVLKAQINKTDRNDARGIAQMMRVGLYRPVHVKTLRSQKLRMLLTHRKLLQSKAIAIDNDLRGTLRNFGLKVGMVGTVRFEARIRELVEDLPDLAALIEPLLVVRQVLRKQTAILHRRLLAIVQADEVCRRLMTIPGVGPVVALTYRATVDVPARFRKSKSVGAVFGLTCVKYQSGEVDRSGAISRCGDEIMRTALYEAAQVMLTHSAKWSWLKAWAMQIARRRGMKKAIVALARRLAVVMHRIWVDGTEFRWTREQTAAAA

SEQ ID NO: 264910 - protein, 459 aa, unidentified
MQHYYLGIDVSKGYADFVILNDKKRPVEENFQLDDTFEGHCCLYERLLRFFDDHPDSTIYAAVESTGGYEDNWFNALIKFQGTLNLKTARLNPLGVNANSKADLKRNVTDKISAQNVAEYMIAHPEKISYQQQDHLVSLRKQWGFIRMLTKQSTQLLNQLESLIYTANPELLAYCKDGVPEWLLKLLIHYPTSSSLSKAKIIKVARIPYISSDRAKELVGNAKKSVASATDKVTGKLIIATVNQILHLKQVIKAQTKLMAQECPVPEVDLLKSFIGIKDFSAIGLMLEIQTVERFLSAKKLASFFGLHPVYKVSGDGSGGFRMSKRGRKEPRQILFMVTLTAIQSNPLIRDIYQEHIQKGMEKMAAIGLCMHKTLRIIYGMLKHNSVFDPEIDRRNREKMVQCNRSVNKDKNRRYQAFDSNAPISRRQHGKREERKQSHSDNITNNGIIAPAPLSTYQI

SEQ ID NO: 264911 - protein, 317 aa, unidentified
MSEELFVGIDVSKATLDIAILPTKESWSVPNTENGIGELVDRLRQLPAPTLVLMEATGGLERQALATIAAAGLPAMAINPRNVRDFAKSVGLLAKTDAIDAHVLALFADRIRPQWRPLPDQDTQALEALLLRRRQVVDMITAEKNRLGATPSIRVKKDISEHINWLERQLRITDRDLDKTIKNTPVWKETVDLLKSVPGVGRVMIATLLSQLPELGTLDRKQIAALVGVAPFNRDSGTLRGRRSIWGGRASVRGVLYMSTLAATRCNPAIRAFYERLRAAGKLPKVALVACMRKLLTILNAMLRGRTAWNQPLEVSP

SEQ ID NO: 264912 - protein, 392 aa, unidentified
MNKAWVGVDAGKEFHWAHVLDASGQEILSRRVKNDEGSLSALIDEVLSLARDLVWAIDQPGGGAALLLALLWERGQRVLYVPGLTVDRARDAYRGESKTDERDARVIADQARMRSDFSEIAPEEGALAELHLLLARRRDLVVDQTRAITRLRESLLALFPALERALDLNAKGPLLLLTRYQSPAKIRRTGHKRLAAHLKGRGVKGADELAQKALAAAKTQSVELPAQEVASRIVAEIAGEVLTLKERLPALDKEVASRFFDRPEAQILASLPGIGPVLGSEFLVAVGDLSAFESADQLAAYAGLVPAARDSGKRVGNNRRMRGGNKVLKRVFFLSAFSSLRSSPHSRAFYDRKRGEGKRHTQALIALARRRVNVLWAMLRDDKTFESPPLRA

SEQ ID NO: 264913 - protein, 450 aa, unidentified
MESNYAGVDWASEKHDVVVQNAAGEERYAGTFAHDEKGLRALCRALVRLNVCLVAIERPDGVLVERLLDAGLRVLALHPNQVAATRARFRVSGGKSDGFDAFVLCELARTDHHRFRVLDPDSDQTKALRALCRGREDLVQTRVALCNQLRAELERFWPGAARIFRSLDSPIALAFLEKYPSPIDARTLGQQRLAAFLARQHYSGRKTPLQLLRKLRDAPEGRAGDAETQIRRQLVLSLVAMLAPLIAQIKQLERQIAQALKQHPDGELFRALFRDPKSVITAAELIAEIGDSRGRYPTADALAGDAGQAAVAIESGKRKVACYRSACNKRLRDAVCTLADSTRHWHPWAADHYARQIARGHDHPRAIRGLGRAWCRVIWRCWQDRTPYDPARHRALQQHVTVTIPGTSGPRPDTAATQRMLGAAVTHSAAQRAEREALDDKPTSAIPIGG

SEQ ID NO: 264914 - protein, 368 aa, unidentified
MSKLLYVGLDVHKETISVTTAEEGRTGTICFIGTIPNTPTDIARMAKRLNKNGHQLEFCYEAGGCGYGIYRQILELGHGCLVAAPSLIARKPGDHIKNDRRDSQKLAIQHRAGNLTPVWVPDPVHEAIRDLVRARMDAATQLTRARQQCLAFLLRHGRIYGPNKKNWTIRHRRWLGLQTFEQKPHQIVFQDYVEAVWAAQERREQLETRITTMLSEWSMAPVVDALRAMRGLDTMSAVIFMSTIGDLGRFETPRQLMAYLGLVPSEQSSGSRIWRGGITKAGNAEARRVLVEAAWSYRYPPRLASEKIQVVAEQAKAIRDIAWKAQLRLCERYRKLSATGKKPTVVVTAIARELCGFIWAIGREVTLT

SEQ ID NO: 264915 - protein, 341 aa, unidentified
MKRWIGVDLHKTQFTVCYLQKNGECKIEVFKVDAKDIETFKKTLSKSDEVAVESTGNTGYFAREIKSEVKVVRIINPTQFKIISASVKKTDEHDAVTIARYLSKGLIPEVRMRTKEEAQIGSLIGTRDKFVKLRSSLKNKIHNILNANGIVTKREVFGSEKGLDKVLTFDIEASYLFELRIIVEQIRSLNKSIDEIGKELTEKGKKLDGHKSITSLTGIGDLSGTILLNAIGNVNDFADDKKIAAYIGIVPRVSVSNETSHYGKITKMGNKIARTTLVQSTLIAIKYNPYLRKFYFRLKAKKGSGKAIIATARKFLTIIYRTLKNKWVFEDFNKFKLAPSI

SEQ ID NO: 264916 - protein, 400 aa, unidentified
MLSIGIDVSKGKSTVCGMKPGGEIVYTPFEVQHTREGMSELVSLLRGSGEEVRVVLESTGSYHCPVVAALLENGIFVSVVNSLRMKRFCSQSIRRVKTDQIDAMQIALYGLAYWPELQPTRLPENTYRELQLLARQYYQMTSLLIKAKVDFNALCDQVLPGMQELMSDHAGRHKLSDFVLRYRHTTHILKMGETRFRKDYCKWAEKKGYRNRERMAALIFATAQNGIPVLPNAPSTQIVITEAIRVLHTVEASRDAILTQMQALAKTLPEYSLVREMPCIGDTLAPRLIAEIGDVRRFHSKRALIAYAGIDAPPYQSGKFCANNRHISKRGNRYLRKTGYEVMQSYVMHKPANDPIFTFIEKKRSEGKSGKLAMVAGLNKFLRVYYGKVTELYRSLPAIE

SEQ ID NO: 264917 - protein, 408 aa, unidentified
MDLTPMHKRVIALDVHQAKITACAVVEHDDGRVEVTQRDFGAFKRDRRALAAWALELRPEVVVMESTGVYWKSPFAALEAVGIIAWVVNAHHVKTVPGRKTDIADAQWLATLARAGLLRASFIPPVDFRQLRLVARQRQKLVGMCSAEKNRLHKVLVDAGIRINVVVADVHGASARAMVKALIEGRPMHEVLDKKGRLRASREELFEALSTEQFSAAHRFVAEEILQHIEQIEQRIVRMDQYLLEGLKAWQPQLNLLQTIPGIDIQGAAMLLVEIGADMTVFGSAERLASWVGICPGNNESAGKRKSGRIRRGNAWVRRLLCEFAQAAARTRCALKAKFESLAIRKGHKKSIVALAHKMLRTIYAMISSGSHYQDKTVDYEALSVARNAPRWMKMLRKHGFIETPAAA

SEQ ID NO: 264918 - protein, 406 aa, unidentified
MNYKQNEKINQVKESTLVVGIDIGSTTQYARAFDWRGIELGKVFPFSNSREGFESFKAWMQHLQDKYKKLDAIVGIEPTGHYWFDLGAYLEDEGILLVMVNPYAVKQTKELDDNSQSKNDRKDPKVIAKLVTEGRYSAPYTPDGVYADLRIMVANRKRLIREMTQIKNRFARWFAIYFPEYTDVFGDYEAQSSMLLLKKVCTPEAIVELGAEKINQIWRDAKLRAVGMKRATTLCETAKRSIGLKKGSSAARYEMKLLLEDYEYKKAQLDAVMEEIEKLCRKIPESEQMLAIKGIGVITVAGFLAEVGDVRRFESPRQIQKLAGLSLRENSSGKHKGQTTISKRGRSKLRAVLFNAAIPLIAKNPEFKSLHEYYTTRANNPLKKKQSVIAISCKLIRVFYAILAKE

SEQ ID NO: 264919 - protein, 339 aa, unidentified
MSKLLKNFIGIDISKSYFDVALIILMHPGQHIHHQFSQCKNGFKEMLQWLAQQDVIINEETIFCMEYTGIYNTGLVNFLVEQKALVWVEMPLRIKRSCGFERGSDDKTSAVKIAAYAFRYQDQIQLWRPLDSSIEKIKNLIAQRDRVVNAITGLTVPVKEMLECGCVSEARQLEKLQKSPLKALEKTRDAIEQLILKIVQQDEHICKKTMQVQSIKGIGKVTAVTLLAYTKGFTTFTTAKQLACYCGVVPFSKTSGSSVRFKPTVSPHDNKKLKKLLHLCALSAIKNDPEIKLYFERKVGEGKNKMCVINAVRNKLIHRVFAVVRDDRFFEENYVRKCA

SEQ ID NO: 264920 - protein, 460 aa, unidentified
MNEYFIGIDASKGYSDFVMLNAKKQTVIDNFQLDDTFEGHAQLYELLHSFNKDNPEATIYAAVESTGGYENNWFQSLVTFQASLPVKTAHLNPLGVSHNSKADLKRNITDRISAKNVAEYMIAHSEKVSYQHQDSLASLRKQWGFITMLTKQSTQLLNQLESLVYNANPEILTYCKDGCPQWVLKLLSSYPTALRLSRAKVKVLARIPYISLDRAKQLIATAKKSVASASDKITEQLIVATVKQIVHLKKTIKVQSEVLANECQIPEVALLKTFTGIGDYSAIGLMLQIQSVNRFLTSKKLSSFFGIHPEYKKSGDGTYRYRMSKKGRKEGRRILFIVAMSAVQSNPLIRDVYQQAVERGMEKMSAMGLCMHKILRILYGMLKHNKAFDPQIDLKNRQKKPPQKRKISQDKNRRYQNFDSKAPISRRQKMRRKERKQSQNVNNVEYGISEASVPSTQLAN

SEQ ID NO: 264921 - protein, 307 aa, unidentified
MTENVFGVDVARDWVDVAGPRGVRRVMNEELDALAAEIAACGGRAVFEASGGYETPLREALARAGATAVRVNPARARSCARAMGRLARTDRADAAVLRRMGQRHPDLPRTPLESEDLRKLKALHARRRQLVEDRKREKTRRAQAREPFVLASIERVIALFCEEIAALEARIAELVASNPDFAERAKLMRSAPGIGPVAVAALLAEMPELGTLTPGAAAALVGLAPIARDSGYRTGKRRIGGGRKPLRDTLYMAALSAARHAPVLSAFATRLREAGKAPKQAVIAVARKLIVILNAMIRDGRAYQIRA

SEQ ID NO: 264922 - protein, 428 aa, unidentified
MPTPCLPVLDPRAAAIDVGSEQLHMSIAGGPPKIFGTTTGQVYALRDYVVAQEVRSVAMEATGIYWLCVYEVLEKAGLEVVVVNGKYVKNLPGRKTDMSDCQWQATLHAHGLLKPGFVPPEHIRRLQDYLRLRTDHIVMAGSHEQHMQKALERMNLKIHDVISDLTGVSGLKMVEAIINGQRNPAALLALCDPQIQKNKAGRLREALEGTWKKEHLFALRQAYELWQFYQKKIAECDQAIEEVLKVLAGPEDPKNPAPAATKRGGVNAPHITGLHSMLWRLCGGKDPTTLPGVADYVLLQLLAEVGTDLSKNWKSEKHFTAWLGLAPGSRQSGKRRGSQRRSRNRAGRLFCVIARSVGRSVDKALGGFYRRLKGRRGGLVANLALARKLAELFWRLMVHGISYVEKGLKKYEEKVAQTEQRLLQKLAR

SEQ ID NO: 264923 - protein, 359 aa, unidentified
MQTQRKELNFEGQNIFVGIDVHLKSWNVSIFTENIHHKTFSQPPKADLLSTYLKLNFPNAIYHSVYEAGFSGLQAHYELTNLGIHNIVTNPADVPTTDKEKRRKTDKVDSNKLARSLRSKDLKGIYTPTQDILEDRSFVRVRSSIVKDQSRLKNRLKSMLHYYGIELPVEFQKSTTHWSKRFMVWLKAVQLKTRSGNMALAISIKEAEQLRALLLEVNNELKIMSNSEKYARNMEFIRSVPGIGLVTGMLFMSEIETIKRFENNNKFAGMIGIVPDCHSSGANEQIREISPRRHSYLRSGLIESSWIAVRIDPALSRAFSEYCKRMEPNKAIIRIARKLSNRIYFVLKNKIKYETRIVK

SEQ ID NO: 264924 - protein, 451 aa, unidentified
MARHGNRFDEVRRYVAGVDLAGGAEHYVCGPRKDDGTHDIERFGTTTNELLRMAAWMKERKVESAAMESTSVYWIPVCDTLESAGIEVVLVDTRTVKMVPGRKSDVKDCQWLQRLHSCGLLRGAFRPPEAFNAVRSVIRERGNVLQMRTQAIQSIQKALDQMNIRLHHAVSDIDGMTGMKILGAIVAGERAPRRLAALRDRRCRKSEAEIAEELAGNWREEHLFNLKQAYGTLCFLDGRIADYDAQIRAMYAKIAASFPPVDPPPGGGGRKPKDREDAKAKADLARICGGFDMTRIDGIGYDSAAAILSELGPKLDAFPTESHFVSYIGVAPALGKSAGKNVSTRRRHKNTSRVGLVLKMAASTLSRSESSLGARYRCVRSRTCSGTAIKDVAREMAKRIYRGIKYGQAYIDEGERAYMERTRERTIKSMKKKISKLGISAEELGIYAIAV

SEQ ID NO: 264925 - protein, 502 aa, unidentified
MNNSAAGENIAGGRPASARSRSLEGNRTTVNRRLPGEPEALATTSNRTTPLEGCNISSVDSRAKGRKMQKTKRAAMNSPEQGPGSWLEKRGFGGLDWASQKHSVVVVDPRGKVIEDFEIEHSALGWKKFREIMQPYGAIPFAIETSQGAAVEQLLEAGMEVYPLNPKSAQSYRERKAPSGVKNDRLDAWSFADACRIDGHGWKALRPEDALVKELRLLCRDEVVLIEQRTSFINQLRHALAEYYPTALEAFKDWNSVGAWMFVQRFPTPQLLKQAGKRQWEKFLHSRHLWRTESGPHRMELFAHATEMSGSVAMANAKSHLALSLVSMLFALEKQLGIYRQRIEELFQRHPDHDLFGSLPGAGPKIAPRLLSEIGDDRDRFGEDPQALQCLAGTAPVTRQTGKPRCKPTRWPVHQRWACDKHLRHAMHLFAEQTLTRCFWAEIYYRHHRQKGRSHADSLRRLAQRWLKIIFRMWMDRKPYDAMLHNQNQLKHGSWVLQINPT

SEQ ID NO: 264926 - protein, 421 aa, unidentified
MYNTRVKHQKRSFVNDKALISTVDIAKDELMVYIRCPFGEEVKPFKVTNNYQGLKEYWAMIMLYQKRYRLQEIMVGFESTGIYSEPLKNFMMDKAVKLVQINPMHTKKMKDITDNSPGQTDSKDTRVIADILQLGHYLSLVVPEGAAAQLRELAHARENQMVHQTRIVNQLEALMFKLFPEFVQIIKNLSTKTAQYLMSKYPTPQRLKEVGLEQLTSEIKKVSRGQLGEDLARRIYQASRESLGTKEAQESMLLEVNYLLGQLIQTGQFIEVLEKKMADALDGISYAGNLLSIKGIGVVLLGGVIGEVGDFRKYRRQSDIVKLAGLDLYEMSSGKYHGLRRISKRGRWFLRKLLFYGALNVVRTGGILRDYYQRLIGRGMKKIKALVAVSRKLLRIMFALVRDNTYCHQKEEQINPVEVAA

SEQ ID NO: 264927 - protein, 322 aa, unidentified
MKEPTVFVGIDVSMKTLDIAVRQAGIRQRAGIHRRVSNDAQGIREIVELVPGPDAMVVLEPTGGYEQDLVYALVEAKIPVAVVNARQIRDFAKSRGKLAKTDRIDAEIIACFAEANRPEPRDLPDEQTRMLEAFVIRRRQLVDARAAEQTRIKIAPKVIRPNIQLMIDFLTKQINDIDKEIKIFIESNTQWRAKADLLQSPKGVARVVSSTLLALLPELGTLNRKEIASLVGVAPFNNDSGQKPRKRMTWGGRAPVRAVLYMATVVSTTHNPVIRDFYKRLLAKGKSVKVALVACMRKLLTILNAMLRDGQRWNPALATKTA

SEQ ID NO: 264928 - protein, 343 aa, unidentified
MGLYVGLDVSLKRTAICVLDETGKVEWEGWSDTQPELIDAALSRWHGRLCLVGLETGSSSPWLARGLDGLGLPVVVMDARRAADAMKARAVKTDRSDARGLAEMLRTGWYTQVHVKTQESHRIKALLSARDQLVRNKRSFFGQIRGMLRPFGIRLAARQGGRAFDEAARAACRHDDLLYRCVDALLEALAAIESQIAALDKQVRLYLQRSKPCWHLTSVPCVGPITALAFLAAVEDPGRFRRSRDIGAYLGLTPRRYQSGDRDIAGAISKQGDAMARHYLYEAANCLLTTWSGRSPLKSWGLALVKRAGAKKARVAVARKLACLLLRLWKQETHYDEAGLKMA

SEQ ID NO: 264929 - protein, 322 aa, unidentified
MSNTKSESITVGIDVSQHWLDVHIKPNNTTKRFDNDESGHQELTKSLIKFSPRIIVLEGTGGLQTRVATHMAQADLPVAVVNPRQVRDFARATGTLAKTDALDAEIIARFAIAMRIEPRFIPDPQREELKALVSRREQLIKMQKSEKYRLQRSYQEPVCQSHHHIIEAIQNELDDVNRQIDDLIQNSPIWRTKDRLLQDIKGIGPHTARMVIAALPELGHVNRREIASLVGVAPFNNDSGKRTGSRFIRGGRPEVRRVLYMAALAAMRFNPQIKVFHDRLQEKGKKNKVIIVACMRKLLIIMNAVIKSNNFTDSIEIAQKIA

SEQ ID NO: 264930 - protein, 346 aa, unidentified
MEHYVGLDVSLKLTAICIVDRTGKIEREGVVPSDPEAIAVFVKSHAPHVVRIGLETGATSTWLWTELRELGLPVICIDARHAKAALKMQINKSDRNDAVGIARIMQCGWYKEVRVKDLHSHAVKALLVSRALLVKIKRDLENQIRGLLKNLALVIGRAKMNVFAVRTAELIDNRPALATAVVPLVKAREAIERQIADLDRKVLLLARKNAQVRQFMTAPGIGPVTALCFLATIDDPTRFKRSRSVGAYLGLTTRRFASGEIDWTGRISKCGDKMLRSYLYEAANVLLTRVAKWSALKAWGVRVAKRCGLRKAKVAVARKLAVILHRMWIDGTEFKWSSKEASNQPA

SEQ ID NO: 264931 - protein, 408 aa, unidentified
MQVTFGIDVSKSNSTVCELIGESKNELTITNDRPGFIQLLHELAAFSKHPQIIFEATGVYSRRLQAFLEDYGYEYVVLNPLKAKKEMNMGLRYNKTDKTDAYHLALIQRLYRHPVNQSESQTYKQLNALSRFYDQLTSDLVIAKNRLHQALQSTFPEIENLFSIARGKNYWHIVARYPHCDLVRKDDKKQIINWLMKLKGIAFNHAQRTTDKLIELAHLAYPVVSCSDIEVQQAQYYARRLLNLSNQRQRIITKMVKLAKTLPNHDLENLESIPGFAQTTAVRVLAELGDLRRFSNPNKINAFIGIDPGRYQSGEMDSNLSITKHGNAVARKLLYRAIGQIDNAAKTNPCHIADYYESKKLSSQTKGFKKIAIASIHKLIRTIYALIINDQPYDYNVATHNQKDFSRN

SEQ ID NO: 264932 - protein, 342 aa, unidentified
MYYIGLDVHKKTISYCVKDASGQVRQEGKIGATRWELDDWMKTLPQPWTVAMEATIFTGWIYDHLLPHAQQVKVAPPLMLRAIAAAKKKNDRIDAGKIADCLRCDFLPECHMASTAIRDRRRTLRYRHLLVRQMVQMKNRISGLLMETGVSHNKQRLHKVGYFRELLASNEEVNESIRPLLRVSRDSIVRLQKTEYALVSSLQRDPLLAERIKRLRTVPGVGPITALTWALEMGDVSRFPSIRQAISYCGLCGDEKSSADKVMRTLLSKQRNKHIQRVLVEAAKLAPRQDHNLALVYEREKQKGNANRATLAVARKMVAYLLAVDRGQRDFVPFADSQSAAA

SEQ ID NO: 264933 - protein, 337 aa, unidentified
MNIVFLGIELAKNVFQLCGLSQASKLVYTKRTGRKELLQTLANIPACLIGIEAPTGAFYWQREFEKLGHKVKVISPQYVNPFVRGQKNDGNDAQAIAVALMQPTMQFVPPKSPEQQNIQALHRARQRIVNHRTATVCQIRGLLLDRGIPIGSAVSRARRAIPLILEDAENGLSSRMRRTIAELYDLFNDLGRRIHFFDKEIETVFRQSEACQRIAKIKGIGPKTATAVVAIGKGTEFKNGRHFAAWLGLVPRQHSSGDRQVLMNMTKKGDKHLRTLFIHGARAVVRVATNNSDGHMNQWVNQLKERRGFNKTTVAVANKNARIIWSMLTNETGYQVV

SEQ ID NO: 264934 - protein, 417 aa, unidentified
MEHVAIDLGGRESQICIRTQENVIRLEKRVPTRKLKEFFGSIEPSRIVLETCAEAFAVAGLAKDAGHDVRVVPATIVRSLGVAQRGIKTDQRDARALSEASVRIELASVHVPKKESREIKTACGMRESAVHARTQLINSVRGWLRGELERVRSGAPETFATRVRESRTSEKIPAHVERQLAIIEAITEQIKGADRDLLEMAKRDERCRLLMSVPGVGPITSLRFVAAVDEFERFSDAHQLESYFGLTPGENSSSDARRRTSLTKAGSKKVRWVMVQAAWSASICRRSDPMVLWMRQIAARRGKQVAIAALARKMLGIMFAILRDRVPYNPSRASKIRVEPTDSQTFNDGIGVPPARKYALRKPVDQSDTILPTTPKEASNEQRAAVKADPSTPDYTVAKKPRRSPVRRPLKDTLGRE

SEQ ID NO: 264935 - protein, 341 aa, unidentified
MDIAVLGIDLGKNSCSVVGLDDSGKVILRRRMQRKTIMALASKLSPCVVAMEACCGAYHLGRLLSAQGHSLRLMSPEYVRPYVKAQKNDERDAEAIAEAATRPTMRFVTLKSQEQLDMQTLHRARDRMVRERTSLMNQLRAILLERGIIVPQGRAKLRLRITELLAQPCEELSLRIRVLIEDMLARWEALNDRIAAFDTEFVAEVKQSEAARRLTSIPGIGALNATALVAAVGDARTFARGRDLAAWLGLVPRQATTGGKPRLLGITKRGSKYLRKMLIQGARSALPSLSRSSTRLGQWLRGLLARAHSNAVVVALAAKLARIIWALLRHGTTFEQRAIAI

SEQ ID NO: 264936 - protein, 346 aa, unidentified
MRFYNHQHKHYCGIDLHARKMYVCIIDQKGKTKVHQNIKTDPQLFFELVFPYIDDVVVGVECVFCWYWIADFCNEHKIPFILGHALYMKAIHGGKTKNDKIDSYKIASLLKGGNFPIAYPYPAKWRATRDLLRRRMYISRRCSELVAHIQNTNTQYNLPAFRKKLSRKYNHHGVVERFEDPAVKKSVEVDLAVIDSLNQILKKLEWHIEKTARQHDYHTLYLLRSVPGVGTILALVILYEIQDVSRFPAVQNFSSYARLIRPKKESDGKWAGYSNKKIGNHHLKWAIKEAAILMLRESQQAKDFVAKYTRKYNKGKALGIFTHKLGRAIYFMLKNNEAFDMKRFFV

SEQ ID NO: 264937 - protein, 332 aa, unidentified
MSIVSTVGIDLAKNVFSVHAVDSQGLVVVRRSLSRAKLSELVAQLPPCLIGMEACSGAHEWARRFVMFGHVVKLMAPKFVAPYRKSGKNDGNDAEAICEAVARPNMRFVPVKSVEQQSDLTLHRVRQGFVEERTATLNRLRGLLAEFGHVLPLRPSELHRRVPQLLEKLPARVATCAQDLLEHARQLQVKALEYEREIKLHVHSNALACRAQTRLGIGPITASALVATVGNGRDFKNGRQFAAWLGLVPRQYSTGGKTRLGHITKRGDPYLRTLLVMGARAVLQRAASLTDPLSRWALAVRERRGYHRACIAIAAKNARVAWALLAKESVTA

SEQ ID NO: 264938 - protein, 348 aa, unidentified
MLADQLDYVVGVDPHRDSHALVVVHVVSGVVVFEATVVASSDGYARALKLVDQHAAGRRAFAVEGTGSFGAGLTRFLTVRGEQVLEVGRLRRERRSGGKTDALDAVRAARSVLTQARPAIPRAGGERQALQALVAAREGAVNAKRAALCQLRDLLITAPEPLRSELRPLTRARLLQRFAATRPEGRRDPELRGSMLALRSIARRVLQLTAEERELAREIETITRKLAPQLLDQPGVGPHAAAQLVLSWSHRGRIGSEAAFARLAGAAPIPASSGQTVRYRLDRSGDRRLNRALHMILVTRKRSHPATIAYIERRLQEGKTRREANRCLKRYLARSLYRLLEHGPPLAT

SEQ ID NO: 264939 - protein, 351 aa, unidentified
MSNSVVAFALCGIEVSHLTLVVALRGHAHDEPLREFPNTGEGHQALLRFLERGARPVRVAMESTGLYGLDLALTLHQAGVAVMVANPRAVRHFAQALLQRSKNDQRDAEVLREFAARMPFQPWRPPSAAALKLVAVARRPEALTDLMAAEKNRAHAASLSAALPAVIRLDLQRSIQTQQRAIDRLTRAALEFLLADPELARRYELLLSIPGFGPTSAVHTLAELTLLPADMDVRQWVAYAGLDPREYSSGTSVHKKVRISKAGNKHLRRALYMPALVAVQHQPQVRAYYEHLLARGKTKMQALVATMRKLLHAIYGMFKHDQLFDGQKLYASTSATLAPPPSLSEVVCSQT

SEQ ID NO: 264940 - protein, 335 aa, unidentified
MTQFTFFVGIDIASASFMACIGVAPWKLMVKPTKFDNCEDGFVSFLGWLKEHGLAPEKTVVCMEATGVYSEGLAYFLYASGYAVAVEPPLNIQRKFPINASKTDDLDCQYVGEYAYRYMDKLSFWKPRDEILEQVKGLLTTRQHFSVQLTGHKNALHAVQRKKVSCDFAKQAHQTMIEQISKHIKAIDQEIRRLIDSDPTFKQTLLLLLSIPGIGLQLAAHLLILMQETLDPRVLASFIGISPIKHESGTSIYSAPTSRHYGPTTLRKLLYLAACSVRTHNKPFQQYFLRKAAQGKHNKLILNNIQNKILKIACAVVRSQKPYIPNYVSLNPLVA

SEQ ID NO: 264941 - protein, 325 aa, unidentified
MRQPQSQVKPQTQVGLDVSSQTLDAHIRVDGKTFSVPNTDAGFDRLCEMLSAYDVSMILMEATGGYEDSAACYLQLQGYDVVVINPRHARRFAQSMGRLAKTDRIDAAILAHMAFMIDSGPDRERYIKPVTDEQRKQLSRMSSRRRQIVDLITIEKQRLTHADDYVRESINDIISLLNERLKRIESDILRYVKKNFSELASRLLSIPGVGSQAVTVLIADLAELGRVNRRRISALLGVAPFNHDSGKFKGQRRIRDGRSSVRNVLYMGVISATRFNPVIKAFYDNLLLRGKPRKVAIIACMHKLIRIINAMMRTGKPFDMSLHGV

SEQ ID NO: 264942 - protein, 338 aa, unidentified
MKLYGGIDLHSNNSVVVIQDEADRKLFEKRLRNDLSTILRALAPFASELEGIVVESTYNWYWLVDGLMEAGYRVYLAHTSAIQTYAGLKYGDDLTDAGWLAHLLRLGLLAEGYIYPKAERGLRDLLRKRGQLVRQRTTQLLSIQNQVLRTTAQRLSGNRIKQLTVEEVEGLLPEADVALAVTSNLAVMDCLIEQIRHLEGVVRRRMRPKPGFDHLCTVDGIGPILAWTILLEVGDIGRFGRVGQFASYCRCVEANRFSNGKKKGENNGKNGNRYLTWAFVEAAHFAVRYNPKIQRYYQRKKAKKNGAVATKAVAHKLARACYYILRENVPFDVDRAFA

SEQ ID NO: 264943 - protein, 321 aa, unidentified
MPGFWGIDVAQAELVIAEAGTTTSRTQPNTVAGCHALAQQFAQVATAPVQLIVLEATGGYERNVVAALGAVGLPVVVINPRQVRDFAKATGRLAKTDAIDAHVLADFGARVQPERRPLPTTEQEELRAVLARADQVQQMLVAEKARLLQALGRRDRQPLRKKIKRHIAFLERELHELDADLDDQLRQSPLWREQDDLLQSVPGIGSKTARALLAFLPELGTVSAAEIAKLAGLAPLNRDSGMWRGKRRIAGGRARIRAALYMATLAAVRCNPMIRTVYARLVQSGKPKMVALVACMRKLLVVMNAMLKTKTRWRPIPVPTA

SEQ ID NO: 264944 - protein, 350 aa, unidentified
MKTITTIGLDLAKSVFQIHGIDDDGSVLMRRKLRRGEVLATFAKLSPCLVGLEACGSAHYWGREIAKLGHTVRLIPPAYVKPYVKRGKTDAVDAEAICEAVTRPTMRFVAVKSVEAQGAAMVFKTRDLLVRQRSQTINALRAHLSEMGVVTKTGVGNVADLVAIVRDEEDDRLPATARFALKALADQIDGLSEAIDQLEAKIVADVRRDTAARRLTTIPGIGPISAAAITALVPDIAGFTSGRHFAAWIGLTPKPHSSGGKERLGGISKMGNATLRTLLVLGATTVLQHIRRGAKGPKWILDLLARRPFKIVAVALANKMARVVYALLTKGEDYRAVGKEASGRETVAIV

SEQ ID NO: 264945 - protein, 458 aa, unidentified
MVRNRSTNNAKPAMSLVHPNAAAIDIGATMHMAAVSADRTPEPVRSFGTFTADLHRLVDWFTECGVETVVMESTGVYWIPIFELLDTRGFAVFVVNARDAKHVPGRKTDVSDAQWLQRLHSYGLLSTSFRPKGRIAELRSYVRQRERLLEYAASHIQHMQKALMEMNLQVHHVVADITGSTGMRIIRAILAGERDPAVLAALRDSRCRADVETIEKALGGNYRAEHLFALEQALALYDSYQEKVLACDARIETVLKELSLDRDRCTTPVPPPGRRMPSTANALDFDVRAALFKLLGKDVTRINGLGPYLTLKLIAECGDDLSAWPSAKHFTSWLCLAPHNKISGGKVLSSRTRRSGNRAASLLRLAAISVGRTDTALGAFYRRLAARIGKAKAATATARKIAVLFYNALRYGMEYIDPGALAYETHYRERVIDNLQRRAKAFGFALQPLEPTPDYAVS

SEQ ID NO: 264946 - protein, 413 aa, unidentified
MNVLHPRCCGLDVHKSSISACILLREGGRAQKHQRRFGTMTQELQELAEWLRQFGVTEVAMESSGVYWKPVWNILEGQFTIVLANAQHIKNVPGRKTDQKDAEWIAQLLQYGLLRASYVPCEIIRDLRDLTRMRASLSQEASRISSRIQKVLEDANVKLASVATNVLGKSGRAMLQDIITGEDNPEQLASLALGHLRVKIPQLQLALEGKIRFHHRFLLRRLLDQVQFVEHEIALLDERLEDIGRQRPDLAHAVARWDTIPGIDRVAAWALLAEIGDNMGQFPTAGHLASWAALCPGNHESAGKRLRGTTRQGSPWLCRMACQCAWAAARTKNTYLSSQFRRLAARRGKKRAIIAVAHTLIVIGYHLQKNQSNYDDLGGNYFDRIHSDGLKRYLVKRLQQLGHKVTLEPIETA

SEQ ID NO: 264947 - protein, 416 aa, unidentified
MEVLREKSARLDVHRSIIVACVLLSTAGGRVEKAVRSFTTTASGLAELAAWLTGCGVTHVGMEGTGVYWMPVYLALEAVSGMTSIVANARHIKAVPGRKTDVIDAEWIARLIRYGLVRASFVPPKPIRDLRDLTRFRRTLVEVQASERRRLIKLLEASDMKLAQVLSDVFGVTGRAILWALIAGDRTPEEMAGLAKGAARKKRQPLIEALGGRLAEHQQRILAIQLRRIEDTEQQIVLIDDAIEARLEPYRPQIELLITIPGIDWVGAAAILAEIGPDMSVFPTAGHLAAWADACPGNHESVGKQKGAAARKGNVHLKTALCNAGIAASRKSGSYFKAKYYSLKSRIGGGKAALAIGHKLLVCIWHMLSTGCCYRDLGEHYLDRRNQHRALKRYIRRLDALGYTVVPKQQIEPAMP

SEQ ID NO: 264948 - protein, 342 aa, unidentified
MGEISMIGLDLAKNVFQVHGVDASGGVVLRRQLRRGAVEKFFAQLSPCTVGVEACGSAHHWARVIGRYGHQVRLMPPAYVKPYVKRNKNDGRDAEAICEAVGRPTMRFVSVKSVEQQATLAVHSTRSLLVRQRTMVANALRAALSELGIVAAAGLEGLHELMARLEAPSEIPEMMRGALLVLARHWQALDADERALERQIAKAARADREARRLMEVPGVGPIIASTVLAKVPDAKVFRSGRDFAAWIGLTGRDHGTGGKHRPGRISKQGDRMLRALLISGASAHLRQQKRRGISDPWLRELLARRPYKVAMVAFAAKTARIIWAMLVKGEQYRARASEPAAA

SEQ ID NO: 264949 - protein, 377 aa, unidentified
MSKIRFVGLDVHAETVAVAVAEPGGEVRSLGIVPNRLESIRKLLGKLGPVQHLKACYEAGPTGYVLYWQLTQLGVACEVIAPTLVPSKAGDRVKTDRRDAEKLARCYRAGELTAVWVPDAAHEALRDLVRAREAAKKDQLRARHRLGKFLLRHGQRPTDAGKAWTKKYLEWIKTHVHFDQPALEATLAHYLHEVDHAAEQILKLEQAIDEAVAQARPEIRSVIEALQALRGVAQMTAATIVCELGSLSRFSSPRQLMGYSGLVSREHSSGNRIQRGAITKTGNAHLRRVLVEAAWAYQHRPNVTGFLLRRQKSLALSEEVKQIAWKAQYRLHKRYQAFALRGKNKNQIVTALGRELLGFVWAIAVHTEAQHKLVKAA

SEQ ID NO: 264950 - protein, 316 aa, unidentified
MFIGIDVGLKHLDVAATEAAPTLPPRVPNTAAGIATLGAALTSLNPTLVVLEATGNYHHPLLAALLVAALPVSVANPAQTAAFRQSRLGRHKTDRQDAKLLARFGELHHGELRRATPDEPDLAQLRALVGYRDDLVVQRTAARNRRHAAQWREASPVVAWLEADLAAINARLREVKAAIAVLLAARPETAVLTAQVGVGLGTAAAVLAYLPAGVLGNPKAAAAYAGLHPRHEQSGQRDRSRLSKQGCPALRRYLYLAAVSAIHHDPEIAAWHQRLRDRGKAAKSAICAVAHKLLRRMMGRIRDVREPHPVILPMAA

SEQ ID NO: 264951 - protein, 354 aa, unidentified
MNYVGVDIHKRYSVLVAVDERGRELARGRISGNSVHAFAQFFEALQGPGKVVLEACWNWGRIYDVLSEIEQVEEVVLAHPLKTRLIAEAQIKTDGLDALALATLLRGNLIARAHVPSKATRARKELLRQRLYWARLRTRVRNRVHAVLDRQRELEMPQCGDLFGRKGLNALSKLRLAEPDAILLGEELDLLKLIDSQIKAQEGRIVAFNANEQATQYLQSLPGMGKILAAVAAAEIDAIERFDGAAKLCAYAGLVPTTYGSGGKVHQGHLLKSRNQWLQWAFIEAAWVAVGCSSYFGGIYRYQRARGKKANIAITIVARRMCRIAFTLLKERRNFQEQHRTFPGRSAVRLTAAA

SEQ ID NO: 264952 - protein, 399 aa, unidentified
MRYCLGVDVAAVDSMYCLVAETGEIIFMPAKSPHTKSGFQWILEKLNGIEQKDIAVIMESTSTYHLKVERFFRENTDCEVIILNPMISKNHKRNLRKTKTDKEDCLNLVDIFFKGEYNCQVRHEEIYAEMQFLSRQIQHLQEGATRTRNRLRQLLSMLNPAYFDAFRNDFMYSETGLRFIAAWPHCDLLNAATAEDIAISLASTHQRSPGYYRRKAERLKTFAANCYPAVSKESVMTDCLAETALRLLAQQQEIEVLKSRLVALGSSTELYDLFISVPGIGPYLASSLIAELKDIRRFENHKKLIAYCGFDPTIIQSGKSIHYNGPISKRGNSTARKILFYTVPIILVVARKTNRQMPLLLYYEKKRGEGKHHHACLVACCTKLLRILLAMSKQNTPYS

SEQ ID NO: 264953 - protein, 313 aa, unidentified
MSPNNTPILYVGLDVAKLTLQVDLAGKSHSLANDAKGHACLLKLLRPHSQAQVICEATGGYEQPVVRCLQAAGVPVTVLEASRVRSFAKAQGQRAKTDPIDAAVLTRYGQAFKPAPTPPLSAQQRQLTEVVQRRRQLVQLRTRERNHTEHYHDAFRQQQARQLIKLLDKQIDQCEQTIAALIAADPVQQQKADRLQAIPGVGPVVASTMLAEMPELGTLNPQTAAALAGVAPYNSDSGNLQAPRHISGGRMAVRCALYLAALSAVRHDRILKEFYQRLRKAGKRPLVALTACMRKLIVLMNHLLKNPNFQLAN

SEQ ID NO: 264954 - protein, 358 aa, unidentified
MKRILKIGMDVHTTNYTLCAMEPIIGEDDRVFATIKVTPDYKIQCGYEAGCLGYSLYNQLTAAGIKCVILAPTTMLTPQGVRIKTDMRDAYMIAQCLSYGGYHAVYIPTEDDDSVKEYLRMRNDHKLALKKIKQQINAFCIRHGFCYDGTKWTLSHLKWLKKLEITNQLYRETLDEYMASYEEQEAKIERYDKRIGEIAEQTRYHDKVKKLGCFLGIKTHTALSLIVETGDFERFAKGNQYASYLGLAPGENSSSDNIHRLGITKAGNSHLRQLLIEASGGICKGAVGHKSKDLRARQNGNTAEVIAYADKANTRLRSRYYKFIRHGKKRNVAVAAIARELACFVWGMMTDNIEMKAV

SEQ ID NO: 264955 - protein, 326 aa, unidentified
MKKINENKFVGIDVSKKTFDVYCLDAKGQAIQSQLPQSSKGYRTLAGFIGPDAICVMEATSTYHLPLAQWLYDHGIRVVIENPLKIKRFSQMHLQRHKTDKADAKMIYEYGTIIVTKSIALWSPQSTRIQELQQCDSLSQRLNKELTALTNTHEALAQLSVVNAEVTRIVNSTIKQLKNALKQLDKQMKTLVKEHYCENYKLLMSIPGVGSKTSVMLICQTDNFTKFDNVKKFLSYIGMSPRTYESGTSVKGKGHISKVGNGRLRSLLYMCSWTAKRTNSQCVAVYEKMHSKGKPEKVIKVAIAHKLLRQVFGVIKHQQPFSTELA

SEQ ID NO: 264956 - protein, 407 aa, unidentified
MEVLHPRCAGLDVHKDVVVAAVRCVSEPVHQEVRSFGTTTGELLSLSEWLKSQGCTHVVMEATGVYWKPVWHLLEESFELVLVNAQHVKNVPGRKTDVADAMWLAELLAHGLVRSSFVPPARIQELRDLTRTRKQLVREISQHTLRIQKVLEDANLKLGSVLSSVVGKSGRAMLTAIVEGEENPQRLADLAQGHARKKRKELIEALRGRITPHHRNLLKLHLGLIDSLQVALKEVDDVVGKTLAPIQARAQLLTTMPGVSDIAASVIVAEIGVEMSRFPSPGHLISWAGLCPRSDESAGKRRSTRLRKGGTWLKTTLVTCAWTAVRTKDSYLRAQFLRLKARRGAKKAIMAIAASMLTACYFMLRDEVQYKDLGPQHFDRHDKGKTIGRLVRRLQDLGCEVDIKRAA

SEQ ID NO: 264957 - protein, 346 aa, unidentified
MNQITRIGMDTSKHFFQLHGVDAAERPVLRRKLRRNQVLAFFAELPPTVIGMEACGAAHYWARELRKLGHEVKLMAPQHVKAYVKRNKNDGRDAEGLCEAMSRPTMQFVAVKTQEQQAALMLAGVRQQLIARRTQLSNAIRGYAAEFGLTAAKGLDKIEPLLAQIAQDESLPALAREMFAIEGREYAQLQVKLKALEAKLMAWHRANAASRRLAQIPGVGPIGATTLVMKAPDPGAFPSGRHFAAWLGLTPKDHSTAGKTRLGKITRAGDEVLRSLLVAGATAVIQQVRHGRGHPSPWLVALVKRKPPKLAAVALANKIARIAWKLMTTGESYDSARMPGASAAAA

SEQ ID NO: 264958 - protein, 344 aa, unidentified
MDHFGGLDVSVKETSICIVDDTGRIVKEVKVASEPAALLKVLGNPIYRFKRIGLEAGPLSQWLFSALAESELPVICVETRHMQAVLKAQINKTDRNDARGIAQMIRVGLYRPVHVKTLRSQKLRMLLTHRKLLQSKAIAIENDLRGTLRNFGLKVGMVGKVRFEARIQELVENIPDLAVLVEPLLIVRRVLREQIVILHRRLLAIVREDEVCRRLMTTPGVGPVVALTYRATVDVPARFRKSKSVGAVFGLTCSRYQSGEIDWSGKISRCGDEMMRTMLYEAAQSMMHSKKWSWLKAWAMQIARRRGMKKAIVALARRLAVIMHRIWVDGTEFRWTREQAAAAA

SEQ ID NO: 264959 - protein, 417 aa, unidentified
MWNKATKVKCSVEDSITNSPLEVFTMTVVIGIDVAKDKHDCFILNSMGVILEDVFTIPNTLEGFNLMLSKIRTHTTPQDKIKVGLEATGHYSYNLLGFLLNNGLTTYVLNPLQTNLYRKSLTLRKTKTDRVDARMIASMLLSDVGLKPYTDTAYHNEELKSLTRYRLDKVQDRAKLKSSVSRLVCILFPELEKLVSTLHMASIYALLEEFPGAKQIANANLTHLKNLLATASKGRYGREKAVEIRDTARASIGSHMPAKSLELRHTIHLIRELDREINDIEAEIQKIMDELDSPITTIPGVGLQMGAMILAEVGDFYNFDSPDKVLAYAGLSPSTYQSGQLKNCYPHMEKRGSRYLRYALFNAAKYVCIWNPTFAAYLAKKRSEGKHYFVAVSHAAKKLVRLIFALERSGQSYRQAA

SEQ ID NO: 264960 - protein, 401 aa, unidentified
MNEFNPAMHQLETASALEVMRAAGQEEKHAAYVGLDVHKETIAVAVAEPGRSEPVYRGEFANQPKTVAKLVAKLSESYDGGLLQFCYEAGPCGYVLYRQILECGHDCQVVAPSRIPKAPGERIKNDRRDALKLARLQRGGDLTAVWVPDQEQERMRDLSRARDDMKGQERKARQQLNAFLLRHGHQWPRGKSRWTPAHENWLAGLKMEHPWQQVVLEEYIAAERAAGERVVQLNAHLMRALPEWSLAPVVDSLVALRGVDKLAAIVLLAELGDISRFDSPKQLMAFLGLVPSEHSSGPRRRQGGITLTGNAHARRMLVESAWSYRFPARWTKHLKGKARQASAEAKQIAWKAQTRLCGRYRALTRAGKNTKVVCVAIARELAGFIWDIVRQEMPRLASQQG

SEQ ID NO: 264961 - protein, 417 aa, unidentified
MYDEEVYYERCAGIDVHKKFLVVCLRIGSKSEVREFGSLTKDIREVVAWLKANGCQMSAMESTGSYWKPIYNIFEQERLPAMICNAQHIKNVPGRKTDVNDARWIAKCLSQGLLNPSFIKDREQRELTDMTRFRKSHIEERSRNINRLQKFLEGANIKLGSWLSDIEGKSATALLELVIGKPDFTVDDVASCMRGRMKSSPDELFCSLEGAITPTQREFFTHIMSVIREQTAQIEKTDTMIQRSLNDNYKAAVEALDAIPGIGRVSAEQIIAETGIDMSRFRNQHSISKWAGVCPGNNESAGKRKSGKTPPGNKTLKATLTQCAKSAVKNKKSFFSAQYSRLVSHRGKNRATMAVAHSILIAIYFVLSGYDFHDLGADYYNQFNREKKINSHVKQLSKLGVAIPDSFLRLAMERPPD

SEQ ID NO: 264962 - protein, 310 aa, unidentified
MDHFIGIDVAKATLDIASLPDGESWTVTNDDRGLAELAPRLVALAPVLVVLESTGGFELLAAITLAKAGLPVAVVNPRQVRDFAKALGRLAKTDALDASLLADFAQRVRPEPRPLPDEAAQLLESLLTRRRQIVDMLIAEKNRLGFARGPVKRDISQHIRWLEKRLAAVDGDLQDAVAASPLYQAKADLLRSVPGVGQVTTVTLLATLPELGQLSRHQIAALVGVAPMNRDSGTMRGKRMVWGGRAPVRAVLYMAALVGIKHNPVLRAFYERLRAAGKPFKVAATACMRKLLTILNAMLKHRHRWDAQHA

SEQ ID NO: 264963 - protein, 391 aa, unidentified
MPTTLTHCTTPTATLYMALELAAHEWLLTFAAGPGSARRHVTIPARAGARLLAEVQRAKVKLGLPADAPVLSCYEAGRDGFWVHHWLTRQGITNAVVDPASIEVNRRLRRAKTDRLDGAGLVRLLARWHGGERDAWKVCTVPPTLAEDLRQPIRERLELVEERTRLVNRIRGLLAGVGAVVDGPLTAATDLDALRQWDGQALPPLLRARLARDRQRLALLERQVTDLENAERRAVRDDATPQVEQARRLLGVKGVGPTSTWLLVRELFGWREHLTPKQTGALAGLCPTPYTSGDSAREQGISKAGSKRVRWALVELAWGWLHHQPHSALSRWYQRKYGAGGARHRKVGIVALARKLLVALLRLALTGAVPEGADVRDWYTKVTGRPRATAT

SEQ ID NO: 264964 - protein, 360 aa, unidentified
MHTFEQLTHFAGFDWAKDHHDAVILDRQGATVQSMTFAHTAEGWTQWREAIKAYPALGVAIETNQGAAVEQLLQNQVTVYPMQPKAAERYRDRHVPSGSKTDQADAWCFADALRVDGQHWRPLAPEDPLTEELRLMCRDEVELITQRTALVNQLQQALYEYYPAALEAFDDWTAPYAWEFVLAYPTAEQLVKAGKRKWETFLHTHKLWRPDTAPKRLEIFGRADRFGGSVAVTRAKSRLAVSTAQVLRTLQRQLEEYRSTIEKLFAQHPDHDLFGSLPGAGAKLAPRLLGEIGTDREQYPDAQGLQCVAGTAPVSFESGKTRRAKIRWHCNRHLRHAVHLPAKARFVALAAPTQNDLTMR

SEQ ID NO: 264965 - protein, 427 aa, unidentified
MTKTEVLKFNAIESTDAIIGVDIAKNVHWAGIILPNGREIRKPFSFNNSKKGFKNLVKEIEKVMVPLNFKKVVIGMEPTGHYWKSFARYLKKIDWIKVVTVNPKKVKDAKELDDNCQTKSDRKDCMTIARLIKDARFFEPYLPEGIWAELRNLSNTRNELIRKNSAVKNRIIATMDEYFPEYEKVFKQILSRTSIEILKECPFPKNILEKGIEGITNHIKQTVKRGYRTQQIVEIYDLAVESIGTEEGLAGARLQLELYVEESELLAKQISRVEEKLEEELKETGFYESLISIKGIGVVSASMLVGEIGDINRFDSYEQIRRYAGLNLVENSSGKHTGRTGISKRGRGLLRSILYKMAFVMVNHNEEIKKLYKYLTTRKTNQLKKKQALVAVGGKILQIIYAIVTKNEEYQATRVFSIDRLKQLKVA

SEQ ID NO: 264966 - protein, 340 aa, unidentified
MVHVGVDLDKRSSQIAVLSEDGEIVQHRLANDAARLEKFFADLPPHTPIAIEASGTWWWLVDLLEELGHQPVLSNPKQTKAIAAARLKNDRVDAERLALLLRGDLLPRVWIPPTTLREARELIRHRIQLVWLRGVLRNRLQAMLARRNLQPTSGQSWLTQRGQRELQRLPLGETPSRIREDYAALLPMLDAQIRRLDADLVTRWGADARVRRLTTIPGIGPFIAIVLVLELGDIERFASAKRVASYVGLTPRIRGSAGRVRAGHITKEGNRLLRWVLVLAATQAVRRPGPLRAWFHAVKKRRGKKVARVALARRLAEIVFHVWKQECDYFTVVRHGVVRG

SEQ ID NO: 264967 - protein, 343 aa, unidentified
MYFIGVDHHKQASQMTVLDQEGRELKMGRVLNLRRELERFLEGFHPFTAVIEAGRSSYVMADLLRELGGEVKMANALQVKAIAHARIKTDKRDSRVLAHLLRADLIPEIYQRGERNRQAQRILRARAYWVSKQTEIKNKIQSLLAQQTEEIRIEVDKRTGGLFSGRGIEFLLRLPLEGTDKMVLDDLVQGYQETQAHIKTSDGRVQALSGTIEEASRIDTVPGFATTLAVLVAVEIADIHRFPSPAHLHSYAGVIPSTYASGERTYHGRITKQGSAWLRWAALEAVYPAIKKDLGLRVLYTRLAKRKGPNAAKIAVARRLLTIIYRILTENRTYLPDRNRSAA

SEQ ID NO: 264968 - protein, 330 aa, unidentified
MSKRFWVGCDMAKATFWAAVSDLRQGVQGWTELPSKCFENTPAGIDAFVAWLGEQGVDAQSVAGVCLESTGRLSTRWAAGLDERLGPVSIINPALPESYRKSLGIRDKNDRVDACVLALFAKATAPEPTVFRSPARQQLCELYRLREALDAQCKANEQRLADGPSSSFVRATLTKTIRSLKRQVKQVEKAMDELVANDRELREDAARIETIVGVGRKTAWVILSEFGDLRQYKRNELVALAGLFPKGTTSGTSVHKKARLAKGGGSRVRKALYMCAMSARQHNPHLRRFAQRLEANGKEPMEAIGAVMRKLLLIIRALIVSERDYDPQWA

SEQ ID NO: 264969 - protein, 404 aa, unidentified
MFYSGIDWSKDHHNLCIMNAAGARASQIQFKHTLKGFEQIEAERRKLDVPASECLVAIETTHNLLVDFLLEHDYVVYIVPPQATNAYRNRQRSSGAHTDESDAALLASIMRTDRDSHRRLSPNTPLTQQMLVQVRLIETLRRSIQRQENQLRDVLCRIYPQALDLFSELTAQISLQFLVTYPTVQEAQALSLKAFDAFCREQHYSRPDLISRRYAHLIEPAPEANSAVVEAYRDHVCILAELLLPQVSRRNEAKVRLSQLFEQHPDAFIFDSLPGAGDLLAPGLLVKFGDHRDRFPTPSSVQALAGTCPVTEWSGKRKSIKFRRGCDKEFRRISQQFSRASLKKSGWANAYWGEIRPRCGSNSHAYRCLANRWLAIIWRLWQDRKSYDEEYHLQQRASRRRPKL

SEQ ID NO: 264970 - protein, 341 aa, unidentified
MQHELRTVAIDLAKKVFHLVGTDTLGKILWRKRLTRHALMPFIAQLPPVLIGIEACGGAHYWARRFREHGHDVKLMAPQVVKPFVKSHKNAMRDTEAIAEAVTRPTMHFVPIKEVDQQDMQALHRVRERLIGARTALINEVHGLMHAYGIVLPKGVAKFRQAVVDKLESEQEKLTALSQEMFRKLVEEFGALEKRLAYYQEKLEALATTHPECQRLMTIPGIGPITATALVAAVGNVGVFKNGRQFAAWLGLVPKQHSTGGQTRLLGISKRGDSYVRKLLIHGARATLRWVKLQTDKRSQWIRGLLARCGWNRTAVAVANKNARIVWALLSRGGVYGDNGR

SEQ ID NO: 264971 - protein, 336 aa, unidentified
MDNTLYVGIDVSKNKLDVAVTYNQNKILSFNSFHNSFNDFEALFVWVKNFTHKKIHFCLEATNIYHEQICEYLISKDNTIVSVVNPSQTKYFAKTKLVRTKTDKTDSELIAFYAVIHKPKPSQIVYNETKELRELTRHLKKLIDERIQQNNRLKITRNLQLIKLISEKTDFIENEINEVEKLIKNHTNKYTILKEKINLLKTITGIGDKTACFLLSEMLMIDDKPVNSKAQTAYAGLDPAHRLSGSSVKGKSRISATGNAKLRKALFMSALCCVSHKNGYFKEFYTKLTAKGKPKKVALTAVMRKLLVTANGVLLNNQPFQPDWAKKKQNDFLNAA

SEQ ID NO: 264972 - protein, 414 aa, unidentified
MLFVGDDWAEDHHDVELMDAAGRRLAAARLPEGVAGITRLHEMIGAHLGEDAGAGADAGAGEVAIGIETDRGPWVSALVAAGYTVYAVNPLQAARYRERHGVSGAKSDKADAHTLADMVRTDAHQLRPVAADSPQAEAIKVVARAHKTLIWERTRHTLRLRYVLREYFPAALEAFDDLAAPDTLELLAKAPDPASAAKLNRSQIRAALKHARRRDIDMKTTRIQAALRSQQLGRAPVITAAYAATTRSIAAVLATLTEQINTLRGQVETHFGRHPDAEIILSQPGTGVLLGARVLAEFGDAPGRYADAKARKNYAGTSPITRQSGKRKITHARFVHNDRLVDALMSQAQSALLASPGARAYYDKQRARGLDHHAALRQLANRLVGILHGCLKTRTLYDEATAWSHHNQDQRTAA

SEQ ID NO: 264973 - protein, 432 aa, unidentified
MSNHHLQVGIDFGQATTHFCLLLPDGQPLEWHHAFANSARGYAAAKQLLLQALATHPLDGVDISGEATGFYWLPFFLQLATDPELEPYAPQLFLLNPRWVHWFKKCFAQDDKSDQKDPYYIAERLRTRRPAVAWTPQLATLPLRFYTRLRFHLIESLVREKGYVSAFLFLQASAYRQLRPFADVFAVTSRWAIGHLPSLDDLAALPVETLAAQLNELSRHRLPDPVGSAQRLQQIAAESFPLPAALTEPVQRILDLSLEHITYLEHQLQDVDRWIATEVKTRPAIAKLLTIPGVGPVFAAGLGAEIGDIQHFLQGLKWDAHRKAFRPKNLRDAEDAVAKTAGLWWPRTNSGEFEAEDRRMAKTGNRYLRYYFVQAADKMRQHLPDYAAFYARKYREVTKHQHKRALVLTARKSVGLVVGLLHRNEAYRPPEA

SEQ ID NO: 264974 - protein, 370 aa, unidentified
MGSIAFIGMDVHKATIAVAVAEGVRGGEVRQLGIFPNRAEVVTKLAGRLAGDGRELSFCYEAGPCGYGLQRQLEGLGHACVVVAPSLIPSKPGDRVKTDRRDALSLAKLHRAGELTAVWVPDAAHEAMRDLVRARATAVRVLGKARQHLQGFLLRHGRIYAGRTTWTLAYRRWLTTLRFAHPAQQIVLQDYIHAVEDAERRVARLAEQITTLLPCWSLAPVVRALQAMRGVGQIVAVTVAAEVGDFSRFANPRQLMAYLGLVPSERSSGGTVRRGGITKAGNALARRVLIEGAWTYRMQARVSRKLHDRIEQLPSAIRDTAWKAQLRLCGRYRHLVAAGKAKVVVTTAIAREMVGFIWAIARQVQLQPTG

SEQ ID NO: 264975 - protein, 465 aa, unidentified
MSKLSQRHRARSSQGETRPCEGMRQVHPHAAGVDIGAHEIVACVPDGDDQQIVRTFGTSTVDLQTLADWFVDRGIQTVAMASTGVYWIPLCEALEARGLPCCLIRAQSITRVPGRQSDVLDCQWIQTLHSYGLLAASFRPAADLVALRTLLRHRAQLLEHRAPHVLHMQQALLQMNIQLSQALSDITGDTGQRIIRAMVAGERDPQHLAALRNYRCKKDAHEIAMALTGTWREEHLFVLTQALALFDFYTTQLSACDAQVEHAFAVIKPHFESTAEASVPASAAVPPRRKPHSHSKNAPEGNTRAHILRITGVDLVAVHGMSDSLAQTILAEIGTDMSKWPDDKHFCSWLGLAPKNDISGGKVLKSRTMKNRNRAAQAFRMAAQSVIRSHCAFGAFYRRLKGRLGPAQALVATAHKIARTVYHMLKHRVPYYDIGAAEYNKRFREREMHYLQKKAAKLGYKLSPV

SEQ ID NO: 264976 - protein, 434 aa, unidentified
MSGKKSLELRVSVDVGYRRHSVAIGLPSGEVLEEFEIAHRPEGFAEFFSRIEKHHKARRCGVAVGMEGFNGCARPLDAMVRRRGYRLYNINNLKLARFKEIFPGAAKSDRIDARKGLELFQLSDHLPLAKEVLQEVKGTPQENEVLKRLTRRRRRLVDERVRVISNLQTDLQAVCPGLLEITKNAGNQWFLNFLVSAATLPQLARLRPSTLLKVPAVGRKYARLIEDWQKRAHFSEEVEWVSEMIQEDAKRCLELDEKIKALKAKIKGVAKDSKIAKTLLSIPGFGTICTAELAGEIGTIERFSKEGSLALYLGMSTLDNSSGKYQGSKQPKHVNRRAKAAMMVALDRHRKYVPESQRYYEKKRREGKKHNQAIRALGRHLCRIIYKMLNDEREYEIRPEKGNTKTKVKSRSCVKTEIRKPKISAKGKITNGAR

SEQ ID NO: 264977 - protein, 378 aa, unidentified
MALQTAAHDGPVLFLALELSKSAWLLAAHLPGANKPKLHRIEAGDTAALLATITALRARVAGESGTAVDVACCFEAGRDGFWLHRLLTANGVASHVLEPTSILVNRRARRAKTDRLDAQGLLRVLMAHCRGDRQACSMVRVPTPEEEDAKRLHREREHLVQERVRVENRIEALLATQGIRGRPSLRSWERDMAAVRTGDGRALPTRLRAELDRLRRRLVLTLEMIREVEAERAAALAAEPQDDTCRTIAALCRIRGIGETSATVLAREVLYRPFANRKQLASYVGLAPVPYQSGGMDRDRRISRSGNPRARTAIIQLAWLWLRYQPGSALAGWFRGRVGALAGRTRRIAIVAMARKLLIALWKYARTGLLPEGVEIGA

SEQ ID NO: 264978 - protein, 416 aa, unidentified
MDLTDLTSTDTEPASPAPPPGLVAGVDTHQDTHTLAVLTAQGAVIATSSFPADQQGYNDLTAHLDRLGPLMAVGVEGTSSYGAGLTRTLRQAGYDTVEVLRPSRRVRRHHGKSDPIDAIAAARTVLSGDGVSQAKDTTGPAEQLRLLLAARTRLISAATAITNSIHSLLTTAPEPLRERYRRLDTPALITRLARTRPTRTITTPQQAATSALHHMARTHQDLHHRAERLNQQMHHILTTHYPGLLAVYGAGTTVAAQLAVTAGGNPGRIHNEAAFAHLCATAPIPASSGKTTRHRLNPGGDRRANAALHRIALVRLRHDPTTKNYANRRTQEGKTTKEIIRCLKRAIAREVYRALTQPPPTDTTSTLAAHRKRHHLTQTDVAHALNTLPHQNLRHRKPPTPTTPTHTPLPPIPHHP

SEQ ID NO: 264979 - protein, 425 aa, unidentified
MKKVTKFAKKVNEQVKETVLDKASWVIGIDIGKENLSCALMDINKTLVCRFEAEGSLDGYQDILDRVKKETRGNGKAIFAMEPTGHYWMVLGQFFEDHNQSYVLIHPLVVARSREVHRLSRGKTDSLDARLIGDLACDRSIIRTQIPEDYWATIRFYAREYMDREKDIVRDKNRITSYLETTLPEFVGIFPNPLGMSGRACLRVLANFREAIKEDRNHFEKHIRDHLSGKRLMISRVRRLYDMLQRGDALGLRAGRQAMFRRIINSLDRLEMYERQQDAAKQSLLDSYDKSEYKQYLDSIWGTTPTVNALVLGFMGDPTSYDGSSSLVKLAGCDPVPNESGKFKGKTSISHRGRNLLRKAGDRISFLLEKRNSVFRAFFNHLLSRQKNRLTKRQARVACVNKYFRIVWVLCNHKVPFNPALASTI

SEQ ID NO: 264980 - protein, 370 aa, unidentified
MAQSTPLFVGLDVHKDSIAVAHAQGQSADPPVFVGAIGPRQADLAKLIRRLQAKTPNLVFAYEAGPCGYTLHRDLTGHGFTCHVVAPSLIPKKPGDKVKTDRRDAVELARLLRSGDLTRVYVPTVEDEAIRDLCRARDAARLTLKNAKLRLKAFLLRLGLHYVGRADWNEAHRRYLAKVICPTPAQQIVFQETLGAVDEQVDRLKRLETELRELGPTWRLDPVVQALQALRGVQWLVAITVVAELGDLTRFDSPRQLAAFVGLIPSEYSSGTARRQGGITKAGNGRARRALIEAAWAYRHPAKVSQHIQTRIDGLPKPIQAIGWKAQVRLCKRFRRLTARGKHPNVAVTAIARELIAFMWAIAKEVAVTA

SEQ ID NO: 264981 - protein, 372 aa, unidentified
MASISHRGFTHLGMDVSKDSILVAVLDPDRDDAPVDRIFSDEDSVRRLIGRFEDRSKLWVCYEAGPTGYELHRLLTSMGVRCDVVAPSLVPKGRGDKVKTDKRDARRLAGLHRAGELTAVGVPSRQQEAVRDLCRTRGDMVEDLTRARNRLTKFLLRHGVVYRNGSNWTFRHGRWLDQLEFDELAMESTFVHYRATVVAREAALAAVEADLVPWFEREPFGVQSARLAAYRGVTRMGALCLSAEVFDWRRFPRARPFMSFTGLVPSEDSTGGREHRGHITKAGNTHVRAQLVEAAWSYRHRASVGPELRRRQQHLPADVVARSWRAQQRLSSRFRALAGRKNVKSVVAAAVARELAGFLWAEMHSDTITSTA

SEQ ID NO: 264982 - protein, 343 aa, unidentified
MQTITTIGLDIAKSVFQVHGVDAAGQVLIRRQLKRRAVLAFFQKLPVCLVGIEACASSHYWSRELQALGHSVRLMPPAYVKPYVKRQKNDMADAEAICEAVARANMRFVPTKTPEQQSCLMLHRTRHLFIRQQTAVINAIRAHLAEFGIVAPVGRKGVTELLHVVADPSDGRVPEVARACLAALGTQLLGLKEQIVEFDRLIMAWYRSNETSKRLHYIPGVGPLLATALAASVADPQTFRSGRNFSAWIGLVPKQHSSGGKDRLGSISKQGDRYLRSLFVAGALSVIRYAKIHGTKHRPWLTALLARRPTKVAAIALANKLARMAWAMMARGERYRNPVALAA

SEQ ID NO: 264983 - protein, 353 aa, unidentified
MLYVGIDFHKSYSFITEMDKAGVIKRQVKLANNRDTLTNYIDLLPTNTKIAIEATCNWYYFYELVEDYDLDISLAHPLKTKAIASARLMNDKISSETLAHLLRADLLPTAYIPNQTTRDMREVLRTHAFLIAQRTRFKNRVHAILLKNGINCPYTNVFGKRSLGWLNALDLRPCYQQAIENYTHLAEALEKEIKSLKDIIHALANENNYARLLDTHPGISYYSGLLIAVEIGDVTRFANHGKLCSYAGLVPSMHASGGKVHMGHITKQGSKWLRWILVECASHAVKKSPHYHALYTRVAHKHGKGKARVAVARSMLRAMYYMLKYNRFYQEHSILKKLRPAPWGHNLIKGSEI

SEQ ID NO: 264984 - protein, 343 aa, unidentified
MSNLPVFVGLDYHQDSIQVCVLNSQGDVLLNRSAGNDADHLARLVNPLGRVQRVGIEACCGAADLGQELVERLGWDVSLGHPAYIARMKSSPDKSDYSDGQLIADLTRVGYLPRVWLAPAYIRALRQLVQHRQRLVDSARAIKLRVGAVLREGRVKIPAERGSRWSKAWIASARDNDQLCEASRWIVNDLLDDLAYMRGKIAAAEAKLRQATAGDRVIEKLLRQPGIGEVTAWVLRACVGEFTRFNTAKQLARYCGMTPRNASSGNKVADAGLINECNKLLRATIVQAAHRLMRTAERWRALAQSLGRRGKPPCVIVAAIGNRWVRTLHHAMKQQDVGEPAMN

SEQ ID NO: 264985 - protein, 338 aa, unidentified
MKLYAGIDLHSSNCYIGIIDGQLEKVLGKRVKNYLPMIIDCLAPYKKDLQGVVVESTYNWYWLVDGLQEHGYTVHLANPAAIKQYEGIKYSDDKWDALWLAHLLKLGILPQGYIYPKETRPTRDMLRRRMLFVRHRTADILSFQSMIARNTGGRISVNNIKKLTEANLGKFFSDPDLLFMAQRYLSIIGLLSQQIKMIEKQAMNKIGLTQRFKWLCTINGVGKILAMVIMMEVGDIGRFKKVGNYCSYCRCVKSERISNGKKKGVGNKKNGNKYLSWAYVEAANFCIRYNPQAEKFYQRKKAKSNGIVAIKALSNKLARASYYMMRDQVPFDSQMLFA

SEQ ID NO: 264986 - protein, 466 aa, unidentified
MRQRKQAVKRSMTTTPSNPLELLNPNAAGIDIGAAQHYVAVPAGRDSDGQDVRCFSAFTADLHALARWLKACGIDTVAMESTGVYWIPLFELLEAQGLQVHLVNPRSVKNAPGRKSDVLDCQWIQQLHTYGLLSGAFRPEEQICVLRSYVRQRAMLISSAATHIQHMQKALDQMNIKLHQVVEEITGATGMRIIRSILDGQRDALSLAQLRDARCKHDVATIAASLHGNWRKEQLFALKQALELFDFYQSQITACDSVIEEHLHSFDAEHRSPPDAPGAAGKGSKHPFGFDAHGHLQRISGVDLTRIEGINVTTAMGIIAETGVDMNRWPSEKHFGSWLGLCPGTKISGGKRLSSRSKPTANRAAHLFRLAAYSLHRSKGAIGAFLRRKKAQLGAPKAITATAYKIARIFYNMLKHGTEYFALGQDYYEKRYRDRLLNNLKRNAQTLGYQLIQLTENTKEMVNNPV

SEQ ID NO: 264987 - protein, 379 aa, unidentified
MDMRALPCWRPNRKEDRPMGDGSSEQPKMTAGVDLGDKYSYLCLLDSESGEVIEEGRLRTTPEAFRRRFASELPPMRIAIEAGTHSPWVSRVLEECGHEVLVANARKLRLIYANKRKNDEIDAENLARLARVDPKLLYPLKHRGEDSQAHLAIIRSREALVGCRTQLVNHVRGAVKSFGGRSPKCPARSFHKRAKEHIPEALRPALGPVLEQIGSLTECIKDYDRRLEAICQEHYPETDLLRKVEGIGPLTALTFVLTVEDPYRFERSRSVGAYLGLVPATDRSGDRDPQKRISKEGDEMLRRLLVGSAHYILGPFGSDSDLRRHGEKIASRGGKNAKKRAAVAVARKLSVLLHRLWVSGEVYEPLHNAHRRQEPEEAA

SEQ ID NO: 264988 - protein, 422 aa, unidentified
MLGVGLDWAEDYHDVALGLPGKGVIEQFRIEHGPAGVARLVARCLAVEPDPAEVRVVLETRHGLLVEALVDAGFAVLPVNPDLVARRRGPAKKKDDAEDARICCLLALDQFVELRRLIPHGELGAELRAIARDDDRAARDERRLGNRLRADLLAVFPAAVDIADGDLGSAVFLRLLQRWPSAEELAAAGRDAVEALARANKHGWPDRFAERVITALAVPRLPIRPELGRAKAGSIRLATAQLLLLREQRRAWHRRMGELLLGGPRHGRTNRPKDPPPGNAFPGGEIYLSMPGLGDRLAARVAGEIGEHIEQFTTPNALQCYAGAAPVTRRSGRSEHVVARRLAYNRYLGNAVRQWAFCSLQQSAWARTFYNAKIVAGKRHHTALRALANRWLEILWHCLHRGTLYDEAIHTANRAHTVTQAA

SEQ ID NO: 264989 - protein, 338 aa, unidentified
MLYSGIDQHKLFSVITTVNDEGIIIKQAELKNNDFDILNYFASLGSEHSATVETTGGWYWMNDLLSSHGINLKLAHAKYVKAIAYAKVKTDKVDSHILAQLLRMNFIPEAYKISDYVRPLRDTLRARLRLSQKRTSCLNFMNRMLEKFNISDPSLLSEFYKLQYQQFDYQEHLLKEQMLTLEKSLYPSLVPNDDIQRLLWIPGIGKMNAFTILLEVGDINRFIDVKHFFSYCRLVPSARNSAGKSKQRSSKDGSKYLKVVFSDAAVHALQYYPTIKKYYSSKLRKKKKQVAHAIIAKEIARIVFYVLKYKSDFNNQFKGIKIEQKKSYQWPRITSPDV

SEQ ID NO: 264990 - protein, 411 aa, unidentified
MNPVIGLDVAKDESQVQAYLERKQPYKKSFKVSHTLEGLSNLLDFIKEVEVVSGKRPPLILESTGHYHTPIVQYFEDRGYLLIIVNPLISYRAKSSSLRKVKTDIIDAHHLCELFYKEDLEPYKQRGIQLLNVRNLTRQHENITGMFIQTKLQFHAVLDQVFPVYIGVFGDLYSDVSLLTLQTFPSSEDVLKAGQETITKKIKEFCKSRSLEWAEKKAGKLMAAAAQNPFQKAIFHSLSLSLDMYINMIKEYKKHLSKLENEIDALAESIEEYHIIQSIPGIGEKIGATIISEIGEIDRFNHPKKLVAFAGIDPSVFESGTFKGTLNRITKRGSSRLRHALFMAVRSAIRDCRKMKTTDEIIPRNKKLREFYDKKREEGKPFKVAVIACANKLLHWIYALLKNKSTFQDLA

SEQ ID NO: 264991 - protein, 345 aa, unidentified
MEVYAGLDLHSTNTYVAMVDGENKVLYKQRHKNEAPAILSALDPFKKDIRGVVGESTYNWYWLVDALMDSGYPVHLANPSAIKQYEGLKQIDDKRSALWLANLLRLNILPTGYIYPKEERPTRDLLRKRLQLVRHRTSHVLSVKNIFARNLGIRMKSNEVKRLTASEVKILFSDKEMRQAVMASVGLIGHLQKEIDGIEEAITKKLKIKKEFGKLLTVPGIGQILGLTIMLEVGRIDRFPTVGDYASYCRCVTSTRTSNGKVTGYGNSRSGNKYLSWAYVEAAQHARRFNEPIRSYYERKTARTNKIIAIKALSHKLARASYYIMRDGVEYDSQRLTRGEGNQHV

SEQ ID NO: 264992 - protein, 367 aa, unidentified
MKKISTAAAQKIEEVEGQRLTVGLDLGDRSTWYCVLNEAGDVLLEQKVATTPKAMKEVFGGMPCSRIALETGMHSLWVSRLLSELEHEVIVAHARNVRLIGESRRKDDQFDARTLARLARIDPDLLGPVQHRSRKAQADLTVIRARAGLVRARPALINTARGLTKSYGERLRGCSPRKMNRELAEGLSPELQSTLQPLLDEIESLSERIAEYNDRVQQIAQESYPEVARLEQVKGVGTLIALTYVLTLEDPRRFRKSRDVGCYLGLQPGRRNSGQSEPQLHISKEGDPYLRTMMVQSAHHVLGPFGADSDLRRWGLRLAERGGKNAKKRAVVAVARKLAILLHRLWVSGEIYEPLRNSSQAMLPAAA

SEQ ID NO: 264993 - protein, 405 aa, unidentified
MKKIAGIDVHKKVLMVVIAEAASPEQIVRKDKFGTGRAELERLRVWLQQTEVGDVVMESTAQYWRPVWNELEPFFALHLAHAQSNRAPQGRKSDWADARRLVKRFAAEELFLSFVPEPEQRDWRTLTRARQALVRDHVHLQNQIEALLEQASIKLSSVVSDLFGLSSLRILSALAEGQTDAEKLAQLADPRLRCGQQTLVDALRGRFREVHRQLLDQALQRLAILSKQIAELSRLAAQRLQPYASTLERLIEVPGIGAEAAQEILAEIGPTAAAFSSSAKLASWIGVCPGTQESAGENHSGRCPKGNRYIRRVLCQVAHAAARTKGSHFEVMFRKFLHKGYNKAIWAVAHKLCKIVWIILHHGARYLESGVVNPKAVQRAIQLHLKALRRLGYVLPPSPTPTSQP

SEQ ID NO: 264994 - protein, 305 aa, unidentified
MKIHIGIDISKLHLDLCHHQQSTRIPNTEKAIKRWLKSLPPTAVLVCEASGGYESLLIVLAHAARRPIARLNARQVRDFAKAKGRLAKTDKIDAQILVDFAETFHPEPLDLPDPLQQELAALVKHRAHLLTQITQNNNLAETLADKKLLTLVARTVAFLRKQVDQIETLMADKISLSPQLAAKTQRLQQVQGIGSLSATALIALMPELGSLSDTQAAALAGVAPFNRDSGQYRGQRHIAGGRAQVRTVLYMAALVASRHNPVLKPLYLRLLANGKAKKLALTVLMRKLIILANRLLKNPAFSLAT

SEQ ID NO: 264995 - protein, 348 aa, unidentified
MRGAVHMQITTIGLDIAKNVFQVHGIDATEKVVVRKQLRRSQVLAFLQALPPCLVGMEACATAHYWARELTKLGHQVRLMPAKDVKAYVKRNKNDAADAEAICEAVRRPTMRFVQVKSAEQQGQLMLHRTRDLLMRQRTQVINALRAHMAELGIVSAQGREGIKELLKIIASEQDARLPVDAHTSLVVLAAGLQAVQTMIGSIEKRIMAQHRASEASQRLESIPGIGVIGATAIAATVPDPKVFRSGRDLAAWIGIVPRQDSTGGKQKLGPISKQGDRYLRRILVVGAHAVLKQARRQPEKYPRLTLLLARKPFKVVAVALANKMARIAWALLAKGGTYRAPALAAAV

SEQ ID NO: 264996 - protein, 363 aa, unidentified
MIVIGADTHKRTHTCGAVFAQTGQLAGELTASAREAGFRELLAWGRSLDEERIWAIEDCRHVSGSLERFLIASGERVVRVPPKLMGESRRGERSSGKSDPIDALAIARAALREGPETLPAAYLDEDAMQVKLLLDHREDLVKARSEDQCRLRWHLHDLWPELEIPAGALDRMVWLDRVARKLARAEQSARVRVARELVTEIRRRTRRAAELQREIGALVKAQAPELLALEGCGALTAAKLIAETAGARRLPSDAKFARLAGVAPIPASSGNRVRHRLDRGGNRQLNCALHRIAVTQGRCHAPAREFLAKKQAEGKTRLEALRCLKRHLARRVWKLLINPEREISMNTVDTQRGKLTPQIAVAA

SEQ ID NO: 264997 - protein, 349 aa, unidentified
MVVVGIDAHKRTHTAVAVDELGKKVATKTVSSTSAGNLELVRWAQGLGEHRFAVEDCRHISRRLERDLLGAGESLTRVPTKLMASMRRSARERGKSDPIDAMSVARAAQREDNLPTARLDGDERKVRLLCDHREDLVNERTRSQNRLHWHLHELDPSLELTAGSLDRYVVLDRLSALCATHAGTVAEIAAELVEKIRALTVRINELEREITSLVATMNPMLLELPGCGALSAAKIIGETAGVDRFSDRGRFARFNGTAPIPVWSSNTTRFRLNRGGNRQVNTALHRIAVTQLRAGPGKDYVERRMAMGNTKTEAIRALRRRISDEVYRRLVTDHAAREAGLQTCVPLAA

SEQ ID NO: 264998 - protein, 372 aa, unidentified
MLYAGVDVSKDKVSVAVLTSGGTKLTSGDFDITTEGLKLLELTLKHLKDEISMAIEQTGTYSMPVILYLMERVEGLRIYLVDGLNFNRFIKLEGRKKQDKADAVSLAEYLRRGLPARLISDKDIKAYGLKVLISQREHLLKVKNQIENRLRQLAETIFPDSKTLSKLVFWSEIKKGRAILDWKRLTDKAEVLSTILRERKIWLEVVHSLEETEREINAFLRAYYPEDLNILKSFGFSETTIAYFISVYVDIGRFKDVKAFKSYMGLGLRIYQSGKKEKNVVNSYTNKYIRKLLYMYVVQAVRERSNHRRVKEYYLRQVEKSGSKKKAIIKTAGKVIEWVYYCLKHKEPFKWEANHETQQEDLSQVNSGQTED

SEQ ID NO: 264999 - protein, 413 aa, unidentified
MAGEINKSCGLDIHKRFLIATILCRSGEKQQQRFDRDEDGILSLRNWVTSEKCDVVACESTSDFWVPIHDSLIKHLPFIVGNARDMKAFTHKKTDKIDSEVIAKLALNGMVQPSRVFPINHREYRSYIRLRRKLVQKRTDIKNEAHAVLAPEMFNLKDVLTDIFGKNGREILSGICSGKNVNQILQNLSPNVRKKSAQIRELLDKEISQSAAIRLNICLKLIKDFDDSIEHLEKEIFNYAYGNHKQEMEILMSVPGIGELGAATLIAEIGNFKDFASGDKLASWLGLVPNVYQSADKYHNGRITKRGPKGARWILTQIAQAAARTRNSKLKEFFNRKKKSIGHAKAIIALARKIATIIWHLITNDEMYEDETGYVKGEGQRRKIVETEIFSVDERISIISEIFAIVEKKKPDI

SEQ ID NO: 265000 - protein, 400 aa, unidentified
MRAVFGIDVSKASSEVAILVNGEKVHGYTMTNDAIGFSRLLGDLKTVHKPEIIFEATGVYSRRLQSFLDEHGYAYTRLNPLEAKKQLDSLRVRKTDQIDAEKLAQSQFVLNRKTTYVQEEIYQNLRDLSRFYQNLTEDIVRAKNRLHKALQVTFPELENILSTPTGEQYWNLVIAFPCKDFVLELSKDKLSESIRQSTSKRISDKHVAYLAEKLIALANQSYCAVKKTSPILEEVRYYAKELLRLSERRQAVLDQMVELAQPLPEYDILLSIPGIAETTATSIIGELGDIRRFQSANQINAFIGIDLRHYESGNFLAKEHITKRGNPYARKILFKCIHNIASASHTNPCHIADFYKKRKRQSQTTSTKPHTIASIHRLIRTMYYLIMHNKLYDYASTQNR

SEQ ID NO: 265001 - protein, 416 aa, unidentified
MKDAPESTERYIGIDVHKRYCVLAAVDAHKEVVLPPQRVSFSRWWEWIHKNLKPGDAVVLEATTNAWHVYDQVVPLVARAVVANPMKVRSLATARVKTDARAALHLAKLLAADMVPEIWVPPVPVRDLRALLTHRRRLIKMRTMTRNRLHSLIHRYSLVPPQGEIFAPKHRAWWEGLQLSLTETLPVRQDLAILDALEPLIGEVREELERLSTVQPWAQSVPYLLQLPGFGLIVSMTVLAAIGEIERFAHAKKLVGYAGLGASVHDSGQRHRTGRITKEGRKDLRFVLVEAARIAVRYHPYWKQQYARLERRMHNNKAIVAIARKLLVVVWHVLTECAVDRHADPEMVAFKLMMWSWELDELQRGGLSTRQFVRYQLMQLELGEELTHVHRGGRDRPIASVEEVLELKPELQPASA

SEQ ID NO: 265002 - protein, 310 aa, unidentified
MDIIIDKGCGLDVHKETVVTRVMGSGIKKEIRTFSAMTGDLLRMKGWLTDLGITHVAMESTGPYWKPVFNILEDSFEVILANARHIKNVPGRKTDVKDSEWICKLLRSGLLTASFVPPQVIRDLRDLTRYRQKLIQAASAEKNRIQKVLEDANVKLSSVVSDTFGVSASRMIKAIMSGNFDTDSLAELAVGRLKGKKEKLKEALQGHFRDHHGFMIQASLDHIASLEKIIADLDRQINEKLKDYHRERELLASIPGVKEQGSSSILAEIGAAMNVFPSEGHLSAWAGMSPGNNESAGKKKVARQPMAIKT

SEQ ID NO: 265003 - protein, 306 aa, unidentified
MVNVGVDVGKFVLDVCIYEKQLHWQDDNSAEGIKRILKRLAHYQVCRLVMESTGRYEFEFAQAAYKKSLPVCIVKPLRVRRFAGAIDQMAKTDKLDAELIAEFAFKVQPEVTPQKSKNLIAIKDLIARRRQLMTMRTQEMNRTKIMGKSLETSCRRIVKYLDQEIARIEKRFAKYIEEQAEWTEKQDILKSAPGVGDALVYTLLADLPELGNLSRNQVGALVGLAPMNRDSGKLKGKRRIQGGRYTVRTMLYMATLSATQCNPVIRGYYQQLVAQGKHKKVALTACMRKFITMLNAMVRDKCVWAY

SEQ ID NO: 265004 - protein, 384 aa, unidentified
MKLIGIDIGKNKHFFCIMDQQTGEIISQPVSFSNDKEGFDFLVQKIKSYPKDSILIGMEDTGHYHFALLKYLLDLQYTVALINPKTTDFNRKMQGGITKNDKLDTINICDVLDTPERKKQYRITKVNSFDLYEQKQLTRHHHNLKEEENVYKNRLQKCIDIVFPEFNNLNILKMFGSAENIANTDIRTIRKCFEIEGRGNRISLTPERLKECARSSIGISSSAEVIQIKHLTAQIELIEEQLTEIDKKIEEFSIQNNSPILSIPGISHFSGTSILAELGDISNYSKPSQIIKFAGVAPLHYESSQFNAQHTAITKKGSKYLRKTLYQIILPVIRHNPVFNKYYQLKISQGKGHRCAQGHCVRKLLRIIYHLLKTNQQFDPQLLR

SEQ ID NO: 265005 - protein, 423 aa, unidentified
MDKNDDSRLQMFRQMKQEIRGSQEYLLVGVDIAKDRHDAFFGSAGGKTFLKKLVFDTTREGFEKLRLHADSIRVQHGLKKIAFGMEPTADYHKPLGEYLIQQGHRVVLVAGSAVKKNRELLDGRWDKHDAKDAANVADLVGQGKCLFYEFPSSDLRELRSLLSLKRKLKKTEQGYRVRIRNHLIAQYFPELDSYFTCGEGPAVVKWCLDPKKLATLSFEEFARMVSSRNGGEKQQRRLREIYEKAASSIGCEVHPAVAFEAQTLLETMGRLHATIIETDKKIAEVCTRFPEYAFLLTIPGFGPDISAKVLGAIGNPHRFQNHRQVLKTAGLDLSADRSGKRSDVTPVISKRGKADLRYGLYQAALVAPVKNPCFMRYFSHKLEGRQKEKGIGTKMRVKLAAKMLVIAWTLMKKKEVFDPGCVK

SEQ ID NO: 265006 - protein, 407 aa, unidentified
MLFIGIDLSDKSFDSCITNSNGDVLTINKFDFDDDGFSELVRKVNEHESEAQNCIIGIENPRSRLVDFLIQRGFNVIPTHPLSISKYRESRIPSKAKSDPMDARLIADYIREHHKSLRAVRIPDDTIRELSILLEDRDKLVEQKTRFSNQLTITLKEYFPVALEAFGSITNKSALEFLSKFDTHQEVKSLSSQKLDNVLAECGFFRTDSKERFHNAMSKKPSAISKSVIKAKVMLKNVLVGHLLLLSQQIEEYDKQIQRLMDDTPDSNIFRSLPGADYILGARLLVLYSIREFSSASEAQSFFGTCPYTSRSGNMIAIGFRKGCNHFGRNTFHQLAFCSLKSSQWAKKQHSKKRKEGKKTHHALRCVANTWVKITYAMWSSKTPYDENKHLASIASHIMNQPAFIQV

SEQ ID NO: 265007 - protein, 364 aa, unidentified
MQYVSNNTELSSHEETRCQFNGSTGVIKLGIDVHQQFYTVVVQEGGSNPKPPQRFRKEAFLHWAARLKQQGAAVHAVYEACGFGFGLQRQLAALGIACHVVCPQKLDEHNRRVKTDSLDAKALCLKLDRFVQGNQDALALVRVPTEQEEQLRAIHRQREQLVKARKQLEAQGRSLIVNHGIEPVQSWWKLRTFAALPVPAWLKELLANSQPILIALQEKIRVLSLQLQSAAGPDQPRGLGAMSSVVIDREIGNWHRFRNRRQVGSYTGLCPGEHSSGNTRLQSCVTKHGNPRLRAALVELAWRLVRFQPNYRPIVKWNEVLRKGALATGAARKKAIVAVARQLAVDLWRIRTGRVRAETLGLIN

SEQ ID NO: 265008 - protein, 327 aa, unidentified
MEKFDVNYIDQDGNERKQEVKNRLNGISKFLATVSSDAVLCAENTGTYGDMLVFLSNQKGINISLVSGYTIKHSLGMIKGKSDPIDAGRIREYGERFYDKLIFKEYDREEMVELRSLYSLRSQLVKSRKILRTGEHSRLNVPMQSISVKEHVTNALAHLDAEMKEIEKEIEGIITSDRELNENYALSVSIKGIGPVITTELIIKTGNFKTIDTARKAASYAGVCPFPNESGKMVGKRKPSSFADRKLKALLYMGAKTAVKHNPEYSLYYQKKKLEGKPHYLIMNNVSNKILRTIYSVVKNKTPYSQDYLCLDPRELEKNNSSAKKVA

SEQ ID NO: 265009 - protein, 416 aa, unidentified
MDVVHERCAGLDVHKKTVVACVLRSAAKGVIDQEVRTFGTMTADLEALRDWLVECGCTHVAMEATGVYWKPVYNILEQSEALTLLVINAQHLKTVPGRKTDVKDAEWIANLLRHGLLRASFIPDRHQRELRELVRYRTALIHQRAAEVNRLQKTLEGANIKLAAVLSDVTGVSGQRILEALLEGESDPQQLAELAHHRVLKYKREALEQAVVGRLSDVLRFVVRQQLQHLHDLEAQIAACDATVEDLLRPFDTELERLHSITGVGPRTAQIILVEVGMAIDRFPTARHVAAWAGMCPGNRQSGGKRQQARTRKGSPWLRAALAEAAWAASKSKDAYLPALFRRLNARRGKKRAIVAVGHSILVTAYYLLTRGAMYQDLGETYFDERDRQNVVRRSIRRLQGLGYTVHLESADSNAA

SEQ ID NO: 265010 - protein, 362 aa, unidentified
MNVIHYIGFDVHKKTISYCVKTVDGRIVEEGTLQAQRTVLRRWAEVRQQAWCGAMEATLFSAWIYDTLKPYAQQLSMGHPARMKAISAGKKKSDRIDARTIADLLRCDLLPKCYVLPPELRDLRRLLRYRNLVVQQSVRMQNKMAGLLMESGTAFNKEKLHGKKYFASLMKSLEEVPESVKDLLRMSRGSMEMFESTQKQLVKRLLAEPALQQRVERLESIDGVGPITALTWALEVADPHRFSSIAAAASYCGLTAAFRSSAGKQQRCPISKQRNAWLQTALIEAAKLAPRWNPQLAALHAQQLERGHPNRATLQVARKLVAYLLAVDKSGRPFQPHTPTPLPITTKSRKKKKKAAALAPAA

SEQ ID NO: 265011 - protein, 358 aa, unidentified
MERISTQRLDFTGENIYVGLDVHTKSWKVHIYSDEFELKSMSQEPNVEGLYKFLDHNYKNANYLLAYEAGFSGFWIQRAFEKKGVNCKVIHPADVPTSNKEHLRKTDAVDSRKIAKGLKNKELNFVHVPTLEEELDRQLLRNRSTLAKDMTRVKNRIKALLKLHGIPFPEENKQGSWNKAFIRWISEIDFEYKSGEITRNSLLSEYEFFRTRTLEITAAIRKLSQTERYKNNLDLLLSIPSIGRLTGMILLTELGDINRFKRLEELCSYCGIVPNCHSSGQTEKDSGLTHRGNAMVKRVLIECAWVAVSKDPALLLYYKEQIKRMTGTRAIIKVARKLLSRIRYVLLNQQKYELGIVK

SEQ ID NO: 265012 - protein, 356 aa, unidentified
MESMPAAIPPVTVGVDTHLDQHVAAVVDQAGRLCGTQAFPASTRGYVALVTWAERFGPVARIGVEGTGTFGAGLTRFVRAYGFQVVEVNRPDRSTRRRQGKSDPIDAQAAARATLAGVAATTPKTREGQVEMIRVLRVARRGALKARVAAAEQLHGVLYSAPQELRQPLLNLKTKTLVTLCAAMRPGPLTSPTAATKTTLRTLARRWQQLQAELDQLDTQLQALVATAAPTLLALPGIGVDTAGQLLVTAGDNPQRLRSEAAFAHLCGTAPIPASSGRTDRHRLNRAGDRRANNAMWRIALVRMRCHPPTRAYVEHRTKQGLSKLDILRCLKRYIAREIHPHLTSPPRITPTAFPK

SEQ ID NO: 265013 - protein, 337 aa, unidentified
MELYSGLDLHSTNTYIGILDTDFKRVFKKRVANNLDLILQTLEPFRGQLKGLVVESTYNWYWLVDGLMDAGFGRVHLANPSAIKQYEGLKHSDDQHDAFFLAQLLILGILPQGYIYPKEDRPVRDLARKRMFLVKHKTAHILSLQSLIARCCGQRISSNQIRTLTVVDLRQLLKEEYLLLSAQANLNIIAFLIQQIKALEKAIKKKVKLDKAFEQLMTVPGIGFILAMTIMLEVGDIGRFAKVGNFASYCRCVSSQRLSDGKSKGSGNRKNGNRYLSWAFVEAAQLGRRYSQRFCRYYDRKAAQTNTIVATKALSNKLARICYYIMRDQVSFKEELF

SEQ ID NO: 265014 - protein, 386 aa, unidentified
MQYPNDSRRCLPVLDQDRTLIAVIEMSLSSWLVAGIVPGIERQPLKKIEADEHALLKLLHRWHSEAVKAGRKIARIAVAFEAGRDGFWLARWLRAHGIEAHVIHASSVAVSREHRRAKTDRLDTEMLKRAFLGWLRGERDHCKVVAIPSLAEEDAKRPTRERESLVGECGRLVNRMKAAFVRLGIRGFNPKLKKAPERLDALRTPEGESIPPNTVSAMRRDMERLRLVREQIRQIELTRLERLQKAPEEGANAMVRLLARVMGLGIETADMLVQEVLARELRDRRAVARYSGLTGSPDESGRKHRQKGLARAGNARVRRGMIQLAWRFLMFQKNSALAQWFRQRTENAPRTRKTMIVALARKLLIALWRFVREGVVPEGIVLRPAS

SEQ ID NO: 265015 - protein, 350 aa, unidentified
MQGNGRWIGLDLSKETYEMCYFDQKGKVGRSGGETTKGGRAKLYAKVKPEDIVAMEANSLAFVMEKEMRAIGCTVVILNASQLSVIYASTKKTDKEDALKLARLVKIYEKEDLPIVDVPTDKEYYRRKLIKEYKTLKGDRTRESNRLHALFVQCGITTIKRSNVQTEVNRQDVLPQLFEYEARQAKRVCERLRVLEAQIEELDQLIKKECKEDKDIQRLQTIPGVGDKTALAFAAYVGDGKRFNNGNEVANYVGLVPRVDCSGTINKYGHITKKGNKIVRALLYQAAWAIVRSSHGGALKAKYFYLTEHGKGKKISITAIARKMAKLMYLIMKNKEEEYQEVPVSALKAG

SEQ ID NO: 265016 - protein, 366 aa, unidentified
MKKTSTVRVNGNMIFKGHKLTIGLDLGDHWSCYCVLDEAGEILLEQKVAMTPEAMKQTFSKIPQSLIALETGTHSPWVSRLLTELGYKVIVAHAQKVQLITKSSRKDDRHDARTLARLVRIDPELLGPVWHRSAQAQIHLTVIRARAELVRARTALVNAARGLVKSYGQRLPKCGTRQVSRELGAELPAELREVLEPLLKEIESLNERIQEYEVRVEKIAKESYPHVELLKQVKGVGTQIALTYVLTLDDPQRFAKSREVGCFLGLRPGRRDSGESQPEMHISKEGDRYLRTMLVQGAHYILGPFGEDSDLRRWGLKLAARGGKSAKKRAVVAVARKLAVLLHKLWVSGEVYEPLRNSQKAIRAAA

SEQ ID NO: 265017 - protein, 367 aa, unidentified
MREITTTFVGLDTHKVSISVAMLMPSEGKPVEWQCTNDRASVRRMVKKVLRQAPAGVQFCYEAGPCGYALQRWIRKEGAACVVVAPSLIPRKRGERIKTDRRDARKLAELDRAGLLTEVHPPTEEDEAARDLCRARESAHGDMVRSRHRVSKLLLRRGWQWMGGKRAWSQGYRLWLRSLRFEHRADQWMFEDYLLALDQVETRLKALEAQILEVSHDPRYAEAVGALRCFRGIDTITAMSLVAELHDVMRFESPRQLMAYLGLVPSEHSSGEKERRGEITKAGNGHVRRLLIESAWHYRLRPGVAALAKRRAGQPTRVIAIADRAMHRLHRRFNRMVERGKPRPKVVVAVARELSGFVWAALRKDLA

SEQ ID NO: 265018 - protein, 344 aa, unidentified
MYFIGVDHHKQVSVMTVLDEGGRELKNGRVFNLREKVERFLEGYRPFTAVIEAGRSSYVMADLLRELGGEVKMANALQVKAIAHARIKTDKRDSRTLAQLLRADLIPEVYQRGTRNRRAQRVMRMRTYWVRKQTEVKNKIRALLAQQNEEVRVEVGKREEGLFSLRGLEFLTKLPLEDPDKMVLDDLIQGYRETQAHLKKTDGIVRSLYGEIEEAARIDTVPGFGTTLSVLVAVEIADVNRFPTVGDLHSYAGVIPSTYASGERTYHGRITKQGSAWLRWAAVEAVYPAIKKDLGLRVLYSRLAKRKGANVAKIAVARRLLTIIYRLLTEKREYISDMMKSSAA

SEQ ID NO: 265019 - protein, 347 aa, unidentified
MTIVEDRPVITGGVDTHAGMHVAAALDPVGGLLGVQEFPATAAGYASLLSWLRSFGILDVAGVEGTGSYGAGLARHLAAAGVRVVEVDRPDRQDRARQGKSDPLDAVSAARAALSGRASGAPRGRDGAVEAIRALMVAKRSARQERTQAVNQARALIMTGPEELRARFVRRSPAQLIEAIAALRPRPGDVPGYATRVALREPVRRDWFLDARLDRLDDLTGPLVTARAPGLLARHGVGPDTAAMLLVAAGDHPERLRSESSWAHLCGVAPIPASSGKTAGRYRLNRGGDRQASSALWRIVIVRLSSHPATRAYADRRSKEGLSKKEIIRCLKRYVAREVYRQLRNGA

SEQ ID NO: 265020 - protein, 320 aa, unidentified
METPRFVGIDVAKGELVVAALPGEERWTVENDEQGIRTLVERLKRETVALIVLEATGGYELRAVSALANASLPVVVVNPRQVRDFARSTGQLAKTDRIDARMLALFGERVRPEVRVLADEDQHALDALLTRRRQLIEMLSAERNRLGQTLGRGTKLVKKSLKSHITYLERELRVSDTELAEMIRSSALWRERDDLLQSVPGVGRVVSLTLLAELPELGRLNRKEIAKLVGVAPLARDSGTMRGKRMVYGGRASVRAALYMGALVATKYNPVIRDLYQRLLRAGKAKKLALVACMRKLLTILNAMAKNNERWRADTALTTA

SEQ ID NO: 265021 - protein, 348 aa, unidentified
MIIIGVDFHPEFQQIASVDTDSGEFQEKRLVHREEAETFYRALAGQKVRVGMEASGHARWFERLVAELQFELWIGDAAEIRTKRVRKQKTDRQDAQLILRLLLEDRFPQIWVPSWENRDLRQLLWHRHRMVQARTRIMNQLQAVALNEGLRCKKRLWRERGRQQLESFHLAPWASRRRHDLLELMDRLNPTIAELTQAIEQEVEKCPEAKRLRTHPGVGALTALAFVLIIGKAERFGSGKQVASYLGLVPLEESSGNRRRLGHITKQGSSMLRFLLVEAAQVTVRSVPEWRSKYLHLMMRRGRKTAKVAMARRLAVRLYWMMRQGWDYEQVKKFGSHAGQPGHRDGVQ

SEQ ID NO: 265022 - protein, 428 aa, unidentified
MSNQEIIRRKQYCQIVKEITGSDQYLVVGIDVGKDKHHAFMGSATGKSLFRKLIFENNLDGFSRLLKTAEEIKVQNGLSKSVYGVEPTGNYHKPLARHLIRCDCYVVLVSGVAVKRNRELLNGRWDKNDTKCAANIADLVSRKRCLYYDCPSPSIIELRSLLSLRRRLKKEEHGLRMRIRNNLLAQYFPELDRFYSACESENLAIVRWCLNPDTIAAMEFDEFFRRVTRTHRGIAQTLRLRKIHSLATESVGCPMGAGVEYEADLLVEKLKQVRRQVKKTNDLIEDFCLEFAEYSYLLTIPGFGPYISARVLASIADPFRFENRKQLIKLAGYDLCADRSGKTSDKAVPVISKKGNNELRYALYQAAHVAAAKVDLFRTYFTRLLRGRERERGIKTKMRVKLATKMLVIAWTLMKKREVFDPAHLSVD

SEQ ID NO: 265023 - protein, 350 aa, unidentified
MLIIGCDYHPSFQQIAFADTGTGELQQRRLGHREEAEQFYRALATAGDEVRVGMEASGHAGWFERLLAELNFELWMGDAAKIAAKRVRKQKTDRLDAQHILTLMVKDDFPKIWVPSWENRDVRQLLWHRHRMVQTRTRIMNQLQAAALNEGLRYKKKLWRETGRQQLESLPLAPWASRRRQDLLDVLDRINPTIAELTHAIEQEAKKCPEAQRLMTHPGVGALTALAFVLILGETERFDCGKQIASYLGLVPEEDSSGERRRLGHISKQGNSLLRFLLVEAAQATVRSDVRWRSRFFHLAQRRGRKIAKVAMARRLAVRLYWMWRREWNYTQLESCGSHAGQLGNRHGVK

SEQ ID NO: 265024 - protein, 386 aa, unidentified
MKDLLEISCGLDVHKDKIVACILSGPIGKTTVSEIREFTTLIPDMAALRDWIVSCNCHHVAMESTGIYWQPIYEILEDAYSGDITLLVVNARHMKNVPGKKTDMRDSEWIATLLRAGLLNGSFIPDKQIREFRYLNRYRKSIIRDITSQKNRVEKFLQSSGFRLSTFISDIFGASGRNIICHLIQHGCIDRESLDSCLKTKTRNHINEILVAVNGTLSQIQQDFLEMLMDHYDSLKSHLAEIETALEEAMAPFSLHIEQLTSIYGINTTASCAIIAEIGTDMSYFKTAEHICSWAGLCPGNNESAGKRKSTSITKGNPYIKSMLCEIAWVIAGKRNTYLSAWYWRIKQKKGAKKAIVALARKLLVIIYTMLKQGKRLIIHRLARSM

SEQ ID NO: 265025 - protein, 408 aa, unidentified
MDDITYVGLDVHKATVCVAIAEGGRGGEVRQVGVFENRPDILCKLAARLDKGNRRLSFCYEAGPCGYGLQRLLTSRGHDCIVVAPSLIPMKSGDRVKTDRRDAMMLAKLHRAGELTAVWVPDAAHEAMRDLVRARATAGRVLAKARQHLQGFLLRHERIYRGPRAWTLAYRRWLTTVRLDHPAQQIVLQDYIHAVEDAEARRDRLTRQIEELLPSWSMAPVVEALQAMRGVGLVVAVTVAAEVGDFRRFANARQLMAYLGLVPSEHSSGAAIRRGGITKAGNALARRVLIEGAWTYRMKARVSRKLHDRLEPLSTEIRDIAWKAQVRLCARYRRLAALGKPSVVATTAIAREMVGFIWAIARRVQSAVEDQRTHSAHAEAPMLTAAAKPCGLPLRLDDADASPTTPQG

SEQ ID NO: 265026 - protein, 338 aa, unidentified
MTEASILYVGLDVHKDSIDIAVAEPERHGEVRHVGSIGGDLAALDKALRRLSGRGHRLHVVYEAGPCGFVVQRHLAAQGLACEVVAPSSVPKRSGDRVKTDRRDAMMLARLCRAGELTAVRVPDIVDEAVRDLVRAREDAVREQRNARHRLKALLLRHGIRYAGKSAWTAAHLRWLADVALPQPAQQIAFQEYLHAITESGLRIARLEQAMRELLPCWALRPIVQALQGMRGVQLLAAMTLAAELQDFVRFVHPRQLMAYVGLVPGEYSSGAKRRQVADDNYLGRLTTTILAGGRPVPGRSGRRGYRELMNAVQRRTGCPARGSRTIRCSSTRTTARR

SEQ ID NO: 265027 - protein, 421 aa, unidentified
MFSDTDLIVGVDVHRRTNVTQMMDGQGDVVDSGRCFANNGTGTRQLARHLARLTDSGGFAAIHIAAEATNNYWLPFFCQLSQSPQLASWPVELYPFNPRVVHNFKKALGDIEKTDDLDAAVTAERLRFGKELPRPFKMDELYLPLRALTRYRYHLVQELVRVKSYCFSQVYLKATNYSDKGKKPFSDVFGATSQAVLREFATLDTIANMPFDELVEWIDVKGKRRFPNPEENARKLQQVAHDSYLLPHEWAEVIHDIIALNLRHMTLLGNLIQRVETAITEQMQSIPNTLETIPGIGPVLSAGIIAEIGDLARFDYNEAKVASFAGLKWPRSKSADFEAEDTKMSRSGNRFLRYYLCEAAQMVRMHAPEYRDYYDRKYKEVRKHQHKRAIVLTARKLVRLVVRLLTTNEPYRLRRVSSDKS

SEQ ID NO: 265028 - protein, 383 aa, unidentified
MKKTEETLQEKNITKKQLLHVAFELSNSNWKLGFSDGNKMRFKSTSARNLEQLEEEIEKAKSRFRLDNDVRIVSCYEAGRDGFWLHRYLLSHGVENVVVDSSSIEVNRRKRRAKTDRIDARKLLRMLMRYHGGERKLWSVVRVPSVEAEDGRQLGRELESLNKERTRHRNRIRGLLIREGLEVKNPSGKKFLEELDSLYTWDGKQLPNDFKAQIVREYERLRMVEEQMGNLRKEREARVRSADTLSMRKVAQLRTLYGIGVTSSWDFVMEMFGWREFRNRREVGAFAGLTPTPYDSGGSQCEQGISKAGRGRVRALNIQIAWGWLRFQPQSKLSLWYMERFAGGGSRMRRIGIVAVARKLLIDLWRYLEYGLVPEGARLRPVK

SEQ ID NO: 265029 - protein, 367 aa, unidentified
MKKGSTTLARQSRKNSQQKLTIGLDLGDRNSWYCVLDEAGHIQLEQRVRTTAKALREVFSAMPRSRIALETGTHSPWISRLLRELGHEVIVANARKVRLIGESRKKDDRLDAQTLARLARIDPELLCPVKHRSAKAQADLMMIRARAGLVRVRTGLVNTARGLAKSYGERLRGCNVRNMNAEKAEGLSPELQAALQPLLAALESVSERITEYNERIEKLAQARYPQVAVLKQVKGVGTLIALTFLLTLEDPHRFSKSRDVGGYLGLQPGRRNSGQSEPQLHISKEGDPYLRTLLVQGAQHILGPFGVDCDLRRWGLKLAERGGRNAKKRAIVATARKLAVLLHHLWVSGEVYEPLHNSCRVAVTAAA

SEQ ID NO: 265030 - protein, 341 aa, unidentified
MEKYVGLDVSMEETSVCVLDGGGNIVFEGKTSSQPDALSKLLRGKASDAARIVLETGSLASWLWHELRGRNFPVICLDARHVRAALSMRVNKTDRNDARGLAELARMGWYREANVKSTESRYTHSLLAARAKLVDLRRDVENQMRGLLKGLGLPPGKAGIKALLEKIVVIMREAPHLRTLFNPMMLAHSALVTQVEFYDVQILKLAKGDETTRRLMTVPGVGPATALAFRSTIDDPNRFKSSSDVGAYLGLTPRRYQSGELDRTGRISKRGDRLTRLYLFEAASVLLSVVKRWSILKAWGVRLAKRVGIKKAKTAVARKLAVVLHCIWVDGTEFQWGKEKA

SEQ ID NO: 265031 - protein, 352 aa, unidentified
MKIIGCDFHPSFQQISMLDEETKQRVRKKLHHASGEAEQFYRNLQGQSVRVGIEACGNTRWFERLLQQLGHELLIGDAARIRAAAVRKQKNDERDADHLLELLEIGKFPAIWVPSPEERDLRQLLLHRHKLVQLRTRIKNQLQHVALDQGLQKKRQLWTERGRQWLLELQLPPWTERRRGDLLLLLEGLEPAIAELSQAVEAAAQRDPRAQLLRTHPGVGPITALAFVLVIGDVQRFAHSNQLASYLGLIPSEDSSAGRRRLGAISKQGNTLLRTLLVEAGQSAARWDPQLKRAYQRCCHRKSHTGIGKVMVARKLAVRLYWMLRSHQPYTPARMQGSPSHPVSTRSGSSIV

SEQ ID NO: 265032 - protein, 337 aa, unidentified
MNTYCGLDLGVKSSVFCIVDEKGKLIAEAEIPTDEKCFERAFGRADMMRVVVEACPLAEWACQLLEELGHEAIIIDARHAKAVIRTKKKTDRIDARKLAQISRTGWYTKVHRKSPAARELRSKHTIRKGLINIRKGLNSQMRGIFRAHGVRVGAVSEGDFYEHIEKLQLRLPEGLRAGMAVLLRVWDQVSRELHELTKRLKEEVKQDYLCRHLMGADGIGPITASTFIATIDDPYRFQDSDQVAAYLGLVPRVYESGETRYLGRITKEGDGLLRSLPVESATVLLTRVKRRSRLKDWGQRLQKEKGFGKARVAVARKLACLLYTMWITGECFDPAMV

SEQ ID NO: 265033 - protein, 406 aa, unidentified
MNAVGIDVSKGKSTVTIRRPGDEVILPPCDIRHTRSAIDALISEIKSLNGETKVCMECTGRYYEPMATWLTDAGIFVSTVNPILIKAYSDDDSLRAPKTDKADSKKIAKYTLDRWAKLKQYGHMDEIRNQLKTMNRQFGFYMDQKTSMKNNLIALLDQTFPGANDFFDSPARSDGSQKWVDFVYTYWHVDCVTGKTLDAFTDHYHKWCSRKGYNFSSAKAKAIYDVSKELIAVFPKDDVTKMIVHQAVHLLNAASKNVEMLRAKMDESASKLPEYPIVMNMNGVGSTLGPQLMAEIGDVMRFEKRGSLTAFAGVDPGKNESGQYVQKSVRTSKKGSPNLRKTLFQIMDSLIQRAPAGDAVYDFMDKKRAQGKPYYVYMTAGANKFLRIYYGRVKEYLESLDANQTE

SEQ ID NO: 265034 - protein, 357 aa, unidentified
MSTKSNKSIANIAVIGIDIGKNSFHVVGQDERGAIVLRQKWSRSQVGARLANLPPCLIGMEACVGAHHLTRRLVALGHDARLMPAKYVRPYAKGQKNDFNDAEAIAEAVQRPTMKFVATKTVDQLDLQALHRVRARLVSQRTGIINQIRAFMLERGIAVRQGIRFLRAELPVILAQPDDALSPRMRRIIEDLATDWRRLDERIDSVSAEINDIAKQDSGCARLMSVPGIGPIISSAMVAAIGSGDGFSKGRDFSAWLGLVPKQFSTGDRTILGKISKRGNRYLRVLFTQAAWVVLVKPQSWERYGLKSWIDAARKRLHHNVLAIALANKLARIAWAVLAKDRDFEVIGKPEVTPQPV

SEQ ID NO: 265035 - protein, 341 aa, unidentified
MSVVSIGLDLAKSVFQVHGVDASGHAVLRRKLARGGLIAFFTKQPRCLVTMEACSSAHHWARELVRLGHEVRLIPPQYVKPYAKRNKTDAADAEAICEAAGRPNMRFVPIKTREQQSVLVLHRVRALLVRQRTAAVNAALGEFGLVVGKGIRKVDELRQRMDKLEPELLPDEARSAIGCLFDHIDGLGERIGAVEARIIAWHKSSEVSQRLASAPGVGPMTATALVAAVGDGRQFRSARHFAAWLGLTPRIQASGGKERIGRISKGGDRYLRTLLVHGARAIVGTTFRKDVAPRPWLTALIGRRPVNVAATALAHKTARALWAMLTRAETYRRPSAVPAAA

SEQ ID NO: 265036 - protein, 341 aa, unidentified
MEEYVGLDVSMEETSVCVMEAAGEIIWEGKAATEPGELVRVLHQRAPTAVKVGLETGPLSTWLWHALRAAQVPVVCLDARHAQAALSMRINKTDKNDAAGLAQLVRMGWYREVKVKQLATHVEGALLASRALLVRQRCELENQIRGLLKNFGLRVKATKGRAFGQSVAALAQKQPVMREMILALLAAWASLRLQIVVLSRRVEQQAMGDPVCRRLMTMAGVGKLTALSFRATIDDPGRFRHSADVGAYLGLTPRRYASGEVDRMGRISRCGDALTRSYLYEAANVMLTRSRGSNPLKAWGLKLAKRAGWKKARVALARKMAVVLHCMWRDGTDFGAPKANP

SEQ ID NO: 265037 - protein, 283 aa, unidentified
MFFLNPNSCKGFEPVPSKEGSWMMAQNDLVVAGIDVAKDKVDVCIRPLPLRRTFASTAEGRRELVSWLRRKKVGKTVMEASGGYEREWAKALRGAKIEVRIVDPKRVRDFARSAGRLAKNDTIDAEMIAWFAETFGEAPGQAYDAERDKLAQIVNARLGLLDIQTEMLNRGEHAGPEAVQKMQARMLKNIAVEIAKLEAVIAAMIEATPNFAERAEIIESVPGLARTTSATLIAKMPELGQVNGKIGAALLGAAPYDDDSGRRRGERHIKGGRRKVRNAFYMA

SEQ ID NO: 265038 - protein, 347 aa, unidentified
MTIIVDTQRALTGGVDTHADVHVAAVIDPQGGLLGVESFATTLAGYKLLSGWMGAFGEIALVGVEGTGSYGAGLARHLRREGLMVVEVDRPNRQERSRAGKSDTLDAIEAARAAQSGRAFGVAKTRDGNVEAIRALMVARRSARESRTKAINQIRQLVYTAPDELRERFVGVPSWRIAEGVAILRVHADADPVRMATKSALGTLGRRAVALGEEGKRLDVLIARLVDKVAPELVELVGVGPDTAALLLIAAGDNPSRLRSEATWAKLCGVAPLEASSGKVTRHRLNRGGDRQANSALWRIVLTRMSCHEPTKVYVARRIAEGKSKREIMRILKRYVAREVYHYLPRD

SEQ ID NO: 265039 - protein, 413 aa, unidentified
MVQVVHERCCGLDVHQKTVVACLITPGPDGQPQKVIRTFGTMTADLLELADWLRAADCHPVAMEATGVYWKPTWNLLEDEFALLLVNARHIKAVPGRKTDVKDSEWLADLLRHGLLRASFVPDRPQRELRELTRYRTSLVGERAAEIQRLHKTLEGANLKLGSVTSKVLGVSARQMLDALLAGTTEPAVLADLAKGRLRAKRPQLERALAGQPGLHQHFLLAQQLAHIDFLDETLEQVSAEIAKRLHPFEAAVERLDAIPGVGRLTAEILLAEIGPDMSRFPTAGHLAAWAGMCPGNDESAGKRRRGRARKGSPALRTALLEAGQAAARTKDTYLAAQYHRLVPRLGKKKAAFAVGHSILRIVYYLLLRDTTYVDLGGHYFDERYRQQRERRHVRGLEHLGYAVTLTPKEPAA

SEQ ID NO: 265040 - protein, 338 aa, unidentified
MSIVFVGIDLAKNVFALHGVNATGAVQLRQPKLARSKLNEVVAALPPCIIGIEACSGAHHWARLFAAHGHSVKLMAPKLVTPYRMSGKRGKNDAADAAAICEAVQRPNMRFVPVKTEERQSRLMVHRARQGYVAARTACINRVRGLMSEFGIVLPQKAEVVRREAGKHLEELPGYANLVIGDLLSEVHHLDERIQQYDAHVRAMARDCTAAQQLMQLCGVGQTTATAIVAMVGNGAEFSSGRQFAAWLGLVPGQYSSGGKARLGRITKAGDAYLRSLLVLGARAVLNAAAAKADSLSRWALAVRERRGYWKAVVAIAAKNARMAWAVLTKGESFRLPA

SEQ ID NO: 265041 - protein, 345 aa, unidentified
MSRFAVAGGDITGLFSCFASLRQKVQRRKDRLYPLVVIQEAGLDGFWLGRVLSKETWIESHIVEAASIAMPRRHRRAKTDRIDGETLIRALTAWKRGEPRACSMVKLLTPDEEDIRRLGRERKTLIAERVFHVNRIKGLLFTQGIREYEPLRRDRRQRLEEARTGDGRMLSKHLKAEICRELDRLELLLTQIKAVEADRDALIARETAETPPRAAALLGIRGIGPEFATILYSEGLFRHFDNRRQVAAYAGLAPSPWQSGNVNREQGVSKAGNPRLRATMVELAWLWLRHQPNSALALWFKERIARNSGRLKQPMIVALARKLLVALWKYVSSGVVIEGAIMKSA

SEQ ID NO: 265042 - protein, 424 aa, unidentified
MNAVGIDVSSRKSTVAVLRPLGEVVCLPFDVTHDIAGLASLVEKLKALDGETRVVMEHTGRYYEAVAKALHEAGLFVCAVNPLLIKEYGANSLRRVKTDKADAVKIARYALDNWADLRDFTPMDAIRYDLKTLNRQFQLASKQRTASANNLIALLEQSFPGIRKCFDSPVRSDGTQKWVDFAHSFWHVDCVRKQPFAAFCERYRKWCKRHAYLFKLSNAEEVYALAKSAVVLTPKSKVVKVLVQEAANQLSSISRSVEVYRAEMDRLAAMLPEYPVVMAMYGVGKSYGPQLMAEIGDVRRFERKQALVAFAGIDPMPNQSGDKNVRSNKSSKRGSPYLRKTLFNVIRTYLQCAPQDEPVFQFLNRKRAEGKPFYVYMLAAANKFLRRYYAKLRDYFASLDTLQLRTPLSKITSTGEIEQRFRLN

SEQ ID NO: 265043 - protein, 417 aa, unidentified
MLKYAALVGIDWSDAKHDVCLLDCASGRREPAVIKHTPEELDQWADSLRRRYPGQEVAVCLEQARGPLIYALLKYDFLTIYPVNPKTLAKFREAFTTSRAKDDPGDAAYLADLLALHRDKLKAWLPDDEKTRTLQYLVEHRRRLVDDRSRISNRLTSLLKGYFPQVLDWFPDICTKLVAEFLSRWPSLGSLKRVHDTTLRRFFREHHSTRQQVVDLRIVRIRSSVPLVTDRAVIAASVVMARALAAQMKATVEAVAEFDRQIERLCQAHQDYEVFASLPGSGTVYSSRLLAAFGTDRTRFASAERVACLAGVAPVVERSGQSTWVHWRFCCPKFLRQSFVEYAGESVRHSFWARAFYMQQRAKGKSHQVAVRALAYKWIRIMYRCWQTRRPYSEVEYLESLRQKGSPLLKYAAESPA

SEQ ID NO: 265044 - protein, 349 aa, unidentified
MKQILKQVLGVDVAQKELVVTLRKMYDDLTLDLYAYKVFKNNKTGFATLLKWLKPIIDKDIKLQFVMEATGVYHQKFAYYLDEKGCNLTIVLPNKISNYMRTLEVRTITDKTASQAICQFGLERKLECWIKPKKVYKELQQLTRERSQIVDERVIVKNQLHAENTEAEPNKSSLKRLKARIKFLNQQEKEIKVEIQDIVNKDAELKKELENICTIPGVGILTAVIVIAETNGFELIRNKKQVTSYAGLDVKEKQAGTSIRSKPRISKKGNRNLRKAMHLPSLSAVKYNKNHKELYVRLIAKSGIKMKGLIAVQRKLLELIYVVYKNKKGFIQNYEQQKRATPLEMETAL

SEQ ID NO: 265045 - protein, 378 aa, unidentified
MSSENTLHIAIELSLSSWLVAARPSGSERPRLHRLEGGNTAALLALIAELRSAAATRLGGPVGVACCFEAGRDGFWLHRVLTAHGVAAYVLEPTSILVNRRARRAKTDRLDAEGMLRVLVAWLGGDRQVCSMVRVPTPDEEDAKRPHREREHLVQERLRIENRLEALLFTQGIRGRPSLRSWERDMAELRTGDGRTLPPLLRAELDRLRRRLVLVLELIHEVEAERAAALAASTNDTMTRKIVALQRIRGIGENFAAVLGRELFYRTFDNRRQLASYVGIAPMPYQSGGMDRDRGISRAGNPRARTTLIQLAWLWLRYQPGSALAGWFRQRVGTLAGRTRRIAIVAMARKLLISLWRFVETGVLPEGVEIRTAALPAA

SEQ ID NO: 265046 - protein, 388 aa, unidentified
MQFAADRLEAPTAIRTDLGAIFISLELSRSSWVVTSLSPGGGEKMSKHTVRGGDVAGLLKRFAQLREKAKGRTGKVFPLIVIQEAGLDGFWIDRVLQNEGIESHVVDPASIATSRRRRRAKTDGIDGEALVRALLAYKRGEPRVCSMVRLPTPEDEDRRRLCRERKVLIMERVQHVNRIKGLLFSQGVSGYEPVRCDRRERLDALQTGDGRALPLHLKAQVRRELDRLELLLAQIKAVEAERDALLAAEQTKAPVAPAMLLGVKGIGPEFAAVLWSEGLSRPFENRRQIAAYAGLAPTPWQSGSVDREQGISQSGNPRLRTTMIQFAWLWLRHQPDSALALWFHDRVKRNGGRLRKTTIVALARKLLVALWKYVTAGVVIEGAAMKTA

SEQ ID NO: 265047 - protein, 419 aa, unidentified
MKVVYPICCGVDVHKKFIVATIIKTEGITLKYAKKRFSTFNNDILRFKRWLLDNDCRDVCMESTGKYWVPVYNLLEDEINVVVASPKWVRAVKGNKDDTKDSKWIGDLFRLGLVPGSFIPPKPIRILREYTRYRYKLVSCKSSEKNRYQNSFTVCNVALDSVVSDMFGKSASLITDYLIETDNFDPEHVKTLLYRSLKKKYEAVIDSIVGYEIAPAQKERMIMVKSHLEYVERAIEMVDEGIDRLVEPYESHISLLCSIPGVDRRSAITIISEIGIDINQFSSPKRLCRWAGLTPGNNESAGKKKSVRITRAGVYLKPALVQVAHAAVKSNENPYYKNKYERISKRRGKKRAIIAIARMILTAVYNMFKTGELWNPVDLFKVDMPSVLMEKQKQKAVQNAIKLLTSQGITVIANTVPAA

SEQ ID NO: 265048 - protein, 328 aa, unidentified
MDPTTTTTALLFAGVDVSKDRLDVCLRWSEPESHHREEAFVVAYDDNGIDALLSRLLEEPTVLVVLEGTGGLERTVVGALAAAGLPVVVVNPPQMRDFARATGRLAKTDRIDASILARFAEAVRPAPKPLPDREIRALQAIVARRRQLLGMIAAENNRLSSATKAVGKRIKAHIRWLEKELSRTERDLETAIESSPALGENEALLRSVPGVGPVLARTLLAEVPELGTLTHKRVAALVGVAPLNRDSGTLRGHRSVWGGRAEVRGALYMGALVAARRNPVVKEFYERLLAAGKPKKVALVACMRKLLSILNAVLKHRTPWRSPQYLSP

SEQ ID NO: 265049 - protein, 359 aa, unidentified
MAVMEGSRHRVVGGVDTHKDLHVAAIVDEQDRVLGTQCFATTRQGYRQMLTWMRSFGSVQRIGIESTGSYGAGLLRFMQSAGIEILEVTTPDKHDRRRRGKNDDLDAQNAAHAAFAGRRTVTPRSRGGMVESLRVLTVCRKTAVAARRVALQIIQTTIVCAPDGLRDMLRSMTRMQLVRTLAAWRPDLTAYRDVEEAYRISLKSLARRYLELHDEIADLDAMIGAIVNDLAPELIARNSIGHTGAAQLLLTAGDNPERLRSEGSFAALCGVSPVPASSGKTIRHRLNRGGDRAANSALHIIAIGRLRTDPVTKTYVAKRIAEGHSKLDAIRALKRYIAREVFHIITRRHKQINQSRIAA

SEQ ID NO: 265050 - protein, 344 aa, unidentified
MTIVETRAITGGVDTHLDVHMAAALDPIGGVLGVESFLATAAGYAELFEWMSSFGSVTRVGVEGTGAYGAGLARFLRRAGVVVIEVDRPNRQMRRAQGKSDPGDAVEAARAVLSGRARGLGKSADGPAEAMRALLVAKRSARETRIRALNQIRHLSFTAPDELRERFRAVRSGALAPRAAALRPQPGDPVLYATKLSLQTLGRRVLALEDDDTRLDALLAELVTASAPSLLELYGVGVDTAAILLVTAGDNPERVRSEAAWAHLCGVAPVPASSGKITRYRLNRGGNRQANHALWRIVFTRMSGDARTRAYVARRLDEGRSKPEITRVLKRYVAREVYRHLPRG

SEQ ID NO: 265051 - protein, 350 aa, unidentified
MKRPIEKLIAGIDLHSNNLVIGVMNQDGKRIAHRKLDCELDQVLAFLQPMKPRLQSMAVESTFNWYWLVDGLHAQGYPIDLANPAQIEQYSGIKNADDKHDAFHLAELQRLDILPKAYIYDVELRPVRDLFRRRTNLVHQRTALFLSFKSLYTRTTGQAMPLAQLKSMEPKEAKTLYEHPANQLIAQVQLEHIEALDKSIVRIEKAVLGCAREIPLYQKLLTLPGIGKILGMTVTMEVGDIARFKTDGDFASYCRLVDSRRLSNGKQKGQNNSKCGNKYLCWAFVEAANFAKRSDEKCRRWYDRKKAKTSTVLATKALACKLAKAAWHVMARQTDYDASRMFPELAQKKK

SEQ ID NO: 265052 - protein, 395 aa, unidentified
MNEPDRFSIAIVRIFLLNGGRPHMMGWTAPDPAASQCAKMALSKDHQREGTVRMQVITIGLDIAKNVFQVHGVDNAGNAVLRRKVRRDQLIPLLRDMQPCLIGMEACATAHHWARELIALGHVVKLMPPAYVKAYVKRNKNDAADAEAICEAVTRPTMRFVAVKSADAQSILMLHRARHLLVRQRTAQISAMRAHLAEYGVVAPKGRAHVRGLIEALDKGDGPLPAMARQVLILLARTIEGLGAQIRKIEIELLAWYRTNQVCRRLSTIPGIGFITATALAATVVDAKVFRSGRQFAAWLGLVPKQHSSGGKDRMGGISKMGDRYLRHLLVVGATAVIRYTRRKATTVSTWANQLLERKPARLVTVAVANKVARIAWAVMAREENYRATPSMARG

SEQ ID NO: 265053 - protein, 346 aa, unidentified
MEHYAGIDVSLELSSVCVVDAQGKIVRETKVASEPEALVAFFASLGFAVKRIGLEAGPLSAWLHAGLKRAGFDTVLLETRHVKAALSAMMVKTDRKDARGLAQLIRMGWFRPVHAKSMGSQEVRALLVARKQLLGRLIDVELSIRGILRGFGLKVGVVTRKGFEGRIRELVTGHITLERIAGAMLSARATLKVEYEKLHKTVLTVVREDAVCRRLMTVPSVGPIVAITYKSAMDDPNRIAKSKAAGALFGLTPKKYQSGEKDVTGGITRAGDEMVRTALYEAANVLLARITRFSKLKRWGMDVAKRRGSKRAKVALARKIAVILHRMWVDGTTYRWTDTQPVAVQV

SEQ ID NO: 265054 - protein, 347 aa, unidentified
MSNAISDKQWVGVDLHLHRSVIVRIDEQGKEVDYLRIDNDPKALVREVRKAGRGAPVAIEATYGWYWAVDALRQAKFEVHLAHPYGMKRMRKTKRVKTDRADAYELANLMRLGSLPEAWIAPPELRELRELVRHRQQLVKAQTSVKAGVRALLAKHGVRLAATRLESLIGKEMLDAVELPGIYAQRLESQRRLLMLLGQEIDLVEVELDRRLKDSKDYRNLLQVKGIGPTLAAVFVLEIGDVSRFRSAEQLCCWAGITPRHYESDKTLHRGHISKEGCKLVRWAAVESVNHPCEPAALAVKQRIIARRGNSARNIAKVAAARRMLEIVFYVLRDGTARCLTPAPEAA

SEQ ID NO: 265055 - protein, 344 aa, unidentified
MSTFAALDVSQETTAVCVVDDDGRTVAERKIPTCPEAISSFLTRHASGLNRVGLETGPMAVWLWNELHDRGLPVICIDARHANAALKVRPNKTDRNDAAGLAQIIRIGWFKQVRIKSRINYELRSLLAAREVLVRSRVKIENEIRGLLRTFGVLFGKAAGGFASRIDQIVVCELDASPMMRTIVGALAKARAAMLERIKELDRQILAAAKADTTVRLFMSVPGVGPITALSVASAFDDARRFKRSSSAGAYLGLTPKRYESGEASRNGRISKHGNKMTRKHLYDAATTMLTRTTRFCSLKAWGLRLAKKVGFKKARVGVARKLAVVLHAMWKTETPFRWSATAP

SEQ ID NO: 265056 - protein, 426 aa, unidentified
MNEEEDTRLREFRQLKKEIRGSREYLIVGIDIAKEKHHAFMGTTFGKTLLKRLIFENTLEGFRKLLIQVEAVQAKYGLEKVAYGMEPTANYHKPLGEFLIRKGATVVLVSGVAVKRNRELLDGRWDKHDDKDSANVADLISQGKCLFYEYPDSRLRELRSLLALKRKLKKQEHGYRVRIRNQLVAQYFPELDRYSGRPEMEGIVRWCLNPVEIAESGKDQFIKLVAPGRKTLAQQRRLQTIQEMAGDSIGCEMGEGVKIEAEVMIEGIRHVREAIKTTEAKIEELCKGFPEYACLLSIPGFGPDVSAKVLGALGNPHRFLNRKQVLKTAGLDLSADRSGKGSQNAVPIISKQGKADLRYALYQAALIASTRNLIFMQRYTQQLQGREKEPGIKTKRWVKLSARLLVIAWTLMKKQELFDPGYINQE

SEQ ID NO: 265057 - protein, 348 aa, unidentified
MKYYIGLDAHSTTSTFAVVDENGQCVLRETVKTSEQSLVRVINKVVGEREMTFEESSISQWLYLQLKDKVENLLICNPTYIAKKHGAKTDFRDALHLAQELRTKHLQPVFHDASHWMEIRTTVSGYLDIVEEIVRFKNRLKALFRAEAIPTDENSFYKNQVRVKELKNPSAKFVAEKLFRQVEFLEGEKEKFKEQFDKNRKKYRPIRNLMTIPGISIIRANIIAAIVCQPARFENKHKFWGYCMLVRHIQESGGKIYGNKRFFGRRELRNIFIGAAENVIRLDGELRDRYDALRAKGVDHKDAKLNLARQIASIALCLLKNNDKYNENYTEYLKERKKTQKEFFDQSL

SEQ ID NO: 265058 - protein, 344 aa, unidentified
MSEIVTIGLDIAKSVFQVHGVDAAGQVVVTRQLKRGQMLKFFAALPPVLIGIEACGTAHHWGRQLQNLGHDVKLIPPIYVKPYVKRQKNDAADAEAICEAVTRPTMRFVEIKSVDQQAGGVLHKTRALLIKQRTMMFNAVRSHLAEFGLVTGTGVAQVVRMVDRLAKGDELDLPELARETLGVLARHIQELQDKLTGIDKQLTRLHYRNDVSNILETIPGVGVITASALASMVTNAQSFRSARHFAAWLGLVPRQNSSGGKTRLGKITKGGNRYLRQLLVVGATSVLRHVRAGSVKGFEWAKALLDRRPPKVVAVALVNKMARIAWVVMTRGVEYERKELAIAA

SEQ ID NO: 265059 - protein, 439 aa, unidentified
MGNYAGVDWASEKHDVLVADAAGERLLSATFAHDEQGLRSLCRALVRLEVELVAIERPDGLLVERLLDAGLRILPLHPNQVAATRDRFRASGGKSDRFDAFVLCELARTDHHRFRVLEPDSDQTKALRALTRAREDLVGTRTALTNQLRAELARFWPGPLGLFRDLHSRISLAFLERYPSPADARGLGEARLHGFLVREHYTGRQQPAQLLAKLRRAPAARIGELELATRRQLVLSLVATIKALNGQIKQLEAQIATAMREHPDGAIFLSLFKKASSVICAAELLAEIGDCRARYPTRDTLAADAGQAAVAIESGKRKAASFRWACNKRLRGAVCTLADTTRHHNPWAQDLYASARDRGHDHPRAIRTLGRAWCRIVWRCWQDGVPYAPARHRALQQHITVTIPTLSGPVVDHPATQRMLADAFATAANPREQEVTAAP

SEQ ID NO: 265060 - protein, 309 aa, unidentified
MVAYSSDKGGEIRTFNNTTAGIKQFIGTLPKDGSIHCVMEATGNYSALLLYMLNVAGITVSMENPLKVKNFARAMLSTVKTDKIDARLIALYGEKMNPQPFKVQGEAILRLRQKRTVIRQLTKQITAMSNLRGSLACLPVPDKGATHTVDETIKFLEKRRDRLQSELTDLVEVEFSRQLALLTTIKGIGITLATALILTTGGFTYFQNAKQVSRYLGICPTYEQSGTSVNIRGHINRNGDAYTRGLLYIAAWPASRFNAQCKETYTRLRQNGKPGKLAMIAVANKLVRQAFAVVAHDKEYIDGFVSNRP

SEQ ID NO: 265061 - protein, 347 aa, unidentified
MSLSSWLVAGLIPGVSREPLKKIDPDPERLLRLLYRWRDEAVAAGSKINRIAVAYETGRDGFWLARWLRNRGIDAHVIHATSVAISREHRRAKTDRIDTAMLRRGFLGWLRGEPGHCSMAIVPSIAEEDAKRPHRERDTLIHERTSIVNRMKSILIQFGVRNFNPVLRKANEKLDAVRTPEGIPLPANAVAALRRLMDRLRVIKEQVKAIEQTRLQRMQRNPADRMNAMVFLLVRIIGMGVETAEQLVREMLFRNFHDRKAVARYAGLTGSPDESGSKRREKGLSRSGNGRVRNILIQLSWRMLQFQPDSGLVIWYKKRTESARGSRKPMIVALARKLIISLWRYLC

SEQ ID NO: 265062 - protein, 432 aa, unidentified
MDQAVAAVAFGDLDHYAGFDWATEKHDVVVVARDGSVVRQLTLEDTAAGWARLREQMAGLGKVGVAIETSRGPEVERLLEMGVTVFPMNPKAAERYRDRKAPSGVKDDVLDAWSFADALRTDGQAWRPLRPEDPQTQLLRLLCRDEIGLIEQRTALVLALQAALREYYPAALEALDNWAVASSWDLVIQFPTPAELAQAGKRRWNNFLHSHRLYRPETAGNRLAIFARAAQFASHNPAVIEAKSLLAVSLAKQLRTLEGQIDEYRRRIEKLFNDHPDSHIFKSLPGAGAKLAPRLLGQIGADRAVFASAEALQSYAGTAPVTKQSGKSRQVHIRRMCDKVLRTTVHLWADQSRHFCAWAQAYYQRKREEGHGHATALRCLGQRWLKILFRMWQDQVPYDEAKHMLSMTRHGSWVLGHLPQPPSALAPRTLTT

SEQ ID NO: 265063 - protein, 346 aa, unidentified
MEHYVGLDVSLKLTAICVVDQTGSVTREGVVDSDPETIAEFVTSNAPSVVRIGLETGPTATWLWTELKQLGLPVICIDARHAKAVLKMQINKSDRNDAAGIARIMQTGWFKEVRVKDLDSHSVRALLASRALLVKIKRDLENQVRGLLKNLGLVIGRAKLNVFAVRAEELIDGRPELMAAVRPLLDARNAIEQQVDGLDRKVMRLARNNAQVRRFMSAPGVGPITALCFLATIDDPTRFKRSRSVGAYVGLTTRRYASGEVDWTGRISKCGDAMLRSYLYEAANVLLTRVAKWSTLKAWGIRLAKRSGLRKAKVAVARKLAVILHRMWIEGTEFKWSSKEAANQPA

SEQ ID NO: 265064 - protein, 343 aa, unidentified
MEQYVGLDVSLEQTSICVVDGSGKALWQGKCASTSEALAAVIRAKAPGVVRVGLESGPLSSWHWHELKKLGLPVVCLDARHAKAALSLQLNKTDQNDARGLAQIVRTGWYREVVVKNVDSQLLRSLLTARAQLVRMRVDLANQIRGTLKPFGLVVGKGGGRPFVERVHSLVAGGPLQEVAEALLTAWQAVSSQVAALSRRLVAIGRQDMAMKRLMTAPGVGTLVAMAYVSVIDAPERFANSSKVGAYVGLTPRRYQSGEEDYTGRISRCGDKLLRTYLFEAAGIILHRVSKWSALKAWGTRLAKRVGTRKAIVAVARKLAVILHRMLRDGTEFRWSAKRAQPA

SEQ ID NO: 265065 - protein, 423 aa, unidentified
MKLTYPICCGVDVHKTFLVATIITSEYVMPHYRQKRFSTFYNGLVAFKKWLLEYDCKDVCMESTGKYWVPVWNVLEDSFHVVIANPKWVSAVKGNKDDKKDSKWIGDLFRMGLVPSSYIPSKDIRILREFTRYRSKLVSMRSSEKNRFQNAFTVCNLTLDAVVSDMFGKSAADIENYLLDTDTVDPEHCVSLLRRSLKKKASDVVEAVSGFNMTPEQKERVRIVQGHFADIDHRIAQLDEIIGNLIAEYEGQIYLLCTIPGVDRRTAITILSEIGTDMTQFGSSKRLCNWAGLAPASNQSAGKKKSVRISRAGVYLKPALVEAAHAAVKSTEKQPYYRIKFERLMKRRGKKRATIAIARMILTAIYAMLSTGEIFNPSDLGKFDMPEDLKRKQTLSSAKEAVKLLVSLGLVPAGSISLDDLAG

SEQ ID NO: 265066 - protein, 335 aa, unidentified
MEITTIGLDLAKHVFQVHGVAADGSLVLKRRLRRSQVHAFFAGLRPCLVGMEACATAHFWARQLLELGHQVRLMPAQYVKAYLRRGKNDAADAAAICEAVTRPSMRFVPVKGETQQAGLMLHRVRDLLVRQRTQLINAIRGHLAEFGLVEAQGPWNVPRLLAGMEDANLPELARSLVRLLAGHLDEVELRIAEIDAQIMAWHKADPVSRRLATIPGIGPLAATAIAATVPDPAVFRSGREFAAWLGLVPRQNSTGGKTRLGRTSRQGDAYIRRLLVIGAQSALWCSKATKANPWIQALLAKRPRLVVAVALANKTARIAWALMARQTTYRTAAAA

SEQ ID NO: 265067 - protein, 320 aa, unidentified
MSDSLDIGVDVDSKEFVPAVADRKAGDRIANTRAGIAQWLNTLPQRCRIGMEATGRYYELLARMAGQAGHVVYVINPRLIKHYGRATGSRGKTDAMDAEAIARYVKKENDRLREYVPRTDEQQQMHDLLRKRQTLVKTRARLEQSFGVSKSAPGELSDLFCALAGTLSELESELQRLGRDGEHGTLYKRLLTIPGVGPAVAAHLIYYMTRWPLANANAWIACTGLDPRPNESGGRTGRRRLSKQGAPVLRQMLYMAAMGLKRCRRGQPLYDELSKRGHPSTAVFNILARKLARIAWGVFKSGRDFDPAMLKVGQACFQQA

SEQ ID NO: 265068 - protein, 357 aa, unidentified
MEKYYIGMDIHNKKTMYVVMDEQGNIIDRGSVDTSKESYMGLLVGKKIPSDTQVAFESGEKMYWANSILIELGMRPVVVSAQEVRAKARRPNQKSDHRDAFEICDGLRRGIYTSIVYVPTPELQNLRKILSRRQHFVKECTRQRNAAKFLIRNLGLNLHKKLCISTTAGWEQLLNMKEVETIAAYLTMHYQLWKMANQFVNDLEKEMDEASKPFKELLELLQTMPGVGPITSTAFVTALGDASRFRTAAEVASYIGLVPSTYDSGEKQRHGHITKNGPAHLRSLLCEAAHHAGKPSHPMNASWRKHMVKSGYKKAITAIAHRMARILFAMWKHQEAFDPNRLQSSKPTKTYRIKNAA

SEQ ID NO: 265069 - protein, 332 aa, unidentified
MKEIKEAVGIDVSKATIDVHVHRKNEYSQFENSKNGFADFLRWTKQVTRLKLDELFFCFEYTGIYSFHLGEFLHKNEVQYSVVPAVHIKRSLGITRGKNDRVDARRIAEFAYLRRETLKRSVPLPQSLLKVKQLLALRDRLVVQRAGFKGSLREIKAVFKKQENEELFTILGKMTEQLTKQIVVIEKKIRELIKADDDLNELFKLITSVKGVGEIIAAQLLVTTNCFEKFQNSRQMACYCGVAPFGRQSGTSLNSKARVNHFANKKMKTLLNLAASTAIQFDPELKAYYERRVKIGKSKMSTLNIVRNKILHRVFAVVKRRTPFVNIAKWAA

SEQ ID NO: 265070 - protein, 411 aa, unidentified
MKTLHKRCAGLDVHKTEVVACLRVVNRGKASYELRRFPTTTRALIELGDWLEQAGCTHVAMEATGVYWKPVWYILEGRFQQILANAAHIKAVPGRKSDTHDATWISDLLAHGLIRASFVPPQPIQEVRDLTRTRKQLTREIVQHTQRIQAVLEEANIKLTSVITDILGTSGRRILKAIVAGQTDPTKLAELGGPRLAATKSQLADALLGRVRPHHRFLIDQHLKTIEQLEETITAFDARIEAALEPFREAIERLKEVPGLSETSVQILLAEIGTDMSRFPTAGHLLSWAGLIPRLDESAGKRRSTRVKKGAPWLKPVLVQCAHAAAKKKNSYFEAQYLRLKARRGPKKAVIAVAASILKTAYHMLADGTCYQDLGADYFVRRDPRRVVAKLASRIRSLGYDVVVKVPEVAA

SEQ ID NO: 265071 - protein, 340 aa, unidentified
MEKRFIGIDLHRNRFTCCIRLENDRTYITEWALEDLGRFVKKLRPSDEVAVEITSNTRLFHDAVAPQVARVAVVDTNQFRVISQSVKKTDPNDARLLSLYLSKGLLPEVRMKDKQLAHLASLTQTRDILVKQRSALKNKVNNILSARGLNLAKEALSSEKKLREVLELPFDEVVRIELRVIVDQIRSLNNSIVELEKTIGEEGSQVEGHKGLSSIKGIGKVTSAILLSVIGDVNDFADEGHLASYFGIVPRVSNSNETERSGRIHKRGSKLGRTALVQSALIAANYSPYLKRFYEQVKGRRGAGKAIIALARKFLGIIYRTLKNKWVFEDFPNFVLAEEA

SEQ ID NO: 265072 - protein, 351 aa, unidentified
MKKVIKQVLGIDVAQKELVVRLGKMVEGLIIELCAGKAFANTAKGFELMVQWVKKLTDETVPVRYVMEATGVYHEPLAYFLANRGLDVSIVMPNKISNYMRTLDIKTVTDKTSAEAIARFGLERSLDNWQKPLPVYKKIRQLPRERDQLIQERTIVKNQLHAEQSEAEPNENSLERINQRIDFLDSQEKEINAEIKATVKTDERTDTLVTLFSSLPGVGVLTAATVLGETNGFNLIRNKKQLASYAGLDVKEKESGTSVKGKPRISKKGNRFLRKTMHLPALAAIRIDNRFKALYIRLVAIHGIKMKAVVAVQRKLLEMMYTIYKTNTKYDREYLQKQEAKRIKNENKEAA

SEQ ID NO: 265073 - protein, 317 aa, unidentified
MSNYNTFIGIDIGKAEVVVGFHGSKTTQTFPNSTVGFKAFFKEHRKDLQEAFVVLETTGGYERLFLNSLLDKQISVHRANTRHVKHFIRSWGQNGKSDALDAQALALYGFERHKTLLLFQKQDPMTLKLSSLAQRRQDLNKMIVQEKNRLKSPQTNSLISESCKEVISALEKQLSSITQEIETIISSVPYYQAKKETLETIPGIGSVISSLLIAQLPELGQLNRRQIASLCGLAPYPYESGQKVGYRKTKGGRQQVRASLFMAAMAARCSHSPLKAYYEKLIMKGKKKMVALTALMRKIIVIANAKLKSLELHPLCD

SEQ ID NO: 265074 - protein, 333 aa, unidentified
MCIYSFFIGSDISKSVIDISYIVDGVPIYLGQFLNSEEGFNDFVKALSKITDVPFCEWFICFENTGVYSKPLLNWLISKDIACKEENAMKIARSLGLRRGKNDKVDSKDISRYAFEKRDSIQATILSKPLIISLRKLLSRRDLLVRQKQSLSVSLTEQKSYIDENLYETLKQGDDILLKAYNDQIKIIEKLIQELIQSDPEVALNDQLAQSVIGIGKVTSAYIIAFTANYTTFKNARKFACYSGIAPFSNQSGTKKGKTKVSHIANKKIKSILSNCIASAITHDPEISWYYNRKVGQGKEKGIVLNAVKNKLIHRVFSVVQRQTPYVKMMRYA

SEQ ID NO: 265075 - protein, 351 aa, unidentified
MMLIGVDYHPSFQTIAFFVEETGEYDEQELNNSDGQAEKFYRDLKRRGICVRVGMEATGYSRWFERLLAELGFELWIGDPAEIKAKRVKKQKFDREDARLLLRLLRENNFPQIWVPDPENRDLRQLLWHRHRLVQMRTRIMNQLHALAMNEGYRWKKKLFSELGRTQFEKLALGPWASRRRQELLELLDRMNPTIDELTAAVEREARKRPEAMRLMTHPGVGALTALAYVLIIGTPTRFQRGKQIGTYVGMIPCEDSSARKQRLGHISKQGNSLLRFLLVEAAQAAARVNPHWRRRYMHLAMRRHKSIAKVAMGRRLAVRLYWMWRNGCEYSPSVEFGSYAGQLGTRNGVK

SEQ ID NO: 265076 - protein, 428 aa, unidentified
MDVQNDNRLEDFRQLKNEIRGSKEYLIVGIDIAKDRHHAFFCTATGKTLFKRLVFDNTREGFERLLIQAEAVKLHHGLTKTVFGLEPTADYHKPLGEFLITAGHRVVLVSGVAVKRNRELLDGRWDKHDTKDSANVADLISQGKCLFYDHPSLPLQDLRNLLAVKRRLKKQEHGARVRIRNHLLAQYFPEFDRYFGKGCSETLPIVEWCLQPSLIAGMAYDDFVHLIAPGMKTLGQEKRLQSIWGMAADSIGCAGGQTLDFEAKLMVEELQRIRQLIHSTEEKIEEICLQFPDYQFLLTIPGFGPDVSSKVLGAIGNPFRFDSGKQVLKLAGYDLGAHRSGKTSDSAVPAISKRGKAYLRYALYQAAFIASTSNPRFIAYYTNKLRGREREKGIKTKMKVKLAAKMLIIAWTLMKKKEPFNPEYLNRD

SEQ ID NO: 265077 - protein, 402 aa, unidentified
MNSVGIDISKGRSTVAVMRPFGEVVISPFEVRHTDSELSELAKQLKSLDGETRVVMEATGNYHAPVAKLLHDAGLYVSVVNAKLVHGYGNNDLRRVKTDKKDAVKLANYGLDRWLTLPRYVPEEDTRLLLKNCYRQYRQYSKVQTVLKNNLISLLDTVFPNVNRLFSSPIRGDGSEKWVDFVAEFWHCRCVSEKSEKAFTNKYQRWCKTHGYNFSEAKAHTIHAEASGHIGIMPKSETTKLLVEQAVVQLRATSAALIALKREMLTLAAQLPEYPVVMGMFGVGPTLGPQLIAEIGDVRRFYSKKALVAYAGLDAPPNDSGDVTGRHKSMSKIGASSLRRTLFLVMGIYLQNAPLDEPVYQFMDRKRAEGKPYRVYMMASANKFLRIYYATVKAYLESLEQV

SEQ ID NO: 265078 - protein, 349 aa, unidentified
MKYYVGLDVAMEETAICIVDDQRRIVREGKAASEPEAIAAFLMATGLTFERVGIEAGPLAPWLCDGLAAAGLPVICIDARHMKAAVSAMPVKTDRIDARNIAFAMQVGWYRPVHLKRPEARKLRLLLSSRQMLLRARIDLDNHIRGVLTAFGLTVGKVATGQFEARVWELIGEGDAQIRWVVGTLLTTRAAVVSQLALLHRAVLAVVKQDQVCRRLMTVPGVGALTALAFRTAVDEPERFASSAAVGAYFGLTPSKYASGETDYTGHITKCGDKAVRVLLCEAANALLTRVSRWSWLKRWGLEVLKRRGKMRAQVAVARRLAVIMHRMWLDGTDFRWQREPDAPAGAAA

SEQ ID NO: 265079 - protein, 346 aa, unidentified
MEHYVGLDVSLKLTAICIIDRTGKIEREGVVASDPEAIATFIKLHAPHVVRIGLETGATSTWLWTELNKMGLPVICIDARHAKAALKMQINKSDRNDAVGIARIMQCGWYKEVHVKDLDSHATKALLVSRALLVKIKRDIENQIRGLLKNLGLVIGRAKMNTFAARAAELAEDRPELAAAVDPLLKAREAVEQQISDLDRKVLRLARNNAQVRRFMTVPGVGPVTALCFLATIDDPGRFKRSRSVGAYAGLTTRRYASGEIDWTGRISKCGDKMLRSYLYEAANVLLTRVAKWSALKAWGVRLAKRSGLRKAKVAVARKLAVILHRMWIEGTEFKWSSKEAANQPA

SEQ ID NO: 265080 - protein, 435 aa, unidentified
MRRVIGIDIHRTFGEVVIWEDGRLRRLGRVDMTRAALEGLGGKLQPTDEVVVEATGNAMAVSRVLSPFVARVVIANPLQVKAIAHARVKTDKVDAGTLARLLAARYLPEIWTPDAETERKRRLTARRYQIVRHRTRIKNEVHAILHAHLIPKCPHADLFNRPGREWLARQGLPADEREAIDRHLRELDRLGEDLAVLDREIAAGALDDNAVKRLMTITGVDLTVATGVMAAIGDIRRFDHPGKLVSYFGLNPRMRQSGLSAAYHGRVSKVGRSHARAMLVEAAWAAAKAPGPLHAFFVRVRAKRGHQIAAVALARKLNVLCWHILTKDEDYLWARPALIANKTRALELQAGKPQQKGTRRGRAYAYNVKALRDQEQQLAQQAERNYARFVERWRTRPRRARRASASIQPGTDRTLGGACSRRAALRHEVARASRK

SEQ ID NO: 265081 - protein, 373 aa, unidentified
MPKYSTAFGMDVHLRSTTVCALDADTGEAVTRRFPGNPWGEIAGWMDGFPGPSLAAYESGYLGFAPQRELAGLGVECVVAAVSKIPRSAADSASKNDRNDAARMAKAILAHDISPVWVPSPEVEGIRDLAGAYDGATARLATAKQRLLAFLAKRGFVYGGTTPAGNPRKYWTYDFLRWLDKVRPEDDGGVRTLAALRNEVEAAAEARADLLSEYRAAADASPIAAEAAALQSIKGCAFALAAAFSAEVGDFTRFRSGRQVTAYFGLAPSQRSSGDSVRLGGISGAGNALVRKLAVEGSWCYAAARHQPKLMPRDTGVPLEIRMHGRKGSERLLRRREEMLARGMPAAKANAATAAELVRWLWALGMMCREGAE

SEQ ID NO: 265082 - protein, 339 aa, unidentified
MNITTVGLDLAKNVFHVVCLNKHNKEVKKRMLRRNQVRQFFAQLPACTVAMEACATAHYWGRELIALGHHVKLIPPQHVKPMVQGNKNDYNDACAIAETVNRPKITFVAVKTIEEHDMQAIHRMRAQCIRDRTALSNSTRGLLGEYGISFSKGLATLRRKIPELLEDAENGLSMRFRHLLARRYEQLVELDEHIAFYTKELELLSQQDEACQRLQTIPGFGPIVASAFRSTLGDGSAYPRGRNAAASLGLVPRQYSSGGKNVLLGISKRGDRYLRKLLVHGARTVVLHAANRDDPLSRWINRIRERRGYNRAAVAMANKMARMGWAILRNNTSYGPTLA

SEQ ID NO: 265083 - protein, 412 aa, unidentified
MGRRCIGLDVHREFAQIAVWEDGKVRQAGQIALTAEALRVFCDSLGPEDEVAIEATCNTHAIVRLITPHVARVVVSNPQKTRAIAEAKVKTDKVDAAILAELLAADFLPSVWVADEATHALRRQVARRANIVRQRTRLKNQVQAILHRNLIPRCPAADMFGVKGRCWLSDQHLPADEELAVDALLRQLDFHGQELRIIDAALGRVALEREEVLRLMTIPGVDATVAVSLVAAVGDFRRFSRPERLVSYLGLNPRVRQSGNQAASHGRITKQGRAHARGMLVEAAFTAARTPGPLRAFFERVRARRGVQIAIVATARKLVCLCWTMIERGEDYAFARPSLTEKKRRALELRAGLPARQGRKGTAAVYSLKDVRLRELEVAQQAEHAYRQQVADWQASRPSKEGVVAANGTRLK

SEQ ID NO: 265084 - protein, 430 aa, unidentified
MDEVNRNRLEEFRQLRKEIKHSEEYLIVGMDIAKDRHYAFFGTATGKTLLRRIVFSNDHEGFRRLLDQAEVLRVQHGLKKVVYGMEPTANYHKPLGEYLIKLGKIVVLVSGVTVASNRESLDGRWDKHDGKDSANVADLISQGKCLYYEHPSVELRGLRGLLSLKRRLKKQEHGYRVRIRNQLIAQYFPEMDRYYERLGAEGLSMVRWCLAASEIAQLEVDPFIERVTSRRVRMEKRRRLEEIWEKAARSIGCDGVPGLEHEAKVMVEGLRQIREMIKETEDKIEELCKQFPEYHYLLTIPGFGPDVSAKVLGAVGDPDRFEKGKQVLKLAGYDLSGDRSGKSSDKAIPEISKRGKADLRYALYQAALVGSTQNREMMIYYTNKIRGRERERGIQVKMRVKLAAKLLVIAWTLMKKKEAFNPAYLRAELS

SEQ ID NO: 265085 - protein, 355 aa, unidentified
METIYIGVDFHARQQTICYLKTETGELVISELQHQDKAAVRAFYAQFQEPVIVGLEASGYSPWFESLLAELGCAVWLGDATEIRRRARWRQKNDRRDAELIWDLMVHNEFPRLHRPTLQSSEVLRMLRYRQKLVKMRTMAKNSLQAIALQAGLDKRKRLYSQAGQAEFKDAVMSPVLQWQRDHWFALMQPLNQQLWETMVWLKAQGKAEPQIERLRTHRGIGLLTALCLLHTLQPVSRFRNTRKVVAYAGFDPQIRSSAERKVYLGISKAGSRLLRFLLVEAVHTAIRYDEDLKRFYKRVAMRRGRPKAKVAAARKLLIRAYIMLRDEIDYAEFRRRAVAARLARAGQGPTCPGY

SEQ ID NO: 265086 - protein, 410 aa, unidentified
MSLFCGIDWATEHHDVAVIDDDGRVVARRRVSNDAAGFAALLALLAEAGDSGADPIPVGIETDRGLWVAALRETGRTIYPINPLAASRYRARYAVSGAKSDATDAVLLANIVRTDPGAHRPLPADTEAAQAIRVLARAQQDAVWARQQIGNQIRDLLKDFYPAALVAFAELPDGGLARRDARTILAAAPTPARAAKLTPARLRRLLIKAGRKRYLDRDTARLREVFADAYLHQPRAVENAMGIHLTTLLGQFDATCTAADELAEAAIAHFEQHPDAEIITSFPGLGMLAGARVLAEIGDDRARFTDARGLKAFAGSAPITRASGKKTVVLHRHIKNRRLAAVGPIWALGSLRASPGARRHYDARRAAGDWNQQAQRHLFNKFLGQLHHCLHTGLLYDEHVAFPPPLKLAA

SEQ ID NO: 265087 - protein, 327 aa, unidentified
MEREYIGIDLHKAFFQACAISATAERRWEQRWPTTPLGITAFLTRCSASSHVAVEASSPTWAFVDRIVEQVGAVHVVDTRKTRIKAGDAAKTDRLDAQRLADALRRDSIVGIYYPPPAIRDLRELGRYRCHLARLQASLKQRIHALLLRQGVSAPKALFTQRGTRWLDALQLPGWAGSELRGLRHVLTDVRGQLVPILAAIRTVAATDPIARVLDQAPGFGPVFSVTLRAEIGTITRFPDGRHLASYAGLVPRVAQSGRRQWSGRITKVGSPWLRWTLVEAAIHQFRRQDAFGRWARRLAVKIGMLKARVAVARALCGEVFAAWPRA

SEQ ID NO: 265088 - protein, 399 aa, unidentified
MDRNRTVGGLDVHKDSIYLCIMGHDEAIIFEKTYGVLTPDLRQMCNDMMDRGVTEAAMESTAVYWIPVWNELCESVELKLVNPYFIKQLPGRKSDVRDAQWIAECLLKNLIKGSFVPEPIVQDMRKLNRRIFDLQEDITYYSNKLDAALQRCGLRLSNYVSTIVGKSYRKSVAAVASGITGPGELIRCIHGRIVNKHGKDTILAAITGSFSRTDITVIRQYWELLEIYSRQSGECQSQLTALCETHFPTEYRRLQTIPGVKERAATAIIAETGVDMKMFATAAALVGWCGLKPRNDVSNGRYKSRKITHGNRYLRHILIEISWTASRKRNCFFSNFSYMQTTVKKKSKMKIQVAIARKILVAVWHMLSKQEDFTDIYLKRLEQQRLMEEKLKSLESKMT

SEQ ID NO: 265089 - protein, 308 aa, unidentified
MPQAVIGCDLSRALIDICELPSGRIGQIANTPDAIAAWLDTLDHDVRVVFEATSGCDGELIAALAMRSHPFSRVNPRQAREFARATGTLAKTDRVDARVLAQMGAALNLPATIPLSPARSHLADFLRRRRQLVDMRKAEKLHRHNAGQPEIAQAIKAMIDLLSQQIAELDCQIAGFITQDHALAEQARLLTAVPGIGPTVLATLLGELPELGTLCRRKIASLAGLAPHARESGTWRGARRIWGGRRKVREALYIAALNASRRIPVLIAMRDRMLAKGKAPKTILIAVARQLLVILNAMIRKRQPIVLA

SEQ ID NO: 265090 - protein, 353 aa, unidentified
MEYIAFDAHKHYTLASVARPDGQLVREQRLPHERGALQQFLARCERGSPVAVETIGNWYWIVDEIEAAGCVPKLVHARKAKLMMGEINKTDKLDVRGLNHLQRNGTLPTVWIPPGELRDQRDLPRTRMVLVRQRTQLKNRIHATLAKYALHHLDVSDLFGVRGRALLRQRLQLLPPCTAYATQQLLEQVENLDRQVRGFEHQMQTVFRPTPTIQLLLTLPGVGLMLAVVIALEVGSIARFATAEKLAAYAGTTPRVHASGGKTRFGPTRPDVNRYLKWAFVEAANAVCLNRSRTPRRHVSRLYERVARRKGHQKAIGAVARHLAEATYWMLTKQETYREPNVAAVSSTGDKRG

SEQ ID NO: 265091 - protein, 320 aa, unidentified
MPATAQTAVAVIGIDIGKNSFHIVGLDSRGAIVLRQKWSRGQVEARLANMSTCLIGMEACVGAHHLSRKLKALGHDARLMPAKYVRPYSKGQKNDFRDAEAIAEAVQRPTMKFVATKTAEQLDLQALHRVRERLVSQRTGVVNQIRAFLLERGVAVRQGLRFLRAELPRLLATPPDVLSPRMVRVIESLAEDWHRLDERIDHLSDEITALARQDAGCERLVSVPGIGPIISSAMVAAIGNGDAFSKGRDFAAWLGLVPKQISTGDRTILGKISKRGNRYLRVLFVQAAWVVLIKPQSWERHGLKPWIEAAKKRLHRISLQ

SEQ ID NO: 265092 - protein, 399 aa, unidentified
MITTPVILAIDLGKFNSVFCWFDPATKATAFRTVPTNPDAIREALLRQPGVTAVMEACSPAGWVTDLCQSLGVPFVVASTNGAAWAWKNVKRKTDRDDALKLARLASVGELQPVPVPPKAVRQRKSLIGLRKRFVGERVRGQNRIRGLLVGQGIAIPRAAQTWTEAGLGVLASHAKPVTGCGPEELWRGELDLLLRRYRASVEQIAEVERKLDALGDAEPATVIVASMPGVGPRTAEVVATHLNDPKRFKSADEVSAYAGLVPRQYQSGETDRRGRITKRGPKLLRAALVECAWCSLRYNAWAKAVWQRLQANGVSKKKAVVALARKLLVRCWAMLERGEPWRKPVPAAGGVRPGRAGEGEGVRESGARRGNEGICPGTTGRPRSWVERTDKRLSVTLS

SEQ ID NO: 265093 - protein, 380 aa, unidentified
MTTRHARIWVGIDVGKGHHWAVAIDGDGETVFSTKVINDESQILALIETARERADDVRWAVDISGRASTLLLALLFAHSQQVVYVPGRTVNRMSGAYKGEGKTDAKDARVIADQARMRRDFAPLDTPPELVTTLRVLTHHRADLIADRVRLINRLRDLLVGICPALERAFDYSSAKGPVVMLTEYQTPAALRRIGVKRLTTWLERRKVRGAGDVAGKAVEAAQSQQIALPGEKSAAKLVCDLAHQLLTLDERIKDNDREIREVFRADDRAEIIESMPGMGPILGAEFVAIVGDLSGYLDAGRLASHAGLAPVPRDSGRRTGNHHRPKRYNRRLRWLFYMSAQTAMMRPGPSRDYYLKKRGEGLLHTQALLALARRRVDVL

SEQ ID NO: 265094 - protein, 458 aa, unidentified
MMKNVKKANAKNVVTMPLINANAAGIDVGDTLLAVAVPQGRDSVCVKEFGAFTCDLKSISAWLKQCSIETVAMESTGVYWKPLFSVLVQDGFEVFLVNAKHTKNVTGRKTDESDAMWIQKLHSCGLLSSCFLPDEQTETLRTLVRFRRSLTQDSTTYILRMQKSLELMNIKVHTVISDIVGKTGTAIIEAIIGGERKAGNFMPFINGRIKADKETLIKSLQGNWRKEHLATLRMSYEMYKILQQKIAECEKEIEETLQFYLAAKNEGIIEPIEKNEIEVSENKKKVKKKNKNHPTFNTRAYIQKIHGVDVVEIYGLSEISALEILGETGTDLSKWLTEDRFVSWLNLCPNNKISGGKLISSSRLKKKPNLASQAFRSAANSLGRSDHWLGDYFRRMKAKGGNKYAIVATARKLAIIYYRMVRYKKNFNPVDMKQYKEKYKAAKISYLERKLEQLRRAS

SEQ ID NO: 265095 - protein, 443 aa, unidentified
MRKAIGRAIGLDAHRDFCEVAIGHEGRVRSAGRVATSPEQLLLFAQSLTKSDRVALEVTGNAWEIARILQPYVARVIVVSPADTGIRQARAKTDRLDARTLAWLLAAGELDAVWMPDDFTRVMRRRLARREQLVRTRSRSKNEVHAVLVRRLKGKPPVSDLFGVKGLKWLDGLELPVEEAETVRAARRHIEFLDGEIADVERLIATEALASPQARRLITVPGVNVVCAASFLAAIGDIRRFPSQSKLTGYLGLDPKVYQSGSAPAKGGHISKRGSSQARWALVEASWSVVLQPGPLHAFYTRLRAKRGHQIAMVATARKLACLCWCLLKREQDYAHQQPSLTAKKIRRLELAAGAPKQPGKRTGTWSTNTALREAERRLAEQAEASYKQMVADWQAAAPKKGGASVTPGAHLQNDLQEVKSRGRPPAPDAHTLTRHHSRHRAA

SEQ ID NO: 265096 - protein, 348 aa, unidentified
MIIGVDPHKMSHTANAVDPATNSTAASLRIDASLVGYRELMRWAKQFPERRWAVENARGLGRHLAQWLVARGEVVLDVPSTATARVRELSRSSRRKTDVIDAAAAASVAALHGDATVVTAEDYTTVFALLEERRANVAAQRVRIANQLHAVLRDLAPGGAALALTAKSVATLLRTIRPDSPAERTRKELAQDLVRELRAVDASLADIEARMTVALDEHGTRLREIDGIGAVTAVRLIGRTGIASRFASEHAFATYAGVAPIEIASGDHTRHRLSRAGDRRLNSAIHLIAVTQVRMRNSIGRAYFDKKIAEGKTRNEAMRCLKRRLANHIWRMMIADERRPPAAREIAA

SEQ ID NO: 265097 - protein, 458 aa, unidentified
MRRKRPSGMTRPAMPMVHPNAAAIDVGAKMHMAAVGADRASEPVQSFGTFTADLYRLADWFEACGVETIVMESTGVYWIPVFEILDARGFGVFLVNARDAKHVPGRKTDVSDAQWLQRLHSHGLLRASFRPKGEIAELRAYLRQRERLLDYAASHIQHMQKALTEMNLQLHHVVSDITGATGLRIIRSILAGERNPAVLALLRDQRCHASVETIEKALTGHYRPEHLFALEQALALYDGYQEKVSACDVRIEAVLKELSIRRGGDAGPLPSPRRRIGRQPNGLDFDVRAALFALLGKDLTQIHGLGPYLALKLVAECGDDLSAWPSAKHFTSWLCLAPSNKISGGRVLSSRTRRSGSRAAALLRLAAVTVGRTDTALGAFYRRLSTRTGKAKAVTATARKIAVLFYNAMRHGMSYVDPGASYYEERYRARVLDNLQRRAKAFGFVLQPAIQGSEEAVS

SEQ ID NO: 265098 - protein, 405 aa, unidentified
MGGEAISGLKGGFDSFVGIDVSKDKFDACGITGDAEKLFQCSATMDRKGFEKLKDHLAVVSASSVLIGMESTASYHVNLFSYLVSEGYNVLIINPLLISNYVKMQLRKTKTDKKDAVVIALFLLANGSTLIQRVTPSVISDLRDLSRQRESLVDEMTALKINIKRLLNITFPELEHMTLIFTKSMLKLLQQYPSAFALRSADLVQLSQMLIADSYGRKREAFATELIKTAHSSIGINSPAKEIILKQQVTLLLHLEDALQEITGVLIEMSRKLMEEDINILTSIKGIGDKSAVNFLVEMGGDITQYDDSGKIIAMAGLDPAVYQSGQHEGKGRITKRGNRHLRRIIWMMTTRVIHYSDIFKVYYLKRRKEGLPYKMAVLATAHKLIRVIYAMLTQRTTFCPQVNS

SEQ ID NO: 265099 - protein, 429 aa, unidentified
MNSTQNKKIEQVKETTMIVGIDVGSEKHYFRAFNWRGIELTRKPVAFSNSMEGFNSFYNSVVELMQKNELKEALVGIEPTGHYWFDLGQFMGEKNIKFVMVNPHHVHKTKELDDNSPSKNDRKDPRVIAGLVRDGRYFYSYMPTGVYAELRNASNRRFVLVEEQTRAKNRLQKWVAVYFPEYKGIYTHIDAKGGLLVLKQAPTPEEIVRLGVEGIIKIWKDAKLRGNGHKKAMLILNAAMKSIGLKAGLTEARMEIQDLIEDYELQTKRLERVNDLIKELCQQIRYADKLLEIKGIGITTVAGFIAEVGDITRFDSTKELQKLAGLELVADSSGKHDGKTKISKRGRKRLRYLLFEAAISVVGKNEEFKEIHRYYTTREKNPLKKMQSLIAVACKLIRVFHVILTKGISYDASKMLKDIRRPGEQLKAA

SEQ ID NO: 265100 - protein, 391 aa, unidentified
MIYIGIDVAKDKHDCFITNSDSEVLFKAFTIANNLDGFNDLYQKIESVMDDVTKVKVGLEATGHYSYNLLGYLIDKGLPTYVINPLHTNLYRKSLSLRQTKTDKVDARTIASMLMSDVNLKSYSDTFYHNEELKSLTRYRFDKVKERAKLKTSVSRLVCILFPELEKLVPTLHMASVYALLSEFPSAKHVATAHLTRLTNLLSESSKGRYGKDTAITFRDAARASIGSNMPAKSLELKHTIKLIQELDSEIDEIENEIKIIMDEINSPILSIPGINYRMGAMIIAEIGDFNRFDSPDKILAYAGFSPSTYQSGQLDGAYAHMEKRGSRYLRYALYNATKYVCHWDPTFAAYLAKKRAEGKHYNVAISHAVKKLVRVIYHLEKTKQQYIKAA

SEQ ID NO: 265101 - protein, 387 aa, unidentified
MPASGPRPDQVAVQTSLAAIFVSLELSRSSWLITSLVPGGADKMSKHTVRSGDVAELMVHLAKLRDKAHARAGASFPIIAIQEAGLDGFWVHRVLERAGIESFVVDAASILTSRRRRRAKTDRIDGEALLRTLLAHKRGEPRVCAMVRAPSPEEEDRRRLCRERRTLVAERVAHVNRIKGLLFAQGICDYEPLRSDRRQRLEALRTCDGRPLPPYLKAQIGRELDRLELLLEQLKTVEAERNALLEPANDVAPVAVKALAALRGIGPELTAMLWSECLFRSFRNRRQIAAYAGLAPTPWQSGSVQHEQGVSKSGNPRLRSTMIQLAWLWLRHQPTSELSLWFRERVKRNGGRGKKTAIVALARKLLVALWKFSSSGVVIEGATMKAA

SEQ ID NO: 265102 - protein, 367 aa, unidentified
MSEITQAIVRVGVDLAKQVIQVHAVDRTGRCVTARAIKRGQFLAWCTQLPPSCFLAMEACAGAHHWARKLRALGLDARLIAAHFVTPYRMEGKSGKNDMTDAAAICEAASRPKMRFVPIKTCEQQGILSLHRVREGIKEERTACINRIRGVLAEFGLVFAKRTEALRAELTDTIEDAGNELSTTARRVLQRAFDHWRELEEHLRWCDQQVRHHARSSPEARRAADITGIGELGASALVASVGEFRQFRSGEQFAAWLGVVPSQHSSGGKASMGGITKRGDDYLRMLMIQGARAAVMTATKRDDPTSRWLAQLTQRVGWQKASVAMANKNARILWAVMTRGTSFDPRHVSTKPATPCSQTEDLVPATA

SEQ ID NO: 265103 - protein, 313 aa, unidentified
MKKTICGVDVSKAKLDVCIEPGHRLASFNNDTVGIAELAAFCREHAVTLVVMEASGGYERRAFVELWEKGVSCALTNPRNVRRYAEAMGILEKTDRIDSSVIARFAHAKNLAPTPLPSQAQQRLKALVTRLRQVTDDLTVQKQRRASTFESTEMRSSIDEVIALLKRQSRSLEGEIASMIDDDPLWAKLAETWREVKGVAGRTVARLHAELPEIGTLSNKAIAKLAGLAPIANDSGKRKGKRSTRGGRAGVRSILFLVAATVARYDKTLADFRARLLAAGKEKMVIRIALARKLLVRLNAKARDARAAYANAT

SEQ ID NO: 265104 - protein, 447 aa, unidentified
MAQRKRPTTQAAITLTHPNAAGIDIGSAAHFVAVPPDRDDESVREFASFTADLHRLADWLDACSVDTVAMESTGVYWIPLYELLESRGFTVLLVNARHVKNVSGRKSDVLDCQWLQQLMSFGLLSGAFRPAEQICVLRCLSRQRTMLLRSQGRFVQHMQKALTQMNIQLANVISDVAGETGQKILRAIVAGERDGHALAQLKNARIRASKDEIAKSLQGSWRAEHLFALKQALDAFDFCGTQLAECDAQIQAQLQALHVREDEPAKGKKRGRARNAPKFDLRAQLFQTCGVDLTRIDGIDVTTALVVVSEVGADMDKFPSDKHFASWLGLCPGTKITGGKVMSGKTKRCANRAAQALRLAAAALRSSQSALGAYYRRLCARMDKPKAVTAAAHKLARLIYAMLTHGQEYTDQGQDYFEERYRQRVLHNLAQKAKAMGMQLVSADNPA

SEQ ID NO: 265105 - protein, 418 aa, unidentified
MEVEHDEQEIIQRVAALDIGKAELVCCVRVPGPGRRRMQEVRTFLTMTRSLLVLSDWLRSLGVTRVVMEATSDYWRPPFYLLEDSFETWLVNAGDVKHLPGRPKTDRLDAVWLCKVAERQMLQPSFVPPPPIRILRDLTRYRVDLVTARTAEKQRVEKLLEDAQIKLSVVVSDIFGVSGREMMAALIAGERDPRVLAEMARGRMRSKTTRLVEAFIGRFSDHHGFLLTTMLARIDALSADIDAVQQRTEQELAPFAQAVARLDEIPGIGATAAAVIIAEIGVDMTRFPTPAHLSSWAKFAPGVKESAGRKKGNGATGHGNRYLARVLGDAAVNAGRTDTFLGERYRRIARRRGKKRAIVAVGRSILVIAWHLLSDDNTQFRDLGPDYYDSRVNLNRKMRNHVRELQALGYKVTLEHAA

SEQ ID NO: 265106 - protein, 405 aa, unidentified
MERVIERCAGLDVHKKTVAACVRVRGTQHVRTFGTTATELLVLRDWLFAHEVTHVAMESTGVYWKPIFYVLEDAFTCVLANAAQIAQVPGRKTDVKDCMWIAQLLEHGLIRASFVPPAPIRELRDLTRYRRALIEERTREANRLHKVLEDAGIKLASVASDVLGVSGRAILAALIEGTTDPMVLAELARGVLRKKLPALRHALMGRFREHHAFLVTQILAHLDYLDELIATVSGQVEVAIAPFADELARLDTIPGINQRTAEAVIAEIGVDMTVFPSARHLASWAGLCPGNNESAGKHRPAHARKGNRWLRSALTEAALAGAVRSKKGALAARYRRVMPHRGHKKAVVAVAHAILVTAYHLLARQVTYIDPGADYYERRHADRVRRRAVQTLERQGYRVSLEPAA

SEQ ID NO: 265107 - protein, 315 aa, unidentified
MSENQVEVFVGIDVCKSKLEVRIEPLGEWFEVGNDDEGIKALCARLSKLAPTLIVMEATGGLETRAASELAALGLCVAVVNPRQVRDFAKASGQLAKTDRIDTHVLCGFARAIRPAARPMKDALTRQLDDLVTRRRQLVEMRVQESLRLQGASQVQAKSLKAHIAWLDKRITQIETDLGTRLRSSDAWRVKDDLLLSIPGVGQITSRSVLSRCPEIGQLNRHQIAKLVGIAPLNNDSGPHRGQRHIWGGRADVRSVLYMATVSAKRCNPVIKAYADKLTRAGKAPKVVIVACMRKLLTIMNAMIKNNTAWSPKIA

SEQ ID NO: 265108 - protein, 364 aa, unidentified
MDVHLRSTTVCALDAETGEAVARRFRGNPWGEVAEWMSGFPGPSLAAYESGYLGFAPQRELSALGVDCVVAAVSKVPRSAADLSSKNDRSDAARMAKAILSHDVTPVWVPSPEIEGLRDLAAAHDAATARLAAAKQRLLAFLARRGYVYGGTTPAGNPRKYWTYGFLRWLDGIRPADDGGIRALAALRNEVEAADETREAVLAEYRAAVAAGPLSAEVEALQSIKGCGFALAAAFASEVGDFSRFRSGRQVTAYFGLAPKQRSSADSVRLGGISGAGNALVRKLAVEGSWRYAQAGHQPKLMPKGSGVPLEIRMHGRKGSERLLRRREEMLERGMPQAKANAATAAELVRWLWALGTMCGEAGE

SEQ ID NO: 265109 - protein, 345 aa, unidentified
MELHTIGIDLGKTVFHLVGLNLRGEVVVRKKLSRNQLLHFTANLQVKLIGMEACGGAHFLGRALREQGHEVRLMPAQYVKPYVKTNKSDYIDAEAIAEAVGRPKMRFVPIKTDDQLDLQSLHRVRERWVTRRTAAINQIRGLLLERGITLRKGRCHVDAALPGILGDASAKLSGALRVLLAQLKLELDHLQMRIDEADAVIKKTAGENEACRRLVAIPGIGPITATAIIAAIGNGAAFKKGREFAAWLGIVPGEYTTGGKQKLLGISKRGNSYLRRLFVQGARAVLQQSAKQSSGLSAWLAQLTARTHRNVAAVALANKLARMAWAVLAKNEPYRPPMLAGAATA

SEQ ID NO: 265110 - protein, 352 aa, unidentified
MRILALDLGKYKSVACDYEAETGGHRFTTIPTNPRTLHDLIVDREPDRVVIEICSIAGWVSDLVRALGIEIQVANPNDERWQWRKVKTKNDRADALKLAQLSALNQLRLVHVPQSEIRQWRALITYRQHLVQRRTKIKNHIRDLLLREGQLLPRYRSTWTQEGIANLEAMSKPFTEVSPDELWRGELGVELAQFKAVQRQLAEVVTKLDELGAANHSVQLLRTIGGVGPRLAEAVVTMFDDPHRFRTAGQVSSYIGMVPKQFDSGETQRAGRITRHGNRLVRSLLVEVAWCALRHNPWARETYKRISGGKKSRKKIAVVAVGRKLLVRCWAMLRSRLGGALNYRWPSRSGAL

SEQ ID NO: 265111 - protein, 340 aa, unidentified
MSLYGGIDLHANNSVVVLLNDQDQVIYQKRLPNHLPAILEPFHLYHGEIEGVVVESTYNWYWLVDGLMEAGYRVHLAHPAAMQQYNGLKYTDDHSDARWLAHLLRLGVLPEGYIYPKAERAVRDLLRKRAHVVRQHTANVLSVQNIMARNTGARFSGKRLQELTKQELQSLLAEEPQVLAVTSSLAVLDCLKHQIKTLEQAVHKRLHHTPSYEQLLTVAGIGTILAQTIALETGDIRRFPTVGNYASYCRCVDSHKISNGTRKGTGNVKNGHPYLAWAYMEAAQFALRFQPAAQRFYQRKLAKSRNNMVLARKAVAHKLSRACYYMMRDRVPFEATKAFG

SEQ ID NO: 265112 - protein, 337 aa, unidentified
MSQASSSPSPSSSTPRFVGIDVAKATLDLAVRTDGQAEGEPWQVANTSEGHAQVVSQVAVLAPALVVLEATGGYEVAVVAALAAAVLPVVVVNPRQVRQFAQATGRLAKTDRLDAQMLAHFAEAVHPTPRPVPDAQSRELTALVARRRQLVQMRVAESNRLTPTTSGRVQQQITAHLDWLDAQLASLDDELREQVRTSPLWRERDDLLQSVPGVGPVLSCTLLAHLPELGTLSAKQLAALVGVAPLNDDSGRLRGRRLVWGGRAAVRAVLYMATVRATRCNPVVQTFYERLRAAGKAPKVAYVACMHKLLTILNAVLRHRTPWAPASPPAHRAPVLA

SEQ ID NO: 265113 - protein, 353 aa, unidentified
MCKHITLTVDYHDRACVIRWFDHGVGRDQLFSEVPTTKEALSAMVERARLATGRLGTVTWLQESTTGWARVQALVADRAQFLLANVLQMPLPPKAKRRKTDKVDTARLQREYLNGSLPLAYQPPAEWRQLRRLVGYREGLVKRRTALRNWINRYLAHETWFDCTGLWSPKGGKRLRTLLKRLPRTDALVIGQKLDELARLEGQLEVALTELVSAYGNCPDAKRIDAIAGIDVVSAISIVARIGPVERFPNADSLIAYAGLAPGIQESDQTRRNGRIGGGGTDSHLRHYLIEATMWARKLPRYKRVYDRIAKRRGKKVGRLVVARMLVRSIYKMLKTGVNFDAGALAPAEAIAS

SEQ ID NO: 265114 - protein, 355 aa, unidentified
MTSIKYIGMDVHMESISICVRNSVGKIVMECVIETKASTLLQFLDGLRGDLRVVFEEGTWATWLYDLMKPHATEVLVCNTRKNAVRKGSKGDRIDARKLSEQLYMNNVKSIYHGEHGLRMMKELARSYLTITKDLTRVMNRLKALYRSWGIPCAGNAVYAPRYRAEWLAKINEAGVRRRAEHYYQQLDVLRPLRQEVRRDLLVESRKHKIWKLLRLIPAIGPIRAAVLIAVMQTPQRFRTKRHLWAYSGLGLETYDSAEYRAFQGQLERSRKQATVRGLNKDYNHDLKDIFKGAAMRASTATGPLRDFYENLLAKGRKPTMARLTLARKIAAITLIVWKKEVRFDANYLKPQQAA

SEQ ID NO: 265115 - protein, 387 aa, unidentified
MKIMAGIDLHSNNAVCGLVDSEGKRLLHKKVPCDLRCVLAVLEPYKQRLESVAVESTFNWYWLVDGLQDHGYKVALANPAAMQQYNGLKHTDDKSDAFFLGELQRLKILPTAHIYDRKTRPVRDLLRRRLLLVHQRTSLLLSLKSLHARTTGYSLSLGLAKALPPEQAAKLFTHPADQLIAREQAQHIRQLSQSIQAIEKMVLGEVKKLSCYRQLQTLPGVGSILALTITLETGDITRFPSAGDYASYCRTVDSARLSNERKKGQNNEKCGNKYLAWAYVEAANFAQRSDGPCRRFFDRKLAKTNRFVATKALACKLSKAAWYVMSQGVDFDSARAFPGPKPEAQTQRSGKAQQGQATKQTELKKKTDLGRASVNPSKGSGSKTLRD

SEQ ID NO: 265116 - protein, 356 aa, unidentified
MSVYLGVDFHARTQTVCWCDTADGLIHQRTLDHEHDDVRGFYTQFAVPAVVGLEATGYARWFHRLLEALGHRLLVGDAYVIRKCALRHQKNDRRDAELLLDLLLHGDFPAVHIPPIASQPVLRLLRYRQRLVEIQTKLRNGIQALALNHQLRLGPKLWSKQGQQQLLAIELDDTDVLQRENSLELLGQIRTRIRTLEKELTSRADQDARVRLLRTHPGVGLLTSLAVVHTLEPVTRFDRARRIAAYCGLDPRETSSGETVRMGHISKQGNRLLRHLLVEAAHRAVHSKADAELRNFYFRLMERKKNAAVAITAVARKLVLRLYRMLREDIDYTEFRRRGREARRARKTPSPTAGGC

SEQ ID NO: 265117 - protein, 329 aa, unidentified
MSASPIAVPLGIDISKARFDVALLKERHRAKRAKFDNTAAGFDQLKAWLRAQAIEQVHACLEATNTYGHALARYLHHQGHQVSIVNPARIKGYGKSQLSRTKNDAADASLIARFCRDLKPTLWHPAPDEVATLQRLTRRLEALEQMMTQEKNRRELCDDDELRADIDAHIEFLEAQETSLKKRLQQLIQVHDRLAEQQALLESITGIGTQTALTVLGEIGSIEVFGSARQLAAFAGLTPQEFQSGSSIHGKTRLCKIGHARLRKALYFPALVMIRYCPEIQAFRQRLLDAGKQKMQVVGAVMHKLIRIIYGVLSSGKTFDSAKLVSQNT

SEQ ID NO: 265118 - protein, 402 aa, unidentified
MYNAVGIDVSKGKSTVAVLQPAGVIIRKPFNVNHTSSELDELAKYIGSLEGETRVVLECTGRYHEPVVKTLSEAGLFVSAVNPHLIKNFGNNSIRKVKSDPADAKKIARYTLDNWIELRQYSSMDNTRTKLKTLNSQFSFFMKQKVAAKANLIALLDNTYPGVNKLFDSPVRDDGSEKWVDYAYSFWHVDCVRKIGLKTFTERYQAFCKKHHYNFQPAKPAELFLASKDLIAVFPKEASYKLLIQQSIQQLNLTSSHVEELRSKMNELASTLPEYATVMGMYGVGKTFGPQLIAEIGDISNFSHREALTAFAGVDPGVDQSGTHNSKSNKASKCGSNRLRKTLFQIMSTLLQTAPEDDKVYQFLVKKRAEGKPYYVYMTAGANKFLRIYYGKVKECIRNLEQ

SEQ ID NO: 265119 - protein, 331 aa, unidentified
METDQYIGIDLHKASFQVCVMAKTGERMWEERFPRDPVGIATFVARCTPRVAVAVEATSPTWSFVDAIERHVGRICVVDTRKTKLKAGYAAKTDRLDARRLADALRRESVVSIYVPPPAIREQRELARHRLMLTQMRTRVLQRMRALLLRQGLGDPPTTRLRSAAGQAWLDQLVLPPQAHRALRTLRQIERDLCAQLAPVDADIAREALADPIVRQLQTVHGIGPVLGLMLRAEIGDVHRFPTPAHLASYAGLVPQVDSSASRTHYGRITNDGSPWLRWALVEVGVQTLRRRDPLGRWGRKLAVRKGAMKAHVALAREMCREIMETWRHAA

SEQ ID NO: 265120 - protein, 370 aa, unidentified
MKKQSKTLGLKTNQEMIEDGMNAVAGLDLGDKHSVVCVMSLDGEVVERKKIPTSLTAFERYFRAWAGMRVVFEAGSHANWTYRLLERLGHEPLMADTHRLALITQSLSKDDRNDAERLTELGLRMPEMLNPIEPCSLETQNDRTVLKAREALVEVRTKLINSVRGTLKSFGLRLPGVSAGAFAKKAGPLLPTELREVLHPLLLLIQHATDEIRRYDKRIEELAQDKYPQTKRMRSANGVGAITSVAFVLNLDNNPNRLRHSRDAGARVGLRPKRRDSGERSPELSITKSGDPMMRRLLVQCAQYILGHRGEDSALRRWGLGLAARGGKSAKRKAVVAVARKLAVLLHVLWQRDVDFEPFYGVEQTPPKAA

SEQ ID NO: 265121 - protein, 363 aa, unidentified
MNYIFVGCDSHDKTLVTKIALNLEPAEKKTFSGTRRGREKLIAYLSRRSAAAGGAKAVVAYEASGNGFILCEEIKAAGHECHVLAPTKIERSTKQKRNKNDERDADRLLEILRGHYLAGNRLPSVWIPDAQTRDDREPVRTRHDLSQKATAVRTQLQMLLKRNGIEKPEGIGKGWTKPYRQWLKALTESGTANRQGMRTTLASLLRQLEFLEEEIGRLDEAMQSVANTARWKPIVDALMREKGVGLKAALKYATDIGDFSRFRRGRQVGAYYGLTPSSQESGDNNDRKGHITREGSPSTRQILCQSTWARVRHDPHERAVYQRLVAKNPKKKKIALVACMRRLSVRLWHVGLQAQLNMTKQEN

SEQ ID NO: 265122 - protein, 315 aa, unidentified
MNEAADVIVGIDVAKAALDVAVRPRGEARHLANAAAGIGELVGWMQALSPEVIVVEATGGYEAPLVAELGIAHLPVAVVNPRQVRDFARATGRLAKTDRLDAQALAHFGQAMRPTPRPLPDEDTQALAALVERRRQVVAMRTAEENRLGATRVAPVRARIQAHLAWLEADLGEIDGDLQQQLRASPLWREQDDLLQSVPGIGPIIALTLLAQLPELGRLSHGQIAALVGVAPLNRDSGTLRGRRAVWGGRQAVRTALYMGTLRATRCNPAIRLFYDRLLAAGKAKKVALVACMHKLLTILNAMRKHQTPWQAQAA

SEQ ID NO: 265123 - protein, 403 aa, unidentified
MKHVIAFDISMGKSYMVIYNAQKQCVFESEIKHSKPEFKKLQEKIHELTDKTGELPKIVFEATGIYSRQLERFMQDNQYTYCLLNPLEAKLQCDSLRIHKTDRSDAHRLALTHFTATRRVFTGTDNLFYQLKSLSRLYSELDSELSIIRGRMHKVIQLTFPELERMFTSKSDLFLNFVQLFPHPDCILGLSKTIIKNRIRANTNKKISNITAEKKAIQILEIAKTSYPAVSQNDVLCDQLKLYARRYQELLHQKECCINKMVYIAEQRAEYNIILSLPGIGPNTAVRLMAEIGDITRFNNNKQLNAFAGIDIRRFQSGKTFFKDKINKRGNKHLRKLLFLIIQNMIKQRRYGQNHIVEYYDKLKTQPYNKCHKVASIACVNKFLKLLFHLITHDIHYDYRLAA

SEQ ID NO: 265124 - protein, 421 aa, unidentified
MKVHRNCCGLDVHKETIAACLILEDAGGNTRKEKRLFGTMTQHLRELAQWLREAEVTAVAMEATGVYWVPVWNVLEREGLKLVLINPEHYRAVRGKKTDLKDGERIAELLQDGRLEGSYVPRTELRVLRDLTRYRVKLVEHQGSVACRIQKLLEQCNIKLASVATNVLGVSGTAMLHALAQGETNPERLADMAKMQLRKKLAALQLALDGHLLPHHRFLLSEMLEELSHVQSSIARLEAEIELQMKPFQKALQAWMSIAGIKHRVGWTLVAEIGPDLEAFPSPDDLASWVGVCPGNNESAGKRKSGKTRKGNRWARRALCEAAWVAAKAKNSYLSAQFRRLAAARGTKRAVVAVAHTMLTIGYHLLQRGTTYQDLGANYFDQRHTLRTTKRLVKRLEALGHRVTLDSPLSTALNQKLSATS

SEQ ID NO: 265125 - protein, 283 aa, unidentified
MLTAEADKCKTKVVVNTAAGVQALLAWCAKHGAQPAQLHAILEPTGLYHEQAATALPQVRVSLVNPAQARDFAKALALRSKNDALDSYVLARYGQTLSPALWHPAPLHARQLRALLTRREALSKDLLRELNRKEKSQFSPSAPLVDGSIDKAIAFLREQIKQIERAIDQHIDNHPDLKQDCELLNSIPAIGPQAGNAILAVMHNRHIDSAQSLAAYLGVVPVQRQSGSSLNSCARLSKAGPSQVRATLYMAALVGTRHNPHIRALYQRLLKAGKSKKAALARP

SEQ ID NO: 265126 - protein, 430 aa, unidentified
MKQFELLHSLFVGIDVSMKENVVHAMPFSPEDHPGHAHLRFSAPNTPAGSAEIVEKVGDFLKFYPDVTQVVIALEATSVYSFHLATFLSVAQFNGHIPAIVYSVNPKEIHAYKKTFTDVGKDDYVDAMVIADYARSNKIRSRPWKGPELLGLRILTRLRFRIARLIGILKNSTGNSIYLECSGLMTGENPFCNVWTATCQQLLTTFQGPDEILNLSDEELLNFITEKGHGRFSHPLDVVKKVKKAARNSYRLDKRVYEPLTSGLSVSFFIIHSLEAAIKKLDKSIETMAKSFSSDSYLILLSIDGVGPVIAGGLLAEIGDIKRFETDDDLAKYMGLTWRGKQSGQSESPVKHMSKAGDVYLRYYVLLATGQIINYSAKYREAYERIRSRKTLFPYRAALNLVARKIVRLIFTLLDRHQLYSDNKVMVTLE

SEQ ID NO: 265127 - protein, 369 aa, unidentified
MSTMPDKITGGVDTHLNVHVAAALNGLGALLGVESFSTTAAGYRALLAWLRSFGEVQKVGVEGTGSSGAGLTRHLLSEAVAVVEVDRPNRQNRRLRGKSDPLDAVAAARAALSGEAQGEAKTRDGNVESIRVLRLVKLSARKDRTRALNQMHSVISTAPEDLRAELRGLTNFRLVERAVAYRPAGKTGVVGATKTALRHLARRVQDLESQIAEVDAVVDPLVRATAPELLEQVGVGTDSAGALLVAAGDNPERLHSESSFASLCGVAPLDASSGKQQRHRLSRSGDRQANSALWRVVMTRISYDPRTREYIERRTKSGQTKVRGLDGEARVDWARRSPRRRVPTTRNAGPAPRRRDACGRRRPGRGPGR

SEQ ID NO: 265128 - protein, 353 aa, unidentified
MSHLPEEREVILGVDTHLDVHVAVLVDVVGRIVATTSVPTTALGYEQLIEWARGFGRFTRAGIEGTGTYGAALARRMHEHGVKVLEINRPDRSRRRLRGKSDPTDAENAARAVLAGEANAIPKAQSGIVEAMRAVSMARRSAVKAKTQAINQLRALLVTAPESIRATLWKVKPEQCVARCARLQSLGDTPLLQALTNTLRLLARRWMSLAKELHQLDAALVELTKRAGRRLLARFGVGPQTAATLLVTAGDNPNRLRSEAALAALCGASPLEASSGKTTRHRLNRGGDRAANNALWTISMVRMRSDPRTRAYVTRRTAEGLSTKEIQRCLKRYIVRELYPLILADLADSVCKA

SEQ ID NO: 265129 - protein, 343 aa, unidentified
MQITTIGLDLAKNVFQVHGVDATGQVAVRKSLRRAQMLPFFAKLPPCLVGIEACGTSHHWARELIKLGHEVRLMPPAYVKPYVKRGKTDAADAEAVCEAVTRPTMRFVPVKSPEQQAALSIHRTRDLLVKQRTQTINMIRGLLAEFGIDIPKGLERALLMARQIVDGKSPDVPIEAAKIVGTLSQQALDIHVRLREIDRDLAVWLRSNDVARRLMTIPGIGPVGATALAASVTDPHQFRSGRQFAAWLGLTPLQKSSGGKERLGRITKMGDKYLRKLLIVGMTALVRRARQNPEGNPRLADLLARKPARVATVAMANKTARVIWAIMARGETYRTGHQPALAA

SEQ ID NO: 265130 - protein, 352 aa, unidentified
MKPRHFIAMDTHCQFCELVAMTERGRVVQRNRCPTTIPALVDAIEQVPRPRFLTIEEGPLADWLYRNLVNHVDEMVMSEPRRNALIAKDSDKDDPIDAEKLANLYRGGHIKAVHHAESAERMLLKRHTALYYDRVRQRVREANRIMSEFRRTGIFVHEKDFVHEADRPALLRRLGTPILCEEIELLWRSYDVVNGQVAMMRSQLTCLGRKDPQVRRFTKVPGIAWIRAVTLFVYLDTPWRFHSKQALWRYIGIGLERRRSGNGPLRLGVGQNANHVLKSTILGAAKSAIAAGNNPFADQYERWIADGISLPNARRNVARSQATTLWGMWKYGSEYRPQWVGVAAAAQLARAS

SEQ ID NO: 265131 - protein, 443 aa, unidentified
MVCGDWNGYPATDKNGCMEREGLMIIRDPKSLPPLISLDVSKGEAHALSVVNAEDIVSGKKRLKTRRFLFTKSGLDTISQMRDEIIKARNDGEDPVVVMEFTGCYSKPVEHYCQEHGFRYAMVPPTMSNKTRENESVKAAKNDNVDCRYIAVSYFEHSIEDRVKDSDEMARIQALNALRATQICLTKRLKQTFRNYLDLVFPRLDRISGLFLYSKAFLLTISEYPHPDLIPSQKKLPKAIMKNDRIHGLGYASDMADKITSYLKDCYSGVSSDSTEVSSLSYICSSLVRSIDEMSEIESKLFSASSNTSQYKRIQTIPGVGPVVASTITAACGDLKQFKKSGALESYLGIVPLTKASGTETGLHHQISHKGNTKARTALYLAAQAAVACSKENAFQRFYARLTEGNNKRPALARTQALIAVAHKILTVMRAICINETDFDPSR

SEQ ID NO: 265132 - protein, 327 aa, unidentified
MFYTGLDIHRKFIYATVLDDNSQIVQQGKFLTTEVDFDSFLGFMPPKQVKIVMESCGIWEDFYDLLESKGYDVCLANPQGVKAIASAKIKNDKVDSEVLAKLLKADLIPKSYIPPKDVRELRALVRHRKILIKHRTKVKNNIHQILRMKNIKHGFKDVFTQKGIKYLKQMNHERINCFLKIMETLNEEIKSLDEQLKENRTSNKEVHLLSTMPGIGRYAAQVIQSEVGDVKRFPSPKKLCNYAGIVPSQNQSADKDYRGRITKVGSRNLRWILVQGAQVAVCLPNKLQKHYYKLAKKKSRSKAIIAVARKMLTIQWHMLTNKEPYIE

SEQ ID NO: 265133 - protein, 344 aa, unidentified
MKITTIGLDLAKSIFQVHGVDATGQVVVRKSLRRSQMLPFFAKLPPCLVGIEACGTSHHWARELLKLGHEVRLMPPAYVKPYVKRGKTDAADAEAVCEAVTRPTMRFVPVKSPEQQAALSMHRTRDLLVKQRTQLINMIRGLLAEFGIDIPKGLERALLMARQIVDGKPPEVPFEAAKIVSTLSQLVLDTHVRLREIDRDLAIWLRSNDVARRLMTIPGIGPIGASALAASVTDPHQFRSGRQFAAWLGLTPLQKSSGGKERLGRISKMGDKYLRKLLIVGMTSLVRRAKYNPGKIDPRLADLLARKPTRVATVAMANKTARVIWAIMARGETYRAGHRPALSA

SEQ ID NO: 265134 - protein, 370 aa, unidentified
MSEFSTIFVGLDQHKESITVAYVGADRSLEPICLGPIGPRTSDVDAMVRKLQSKGKKLVFAYEAGPCGYGLHRHLTRKGHTCLVVAPAKIPRKPGDRVKNDKRDATNLCRLLRSNDLKCVYVPQIADEAIRDLCRAREDAVSDLKAAKHRIKSFLLRHDIRFNGKADWKTPHLRWLGEVKCETSAQQVVFQEYVRAMIQGFERVGRLEIELTQHVQSWRLSPVVEALQALRGVRFTVAVTAIAELGDLTRFENPRQLMAFLGLHPSEHTSGERRRLGGITKTGNTHARRALVEGAWAYRFPARVSKQIQARQEKLPEAVRDIAWRAQVRLCKRFQKMIARGKNSNVVVTAIARELAAFMWAIAKQVPVAA

SEQ ID NO: 265135 - protein, 347 aa, unidentified
MRFYTKQHRYYCGIDLHARSMYVCILDPQGEILLHRNMACAPELFLKAVAPYREDMAVAVECIFTWYWLADLCAQENIVFVLGHALYMKAIHGGKAKNDKIDAHKIAALLRGGMLPMAYVYPALMRSTRDLLRRRMHLMHKRSELLTHIQNTNSQYCLPQFGKKIAYKKNRQGVAEHFADSSVRKSIEMALSLIDHYDKLLTEVELYITQNAKIHDVNAFNRLRSVHGIGKILALVILYEIHEIDRFPTVQDFVSYARLVKCSKESAGKRHGSSGAKIGNVHLKWAFSEASVLFLRANPAGQRYADKLTSKHGKAKALSILAHKLGRAVYYMLKRDKAFDMNKFLNS

SEQ ID NO: 265136 - protein, 414 aa, unidentified
MLKIVYRICCGMDVHKSFVVACIASTNEQGVTTYKSKRFSTFAGDLRKCAAWLAENNCKDVCMESTGKYWIPIYNILEATCNIVLAHPKYVKAIRGKKTDKRDAKWIADIFKHDLVAGSFIPPADIRQLRDLFRYRWKLTHYTTGEKNRAQNCLTVSNFKLDDVFSDVFGKAASAITSRILENPTERITDVSSFRTKGMRATNEQVLAAVDGEMCAEQAEKLRIIRSHMNSLELCKLHLESLILSTAEKYLPQLNLVMTAPGIQSFAAIGIISEIGVDMSVFPTSKHLCSWAGLTPQNNESAGKKKTTRISRAGAYIKPLLVQCALNAIRAKQFPEVRNRYLALKKRRGHKKAIIAIARMLLTAIYNMLKKNEPYNPELYRKGDRPPAHREVSVEEAIFILQRQGYLVTAPPTT

SEQ ID NO: 265137 - protein, 432 aa, unidentified
MKYKLKQKQNQRITRITEKTLVVGADIAKKIHVARAVDFRGIELGKECVFHNDQEGLTKLAAWMKELGRIHEKTDIVFGIEPTEHYWFPLAAFLKEQDIRVVVVNPHHVNKSKELEDNSQTKSDYKDAKVIADLIRSGKYSEPNLPTKEYAELRILMNFREKVMVSLNQVKARITNWFDRYFPEYPQVFKDWEGKASLMTMRQFPTPEEIVSIGARGVLTHWKTEIKRGVGIKRAEQLYAAATVSIGLTEGLTAARIELAALLQQYDLYCKQEESIMTEVLQILEKIPGTKQMLSIPGIGILTVAGFLAEVGDLNNYDHGQQIIRLAGLNLTENSSGKRKGKTGISKRGRSRLRGILFRCMLPMVAKNKEFKALHEYYTTRSQNPLKKKQSIIALCGKLVRVLYALGTKQKEYNANEVLGPIRQAQLQQSAA

SEQ ID NO: 265138 - protein, 347 aa, unidentified
MAENISPLAEVTTVGVDVAKHVFWVHGVDARGRVVIAKSLRRKDVSGFFATLPPCLVGLEACGSAHHWARTLAAHGHEVRLMPPAYVKPYVRRQKNDAADAAAICEAVTRPSMRFVAVRSIANQAVLMRHKVRELLVSQRTQLLNAIRGHLSEIGIIAPQGAHHARGLARFIIASNEAVPDAVRAALLPLVTQLDNLDAEIDRADRSIKALAAADARARRLMTIPGIGPLTASAIAASVQDAAAFASAREFAAYLGLVPRQRSTGGKERLGHISKMGNRYLRKLLVVGAHAVLFHRKGHSDALRIWACKLLATKPFKLVAVALANKLARIAFAVLRTQTSYRGAAAA

SEQ ID NO: 265139 - protein, 355 aa, unidentified
MNQEKYIGMDVHQATISVAVMDGNGKIIMECILETKAATILQFIQGLHGTLSVTFEEGTSAAWLHDLLKPHVSHLVVCDPRKNALLKDGSKSDRIDARKLAELLRGNQLKPVYHGEHGVRTLKELGRSYLTITQDVTRVMSRIKALYRSWAIPCSGTTVYALRHRAEWLAKIQEPGVRLRAERFYQQLDLLQPVRQQARCDLLVESRKHSAVKLLRQIPSIGPIRAALLVALLQTPHRFRTKRQLWAYSGFAVETHDSGEYRYVRGKPQRNRERMTVRGLSNNHNHDLKNLFKGAAISASIRPGPLRDFYVELLERGMRPTMARLTLARKMAAITLTIWKKGVDFDPRQLHRQAA

SEQ ID NO: 265140 - protein, 412 aa, unidentified
MTAINQFAAHVGLDWADKKHDVCIQYESGERRFQVIKHTPEALDTWLRELHKQVKGTIAVALELKKGPIVYALQKYPYVTVFPVHALSLARYRQTFWPSGAKDDPLDAELALDLMLRYPNKIKAIEPSNSEIRLLQQLVEQRRLLVEDKRRFVNRIINTLKQYYPQPLEWFSHRDSELFCDLVIRWPSLQQLKRARAQTVRIFLNSKGGTAVAHTEQRIKHIADAVPLTTDVSVIEANALMAVALAKQIKLVASNIKAYDERIEALFDTLPDANLFKSLPSMGPCMGPRMLAAIGDDRNRFNSAEEIQNYAGIAPVTERSGQKSWVHWRWQCAKFVRQTFVEWAAKTVYSSYWAELYYQQQREKGKSHQSAVRALAFKWIRIIYRCWKNKTPYDEAKYLKALRERNSPLLMV

SEQ ID NO: 265141 - protein, 332 aa, unidentified
MTEYIGIDVSKQSLELWDGTQEEEVPNERRLTTLKKLLKKRYGGEWNQQVRFIYEPTGPYSNYLRVFASENELKVHEVNPKKSANFAKVLGNRSKTDAIDAKMLSAFHALLAEEDFCIPAMDERAEQLGAYLGSYEIIQKTRTMLSNHVHALEEKSGVTRKLKDSLEKELGRLGTMEEQLEKEMGAVAEDHEETREALHNLLSMNGIGIISAMSLLYLFRKYPGAHRNEITALAGLDPGQRQSGSSLQGGRKISRAGDPLLRKVLSLACMNSIQHNECIQAFYKHLVSDNHKKPKVALVACMRKLLFIAHHLYVTTSKYRALHHDANLCLSS

SEQ ID NO: 265142 - protein, 343 aa, unidentified
MDHFAGLDVSVKKTSVCIVDDTGKIVREVKVASEPEALLAVLKNPAYQFKRIGLEAGPLSQWLYSALAEAGLPVICVETRHMRAVLKAQINKTDRNDARGMAQMMRVGLYRPVHVKTLRSQKLRMLLTHRQLLLSKAIALENDLRGTLRNFGLKVGMVGKVKFEARIRELVETLPDLAVLVEPMLIVRRVLREQIVILHRRLLAVVRDDEVCQRLMTTPGVGPVVSLTYRATVDIPARFRKSKSVGAVFGLTCAKYQSGEVDWDGRISRCGDEMMRTMLYEAAQAMMRSKKWSWLKAWAMQIARRRGIKKAIVALARRLAVILHRIWVDGTEFRWTREQAVAA

SEQ ID NO: 265143 - protein, 321 aa, unidentified
MLKFDEVYGVDISKDSFDVFNTSGIHNQFRNELDGFIAFSTKLTNKSLVAIESTGAYHVGIAEYLHAQGYHVAVLNPLSVKRFIQMKLSKIKTDKSDAKAICEFAQTNPVPLFYPRDKVNKECWQLISLINSYTNQRTALQNKIKAEKVLNVPSRKVYDSIERTLLFLKNERIILDEYLFNLVKKYYPDQLTLLNSIPGIGNKTATFLIVITRGFSRFENSKQLCSYAGITPIIRQSGSSVRGRSRISRMGNKNLRNLLFFCSLSAFKCNKGCKELYERIVGKGKSKKLALIAVCNKLLIQAFAIVKSGLPYDENFVSKLK

SEQ ID NO: 265144 - protein, 388 aa, unidentified
MLFVGIDVSKDKFDACGIGDSGKKVFALTASMDRNGFEKLVLHLKNHARLLGLESTACYHLALFSYLTAQGYRVVIINPLLIANFVKLRLRKTKTDKKDALTIAQFLMLKREALEEHSCSADVMELRDLARRRERLTDQVTKLKGNMKRILSVTFPELEHLTGVFAKSILQLLIRFPSAAAVRNATVDEVASIVVPRSWGRKSKAWVEKLMATAASSIGVPSPAKELVLKQDAGQLLYIQGQIKEVTKLLTSLCTEKMKKDIDILTSLQGIGVSTALQFLIEMGGDIHLYKNDKKLIAAAGLDPSTYQSGTHEGKSKISKRGNRHLRRVIWLMAKNTIFSNELFRSYFYKRRREGLPYKMAVLATAHKLIRVMFSMLVHQTYFKEGGK

SEQ ID NO: 265145 - protein, 361 aa, unidentified
MKKTTQHLIAEVPSKHSPTELTVGVDLGDVWSHYCTISQNGDVVDRGRFRTNPQGVEKWFKNLAPVRVAMEAGTHSIWISEQLQLLGHEVIVANVRELRAISHSDRKSDQVDAEKLARFARLDPKILRPIAHRTLQQQQALTLIRARDLMVRLRTAAVNAVRGLTKSCGHRMPASTTACFARRGLAMLPAELAPALGPVLEQIAEMTTKIKQYDRQIRQLTQTECVETQALLKVYGVGPITALTYVLTLGDKQRFQRSRDVGCYLGLRPRRSQSGDRDPQLGITKAGNGYLRMLLIECANHILRPPGKDSSLRRWGLALAARGGKKAKNKAVVAVARKLAVLLHRIWVTQEPYIPFYAEAA

SEQ ID NO: 265146 - protein, 483 aa, unidentified
MAKRKLSTFERLTNGKLNRKQRKELTRRLCAEDPGLEIVHRNAAGIDVGNQSHYVAVRPGSDPQPVREFGSWTADLHRMADWLESLGVKQVVMQSTGVYWIAVYDILQARGLAVCLTNARDTKNLPGRKTDVQESQWLLKLHTYGLLRNSFRPPEQIRALRTLWRLRDRHVRDAGREIQHMQKALTTMNVQLANTISDVSGVTGQAIIRAILQGQRDPQQLAELRHYSIQASKQAIARSLEGNWQEDVLFELQQAVDRYDFCQGQIAECDRRLKGYLAELPSRSCPPAEPEAAAPTEENPKRKRKLRNRKPRKNEPSFDLQAELNRICGVDLSTIDGVDVMTIHTWVSELGVDMTPWRTENHLVSWLNLAPKRQISGGKVIKHEHSPAKNRLADALRMAASTLRESDSYLGARFRALRARLGPGKAIKAMAAHLARLIYRMLTRGQAWVDRGADVFEERRTEREKKALQRKATALGLRLMPVA

SEQ ID NO: 265147 - protein, 412 aa, unidentified
METWVKCGCGLDVHQATVVACLLAVQNDGKVQKQMRTFATTTRELLSLSDWLLLEGCTHVAMESTGIHWKPIYAILEGGLQIVVANAQHVKKVPGRKTDVKDAEWIADLLCHGLLRSSFVPPKPVRELRDLTRYRRKLVESRSAERNRLLKLLESANIKLASVAADVFGVSGQLMLRALIEGKATPQEMAELAKRRLRSKIPQLALALEGKLEEHHRFLLQLQLDRLEAVEKDLTTLEQRIQEKLKPYATQLALLQEIPGVDWTLAAVIIAELGVDMSVFQSVSQLASWAGVCPGNNESAGKRKSSRIPKGNVYLKTALVEAANSAARAKGTYLRDKFYRLKARRGYKRAAVAVAHKILVSIYHMLSQNVPYNDLGDLYLDKLNKQHLTRNLVHRLERLGYTVALTPQQEAA

SEQ ID NO: 265148 - protein, 344 aa, unidentified
MDHFAGLDVSVKETSICIVDDTGRLVRETKVASEPEALLAVLTNPAYHFKRIGLEAGPLSQWLYSALAEAGLPVICVETRHMRAVLKAQINKTDRNDARGMAQMMRAGLYRPVHVKTLRSQKLRTLLTHRKLLQSKAIAIENDLRGTLRNFGLKVGVVGAVKFEARIKELVENVPDLAVLVEPLLMVRRVLRKQLGILHRRLLVLVRGDEVCRRLMTVPGVGPVVALTYRATVDVPARFKNSKAVGAVFGLTPAKYQSGESDRTGAISKCGDEMMRVMLYEAAQIMLVRSTRWSWLKAWAMQIARRCGMKKAIVALARRLAVIMHRIWVDGTEFCWTRKEAAAT

SEQ ID NO: 265149 - protein, 466 aa, unidentified
MAQRGRGQGGKGQRQRRGLERINANAAGIDVGCNEHYVAVPPGRDAEGRDVRSFRGFTCDLEQLAEWLRLCGVTTVAMESTGVYWIPLYDLLESKGFEVLLVDPRGLKRAPGRKSDVLDCQWLQELHTFGLLAGAFRPEEQTAALRAYARQRAMLVAYASDHIQHMQKALTQMNVKLRSVITDITGVTGQAIIRAILDGERDPRALASLRHEACHNDEATIADALEGTWREEHLFSLRQAFELYQIYQEKIAACDAAIEAHMSGMDDRTGGATLKPTKRGKRRKNQPHFDLRGSLYRIAGVDLTRIEGLDAITVLKVISEVGADMTPWPTRKNFTSWLGVCPGSTITGGKKLSSRTKPSANRAAEALRVAAQSLHHSRSWLGAFLRRKAAQKDMPTAITATARKLAELIYTLLKRGTEYVTRTQEQYEMMHRQRMLAGMARSARRFGYVLVPKDAVMLTPEPAPAQ

SEQ ID NO: 265150 - protein, 325 aa, unidentified
MDVLGIDVAKASLVVVLLVGERQQRAEFANTPAGHAKLLSWLAKRCPAPVHACLEATGTYGDDLAQLLFDAGHTVSVVNPARIAAYATVQAARHKTDQADAALIARYCQREQPAAWQPPAPELRELRALVRHLDTLQQQRQAEHNRLEAGGHPATVTQAIQAHLTFLSAQIDTVEQQIEAHFDQHPDLKRQRELLDSIKGIAARTATRLLAELGDWQRFANARAVVAYVGLNPREYRSGSSVQRRTRLSKAGNAAVRAALYFPAIVAKQHNPLVQALCARLTARGLCPKAVIGAAMRKLVTIAYGVLKSGQPFDPKYAQLASGQA

SEQ ID NO: 265151 - protein, 366 aa, unidentified
MENKVTHLGLDVHKDSIAVAVLRPGELEPDQRVIANTPDALRKLIRRVADRSSLVACYEAGPTGYGTQRLLASLNVECDVIAPSLVPKRSGDRVKTDRLDARNLARLHRAGELTPIRVPSAEEEALRDLVRLREDLKDDRRRMQHRIKSFLLRHDRRCPDHRRGWSRRYRLWVTAQRFDDPNTQLAFDHLLAALNTRTVQLDDIDRQLAEAAARPPLGDAVAKLRTFRGIDTLSALTIAAEVCDFRRFPSARSFMGFTGLVPSEHSSGLRERRGSITKTGNAHLRRVLVEAAWSYRHKPFVRPAMSERFVGQSSHVITYSWQAQVRLHERFKSVAARKNRNVAAVAVARELAGFVWGLMNERIDPV

SEQ ID NO: 265152 - protein, 413 aa, unidentified
MLFVGDDWAEDHHDVEIVRDDGRRLVTKRLPEGLDGITRLHGLIAGCMPPEEWAELEPGEAAALVKVGIETDRGPWVAALVAAGYEVFAINPKSSAHYRELHTTSGAKSDRGDAHVLAEIVRLDRAHHRPVAADSAHGESLKLVARAHQSMVWERTRHVLRLRSALREFFPAALAAYGDLDEPDTLQLLTIAPDPDSAARLSTAKISAVLTQARRRNVAARAQRMQDVLRAPALRQPGPVQAAFAAIATSEVRMITAINTEIAALGQVVAEHFGRHRDAEVYLSQPGLGVILASRVLGEFGDDPDRYADAKARRNYAGTSPITKASGTKKVVLARYARNTRIADATQQWAFGSLRGSPGARAYYDELKARKIGHRAALRQLANRWVGILHGCLKTQTLYDEKTAWGHRNTTAA

SEQ ID NO: 265153 - protein, 340 aa, unidentified
MSEISIIGLDIAKHVFQVHGADALGRAVLRKKISRAKLLSFFASQPRCRVVLEACGGAHHWARELARLGHDVQLIAPAYVRPFVKRQKNDAADAEAICEAAQRPSMRFVPIKSETQQAAAMVFRGRDLLVRQRTQISNALRGHMAEYGWIAPKGLAHLDKLATLLADPAAVPEGVRSVCTVLLESLALLDRQIATLDQEIVRRSREDAVARRLMTIPGIGPITATAIAALAPPPGTFAKGRDFAAWVGLTPRQHSTGGKQKLGAISKMGERTLRRLLIIGSSAVVLQASRRGAPRGSWLEQMLARKPRMLVTVALANKTARIVWALLMKNEDYRAPVVAA

SEQ ID NO: 265154 - protein, 344 aa, unidentified
MEPMYYIGLDVHKQKISYCVKDLGGKVCAEGSIPATRFDLDHWMKTLPQPWSAAMEATMFTGWIYDHLKPHAAALKVAHPLMLRAIAAAKKKNDRIDASKICDCLRCDFLPECYMAPTAIRERRRTLRYRNLLVRQMVQMKIKISSLLMEAGVSYNKQRLHKAGYFRELLATNPDIDEGLRALLRQCRETVVRLGKTESALIRSLEHDRLLAQRVERLMSIPAIGPITALTWALEVGEVQRFSSIKKAVSYCGLCGAEKSSGNTVQRTPLSKQRNKHLQTTLIEAAKMAPRYSPTLALLYDREKQRGNANRATLAVARKLVAYLVAVDRGQTRFLAVDHEACAA

SEQ ID NO: 265155 - protein, 354 aa, unidentified
MLIIGCDFHTRYQQIAMAREETSELLVERRLDHESGEAHAFYRSLQSSQEPVRVGIEATGPIHWFERLLAELGHELWIGDSARIRASEVRKQKTDERDARLILDLLLSKRFPKIWIPTPAERDLRQLLWHRHKLVCLRTMLGNQLHALAMSQGLCRKRKLFTKKGRMELQGLALAPWGRRRREELLKLLDQLEPPIADLDRAVSEEAKRREDAVRLMTHPGIGPINALAFVLTIGPVTRFPRSRKLVSYLGLNPSEESSGGRRRLGAISKQGNTMVRWLLVEAAQQAMRFDPALRQDYLRLKFRRGHAVAKVAIARKLAVRMYWMLRSGADYARLVRRQGSPGGTLMNASSSLA

SEQ ID NO: 265156 - protein, 359 aa, unidentified
MLTQSNKIDFSGQHFYVGLDVHLKSWKVSIMAEKLTLKTFSQDPNPELLHHYLVKNFPNGIYHSAYEAGFCGYWIHNKLKALGIDSIVVNPADIPTTDKEKVNKTDKRDSKKIAKSLRNGDLKGIHVSSLKTLEDRCLVRTRGTIMKDLTRNKNRIKSFLYFHGIEIPETFTHSSNHWSKRFMNWLRSIELVEYSARKSLNLIIDESEHLRLIILDATMGIKELSHSETYVNRIKLLQSIPGIGILTAMIILTEIETIDRFDSFDKLCSFIGLVPTMHSSGEKEMIGEITHRGNNFLRSAIVESAWVAARKDLALNKSYHDYCKRMEPNKAIIRIARKLLNRIRYVLKNNEPYNYCVVK

SEQ ID NO: 265157 - protein, 357 aa, unidentified
MVLYGGLDLHGDNVYCTLIDQTYRPVFEQRLPNDLPTVLAALAPYRDRLAGLTVESTFNWYWLVDGLQANQYPTRLANPARMQENIGLKSANDKTDARFLAKQMAMGVLPEGYIYPKEERPMRDLLRRRMRLVQQRTGEWLSLEGLVARHSGQDLGIQALAKLSTAELDALLGHDPLVMAAAQINLEHIAFLDECVHRIEKAVEGQVKLKDGYERLIGVPGIGRILTMTIMLETGPISRFPGPGNYASYCRAVKTEHTSNERKKGEGNGKSGNRYLAWAYIEAANFAVRYSPELRAWYQRKAERTKRIVALKAMANKLAKACFFILRDGVEFDVKRLDWIIGRRRGTGVGFGNNHQG

SEQ ID NO: 265158 - protein, 414 aa, unidentified
MELLHERCAALDIGKKDLKACVRAPSPKGKRSRRQEIRTYSTTTNALLELRDWLLAERVTLVVLEATGDYWRGAFYLLEDDLNVILVNAAHAKGLPGRKTDVCDASWLCQLGECGLLRASFVPPEPIRQLRDLTRYRTTLTAERTREAQRLEKELEDAGIKLSSVATDILGVSGRAMLAALIAGEDDAVALAELAKGRMRPKIPQLVQALTGNFGAHHAFLCRLHLERIDQLSATIGELSARIEEQMRPFSHKLDQLQTIPGVARAVAEVIVAETGADMSRFPSPGHLASWAGVCPGHHESAGKRKSGKTRHGDRWLCGALGTAAMAAARTRDTTYLGARYRRLVPRLGKKKAIVAVEHSILTAAWHMLTDDVDYHDLGGDYFARLDPERAMRRIVRQANALGYTVRFDPIHAA

SEQ ID NO: 265159 - protein, 348 aa, unidentified
MKKVVRQIVGIDVAQDELVVCLSRTDEELHQECFARKIFTNNVKGFGFLTQWVSKHSDAAIELRYVMEATGVYHERLAYYLEEKGCLLSVVLPNKISNFFRTLDVKTVTDKTAAETIAIFGLTRKLTDWKKPRPIFQQLRHLTRERGQIIDERTVLKNQLHAQKAGAKSSESSIARSKKRIDLLNKQEKEVRAELDQALKGDQEVKDLVKLICTIPGVGLLTAMTVLAETNGFDLIRSKKQLTSYAGLDVREKQSGTSVKGKPRISKRGNKYLRKSMHLPALTAIRHDERYKAVFARLVGKHGIKMKAVVAVQRKLLEMIYTVFKKNEAYDKNYFLHQEEKNEAAIKN

SEQ ID NO: 265160 - protein, 343 aa, unidentified
MQIRSVGIDLGKTTFHLVALGDNGKVLLKKKFTQKQLIAFTANMQTCLIGMEACSGSHFLGRALREQGHDVKLIPAQFVKPFVKSNKNDFIDAEAIAEAVDRENMRFVPIKTDDQLDLQALHRVRDRLMARRTALINQIRAFLLERGMVFAKSPIRLREALPEVLENVNENLTPRMRNLVAMLWSEWKDLELQIVEMNDEVERIASSDDACRRLRQIPGIGPLVATAIVASIGNGAAFRKGREFAAWLGLLPKQHSTGGKARLYGISKRGNSYLRKILIHGARAVVLRSKRDRIAMGAWMTSLETRAPRNVLIVATAHKLARIAWAVLSTGQDYRAVPEALTV

SEQ ID NO: 265161 - protein, 368 aa, unidentified
MKSIAYVGLDVHKEFIVAVALPEKGDEPILEKRIANDSLAVKKLFVRLERTHEPVCCYEASSCGYVVHRWLAEMGIACDVVAPSLIPKKPGDKVKTDRRDARKLAKLHRAGELTKVHVPSEEDESVRSLVRCRETMVKEVQKSRHYVLKFLSARGLGYLAGSNWTKKHWNYLKGLKFEGADEITWRQYLTLLEYKLSQLEELNRQLAQVAEGEPYKQRVGKLGCLRGVGTQTAMVLISEVQDFSRFASPRALMAYFGLVPSEESSGGTTRRGGITKTGNSRARRVLVEAAWQYAHKPALSDGLKKRQEGQPVEVIAHSWKAQHRLHNKFWRIALKKERCKAATAVARELTGFVWALMTQYEQREASAA

SEQ ID NO: 265162 - protein, 394 aa, unidentified
MFFVGIDVAKRKHEAVVIDDKGRIVQKSFSFPNSLSGYNSLISCVKRITSTRKDIVFGMESTSHYWLALYSHLIKDGYTAHVINPIQSDAFRGLFIRQTKTDPIDAVIIAEVIRFGKYSSTHFPQHKILALREMCRNRLYMVDAISDLKRKTIALIDQVFPEYDQLFSDTFLVSSIEVLYRYPTPKKLLHIRRDTLTNLLIKTSGGHFGSAKADEIIHAAKNTFGIDDPYDVYADLIKTFIKQIKFIQKNVSEIDQKITAIMDEIASPITSIPGIGVTLGAVILSEIGDISRFKSADKLAAFAGIDPSLKQSGDYSSIRNHMSKRGSPYLRRALWMACIPATQVDPMFRAYYLKKRSEGKSHMKTMGHIAKKMICVIYAVLRDNKEYQPVLTAA

SEQ ID NO: 265163 - protein, 423 aa, unidentified
MKITTSEIQSNQSVAILAFDVSKNILNMTTAIGGQRSDHEFPNRTPQIEIQLLAWKQRAQMAGYSQVLVVCEPTGCYHMTLLATAHRLGLKTAWVSGESVFKMRAIETNDSGKTDLKDPHVIHTLASMGKTLICRHYDETYALLRQWHALYEQADIEAVRAKCLLASQLKVLFPDYDFQKDFLYTRSGTTLIEHYGANPQQIVKETKDRFCLQMKQAVPRMRQTTLDRLYSQAQSSVRNQQSTRLVDIQQWRFLQLWEDCQRHQSRKAEAKQQMITLYHDLCLFDPSLPRQQKDVVSTFYLARIVAETGPISDFTTLRKFMRYAGLNLREKQSGTYRGKTKLSKKGRSLLRKVLSQAVLPLVKKKGLYGPYYHNKKAHGMSGTKAMTAVMRKFLKLIYGWYKSGGQFDQSRIFTCESQYQCAA

SEQ ID NO: 265164 - protein, 327 aa, unidentified
MYVCIVSHDGELLVHRNMKAAPEPFLKAIAPYRDGLVVAVECTFTWYWLADLCAQEDIPFVLGHALYMKAIHGGKAKNDKIDSQKIATLLRGGMLPKAYVYPAEMRATRDLLRRRTHLMRKRAELLAHVQNTNSQYNLPEIGKKIAYKANREGVAERFDDPAVQKTIAIDLELITYYDQMLSDLELFILKTAKHHDAQTLYLLQTVPGIGKILSLVLLYEIHQIDRFLRVQDFASYCRLVKCAKESGGKRLGTSGNKIGNAHLKWAFSEAATLFLRGNEPGQKYLARLEKKHDKGKALSILAHKLARAVYVMLKRQTTFDLEQFLCT

SEQ ID NO: 265165 - protein, 310 aa, unidentified
MAKHITICAGIDTGKRKLDVALEGNREQLQVENTSDGHAVLLAWLRRHRVKRVGIEASGGYEQPVVAALRRKRFVVVVFQPAQVRAYAKFHLQRAKNDKIDAALIAVCTAAVRKIHAAPDPRLLPFAEQLTMIDQIGEDIARLKNRIESCRNVEINKLWHEDIVRLESREKAALKALVAAIRKHPDLARRLALINSVDGIGLPTAVAILVRLPEIGRITREQAVALAGLAPYDDDSGDQVGVRHIEGGRKRLRRALYTASLAASFRWNQQRPERNTSARLSPARGRCSSSPTPWLLAGRRGRTVHRRKRP

SEQ ID NO: 265166 - protein, 366 aa, unidentified
MDKIGVVEGRRQAGLPAPKRPPEGTPVWMAIDISRSKAVYCLRWGGSEQRRLSTPLGIEHVRALLEHYRGCQVHVAYEACGFGYELAWWLQEQGVRALVIAPSRVERAPGLQVKTDRVDVGKLARKFEKGDLKAIAIPSRTVHEQRQLGRTYAQSLKERKRAQVRIRSLMQEHGRLGPLPTAGWKVYSAWLREQHLPEPIRLCVQVHQQLRAVADQQAQRLKAELDTLARSDAYRPLVKALSAQVGVGWQSAIRVVLELGDIDRFRTTDALPHYLGLTPSQYSSGELDHRGHTLKCGPGVLRALLLECAWTAVRHGNAPELTDCFTRLAPRIGRKRAIVAVTRKLAIKLRRRWRAQRVSSPPAPAV

SEQ ID NO: 265167 - protein, 456 aa, unidentified
MAKVSKTNNRTERDWDEGLSALNRNAAGIDVGNAEHYVAVPAGRDLEPVQTFGSFTADLHRMAQWLKACGVATVVMQATGVYWIALFQILESYGFQVNVVNARHTKTLPGRKTDVLECQWLQKLHTFGLLNNSFRPTEEIQVLRTYLRQRENLVAAGSTCIQHMQKTLTQMNVQLANVISDISGVTGMAILRAIVAGERDPDRLSTFKHNRMRASRKEIARSLEGNWREELLFVLEQSLELYDLYVRKIAVCDQRIERHLKTMTSKPEPIQTSDPVALPSPKQEPRFSLKDHLCRITGVDLTKVAGLQVQTVQTIISEVGVDMSRWNTEKQFASWLGLCPDNRISGGKVLKSGTRQVVNRAATALRLAAWSLIRSQSALGANFRRLRSKLGAPKAITAMAHKLARLIYRMIKFGTEYVDKGMAAYESRYHQQQMKWLSKQAASLNLQLIPMPEVTG

SEQ ID NO: 265168 - protein, 349 aa, unidentified
MKKLIAGMDLHSNNVVIGLMDMDGKRVAHQKVECRLSEVVRFLAPYKKRLEQVAVESTYNWYWLVDGLQALRYPVVLANPAGMEQYSGIKHADDTNDAFFLAELLRLKILPTGYIYDPQLRPVRDLLRRRLTLMHQRTALMLSFKSLFTRTTGGQMSLSRLKAMEVAEAQELYAHPANQLIAGLQIQHIDQLDASIGRLEKAVLAVARELPCYPKLKTLPGVGIILGLTITMEIGDIKRFAGPGQFASYCRAVAAQCTSNGKSKGENNRKCGNKYLAWAFVEAANFAKRYDEPCRKWYERKAARTSNVIATKALACKLAKAAWHVMAKRSNYDEKRMFPELATKPMNKN

SEQ ID NO: 265169 - protein, 329 aa, unidentified
MKVQHIIGADLSKRSIDLVYHLSKTHIKIDNSTGGFNDLMRWLQKLNIDISETMIVMEHTGLYSYCFESFLHQHQIAFCKVNALEIKRSIGLVRGKTDKLDAARVAEYGYEKKNRLIVNEPLSNDLKGLQMLHSTYQRFIRHRAALINALKEYRYIGIAEKDLIIQTQQQLIKNFDKQIQKLMAQIEMIINQQPALNQNFLLLQSIKGVGKILALTVIIKTHNFTRFTNARKFACFCGTAPFDHSSGTSIRKKARVSHLADKQMKTLLDLSAKSAIQYDKELKEYYSKRTQNGKSKMSTINVVRNKILYRMFAVIKRQTPFIENYSQAA

SEQ ID NO: 265170 - protein, 298 aa, unidentified
MPMLEGRVDAVIGVDTHRDRHAAALLDPNGGVRATLEVPSDQAGHARLLRLAEAQAPGRRVWALEGTGCYGAGLTRFLVDQGEWVVEIDRPKRPRGRHGAKSDALDAVRAGREALARDHLTSPRQRGHREALRVLHITRAGVVAAGADARRQLKALIITAPEPLRDRLRGRPWRQQVGACAGLVAAPGDPVEDRATVRALALTAQRVLTARQDAHELEAELRRLVMAVAPALLTQPGIGPITAAQLLISWSHPGRFRSEAAFAMLAGAAPVQASSGQVVRHRLNRGGDRQLNRPCTPS

SEQ ID NO: 265171 - protein, 395 aa, unidentified
MGIDLHKETHTAVILDCWNRKLGEITFENKPSEFSKLTRKVSRFVTEEKNVVYGLENAYGYGRALAVWLIEKGNMVKDVNTSLSYAQRKSVPMYQKSDSYDAEAVALVLINMLDRLPDAIPDDKYWTLSQLVNRRDNICTHQSRLKNQLHEQLCAAYPSYKQFFSDISRATALYFFREYPSPEHLCGKTAEELAEELRPVSHNNCSIKRAEKILNLIQSDGETQREHQESRDSITRSLVSDLEHYRVQLEEVEKAIEMMLLQFHCTLMTMPGIDVITAANMLSEIGDINRFPNANKLAKFAGIAPVNFSSAGKGKDMCPKQGNRRLQAIFYFMAIQMIQISTNGVPRNKIFREYYLKKVEDGKNKQQALICIARRLVNIVYGMLKNHTEYREPEQ

SEQ ID NO: 265172 - protein, 372 aa, unidentified
MNYNTVYVGMDVHKESFSLCAYTIEAEKASHYQRTEADYKKVLNYLEFLRTIYGDDANFICGYEAGCLGYTLYHQLTANNVKCIILAPTTMLEQRSKKRIKTDKRDAEIIAKCLAQHNYSPVHIPTAKDEETKEFLRMRDDHKLALKKIKQQILAFCLRHNYRYDGNSHWTAAHLKWLKALTPESLYKEIRDEYLLTYQTLSDKLERLDKRIEELSAQDEYKEAVKKLRCFIGVKTHTALSVLVEVGDFKRFASAQHFASYLGLVPGEDSSGDDQNRLGITKAGNRHVRLLLTEASQCYARGHVGFKSKELKARQSGNTPAVIAYADKANERLRRRYYKMVLNKCKKHNVAKTAIARELACFMWGMMTDNLA

SEQ ID NO: 265173 - protein, 374 aa, unidentified
MGLGGDRNHGGADMAQAKTWAAFDVHVSGVVAATLDRDSGELRVRRLRGGSDAVVEFVAGLSGSVRATYEAGPSGFVLARKLEAIGVDCLVCAPGLIPRGASDRVKTDRRDAERLVRLLAAGELHRVAVPSVEAEALRDLVRAREDLRGDLMRARHRLAKLLLRHEVCFDGPQANWTQAHLGWLAGVRLAQPASQRALEDYRGAVASLMIRREQLEAEIARALPCSPWAQTARRLMCLRGIDTLTAAGLCAEIGDFARFSHPAQVMSYLGVVPSEHSSGERRRRGPITKSGSRHARRLLVEAAWHYRRPPRVAGSLARRQRGGEPQILALSWKAQRRLHHVWNRMEQRHKRRTIIAVAAGRELAGFCWAVATTD

SEQ ID NO: 265174 - protein, 424 aa, unidentified
MKFKMQDKQNQLIERISDSHLVVGVDIAQELHVARAVNFRGIIVGDPLTFENNEEGFAKLLQWINQLKTLRGFASTIVGMEPTGHYWINLSKWLYDQDIEAVTVNPHLVKKNKENRDNSRSKSDKKDALVIADMVKNGYYSFIRHSSETFEKLRVLMSNRDMTVKRLVSAINQINRWVDIVFPELRQVFKDVKGKGAMATLRLFPTPLELRSMKAVDIVEGWKSQMKRQPGIKKAQALIELAVHSVGTRQALEAYKLHLEQLIEEFDLATVQLERVEQEVTSLLKQIPFARNLLAIKGISEIALAGILGESGDLSDFAHGNSLLRHAGLHLSEASSGKWKGQIVLSKRGRSRLRRFLYLATMSLVMNNPDFKELHANNVNVKKMKKMKSIMKLIHKLARVLVGMARKNDSYRSEKIQSISPIAA

SEQ ID NO: 265175 - protein, 344 aa, unidentified
MEISVLGVDLGKNVCSVVGLDASGAVVMRRKVRRETLIALAEKLPACIVGMEACCGAHHLGRVFSAHGHDVRLMSPEYVRPYVKAQKNDDRDAEGIAEAATRPTMRFVELKSQDQLDTQTLHRSRDRLVGERTALINQLRAILLERGFVAPQGKRKLEGFLALLMDEQGGAGLTPRIILLVADARKQWAELDRRIAAFDAEFVRWVKENDEARRLTTIPGIGAIVASALVAAVGRAESFDRGRDLAAWLGLVPRQFTTGGRPKLLGISKRGNKYLRKQLIHGARAALPYVAERDTPLGRWAKGLISRAHRNVAIVAFANKLARIAWAVLRRHERFAAIRTPVAA

SEQ ID NO: 265176 - protein, 317 aa, unidentified
MRASAAFFVGIDVSKEQLDIAVRPSGESWTVAHEEAGLSALVARLRGLAPTLIVLEATGGWEVPVTGALAAAALPVAVVNPRQVRDFARATGLLAKTDRLDAQLLAQFAEVVRPAPRPLPDAQAQELTALLQRRRQLVEMLTAEKNRLPLAARRIRPQLQAHIAWLHQQIAQFDEDLRQLIRSSPLWREKDDLLRSTPGVGPVLATTLVAALPELGTLSRRQIAALVGGAPLNRDSGTLRGRRTVWGGRAQVRAVLYMSTVVAVRHNPVLIAFYQRLRAAGKAPKLALTACMRKLLTILNAMLKHHRRWAPVRAQHA

SEQ ID NO: 265177 - protein, 357 aa, unidentified
MKITTIGVDLAKNVFQVQGVDERGKAVLRKQVKRKDVVKFFANLERCLIGMEACGSSHYWARKLTELGHTVRLMAPQFVKPYVKTNKSDRNDAEAICEAVARPNMRFVPVKTGEQQAVLSVHRARQGFVKARTAQANQIRGLLAEFGIVIPQGIGHIAKRLPEILEDAENALPGMMRQLLQRLGENLKAMDRQVGELERQITLWHRDNEPSRTLEAIAGIGPITASAFVASVGDAKSFKNARQVPAWLGMVPRHEGTGGKVKLGRISKRGDVYLRTLLIHGARSVIRQFERKPDRADGWLKKLLARRNKNVAAVALAAKNARIAWALLAHERTYQSDYVTKRTAVQSRSVELNEATV

SEQ ID NO: 265178 - protein, 355 aa, unidentified
MNSVRYVGLDVHRDTISEAVLSESGRMIQQSILATRAAAILDFIGGMRGTLHVTFEEGTHSAWLYDLLERRVARLVVCNPRMNALLKSGNKSDAIDARKLAELLRADLLSPVYHGEKSAMEVQHLARSYALLTEDTTRVMARIKAIFRGQAIACAGQKLYGHKHRDEYLAQLGACALRRRAELLYQELEAVQQLRRQAKREMIVECRKYPETKLLCSVLFLGPVRAAVLIGRVQTPHRFRTKRQFWAYCGLALEMRDSGEYRMVDGQVERRKKPAQIRGLNWNHSHELKNLFKAAATTASFSNGVFREFYLGLLKKNMQPEMARLTLARKIAAIALKIWKKGEAFDAEQVKLQAA

SEQ ID NO: 265179 - protein, 339 aa, unidentified
MARYIGVDLHRNQFTVCVIAENGREYLSEYRLEQLPRFVAKLRATDEVAVEVTGNTRLFYDAVAPHVAKVVVVNPTQFRVIRDSVKKTDPHDARTLAFYLSKGMLPEVRMKDKLHAQLASLTQTRDTLVKQRTALKNKVNNILSAHGVTLRKEALSGDSGLEAVLGMKFDGIVMTELRVIVGQIRACNASIAELEKTIQAEGPKLPGHENLRSIKGIGNLGATILLSVIGDIDDFAHPGKLAAYFGIVPRVRNSNEVERSGRITKRGTKLGRTTLVQCSLIAMRYSPYLARFYHKIQARRGTGKAIIALAKKFLGVIYNTLKNNWIFEDFPNFVLAEAS

SEQ ID NO: 265180 - protein, 341 aa, unidentified
MRTLYVGMDIHKNFIQAAALDEEGNIIKEQKFKSDCEEIKRFVKSLNAQKIHAAIEATCTWYHVYETLNALDVETTLVNMRRTKTIAESKIKTDKLDAKTIAQCLRTGFIATAYIPPKTVMEQRNILRHRMSLGKEIIRYKNKVHAILLRNGIQHHDYSDLFGTGGMKFLQHLTLPDSEQYSLTSYLNIVETLVQEKTQTAKKIETLCKNNQQAMLLTSIPGISYYSAMIILTEMGEVHRFSNPKKLCSYAGLVPRTIQSGNHVYHGRILKECNQNLKWILDQCTHIHIRHCPNSLITKLYHRVKEKKGTNKATVAASRKLLTCIWHMLMKDETFKYDNDN

SEQ ID NO: 265181 - protein, 458 aa, unidentified
MKIKSIYPARNSSQLREVLGKYSPGELLYAPIDVAKYNHKACAVNFFGDILTPAFEFSNNAHGVKFFISKITEAARNAKAKKIFIGLEATGHYHQNLTLHLKSLGYEVAVINPFDSWKERLNKSSKTDKIDLGSIAKSLISRKFSSSTVPEGVYYNLQRATRTRRKFVNRRTSSKNIITGLLDNLFPGLWDKEDTIFSDRWGKASLSVLEHYPTPQMILRLGEKRLTRFLKKGTTKLGEKTARKIISAAKVALTRSPYEQTMDILALRSHLQAYRLYEEIIFHLEKEIAYLLVQTPGTYLLSVPGISVTYAAEVTAEIGDISRFAYANQIISLAGTCSKKDQTGEHDPQNLPISKKGNKFLRTVLNQAGLSLNTWCPDFNAYYSRKVEEKKGRCGIARTATGNKFARLAFALMKHESLYHPHSFNTLVQDPGNYYLLSLWRNTEEVKGFLFREDPSSE

SEQ ID NO: 265182 - protein, 402 aa, unidentified
MGKFIAEQAEKQTAAAFEGTRGWSRYAAFIGLDVHKETIAVAIALPGRAEPAYRGEIAHEPKVLKQWLERLNDEFGGALLLFCYEAGPCGYGLYRQLTEAGHECQVVAPSLIPKKPGERIKTDRRDALKLARLLRAGDLTAVWVPDTEQEAMRDLTRARDDMKSQERKARQQLNAFVLRHGHHWPRGKTRWTAAHCNWLESLRFEHDWQQIVLQEYMDAAKAATQRVADLTGQLMRALPGWSLAAVVDSLVALRGIDKLAATVLLAELGDISRFDSPKQLMAYLGLVPSEHSTGSRRRQGAITLTGNGHARRMLVESAWSYRFPARQTMHLKRKASMASPEAKAIAWRAQKRLCGRYRQLSQAGKNIKLVCVAIARELVGFIWDIVRHEMPRLAPQRSAVAG

SEQ ID NO: 265183 - protein, 338 aa, unidentified
MKITTVGIDLAKSVFTVHGVDEHGKPALRKTVRRGKLLELFAQLPACVVGMEACSGAQHWARELRKLGHEPRIMAAEFVEPYRRGGKNDTNDAAAICEAVSRPQMRFVPIKSVEQQAVLAVHRLRQGLVEERTALANRLRGLLAEYGLIVGVGLDRLRRSLPEILEDGENGIPGIAREVFADAAQQLSELDVHIGDYDRRITALARASEPVQRLMKMEGVGPVTATAIVASVGDAKVFRNGRQFAAWLGLTPRQHSSGGKQRLGAMTKHGDVYLRTLLIHGARAVLRVTRMRHDAKSRWVESLRHRRPDNVAAVALAAKHARIIWALLAHQQSYCPAS

SEQ ID NO: 265184 - protein, 418 aa, unidentified
MTKKLDTTFIQVVHPVCCGLDVHKKKISACLISVDEHGQEQYEIQEFGTFTNNLLEMKEWLTDNNCPIIAMESTGVYWRPVHNVLEGFMEVILVNARHIKNVPGRKTDISDSKWLAGLLRHGLLRGSFIPPKEIRQWRELTRLRRTYTESLADYKRRVHKLFETANIKIDSVVSDLFGVTGRNLISLLCNESELSLANIKKNAQRGLKEKSEELHRSIQGFFEDHHRFQLMGMMEIISDFEKIISEITARLDNLTAGHQDLLDRLDEIPGIDKKSAQSIVSEIGVTLDDFICMAALASWAGLCPGNNESAGKRKSGKTSVRSHPFKTILIEVAWAAVKKKGSYYRAKYFRLKARRGPKKAIVAIAHRISKAIFNIIKYGQSFEDLGENYLTVQTRQRAISNIKQRAKQLGFELVPCMN

SEQ ID NO: 265185 - protein, 334 aa, unidentified
MKKFKFYLGIDISKLSLDYCLTDESGKTLDQGKIDNHTISFRKFFSRLSKHYNLNDGFIVVFENTGIYSNPLACFLSENQYSYSECSALEIKRSRGLSRGKSDRVDAKQISLYALRNIDKIQLSVFPENLYQQLKLLNTEREKVLAAIKTFSRTGEAEEFLGTEIYRVVKTINRQTLSALKKQLSILDDKIASLIRGNEDLKQKQELLKSIPGVGEIGSIHLLLVTKGFTRFKNWRKFACYCGIAPFEYSSGSSVRGRNRVNPLADKKMKALLHLLSLTTIKYDEELKIYYNRKKDEGKHSLLALNNVKCKLVSRIFAVIQRGTPFVKTHQFYN

SEQ ID NO: 265186 - protein, 427 aa, unidentified
MTRKDFNRGYAKRQRICEPTLIVGLDIGCEFNMMCMMNAKGKVLGEHKVHNSREGFEFFRDVVDKAAKRNRLWDVLVGFEPTGTYWRKIAFYAKELGFEVRFVRTTALKHQRELDESAPLKTDRRDAYTIANIIREGKCIDSVIEDGIYRELRSLVNLRENAVSDGTRLKNALRTFLEDFFPELSRLYSSMSAKGLLAILQTCPFPADVLNYGEKRLAELISKSSRSKKIGESKSSKIYAAAQESIGLKRVGSSDRLRLEFYLKGLRKSAEDLKAIDAEMARLLKEIPHAQYILSIPGIGMVTAGIILGEFGNLDNFQGAKQGIKYAGYDPTGKESGKHVGRRRISKKGRWRLRKTLYLSSMRVVRAIPEFKEYYTRKIDGTSGSGRKLARKEALCAVIIKLIRLIFAIVKDGRMFEYREKSKLLAA

SEQ ID NO: 265187 - protein, 372 aa, unidentified
MNYNTVYVGMDVHKESFTFCAYTIDAEKGSRFQRTEADYKNVLRYLEFLRTVYGNDANFICGYEAGCLGYTLYHQLTEHHVNCVILAPTTMLEQRSKKRIKTDKRDAEIIAKYLAQHNYSPVHIPTAADEETKEFLRMRDEHKLALKKVKQQILAFCLRHNYRYDGNSHWTAAHIKWLKSLKPEALYKEILDEYLLTYTALSDKLERLDKRIEELASKDEYKESVKKLCCFIGVKTHTALSVLVEVGDFHRFASAQNFASYLGLVPGEDSSGDGQTRLGITKAGNRHVRMLLTEASQCYARGQIGFKSKKLKSRQAGNSPQIIAYADKANERLRRRYYKMVLGKSKKPNVAKTAIARELACFIWGMMTDHVA

SEQ ID NO: 265188 - protein, 417 aa, unidentified
MKYALVRLLPDVPPGGVAAGIDWASADHAVCVVDMAGKVKDRFAAAHDRAGIAALIARLRQNQAGEVAIERGDGVLVDALAQSGLTVVVIGSRQVKNLRSRYGSSGAKDDRFDAFVLADTLRTDRSRLRPLVPDTAATLALRAAVRARKDLIRHRVAACNQLRAHLQTAFPGAIGLFSELDSRLSLAFLAAFPGRGAAAALDEQAIAGWLATIPRRGNAAPPGALAARLAAAPPGCGDDTAQSALTTELAGAVADLAARIAALDAQIAAQLAAHPDQHVFTSLPRAGTLRAARLLAETGDCRARYPDPWSLAGIAGVAPVTRRSGTRISHDFRWNVNRQLRDAYCDFADGSRHASPWAAATYTAARDRGKDHPHAIRITARAWIYIIWRCWQDSTAYDPAKHRTAQAATSSNSHPPR

SEQ ID NO: 265189 - protein, 351 aa, unidentified
MLIIGCDLHTRCQQIAMLDTETGEIVTRRLEHANGEAREFYRRLPAAARVGIEATGCTQWFERVLAECGHELWVGDPAEIRARAVRRQKTDARDAELLLDLLRTERFPRLWVPTPEERDLRQLLKHRDKLVGMRTSVKNQLHYLAMSQGVCRKRRLWSEDGRRELESLELRPWASQRRQELLELLDRLDPRIGKLDAAVEAEAQRRPETVRLRQQKGVGPVTALAFVLTVGPVERFPNSRKLVSYLGLNPSEDSSAGRQRLGHISKQGNQMLRWLLVEAAQSAVQHDPEWRQRYQRLKFRRGANVAKVAMARRLAVRMYWLLRQAQSAASPVRTPGSSARTVVGQVGPSIL

SEQ ID NO: 265190 - protein, 336 aa, unidentified
MTIIRVGLDTSKHVFQIHGVDENEQPVLRRQIRRSEVEKVFAKLPPTRIGLEACGASHHWARVLRGLGHEVMLIPPQYIKAYVKRGKNDAIDAEAICEAMSRPTMRFVPVKTVEQQAALTMLGVRDLLIKQRTMLINAMRGHAAEFGVTAAKGPKQITELLARLASDQGVPALAREMVGLLADQLAAVNAKLKVIEARLMMWHRHDQTSQCLATIPGVRPIGGVSLALKVPDAKAFRSGRHFVAWIGITPRENATAGKHRPGKISRQGDEDLRRLLVLGATAVIQQAKRGHASPWLVGLLARKPRKLAAVALANKMGRIVWAMMVSGETYRRPAQA

SEQ ID NO: 265191 - protein, 353 aa, unidentified
MREEKYIGMDVHQATISVAVMDAQGKLIMECLLATRAATIVEFIQGLHGTLSLTFEEGTSATWLHDLLKPHVGRLVVCDPRKNALLQDGNKSDRIDARKLAELLRTNQLKPVYHAERGVRTLKELGRSYLTLTKDVTRVMNRIKALYRSWAIPCGGTKVYARRHRAEWLAKIAEPGVRVRAERLYQQLDLLQPVRLQSRRELLLESHKHAAVKLLRQIPSIGPIRAALLVALLQSPQRFRTKRQLWAYSGFAVQTHDSGEYRWVRGKLQRNRERITVRGLNDNHNKDLKNVFKGAAISASTRPGPLHDFYVARVEKGMRPTMARLTLARKIAAITLTMWKKGVSFDPKQLQAA

SEQ ID NO: 265192 - protein, 423 aa, unidentified
MAESFTFFVGVDLGAERHHVVVLNATGETVGRRSVEHNGADVLELFSWLAKITGDTIASLIAIAAETPRGSLVESGLERGHPVFSINPKQLDRFRDRFSVAGAKDDYRDALVLAASLRTDQHCFRSLQLGDPRLVLLRELSRTGDLLQRDLRRNCNQLWSLLQRYFPALLSLSPAADDPWLWTLLQSAPLPTQAARLKPRQLEKILADHQIRRVSASQLSDLLHQPPLPLAPGAAPALAESAGLLLPHLRLLHQQTAQLARRIDNLIEELQQDPDFAEHRDIEILRSFPGLGRVFTATVLAEAHRPLVDRDYHALRALGGAAPVTRQSGKTKLVLLRRACNHRVQHAVFHSANVFVQKDPRAREQYHRLRLQGNTHARALRGVADRMLALLFTLLKNGSCYDPDRRLASNHPEGTPPQKNLDK

SEQ ID NO: 265193 - protein, 355 aa, unidentified
MSQEKYIGMDVHQATISVAVLDSRGKLIMESILETKAATILEFLQGLHGSLSVTFEEGTSAAWLHDLLKPHVTRLVVCDPRKNALLKDGSKSNRIDARKLAELLRGNQLTPVYHGEHGMRTLKELGRSYATITQDLVRVMSRIKALYRSWAIACSGTSVYAPRHRAEWLGKIPEPGVRLRAERLYQQLDLLQPVRQQARRDLLTESRKHHAVKLLRQIPSIGPIRAALLVAQLQTPHRFRTKRQLWAYSGFALETHDSGEYRYVRGKLQRNRDRMTVRGLSNNHNPEVKNLFKGAAISASTHPGPLYDFYVALLEKGMRPTMARLTLARKIASITLTIWKKGVDFDATQLHRQEA

SEQ ID NO: 265194 - protein, 429 aa, unidentified
MSYRIAGIDVHKKMLAVVVSNVEVESEFQFERRMFGGNPEQLRLLAAWLLEQEAEEVVMESTAQYWKPVWGALERYWKPIREKREGAKRRSGTLHLAQAQSNRGRRGRKKDFVDAERLVKRLVARELTLSFVPDAEQRLWRAVTRKKYQLRRDLVRLNNQLESLLEETHIKLSSLVSDLLGVSARRMLKALADGETDPAALAALAHQRLRATPEQLCDALGACTDLKPVYRRLLKMTLEQLQLLEQQIGQLDQELATLLHPHQDAVHRLAEVPGFGVDSAQQIIAEVGPTAATFPSEKCLSSWVGACPGDEESAGVNYSHQSPKGNRHMRRLLNQAANAAVKVKGSIFEVIYRRCVPRLGHNQAIGVIAHRQCRLIWLILHKGALYEERDPAVTMQSKYKRTWRMIRQLRQLGYRIDPPNLQPSQAQTQ

SEQ ID NO: 265195 - protein, 343 aa, unidentified
MIYIGMDVSSKEFVIHAIDQRQQKVFDGKIAPSRAGLRKLVKDLGIGPKLFIFEAGNQLKWIALTLMRQEGVRIHVVHPNEIKWINESSGKTDRIDARKLSQLGRGNLLPRPVHVVEGKTRELRELVSARGQLQSKRVALINTVRGYMKQEGVSLPEKFFQRCDWKSSLWEKSLGETQKLIVKSFMDGIEALEHSEAEITGKMIEIQDSRCELLETIPAIGKIASRVLVSALDDVGRFENKKCVANYGGLAPTIYQSGNTTNLGRINRDGRQEVRKVLLQCAHTIQRMVSRDAVPIRNFLERIEKRRGKKRAVVATARKLLTIAYGVLKSRAAYDPMRLRAFA

SEQ ID NO: 265196 - protein, 458 aa, unidentified
MRRQNRRPLRAAAAPKLGRHNPAAAGLDIGAEEIWACVPAERDAHPVRAFGTFTPDLHALADWLAHCEVTTVAMESTGVYWIPIYEVLEARGFEVALVNARHLKHVPGRKSDVQDCQWLQQLHSYGLLTASFRPAEDMRVLRAYLRQRAMLVEHRAGHIQHLQKALQQMNVQLTQVLSDITGTTGLPIIRAIGAGARDPQVLARLRHGRCPRREAEIAKALSGHYRPAHGFALKQALALYDFYTAQVQECDTYIEQHYAAIKPAYDEQTPPPPLGPDPKPNSHAKNAPAFDVRACLYRILGFDLTATEGLEASSAQVLLSEIGTDLSKWPTEKHFASWLGLAPHNDISGGKVLRSKPLKGNRRAAQTLRLAAQTLGRTQTALGSYYRRLRARKGPTQAITATAHKLARILYHILTHRTPYQPQSQETYEQYLRQRAIRHLKRTATRLGFTLLPQPVAA

SEQ ID NO: 265197 - protein, 466 aa, unidentified
MPKTKIKPKQNQPKVSSLETLDVVHPHAAAADIGSREIWVSLPPDRGGETVRCFGTFTPDLESLVQWLVENRVDTVAMESTGVYWIPLFELLEANQIQAYLVNAQHIQNVPGRKTDVLDCQWLQKLHRLGLLNGSFRPDAEMVVLRTYLRHRAELIQHRAPHILHMQKALQHMNLQLHHVLSDITGVTGRQILRAIVAGERDPKALAGFRQPGCKADEATIIKALTGSWREEHLFTLKQSLDLFDFFTTQINACDAQVERQFAALKPRWDAPEELPQLPPVKPNSKTKNKPAESTRQELFRIVGVDLVAVTGLRASLTQTILTEVGTDMSKWPSVKHYASWLGLAPHNDISGGKVLRSRTLKTGNRAGQAFRQAAASVTRSNSAFGAFYRRKCAQLGPAQALVATAHKIARTVYFMLKYQMPFEDIGAEGYETQQRQRELTSLQRKAAKLGFDLTPKEAALVPTPA

SEQ ID NO: 265198 - protein, 420 aa, unidentified
MTVDLERGYKHRELCGPKQYLNLLLRSVLMIYVGIDVAKDKHDCFITNSDGEVLFQVFTIQNNREGFDGLFSRIQSVSHDMSNIKVGLEATGHYSYNLLGYLIDKGLPTFVINPLHTNLYRKSLSLRKTKTDKVDARTIAMMLMSDVNLKSYSDTSYHNEELKSLTRYRFDKVQERAQLKQSVSRLVTILFPELEKLVPTLHIASVYTLLSELPSAGKIASCHLTHLTKLLENASKGRYSREKAIEIRDAARISIGSDMPAKSLELRHTLRLIGELDSEITEIEAEIKRIMDQISSPILTIPGIGYRMGAMILAEIGDFSRFDSPDKILAYAGASPSTYQSGQLECSYSHMEKRGSRYLRFALINAAKYVCHWDETFSAYLQKKISEGKHYNVAITHATKKLVRLIYAMEKSGKPYIKMA

SEQ ID NO: 265199 - protein, 310 aa, unidentified
MERLFVGIDVSKDRLDVHVRPTDESFAIQADETGIAALLARLAGLQPSLVVLEATGGYEAAVAAAIAHAGVPVAVVNPRQIRDFARATGQLAKSDTLDARVIARFAETVQPPVRGLATDQAQALAELVSRRRQLVDMLAAEMNRYRQARNRPLQKRINAHVTWLTRAIEELEDDIKRLIRSSPVWRETENLLMSVPGIGDITAHALIADLPELGHLDRRRIAALVGIAPLNRDSGLGRGRRTIGGGRPTVRRALYMATMVAIRYNPMIAAFYRRLTAAGRPKKVAIIAAMRKLVTILNAVLRDQRPWQTA

SEQ ID NO: 265200 - protein, 446 aa, unidentified
MEVLYERCAGLDVHKKTVTVCRVRLVGRQREQEVQRFGTTTPELLSLADWLAAWSVTHVAMESTGEYWKPIYNILEGNYDLLLVNAQHLKHVPGRKTDVKDAEWLAECLRHGLLRASFVPERPQRALRDLTRYRTKLVQERSRLANRLQKVLEDANIKLGSVAADVLGKSGRAMLEAMIAGEEDGEVLSDMALRKLRSKRTQLEKALTGRMTDHHRFLLTQQLQHYDFLNGQIAVVEERVQQQMMDMDDQRPPTERDNPPEDTVDQDDSPSSEPLTHSEAIALLDTIPGVNERTAEVIIAEVGLDMERFPSHKHLAAWSGVAPGSNESAGKRYSGKTKPGNKALRAALSQAAWAAGRTKGTYLGTQYKRLAARRGKKRAIVAVGHSIIVCAYHILAKREPYRDLGAQYFDQYKKERTIKRLINRLNNLGVEVDISAPTVIPANGDI

SEQ ID NO: 265201 - protein, 401 aa, unidentified
MAKSIWAGLDIGVETTSMCVIDDAGKVLQEATCPSTLKSIHAEIRWLKRRRSAKVGLEAGSGVSLARGLRSLGYSIEIYEARQLSKFLRVRRNKTDAGDANGIAEAGRIGASMVSKVYLKSLESQSLQSRLTIRRHLIRERVAAVNLLCRQIELYGGRVRRSPRAVHLRERVEAQLRTIFGKTSPPLRTDLRSLLEHCQRMVTYQEELDKELEDLAFESEVCRRFMEIPGVGPICALTFYAAIGEPHRFRRSADVGSYLGLTPRLYESGLTSRIGRISKMGNRAVRSLLTHASIRLMCSRSDCELRQWAAQVEQRRGRPRARIALARKLAVVMLAMWKSGEPYRPTSSAGSEPGLRREADPECTRAHRSACKVVGPVPDQDYPARSDAPSPSARIRVGAQT

SEQ ID NO: 265202 - protein, 329 aa, unidentified
MVTASLLPVVGLDVSKATLAVCYQVNELVKHLEVSNTKAGFQQLVKACGAHCRFVMEATGTYNLALAYYLHEQGGEVAVLNPLVIKRFIQMHLSKGKSDRKDAQWLLRYGQQQLVNVWQPDETVLVECRQLEQVNEQLLKQKTMVSNSLEALQRQPVSSKQALKRLQQMRKTLTQQIALVEAELLTLLEQRFAAQMTLLCSIPGIGRKTAGMLLLFASGFTHFDNYRQLIALAGLSPREHTSGTSIRGKVRITKMGGGLIRGKLFLCSFSAKKMNAACAALFDRLVAQGKNKKLALIAVCNKLLKQAFAIVKSGVPYQADFCSKLAPTP

SEQ ID NO: 265203 - protein, 343 aa, unidentified
MQVSTIGLDLAKNVFQAHGVSAEGKVVLKKQLRRGQVLSTFAKLPPCLVGMEACAGAHYWARELRKLGHDVRLMPARDVKAYVKRDKTDAADAAAICEAVSRPSMRFVALKTPEQQGRLMQHRVRDLLLRQRTQTINALRAHMAELGLVAATGRQGLGLLLAILADAKDERLPQDARASLKLLASQIAALQAQIDTLDKRLHAQHRQCPASRRLETIPGIGVIGATALAATITDPKAFKSGRDLAAFIGLVPRNNSSGGKQRLGPISKQGDRYLRRILVVGAHSILKQARTRPDKHPWLARLMARKPGKLAAVALANKTARIAWAALARGETYRAPTAPAAAG

SEQ ID NO: 265204 - protein, 414 aa, unidentified
MDVIHACVAGLDVHKETVVACVRRIGEGGRVWKEVRTFETATRHLEALRTWLQAEGVTHVAMESTGVFWKPVYNCLEEHFEQVLLVNARDIKQVPGRKTDVKDSEWLAQLLQFGLLRGSFVPPRKQRELRDLTRHRTTLVQEYNRVVNRLHKVLQDANIKLSSVASDILGVSGRQMIEALGRGEEDPAVLAELARRRLRGKIPQLRVALEGRVREHHRFLLRLLLEQLDFLTQAIDQLSQRITEMADPPVQAAVALLTTINGVGQRVAETIAAELGTSMTPFPSHKHCASWAGVCPGNNESAGKRKSGKTSKGNRWLRRALAEAAWAASHTKGTYLAAHFRRIARRRGNKRAIVAVSHTLLIVMYHMLSKQLPYADLGADYFDRLQPERLTRYYLTKLRSLGFKVTLAPLEEAA

SEQ ID NO: 265205 - protein, 411 aa, unidentified
MDVLVERCAGLDVHKDSVSACVRTPGPQGGREEEVRTFGTTTVEILALRDWLVASGVTLVGMESTGVYWKPIYYLLEDALECWLLNARHLRNVPGRKTDVKDAEWICQITEHGLVRPSFVPPRPIRELRNLTRYRKAQIEERTREAQRLDKMLQDAGIKLSSVASDVLGVSGRDMLNALVRGTRDPEILSELARGTLRKKIPALRDALLGRFSAHHALVVGTILAKLDFLDEIIGAISAEIEVVIAPFGAELALLDTIVGVDRRTAEGVIAEIGVDMARFGTAERLASWAGMCPGNHESAGKQRSGRARKGSKWLGTYLTEAAKAAARTKDTYLGAQYQRLRGRRGAARATKAVGHSILVDAFYILSRGVPYDDPGAEYFIRRRPEAQTRKLISQLNALGYTVTLNPPQAA

SEQ ID NO: 265206 - protein, 415 aa, unidentified
MALKIVYKICCGIDVHKTFVVACIASTDSKGVTTYEHHRFSTYTKGLKDLLQWLLKHNCKDVCMESTGKYWIPVYNVLENDCTIVLAHPKYVKAIRGKKTDKKDAKWIADLFKHDLVAGSFMPPADIRQLRDLMRYRFKLTCFMSSEKNRLQNCLTVSNIQLGNVVSDTFGKSAQAILDKLLENPADTSFDLEPLVYKSLKKKLPELRDAIDGYITPEQAGKLKVIKAHYENLESRKAELEELILALAAPYQQELAILQTAPGIRSTFTAIGIISEIGTNMEAFPSAKHLCSWAGLTPTNNESAGKKKSVRVSKAGCYIKPLLVQCANAVVTSKKHPEIRNRYLRIKKRRGHKKAIIAIARMLLTALYHMLKNGENYNAELYRKSDQPPVDREITIEQAILIARNQGYKIKSATA

SEQ ID NO: 265207 - protein, 340 aa, unidentified
MLSVGLDIHTKHIALCVLSEAGHVVQRARVRGLEELLRLLKGLPDRFEVCYEASCGYGHYHDLLRPLAARVLVAHPGRLRLIFRSRDKNDRKDAERLAKLLYLGETPTAHVPSLDVRTWRELINCRSQVIAKRTRAKNALRALLRGAGVVPPKSPGPWTKKGLAWLRQLGLPTASQQLRRDLLLEEVEALNGQVRRLEQELNRRAQQTPAVARLRSIPGVGIRTAEAVAAFIDDPQRFRHAKAVGRYFGLVPCQDQSGDKNRLGHITREGPAVVRQLVAEAAWQAMRRSPTVRAYFERTRRGDPQRKKIAVVATAHYLVRVMWALLKRGTVWQENEALAQ

SEQ ID NO: 265208 - protein, 318 aa, unidentified
MNSYYKVESTEPVRYVSLDISKARLDYTIAGQKCRQVPNTAAGIATLITLVQPLPGVRVVCEATGGYERRLLEQLHQASVPVCRLQPGRVRNFARAEGTLAKTDKIDVGLIYRYACAMHPRVEKPPLPEVTALRELLDYRRQLVDQGTQTANRLETAGPTLQALLQAQREQQAAALAKADELVAQQVRAHPALRAKAERMQQLQGVGPVLATTLLAYLPELGEEDDKRIAALVGVAPHAHDSGETSRPRHARGGRVEVRNVLYMAAVSASQHNPVLSLFYQRLQAAGKPANVCLLAVMRKMIVVLNRMLKDPHFTLVG

SEQ ID NO: 265209 - protein, 340 aa, unidentified
MNATSIGVDLSKSVFQVSLANAAGRVIEQKRLSRAQYQRFLAEQPAAEIVMEACATAHHWARTARALGHQPCLLHAQYVRPYVRRNKTDAADADALVRARRDPDLKPVPVKSVDQQALQGLHRIRQQWVATRRQRITLARGLLAEFGLSLPTGASGIVARLHAVIDRVPGVLVSGLTPIIDEIGSLEARIKQLDRQLTTIAKTNLDAQHLMSIPGVGVIIATALVGSVADIHSFKRARQFAAWLGLTPREYSSGQTRYLGRISKRGDGYLRMLLTHGARSALLLAHRQASKGDHTLTSVQRWVLDVEQRTHHNKATIALANKMARIIWAVWTSGEDYLAD

SEQ ID NO: 265210 - protein, 386 aa, unidentified
MTDKTLQTHDTQPVRLLVALELSLKTWRLAMAVAGAPKKRFKTIAGGDDVALGQAIEACKTKWGLDVAAPVVFCYEAGRDGFYPYRQLTAAGHTVWVIDSASIEVSRRKRRAKSDGIDAEKLLGLLQRYVGGEQSALRVVRVPAVAVEDLRILPRERETLLKERQRLRNRIESALFGQGYRELPKTAKRLAAWLQERTDVGDYLKERLDREVARLALVEAQLREVDARQAEVIQTESGTAAAGEVLRMAQALQGLVGIGLVGAWVLACELFGWRDFHNRREVGGALGLTPTPYSSGEDPREQGISKAGNRRARSMLIELAWLWRRYQPDSALSQWYRTRFASGGKRPRRVGIVALARRLAVALWRYVKTGAVPEGAKLKPVSVAAN

SEQ ID NO: 265211 - protein, 294 aa, unidentified
MSHDVKYIGMDVHKEAIVIAVQNESGKLVMESVIETKASSILQFLHGLRGELHVTWEEGTWAAWLYDLLQPQVQHIVVCNPRRNALLKEGSKSDKVDAGKLADLLRTGMLRPVYHGENGLRTLRELGRSYQTISNDLTRVMNRLKALYRGWGIPCAGTQVYAARAREEWLSKLPQAGVRRRADLLYQQLDGLQALRREVRPEFLAESRKHKAAKLLRQIPCIGPIRAARLIGLMQTPHRFRSKRQLWTYSGLGVETHDSAQYSFVRGQLQRSKKPQQVRGLNDPATLCCTSITL

SEQ ID NO: 265212 - protein, 347 aa, unidentified
MEDAMGMFAALDVSQEETAICVVRQDGTQVVEAKVPTCPDAIADWLTERTEGLERVGMETGPLAVWLWNALTERQVPIICMDARHASGVLKMMPNKTDRHDARGLAQIVRTGWFKAAQIKSHDAYVNRAMLTAREALVGMRVRLENEIRGLPKTFGIMFGKRVGGFKRRAEEIIEGELAVAPELVPIFEALMQARRDILARIAALDSRIRAVAKRHATVRLLMTAPGVGPITAMAVVAAFDDASRFRRSSSAGAYLGLTPRRYESGEISRNGRVSKRGDAFTRKCLFEAANAIFCRNLGGPRLRDWAKAIAERTGPRKAKVALARKLAVTLHAMWRSNTPFREVAMT

SEQ ID NO: 265213 - protein, 445 aa, unidentified
MRVVYKRCTGLDVHKKTVVACRRWTKEGGEVETEVKTFGTTTPELLELVDWLSEWEVTQVAMESTGEYWKPVFNLLEGNFEVLLVNAQHVKHVPGRKTDVKDAEWLAELLSYGLLKASFIPAKPQRDLRDLTRYRVKLVQERTRVVNRVQKVLENANIKLASVASDPLGVSGRQMLAALVAGETDATLMADLAKGRMRNKIPELEKALTGIVNDHHRFMLAQQLAHIDFLDEQIAEIEAEIGRRVEAMSEEPQSDNQSVPTSGSDEQKGGEAEMQLTWNEAVTLLDTIPGINNRTAEAILAETGIDMGQFPSPGHLARWAGVAPGNNQSGGKRYSGKTPPGNRALRTTLVQAAWAAQRTKGTYLSTVYRRLAGRRGKKRAIVAVAHSMLVSIYYMLLRHQPYQELGGDYFDQRRKEAKADYFMRQLQKLGLSVQVEPFPMQMDAG

SEQ ID NO: 265214 - protein, 404 aa, unidentified
MNNVAGIDVSKGKSMVSVLRPFGEVVAKPFSIGHTGSELKELADYLKSLDGETRVVMEHTGRYYEPVARFLHDEGVFVSAVNPKLIKDYGNNTLRKVKTDKADSRKIARYGLDNWAELRQHTPMDTIRMQLKTLNRQQSLYTKTKTMMKNNLIALLDQTYPGVNALFDSPVREDGSQKWVDFAMTFWHVDCVRNMSLTAFAERYRKWCKRNGYNFSQSRAIKIHTEAQDLIAMLPKDALTKTMVRQAADALNAGSKSLERLKAEMRSLASQLPEYPVVMAMRGVGDSLGPQLMAEIGDVTRFAHRGSITAFAGVDPGSDQSGTHEAKSPRTSKSGPPELRKALFLVMDCLLKTMPADDPVYRFMDKKRSEGKPYLVYMTAGANKFLRIYYGRVKEYLASLENAD

SEQ ID NO: 265215 - protein, 365 aa, unidentified
MQKISTMRTSGRKIFKGQLTIGLDLGDRSSSYCVLDEAGEIILEQQVPTTGEAVKQTFKRMPRSRIAMETGTHSPWMSRVLTELGHEVIVAHAQKVRLIVKSRRKDDRMDARTLARLARIDPELLTPVQHRSAQAQLHLTEVRARAGLVRARTALINAARGLVKSYGERLQKCGAFQVSREIGSGLSAGLREALQPLLQEVESLNEHIKEYDRRIEQMAREKYPETALLKQVKGVGDLIATAYVLTIEDPHRFRKSRDAGCFVGLQPGRRNSGESEPQMHISKEGDEYLRKLLVQGAHYILGPFGEDSDLRRWGQKLAARGGKNGKKRAVVAVARKLAVLLHRLWVSGEVYEPLRNSQKAMTVAA

SEQ ID NO: 265216 - protein, 458 aa, unidentified
MIMGNKKISLEVADPNAAGIDIGSKSHWAAVGQNAQDFKEFGVYSEDHLALCLWLQKHKVETIAMESTGTYWQNLFSSLVAFGFEVILVNGRQTKNIKGKKTDIKDCQWIQKLHTLGLLTSSFLPDSTTDIIRTYSRHRQGILKQSAKTVLRIQKHLRLMNMRLDVVVKDITGLTGTKIITDLINGQTDGKELARHRHYNCRKPEAEIAKALQYNGRNDYFFALKQEWATYLHLQDQITEIDIQIKKHLEGIIDSDGNKKQHIAFEKPYKRKNKNTIRGLDMNQISYQYFEGVDIMAIEGINDSTVMTIIGEIGLQGIKKFNSAKQFASWPGLAPNNRISGGKIIGHHLPKGSSRLKIAFRLAANAIGNLKEGHLADFFRRINYKKGRATAVSATARKLAVIIWNMLSKGTPYRPPTEYLFLDQKRKLKLVNRIKRNIAKFEIRPEDVGFDKSLNIST

SEQ ID NO: 265217 - protein, 414 aa, unidentified
MAGEINKSCGLDIHKSFLIATILSRSGEKQQQRIKRDDDGILSLRNWVTSEKCDVVACESTSDFWVPIHDSLIKHLPFIVGNARDMKAFTHKKTDKIDSEVIAKLALNGMVQPSRVFPKKHREYRSYIRLRHKLVQKRTDIKNEAHAILAPEMFNLKDVLTDIFGKNGREILSGISSGKNVDQIIQNLSPNVRKKSAQIRELLDREISQSAAIRLQICLKLIKNFDDSIELLGKEIFNYAYGNHKREMEILKSVPGIGELGAATLIAEIGDFKDFASGDKLASWLGLVPNVYQSADKYHNGRITKRGSKVARWILIQIAQAAARTKNSKLKEFFNRKKKSIGHAKAIVALARKIATIIWHLITNDEMYEDETGYIKGEVQRRKIVETEIFSVDERISIISEIFAIVEKKKPDIK

SEQ ID NO: 265218 - protein, 454 aa, unidentified
MKKKETKLQPDIVTMPLVHPRAAGIDVGDTLHSVAIPEGIFAERVKTFGSMTCDLEAIAAWLLEAKITTVAIESTGIYWKPLFSLLNKKGLEVYLVNSRQTKNVSGRKTDEDDAMWIQKLHSCGLLKSSYLADDEQEALRTLVRYRHTLVQDCSRFKNRMQKSLELMNIKFHTLFADITGKTSLAFIEAILAGERNPENFLPLVDGRIKANREEILKSVVGTWRSEHLFTLAQSYEMTKVYTEKITACDRAIEERLQCYQAFTNYGECDAVVSANNKPVLRKKKQRGAPVFDVRSYLKKIYKADVLAIYGLSEMGGLEILAETGVDLKKWPTKNHFKSWLNLCPNNKISGGKLISSKLLKKKPNAASQAFRIAANTVQRSNHWLGDYFRRMKSKGGNKFAVVATANKIAMIFYKMVTEQKDFIPVNQEAYQLKYKQAKIAFYKKKLLQLESAAA

SEQ ID NO: 265219 - protein, 350 aa, unidentified
MKETIESVVGFDIGDRRIEVCVVSLRGGRVLRREKLATQREAVESWLRCEPRSRIVMETGTHAPWIARAAQAAGHEVIVADARTVKLITQSMKKTDRRDAELLARLGRSDMALLRPAHVRSEATQRQRALLRLRDALVRARSLQINALRGVMKTDGRRLPACSAEAFPRTAWEAMDADWRALTRPMLRAILVLSRQIRQYDRRLEEIAAREHGEAVARVGQVAGVGTLTALAVVLAVEDPRRFRSGRQMSAYLGLVPRRSQSGEKDPNLGISKEGDAYARRLLVSAAHYVLERGPDTDLKRWGLALEIRWGPKNRKRAAVAVARKLAVLLHRLWVDGSTYEPLRAATVAA

SEQ ID NO: 265220 - protein, 364 aa, unidentified
MLNTTTFVGLDVHARSIKAVALDAMTGEVRSATFAYDAAAVAEWVRSLDPAAKCVYESGVTGFDLQKRLAALGVDCVVGAVSKMIKPSADRKRKNDRNDAEFLARMLSVGNVVEVWVPDDECEAARDLVRALDDAREDLKRCKQRLSKFLMRHGYAFSETTPTGRRKGNWTAAHWTWIRSISFPEKADGDALAYYVDAVRQAMEDKARLEKLVEAEASKPRWKRRVDSVRCLKGIDVTSAADLVFEAGEFSRFKSARSFAAWLGLTPSEHSSGESVCVLSSSRRQNRRYDFDTFGVSRADLFFYSRDLPSISAFSILLLAPPNSTSLPWCMMRSMMAEASLSSPNTTPHLLNSIFVVITRLRFS

SEQ ID NO: 265221 - protein, 315 aa, unidentified
MEKFPLFVGIDVSKERLDVAVRPTGETWQVSYDAQGINSLTGYLRELMPHLVVVEATGGMELVLAGELAAAQLSVAVVNPRHVRDFARAAGKLAKTDALDAQVLAHFAEAMNPEPRPLPDASTQELGALVARRRQLVGMITAEKNRVRTANQRIRPKVQEHIRWLEENLEDLDRELGDFMRSSPMWKDKDELLRSTPGVGPVLSMTLLSGLPELGALNRGEIAALVGVAPFNRDSGTLRGKRKVWGGRGQVRAALYMAALVATRYNSVIRDFYQRLCAAGKPKKVALTACMRKLLTILNVMVKHRRHWNPIVQNS

SEQ ID NO: 265222 - protein, 341 aa, unidentified
MKKFIRIGVDLAKNYFQIHALASESGPAVTRKLKRSKMLEFFSQIEPCLVGMEACGSAHYWARELKKLGHEVLLMPPDYTKPYVKRGKNDAVDADAICEAMSRPGMRFVPVKSAEQQATLMLHKTRELLVKQRTMSVNALRSHLSEFGIIAAKGIGRVDELLELAESDATLPAATRAAVEVLALHLEGLDKSIDDLEDTIASAHAQSEMSRLLDEVPGIGKLIASVIAASVPDPSVFKSGRDFAAWLGLTPRQNSSGGKQTLGAITKQGNRYIRKLLVLGATSLLNVVGKRKGALRDWIVGLLAKKPARLVTVALANKLARIIWAMMKTGESFRTEMFAKA

SEQ ID NO: 265223 - protein, 354 aa, unidentified
MSQKLNAAIAVIGIDIGKNSFHVVGHDKRGAIVLRQKWSRGQVEPRLANMPRCLIGMEACVGAHHLSRKLQMLGHDARLMPAKYVRPYSKGQKNDFRDAEAIAEAVQRPTMRFVATKSAEQLDLQALHRVRERLVSQRTGIINQIRAFLLERGIAVRQGLRFLRAELPGILATRTDLLSPRMLRIIEDLAGDWRRLDERIADLSSEIEALARQDKGCERLMTVPGIGPIISSAMVAAIGRGEAFTKGRDFGAWLGLVPKQMSTGDRTILGKISKRGNRYLRVLFVQAAWVVLAKPQSWGRHGLKSWIEAAKKRLHHNVLAIALANKLARIAWAVLNKERNFECVRRDAMAPRPA

SEQ ID NO: 265224 - protein, 340 aa, unidentified
MTITTVGIDLAKNVFAVHGVDQNGRTVLVKPKVSRAALPELIASLPPCVIGMEACSGAHYWARLFRQYGHEPRLMAAKFVSPYRMAGKSGKNDAADAQAICEAVRRPHMRFVPVKDESQQAMQCLHRTRQGFIEEKTATYNRLRGLISEFGVIAPQSADALRHMVSVQKSSLPLQVQQCVDDLMEHVDRIEANITEYDRILSHIAKTDHRSQRLMELKGVGPTTACALVASIGNAHDFKNGRQLAAWLGLTPSQYSSGGKSKLGRITKAGDSYLRTLLVRGARSVLIGAGKRTDSFSRWVCMLVERRGYWRAVVAIAAKNARLCWASLHYGDDFRLYSVN

SEQ ID NO: 265225 - protein, 349 aa, unidentified
MRYIGVDLHKTNFVVCFMSESETTHLETYPLTKSGIARFINHLEAADELAVEITANIYYFYDQVKAHVSRIALVDTYRFSVIATSKKKTDKADARALARFLKLGYLPEVPVPSEKIRQLRHLLQARETLVGMRTKLKNMGHAALTRNGVALTRSAFASAVSRVRLAKRDDLASADHVILQSVLRQIAGLDREVETLEAEIIRVGKTLAGLKRVLQLHGMNLVSAISLLAEIGDIHRFETSKQLTAYAGLATSTRQSNDTTRHGKITKQGRKRLRTVAIRAVLSMVNRTDTPLMDFYRKKKQEKGSGKALCATARKLLTIVFVMLKKELDYWYLEDRLYNRKLRALNAAA

SEQ ID NO: 265226 - protein, 343 aa, unidentified
MDKYDGRQFVGIDLHRQRSVVVRQSESGEWLSAVRIVNDPVALGLQLEQAGSDPEVVLEATYGWYWAVDVLQAGGAHVHLAHPLGVKGFRYRRVKNDVRDAADLADLLRMGRLPEAWIAPPQTRELRELVRYRAKLVALRTGLKAQTHAVLAKAGVLIATSDLFGVTGRQRLAKVPLGAAYAQRISSLLELIDILDAHEARFAAMIAEQLRAHRGYQAIQQLPGVGPVLAAVFVAEIGDVHRFAGPAHLCSWAGLTPTHRESDKVVRRGHITKQGSKLVRWAAVEAIQHQPGSTKIARDRKRIEARRGRNIAKIAAARKLLTLVYYGLRDEHIRALAHHQVAA

SEQ ID NO: 265227 - protein, 342 aa, unidentified
MQVTTIGLDIAKNVFQVHGIDAAEKVVVRKQLRRSQVLEFFKALPPCLIGMEACATAHYWARELTKLGHKVRLMPARDVKAYVKRNKNDAADAEAICEAVRRPTMRFVQVKSAEQQSQLMLHRTRDLLMRQRTQVINALRAHMAELGMTAAQGNAGLRELLAIIAGAADERLPAEAHASLIVLAAELQAMRTLIASIEKRIIAQHRSDEASKRLRSIPGIGPVGATAIVATITDPKAFRSGRDMAAWIGLVPRQDSTGGKQKLGPISKQGDRYLRRILVVGAHAVLKLARQKPEKYPWLTQLLARKPFKVVAVALANKMARIAWALLVKGGPYRARALVAAA

SEQ ID NO: 265228 - protein, 281 aa, unidentified
MEQTFFTGIDVSKHRLDVALSQGDEILEFYSIPHTEDDISGLIEKFKKTSPKLIVVERSGGLERSLVAHLAEAGLPVVANNPRQIRDFARATGILAKTDKIDARTMARFAAVIKPPQRPIKDAERQQLADKVARRRQLVHILAQEKNRLSRAVGSVRADIEHHITYLQERLDKINKDIEQIIESTPVYQETVEILTTFPGVGRVTSAGLVADCPELGSLNRREIGALTGTAPFNRDSGTRSGPRCVWGGRKTVRVHLYMATISAIKWNYKIKAFYQRLIAA

SEQ ID NO: 265229 - protein, 370 aa, unidentified
MKSIIYVGMDVHSTNYTLARFMFGNEQPFAVTQVDPDYKHILNYLKQVQKNYGGPCEFLCGYEAGCLGFTLYEQLKAHNVPCVILAPSKMPKVKNEIKTDKRDAMKIAKCLAYNDYSAVYVPTKEDHQVKEYIRMRDAHKTALKKVKQQILAFCLRNGFQFTAGKNYWTDKHMKWLRGLQMDEMLREILDEYLATYQASLDKLERFDKRIEELAAGTRYADKVKMLSCFIGIRTHTALSLIVETGDFRRFAKADQYASFLGLVPGEHSSACDKNYLGITKAGNSHLRRLLIESAQCLARGRVGYKSKVLKAKQYGNPAQVIAYADKANERLRRRFYHLTLKLKKKRNIAVAAVARELSCFIWGMMTERIS

SEQ ID NO: 265230 - protein, 355 aa, unidentified
MGSAKYVGLDVHKDTISIAVMNSAGKLIMESIIETKAITILQFFQGLHGDVYVTLEEGTWAAWLYDLLKPHVTQVVVCNPRKNALLLKQGSKSDQIDARKLAELLRLGALSAVYHGEHGLRMLKELSRSYLTISKDLGRVMNRLKALYRSWAIPCAGAQVYAPRHRAEWLAKITEAGVRRRAELYYEQLDALRSLHKQAKKELLSEGRKHSATKLLRQIPGIGPLRATQLVALMQTPHRFRTKRQLWNYSGLGLETHDSAQYCMVEGQLQRSKKPQQLRGLNDNHNHDLKNIFKGAAMRASTAAGPMRDFYQALLAKGRRPTMARLTLARKIAAITLIVWKKGVSFDAKHLKQAA

SEQ ID NO: 265231 - protein, 400 aa, unidentified
MNAVGIDVSKGKSTVAVLRPFGEVAASPFDVIHNDSDLKQLAELIKALPGESKVVMEYTGTYFEPIAQFLHNNGIFVSVVNALLVHDYGGNSLRKIKTDKKDALKLASYALDRWTELDEYIPADEQRKTLKLLNRQYNQSIKIQTMMKNNLISLTDSVFPGINKLFTSSERQSDGHEKWVDFLKAFPHRDCVAKLYLSVFKIKYKSWCSRNKYKYSEAKAEEIHAYAKSVIAVLPMNDSAKLLVTQAVSQLNTILETLSSIRDEINRIASSLPEYDTVMSMFGVGKVYGPQLIAEVGDTRRFRNRRAITAFAGLDAPPYQSGQLDVSSRHISKRGSAALRKVLFQITEVYILNKPEDEPVYQFIDKKRSEGKHYYSYRIAAANKFLRIYFAKVNQVLNSQ

SEQ ID NO: 265232 - protein, 324 aa, unidentified
MTDAVLGIDVSKTTLDTSFLAGTKPRSRSFANSPDGWRQLIAWLAKEGVRQVHACLEATGRHSLGIALALHEAGHVVSLVNPAQIRDFARTKLGRNKTDPVDAAHIREYAELFKPRPWTPPSPALRRLCELQTIRAGMVASLTEWKNRSTSGMADDRALALAKATIQHFTSQLEAVDQAIAETIDNDRELCAKRTLLVSISGVGETLAGIVLAELPGPEVLGSSGAAAAYAGLNPRQHQSGTSINRPARISKIGNAVLRSALYMPALSAMRYNPAVAALVDRLKAQGRLTGKQIVVAAMRKLLVICFGVLKSGKEFEPAIALGQ

SEQ ID NO: 265233 - protein, 372 aa, unidentified
MTQTNILFIGMDVHKESIVISLADDDRSEIRRYGSIGGTLADFKKTLRKLVSTDKELFFCYEAGPTGYELYRFIVSQGHQCIVVAPSLIPKKPGDKIKTDNRDADNLTRLLRSGDLTAVYVPNEEDEAIRDLSRAREDVVLVLKSAKQRLKSFLLRHNIRFDGSANWSEKHLRWLAEDVNMPYPAQKVVFQEYVNSVTEANARVKRLDKEILYHTKQWRLYPIVESLMSLRGVRMVVAVTIIAELGDLTRFENPKQLMCFLGLTPSEHSTGDRKRKGAITKTGNQHARRVLVEAGWAYRFHAKVSKEMQKRQENIPIKVRDIAWKAQLRLTKRFRMMANNGKPRNVIVVAMAREIAAFMWAIAQEIPISPRQ

SEQ ID NO: 265234 - protein, 343 aa, unidentified
MKLSRVGVDLAKNVYQLHGVDRTGKAVWKRRLRRDQWLAALTDKVEPGCEIGMEACTGAHHWARELQSRGYTVRLIAPQFVKPYVKSNKNDANDAEAICEAMSRPHMRFVTVKSVEQQDIQATHRVRTELKDHRNAKANQIRGLVAEYGLVAPQTLLALRRAIPDWLEDAENGLTDYFRSLLHGLWDDLLTLEDRLKELDKEIEKLARSNEVAKRLQQLRGVGPIVATALVATVGNGEQYSKGRQMAAALGLTPRQNSSGDKHRLFGISKRGDVYLRTQMIHGARAVVSQAKHRDDPLSRWVTDIAKRRHPNVAAVALANKTARMAWAMLRNDTDYDPGLGAC

SEQ ID NO: 265235 - protein, 321 aa, unidentified
MQTPSSGVLNVGADIAKDDLMVACAEGSFATRKIANQRAALLAFLKGLPAGSRIGIESTGSYHELLAELAHKRGFVAYVLNPKDTHHYAKAMGQRGKTDRVDAELIARMVEREHENLHPWIPPTPQQREVDRLLKRRATLRCLRAALGQSLQGVHGFAADLKALRLRFDQLTARIDARVKELLEADPDRKRDYARVCKITGVGAVVGASVFNTLDRVRLRSADSFVAFTGLDPRPMDSGQHRGRRRLSKRGPGELRRLLFLAAMSAAKTKIWKPLYEHYRAKGLSSTATLVILARRIARTAWSIFTHKTEFDPKRVTQGLT

SEQ ID NO: 265236 - protein, 346 aa, unidentified
MLYAGLDLARKRICFDARRPDGEIVDRGASPTDSEGLDRLAERLLAHDPHVLAVVESMNGARFVHDQLELHDIDVQICDAERAKGLAPLACKTDKIDAGVLAELARRDLVPEIWLPDPGTRADRERARFRLHLVRKRTALKNRVHSTLIAWGKPCPVSDLFGRRGRGLLGRLSIPEPWRSTLQASLQLIDSIDGEITAQERELRLIGAAHPYVPQLTTVPGIAWVLGFTIACEIGDITRFPSPKKLTGYTGLCPKVNQSGEHDWRGPMKKNGPRYLRWALIEAAQHAGRSPHYRELYERTRKRHGPQRGAKVAAIVVARKLSGAIWHMLTNDEPFAPGSAAGTLAA

SEQ ID NO: 265237 - protein, 320 aa, unidentified
MNAEIFVGVDVCKAWLDVAQVSSPLKDAPGELTSRVSNDEAGRAVLVKQLQRLAPTLVVLEATGGFEAAMASELCAAGVAVAVVNPKKVRDFARSIGVLAKTDRLDAQVLAKFAQATRPQVYALPDETQQEIIELVDRRAQLVSMRAQEKNRLATVKHVARTSVRHHIEWLDKRINEIDKDLDGRLKDSTIYQPKYELLDSVPGIGRVTISMLLGRLPELGSLDRKRLAALVGVAPFADDSGRRRGQRYIQGGRADVRSTLYMAVFTARRCNGPIKALYDRLKAAGKAYKVAMTACMRKLLIILNAILKSGQPWRQIESA

SEQ ID NO: 265238 - protein, 482 aa, unidentified
MKKRTIYAEQSQELLRLFEEAGNNSKIMCVPIDYAKKDNVVMFCNGYGDILRKPFSVKNSPEGIEYLSDQVTRSCLSRSINPKHVFFGGEDVGSYAENFANALRAKGWFVGGVNAHDAKKQRANAQASTDRLDLMGIAIMLINRRANCSPAQSGIYLNLRNLVRHRASLVKLSTKVRNQIHTAVDRLLPGFLDEKKTGIAPFSKSSLYLMKDRFSAARIRRKKTDKLTEILRQYGTQNPERAASKLKEYAKAVLMPPNEYIGTLQVSLAQHVKHYRCIRENIEQLEKEIALWLAQTQGAFLTTVRGIGIVLAAGVTAEIGDPNKQKPLNNLVSYAGIIPRVKQTGGIEGKTYTGKVAKRCNRLLKNYVVQSGLHLGLHGPENLMTDYKRREASGQHADFGIARRYLRMGMCLMRTSQIYLPQRLRNRNTEPKERAIYYLMIWPKIRDKWIKLDALNAAFAKDRPLGKWRHMVQELYGITLKL

SEQ ID NO: 265239 - protein, 320 aa, unidentified
MPASCGVGIDVAKDTLDVAWATESDARWRTTNDEAGWAALIDQLHARPPTVIVLEATGGYETGVASALSVAGLPVAVVNPRQVRHFAKALGRLEKTDTLDAGILCEFAVRIAPVPRPLANDELADLQALVTRRRQLVDMLTAERNRVPLARGAVRKNLRTHIAWLEKQVGHTDRDLRTRIEASPIWRVRDQLLQSVPGIGPTTAACLLAGLPELGTLSHRAISKLVGVAPLPDDSGTRVGYRRIQGGRADVRRALYMATVTAIVHNPTIAAAYRRWRAAGKRPKVALIAAMHKLLIHLNAILTDQTTWQPTPVPPSTTPS

SEQ ID NO: 265240 - protein, 314 aa, unidentified
MYLGIDVSKLTIDCCLIADGQSHQKKFQNNKGGFEQLTKWLQSHKVSDKLHCVCEATGTYYEALAEYLYSRYTITVENPRKIKGYAIAELQRSKTDTQDAKLIAQYCQDRKHKLKAWQPPAKEQKQLQEIARYLDYLKQQRATEKAKQHEAPDYIKSHIQTTISNLTTQIQTVKKQLLQFYKDNPSYNNMRKRLKTITGIGEQATAVLLSTYKRHEFKNAKQFTAYLGLDPRKYQSGTSVNGKSRISKIGSSEIRKSLYMPAVVAYRCNAFPEFVGRLKNKGKHIKLILIAIMRKLAVIAFTLLKNGQDFQVER

SEQ ID NO: 265241 - protein, 309 aa, unidentified
MNEELVYLGVDIAKAYLDAAIANEKRRFSNDAVGHRRLIQWLKQIKGPVQVICEPSGGYERALVRALVAAQIKVSLVPANRVRQFARAGGILAKTDRIDAKLLCAFGEAMKPGIISASQLEQEQLRELESQRRHLTHLLVMEHNRAARVSEVCARKLNRRLITQIKKQVEQLDLLIQEQIAASRELATKAQKLTTISGVGARTAALLLAQMPELGQLNRREVAALVGVAPFNRDSGRMRGKRAIYGGRRSVRHGLYMAALVAARHNPILRGFYLRLRAAGKPAKVALTATMRKLLIVLNSALKPDLNYA

SEQ ID NO: 265242 - protein, 368 aa, unidentified
MKQVTTYVGVDAHKKDLFIAMLVGDGQTPVTWTVPNEPPTVKRLVRKLEREAPGPVLVCYEAGPGGYALQRQVTTRRVSCQVIAPGLIPRKPGERIKTNRRDARKLAELLRAGLLTEVRPPTLEEEAVRDLCRARDDAREDLQRCRHRLGKLLLRRGLHYPGRNWTRGHRAWIAGLTWTQPAERVVVDDYLLAIDHLEARLGELDARLGEIAETDPYREPVGWLRCFRGIDTLTAILVLGELHDFRRFPSPRALMAYLGLVPGEDSTGEKQRRGRITRTGNALVRRLLVETAWHYQHRPSIGVALTRRRKGQPGRVIAIADKAQQRLCRRFRRLAEHHKPTPKIAVAIARELAGFLWAALQPAPVPVN

SEQ ID NO: 265243 - protein, 427 aa, unidentified
MAYRIAAVDVHKKMLAVVVADVVVEGEYEFDRRKFGATPAELRRMAEWLVQQEVEEIVMESTAQYWKPVWGALERYWKPARQGREGATQMSGTLHLAQAKSNRGPRGRKNDFADGERMVKRLVAQELILSFVPDPDQRLWRTVTRRKYQLTRDKVRFTNQLESLLEQAHIKLSSLVSDILGVSARRMLKAVAEGETDPAVLATLADCRLRATPEQLADALGACAQLHGAYRRLLTMALEELKLMEKQIEQLDREALELLQQHQEAVLRVAEVPGFGVESALQMIAEVGPEAAAFRSEKALASWVGVCPGNEQSAGQSKSTRSPKGNRAMRRLLNQAAHAAIKVKGSILDLTFRRLLPRLGYKQAIWAIAHRLCRVLWLILHQGVRYQERGSEVSAKSKRTRTARMIKELQKLGYRVEGGLLPAANLS

SEQ ID NO: 265244 - protein, 421 aa, unidentified
MKPQVSEAFAAFVGLDWADAKHAICLQAAGTVQRECLSLAHSPEAVHTWVQTLRMRFNGQPVAVGLELNKGPIVSALRHYDCLVLFPVNPLTVAKYREAFTPSRAKDDPTDAELLVDILLKHRDKLAPLNPQSPAMRALAQLVEHRRRLVGDKVRLTNRLTSALKNYFPQVLQWFSEKDTAIFCDFLSRWPTLKTAQLARRTTLEGFFRTHHVRSPDLIATRIEAIKSARALTTDDGVITPNVLLVHVLVAQLRVTLQGIADFDRVIVQRAQDHPDFPLFDALPGAGAVFAPRLLVAFGEQRERFTSAEELQKYAGIAPVTERSGKKAWVHWRLQCPKFLRQTFVEWAAESTRHSFWAQVYYQQQRDKGKAHQAAVRALAFKWIRILYRCWQERTPYDEAIYLQALKRRNAPLLHNLAKVS

SEQ ID NO: 265245 - protein, 460 aa, unidentified
MAQKRKNAPGKGRKGQPHSLNPIQPNAAGIDLGSREHCVAGPPLSDGSPNVKHFGTTTPELLRLAGWLDQQKIATVAMESTGVYWIPLFEILDSRGFDVQLVNSRQIAHVPGRKTDMIDCQWIQLLHACGLLRGSFRPGDDICRLRALIRERNTIVEQRSDWVRRMQKSLDQMNVCVHHAVSDITGYTGMAIIRAIAGGERDPRALASLRDCRCQKSEARIAEELTGNWRHEHLFNLGQALKVYDQLCGVIADYDAEILKHVDSLQPPDSKGSPAPPPATRAKANKFFRLGQEPMRQALYRMSDFDLTTIDGVGVETAVVIMSELGPDLSAFPDEGHFVSYLRLAPNISISAGKKVPGKFRAVSSTRVCNALRMAATSLRNSKTALGAYYRRISRRKGSSVAVFATARKLAQLVYRLIRYGQAYVDTGSEVYEARFTQRRLAAYTRALKEMGYKIQPLAA

SEQ ID NO: 265246 - protein, 396 aa, unidentified
MRLIIIKRHPLSIQERIWYAWVRSPIQPTEVPMPLYGGIDLHSNSNQSAILGEDRKRIMKRKLANDPALILRFWEPYKADLVGIVVESTYNWYWLVDLLQENGYRVHLANPAAIQKYNGLKHADDNHDAFWLAELLLLGILPEGYIYPKEVRAVRDLLRKRQQLRQLRTCLILSLQNIVTRNGGPKLSAQDLKTLKADRAQAYLQEFPELLLAGSANKACIDALTQQMARIEAVVETKLKLQEPYLQLLTLPGVGRILGSTIMLETGPISRFSKVGCYASYCRKVNSRWTSNEKVKGHGNKKNGNKYLAWAFGEAAERARLFHRASREFYQRKLRQKKNAALAHGALAHKLARAAFYILRDKVAFQQEKMFGYSEVALGNVGRDGDPGTKLVKPGD

SEQ ID NO: 265247 - protein, 457 aa, unidentified
MPQPKRSRSRTGLSAVHPAAAAIDIGATMHVAAVGPDRDTEPVRTFQTFTDDLHRLADWFARCGVKTVAMESTGVYWIPVFEILEQRGFEVMVVNARDAKHVPGRKTDVSDAEWLQRLHEYGLLRPSFRPQAEIAGLRAYLRQRERLLDYAAAHIQHMQKALMQMNLQLHHVVSDITGVTGMNIIRAIVAGERDPNVLASHRERGCHASVETICQALVGNYREEHVFALSQAIELYDVYQTKVAACDRQIEVILKRLKESATPPASKLLPPKHRSRQPNAPSFDARAALHAILGVDLTQIHGLGPYLALKLVGECGTNLTAWPTAKHFTSWLGLAPHNKISGGKVLSSKTRRTSNRAASLLRLAAVSVGRTDTALGAFYRRLAARAGKAKAITATARKIAVLFYNTLRHGMSYADPGATYYEERYRQRVLGNLQRRAKSLGYVLHQAERDPIQMVVS

SEQ ID NO: 265248 - protein, 356 aa, unidentified
MISRLTVHVPKIIIGVDTHKEEHVAVVIDKLGARIGQLTLPTTKVGYASLECWARTLGEIEAFGVEGTGSYGAGLARFLKGQGHTVIEVNRPDRSTRHRLGKSDPTDAEMAARSVLAGVALDQPKSGVEEVEMIRMLKSTKNSAMKGRTQAINQMKALVVTAPVELREVLNGLTSSQLVVRCSGWRSGPLDTPTTAAKYALRSLARRYAQLADEIEKLNKELARLTVAFAPMLVDLFGIGPDTAADLLVTAGSNPERLKSEAAFAALCGVSPIPASSGKTNRYRLNRGGDRRANAALYRIVIIRLRYDIRSRTYLQRRTAEGKTKMEVIRCLKRYIAREVFGILHEIGMRHTFRNA

SEQ ID NO: 265249 - protein, 394 aa, unidentified
MKLIGIDIGKNKHFFCAMDQQTGEIISQPVSFSNDKEGFDFLVQKIKSYPKDSILIGMEDTGHYHFALLKYLLDLQYTVALINPKTTDFNRKMQGGITKNDKLDTINICDVLDTPERKKQYRITKVNSFDLYEQKQLTRHHHNLKEEENVYKNRLQKCIDIVFPEFNKLFNSKYGIVYMNILKMFGSAENIANTDIRTIRKCFEIEGRGNRISLTPERLKECAISSIGISSSAEVIQIKHLTAQIELIEEQLTEIDKKIEEFSIQNNSPILSIPGISHFSGTSILAELGDISNYSKPSQIIKFAGVAPLHYESSQFNAQHTAITKKGSKYLRKTLYQIILPVIRHNPVFNKYYQLKISQGKGHRCAQGHCVRKLLRIIYHLLKTNQQFDPQLLR

SEQ ID NO: 265250 - protein, 341 aa, unidentified
MSEVSIIGIDLAKQVFQLHGACADGSVLFRKQLSRSQVLVFLEKQPRCTVAMEACATAHDWGRRIEEVGHDVMLIPPIYVKPFVKRQKNDMADAQAIAEAAARPTMTRVSVKTKDQQARAMLFRTRDLLVRQRTQLINALRGHLAEYGLVAPRAKANLRRLEQALAEPDSELPGMVVEIGQTYLEQIAALTGRVEALETRLRAEARGDAAAQRAQTMPGVGPVTAMAIAAFAPPMEIFHRGRDFAAWLGLVPKQYSTGGKPRLGRTSKMGQRDIRRLLIIGAMAVIRAAQRKGLPEGSWLTRQLDRKPRMVAAVALANRMARRLWAMLVKDEDYREPVQPA

SEQ ID NO: 265251 - protein, 407 aa, unidentified
METKNPRCAGIDVHKDMLKVAARVDGGVVVETFGTTSAEIFRLSDWLASQGITIVAMESTGVYWKPVWNLLEGRFQLILANAQHVKAIPGCKTDVKDCRWLAELLEYGLVPPSLVPPRPQRDLRDLTRQRTTLGEDRARVVNRVQKTLEDANIKLASVATDITGKSGRAVLDALADGKLSIDQMVELVHKRMEAKKPALRKALEGKVTAHHRFMLRQALDQIDHLDEQILNFDRRIDEVMSPLEHEGVKRLDAVPGLNAKTAQVVIAEIGTNMGAFPSAKHLASWAGLCPGNNQSAGKRRSGRTRQGNGYLKAALCQAAWAASRTRRSYFSVQHKRLTTRRGVKRANIAVAHSLLTTCYYLLKEPREYVDLGIEHFQKTPDPERSAKHMVKRLEKLGYKVTIEKAAA

SEQ ID NO: 265252 - protein, 370 aa, unidentified
MGKSALYVGLDVHKMSVDVAVAEPGPGAEVRFYGRIGGDLEALDKVTRKLQAKGAELRFAYEAGPCGYQVYRHLTAQGHSCLVAAPALIPRRPGDRLKNDRRDALALARLLRAGELTPVKVPDADDEAMRDLTRAREDAICVERRARQRTVAFLLRHGRVYPGKTTWGRGHWAWLLEQVMDHPAQQIVLQEYLDAVREASARVLRLTGQIRDLVPQWHQAPFVAAYQALRGVSFIVAATVVAEVGDLDRFNNPKELMAYLGLVPSEHSSGASVRRGRITKTGNSHARRVLVEAAWAYRLQARVSRTLLKRQEGLPERVRQLAWKAQLRLCTRYRRLLARGKARQTIVIALARELAAFLWAIGRAVAPATA

SEQ ID NO: 265253 - protein, 322 aa, unidentified
MKTQELFIGVDVCKDRLDIANDSNSEVWSEANDDSGVSLLVEKCTTLKPTLIVMEATGGLETLLYSALVTAGLPAVVVNPRQVRDFAKALGKLAKTDAIDAWVLARFGALMRPEVRPIKDEQTRELAALVTRRRQLLGIRTAEKTRLRQAAKWTRKDIKSLIKVLDARLAKLEKEIGSNVKNTPGWKEKDEIITSVPGAGPNLSSYLLANLPELGKLNGKEIAMLVGVAPLNRDSGKFRGGRIIWGGRSQVRSALYMSTLSASIHNPHIKRFYQRLIEKGKKPKVALTACMRKMLTILNTMVKNNTTWDINYSLTLESNHGC

SEQ ID NO: 265254 - protein, 328 aa, unidentified
MQQTLIVGVDVSKLTLDIHIKPSGFWMQIPNQPQGFRLLLKELNKQLTAESRVIVVMEHTGKYSWRLETFLRSRSIDYCKVPALEIKRSQGMTRGKNDKIDAERIAAYGWLRRDELKADQPLAEGVRELQDLLRLRSKLVRDRSGYMCRLKEMKVSGEDIKGFASKIQRNLITMLSEHISSVDQEIRAIIDANSAIQKTCDLLRSIKGVGLIVAASMIGCTNNFSRFENARKFNCYAGLAPFDYLSGTSIRGKSRVSHLANKEVKTILTLAASTAIQHDAELKNYYKKRVANGKTKMNSLNVVRTKLVARMFAVIKRQSPYQEMVQAA

SEQ ID NO: 265255 - protein, 431 aa, unidentified
MLGGNQEKLMSQNQPEIQYAAFVSIDWADQKHVWSLQEANSSTREHGEVGHMPEAIEAWIAQMSQRFAGRPIAVAVEQSRGALVFMLSKYEQLHIFPVPPAMTANLRKAFYSSGAKTDPADTDLLQDVLQMHREKLRRLSPDTEATRLIQNLVEERRKLVDEKTAQSNRLEAHLKIYFPQIPQWFGDVDSPLVCALLERWSALEALQKARPDTLRSFFRKHHCRKEELIESRIKAIGEAMPALKDRAVVEAQLAVVKVLVQVIQVLHQGIEDFNRQIQEAAEAHPDFFIFESLPGAGAVMAPRLLAAFGSQRERYRNAAEVQTLSGIAPVTESSGKSSWIHFRFACSKFVRQSFHEWAALSITQSQWARAYYELQCRRGKRHHAAVRALAFKWIRIIFRCWKERVAYDEKVYLAALTQHNSPLLAATKIAL

SEQ ID NO: 265256 - protein, 353 aa, unidentified
MNVYYVGLDVHKASICIAVLNAEGKLVMESVIETSAAIILDFIKGLRGQVHVTFEEGTHATWLYDVLKKTKVTVIVCDPRKNRLLQDGNKSDRVDARKLAQLLRAGLLSPVYHGEHGTRDLKELVRSYEYLVEDSTRAMNRIKALYRSRAIACSGTTVYQSQQREAWLEKLPEAGVRARAERLYSELDHLTVLRREARQAMVAECRHHAASKVLLKVPTLGIVRIAQLISNVVTPHRFRSKRQFWSYCGLAVVTKSSGDHHVVGAELHRKKRMATTRGLTRSHNRTLKYVFKSAALTAVRCEPFKSCYAELVERGLRPELARVTIARKIAAVTLAVWKKGEAFDTDQIIKHAA

SEQ ID NO: 265257 - protein, 431 aa, unidentified
MNYNQNHKISQITSETLIVGVDIAKHNHVARAQDFRGLELGKTCFFENTNAGFHSFLDWINQLVKECKLNQVIVGMEPTGHYWLNLAHLLKENNIKFVSVNPLHVKRSKELDDNSPTKNDVKDAKVIAQLVKDGRYAEPTIPQGIYAELRVAKKLRDLLNVDLQVVQGQVHNWLDRYFPEFLTVFKSWEGKAAIHFLKLEALPHELVNYTDEELLLSLRQVVKRSIGLKKIRALKEAANLSIGIRQGAAMAKLELRALLEKYDFIQMKFEELDHQLDQLLDHIPGVTQMLEVSGIGRDTVAGFFAEVGDLRDYQHPRQIVKLAGLSLKENTSGKHKGQTKITKRGRKKLRALLFRAAMILVAKNKAFKALHIYYTTRSHNPLKKMQSLIALCNKLIRILFSIGKKQFTFQEDKMLKDIPHMATFVVHQTVA

SEQ ID NO: 265258 - protein, 319 aa, unidentified
MNTTINANSRKTERNVGIDVGKDTLDIYIYELEKHWQATNTLDGIKQLIKQLKRYQLTRVLVEATGGYERRLVEACAEKSQPVIIVQPIQVRQFAKAQGLFAKTDKIDARLIAEFGVLMQPEPRALPSKKVRLVRDLLARKRQLNETRTQELNRQHKAEKVLLPSHRRMIKLIDKDIAWINEKLAKEVSAITEWQRVYEVLSSVPGIGDGVAYTLLGELPELGQLTHRQIAALTGLAPFNRDSGYMKGRRRIKGGRAPIRTVLYMAMMCAIQHNPVMKQFYQKLVAQGKHKKVALTACMRKMITILNAMVRDDKEWQMT

SEQ ID NO: 265259 - protein, 360 aa, unidentified
MKKISKQSQVVKAAKPERSVGLDLGDRFIHYCLLDQEGEVMEEGRMANSETALRKHFADEAVMRVAMEAGTHSPWVSRLLKRLGHQVLVANPRKIRAITGSESKNDRNDAEQLARFAAFDPKLLSPIEHRSEQRQQDLNLIHARATLVRARTMIVNVVRGLVKSAGDRLPDCSTESFAERTKAAIPASLREVSMPLLKQIGLLTAQIDLMDKQIDKLGKKYPEISILRSTPGVGPLVAACYVLTLDNPNVLGDNRQAGAFLGLRPRQSQSGDSDPQKRIARTGNTYLRSLLVQSAQYVLGRFGPDSALRRWGLKLAGSGGKRGKKRAIVAVARKLAVILHSMWRSRIVFQAFPQSATGVA

SEQ ID NO: 265260 - protein, 411 aa, unidentified
MEVVHERCAGIDVHKATVVACVRMPGARPGERHSETKTFATTTRALTELTHWLVGHGVTDVAMESTSVYWRPVYAVLENTVRLILVNARHVKMVPGRKTDVRDSEWLAQLLECGLLRASFVPPRPVRDLRDLTRLRKTLIRERGHHVNRIEKTLELAHIKLGCVVTDLMGKTGRAILQALSAGIDDPDQLAEYAQGLLRKKRAALREALVGRLTPHYAFLLQQHLALIDTLETHIVTLDARIEEAMAPFAEPAALAQTMPGVAVRAAQAILAETGVDMQPFPTAAHLASWARLCPGTHESAGKRQPTTTGKGATWLRATLQEVAWAAVRTKKSYYRALYHRIKGRGGPKKAIVAVQHAMIVALWHMLKRRVAHHDLGADYFERRNTARIRRHHIRRLEQLGYDVVLVDKAA

SEQ ID NO: 265261 - protein, 365 aa, unidentified
MSKDIKKPAGETRRYVGIDLGDKKSRVCILDEGGQVVLQEWVVTTPEAFFKRFHGETKMDLAMEVGAHSRWASDLLRRCGHRVVVADPRQIGLITKSNAKSDKRDARTLAQLLRVDARLLSPIEHRAEELQMDLTVIRMRDNLIETRTRLVTSVRGVVKATGGRLPRGETSSFPQQVGDLIPEPLRPAVGPVLEVIDRWNEAVYEYDCLLEHWAETRYEESRRLIQVKGVGTLTALTFLLTVGDKERFSRTRDIGAFVGLRPRLGQSGDNEPELRITKAGDGLLRKTLVECAQYMVGPFGQDSDLRRWGLKMIAAGNGSKRARQRAVVGVARRLAVLLMSLWKSGQSYDPLRHSRAQERSQEVAA

SEQ ID NO: 265262 - protein, 351 aa, unidentified
MAAKKRSVIGGVDTHRDTHHAAVIDSTGGLLDDAEFPATAAGYTDLLTWMRSFGRLIAVGVEGTGSYGAGLARHLASHKITVVEVDRPDRRTRRIKGKSDPIDAIAAARATLAGTAMGTPKTRTGPVEAIRALRVARQGAVKARTAAINQMRGLVAAAPETLRAQLTKLSAAVLVNRCATLTTDPTRLQDPEQATAAALAGLARRITALTEEITALDRQLAPLVREAAPRTSALFGVGTDVAAQLLTTAGDNPDRLRSEAALAHLCGAAPIPASSGRVRRHRLHRGGDRGANHALHTIALCRLRYDPRTRAYQQRRITEGLSKQEILRCLKRYIVRDVYTALRADFAALAP

SEQ ID NO: 265263 - protein, 358 aa, unidentified
MNRNTGMSAGQIIGTMNGQQVVGLDIAKHVFQLHTVNMGTGEIVNVQIKRAKVLEHFANRQSCLIAIEACGGAHHWARELTAQGHRVRLLHAKAVRPFVTGNKTDATDARAIWLAVQQPGVKFVGIKTAAQQATLTLHRQRELMMKMRNMQTNALRGLLYEFGATFAKGRKALFKDVEQALEELSAQLPQMVRDSLREQVARIKVMSEDILAIEKRLGLQLKVDPQMQRIAQIPGVGLLTATAAIATMGEASAFKSGREFCAWLGLVPTQTDSGGKVRLGGISKRGDTYLRTLLIHGARSVLTHAKEPGPWLEQIKQRRPANVVVVAQAAKMARTIWAVTAKNQDYQRGFQSVRPQAA

SEQ ID NO: 265264 - protein, 344 aa, unidentified
MSKHAVRGGDVARLLERFAQLRKKALARTGKVFPFVVIQEAGLDGFWIDRVLRKEGIESHVVDPASITTSRRRRRAKTDGIDGEALVRALLAHKRGEPRVCAMVKAPTPEEEDRRRLCRERKVLIGERVRHVNRVKGLLFSQGISGYQPLRHDRRERLDTLQTGDGRLLPYHLKAQVRRELDRLELLLEQIKAVEAERDVLLAVQQGAAPAPAAMLLNIKGIGPEFAAILWSEGLFRHFDNRRQVASYAGLAPTPWQSGSVDREQGVSKAGNPRLRTTLIQLAWLWLRNQPQSALALWFKERVNRNGGRLKKTTIVALARKLLVALWKYVTAGVVIEGAIVKSA

SEQ ID NO: 265265 - protein, 461 aa, unidentified
MTRLILGIDVACRAAHQATLTDERGEFVWSARKFRTTTQDLESLWSSLPGDGELTVVMEPTRNAWVPLASWFQLRGAAVVMVPPEQSADLRDYYSKHTKSDRLDSRILARVPLLHPEGLHSLEGLGPADPLRRITKLRASLVKRRTVIAARLDAYLELLGPSWHAAFSADLISNRCLRLLASGYADPQALRRLGRARLTKLIWRYSHGKCGEREALELLAAAEESVALWDGELDFAELADDIAVEARLALALCHEIHELEERIAVSLKALDPLGIMTSVPGVGTVNAAQILARLGDPNRFRSLAGAKSYSGLVPSLSASGVHGRHGGPTKSGDAPLREALFMAADWARRVDPTLAQRYHRLMVSEGKHHNSALCHVSATLLTRIISCWRAGTPYVIRDLDGTPITKEQGREIVASHYSVHEAIRAQRRIVNRGTSRRIKESPGAPSIDSSQEKDRTTQKGT

SEQ ID NO: 265266 - protein, 422 aa, unidentified
MSYCPVAGIDVSKQFSDMCILSPDNKIFAQEKIYHDETSINRANALLQKAERLFFSKPVIVMESTSHYHLILFQFFSEHGYDVIVVNPLQSNSMKDFSIRKRKTDRVDAFKLAMMYRTKTLRPSQIPQTATRALRQLCRHRAELLNDVSSYKNRLTALLDQTFPGYDKVFSDVGGVTSCAVLVRFPTPTILLVEEESELVEVIAAASKSGYSFAKKKAGLLISAAQKAQTLGIHSCADETLIVCTIQMLRTLSESVLQIETAIDNLLAQIKEMRNNVSLLQSIPGVGSHSAALLLGEIGDISLFKKPKQLAAYFGLDPTERQSGSFRETKNKLSKRGSLYARAALHMGVVNSICKRGKDSAANPVLLSYYEKKCKNKPAKVAQAASMHKLVFIVFAVLRDQKPFELKTPEQYAVEQGFVKAA

SEQ ID NO: 265267 - protein, 347 aa, unidentified
MLLVGIDWAERHHDVCVMAADGSVLAGERIADGVAGVARLHELIAGHASDPAEVVVGIETDRGLLVYQVIAVNPLAASRYRERHTISRAKSDRGDARMLADVVRTDRHHHRPVKGDSGLAEAVKVLARGHQQLVWARQRQANMLRSVLRAFYPAALAAFGGDPGGRDAVAVLGLAPSPDRDRLLSHAQLVAALRRAGRRRQVEARAAVIQAALASQQLEAPPVVAAAYGQVVAAAVAVIASLSEQLASLEAALTIAFGAHRDAGIVRSQPGLRVVLAARVLAEFGDDPERYVSAKARKAYAGTAPITRASGLRQVVLARAVGNRRLSTACHLWAFAALTGSPGGSGG

SEQ ID NO: 265268 - protein, 345 aa, unidentified
MKYIGIDYHKQYFVATIMNEQGEIIRRDKASTDRSSIRHYFKHADLSGGVKAVMEACYGWEYFYDEASELVDELIMAHPLKTRLIAEARIKTDTIDSETLAHLLRADLIPRAYAPDLETRGQKNLLRYRSSLVAMKVRIKNIIHSVLTRNHIEDQPFTSLSDKFGKRGLSYLRAVSLKGNDTVILNEYLDLLEETDKKIKEAEKRIRTLCREDKICTLLRSIPGIGPILAVTIRYEIDNIERFMSAGKLCSYAGLVPSTYSSGNRTYQGKITKQGNKWLRWAMIEAAQKAPAKDLWLQGFYQRISRNGKKIARVAVARKLLEIIYRMWKEEKPYYKKGTVALPVV

SEQ ID NO: 265269 - protein, 343 aa, unidentified
MTQYVGLDVSLKETKLHVLDEAGSRVWRGRCATEPAAIAAAVRRYAPAAVRIGLETGPLTTWLWTALTAEGLPMVCLDARHAKKALDMKVNKTDANDAEGLAHLVRAGWYREVRVKGRSAMLAKALLGARGQLLNMSLSLENQIRGMLKTFGRIVPKGAGGLFEKNVRAVIADDAEIAAVIMPLLQARGMARSKCAALDRRIIRSVQGDASCRMLMTMPGIGPITAVSYVAALERPDTFKRSRAVGAWLGLTPRRFQSGEVDYDGHISRRGDRQLRALLYEAAAVLLTRVRKESALRRWGLMLWKRLGFKRAATALARKMAVVLHSMWKSGTAFNPTLSAVTP

SEQ ID NO: 265270 - protein, 339 aa, unidentified
MNSMAVGVDIAKNVFQVHYVDQATGEVVNRPIKRAKFLEHFANRAACLIGMEACGGAHHWARELTRMGHDVRLMPAEFVKAFNIRNKNDAADARAIWLAVQQPGKPVAVKTEMQQAMLALHRMREQLVKFRTMQINGLRGLLTEYGEVMSKGRAKLDKEIPAALGRIAERLPAALIHTLREQWNGLTRLDEQVAEIERRMREWKKEDRAVKSISEIPGVGLLTATAAVAMMGDPKAFRSGREFAAWTGLVPKQTGSGGKVNLHGISRRGDTYLRTLLIHGARAVLTHAKEPGPWVAEMKKRRPTNVVVVALANKMARTIWAVLAHNRPYRKDYVSVKLA

SEQ ID NO: 265271 - protein, 343 aa, unidentified
MKITTIGVDLAKNVFQVHGVDGHGKVQVRKQLKRAQVFPFFANLPPCLIGMEACSGAHYWAQKLTTYGHTVRLIAAQFVKPYVKTNKNDAADAEAICEAVSRPHMRFVAIKNGNQQAVLALHRARQGFVKTRTAQANQVRGLLTEFGIVIPQGICHLSKRLPEILEDGENDLPGTLRQLLARLLAHFRILDQQVTDLEQQISLCHRDNEDSRRLAGIPGIGPITASALVASIGDARSFANGRQMAAWVGLVPRQHSSGGKPTLLGISKRGDSYLRTLLIHGARSVVRVSENKLSADSWLRRLMERRSKNVATVALANKNARTAWALMTQGRTYQSDYVSVSPH

SEQ ID NO: 265272 - protein, 373 aa, unidentified
MKYSTVYVGMDVHKETFSVCCYTNEKEKAEYSQTMDAHYSKVLNYIEAMRFHYGNDVLFICGYEAGCLGYTLYHQLTKHGIKCVILAPTTMSKPAGGKKIKTDKRDAALIARCLAHNDYKAVHIPTDKDEQIKEYIRMRNDHNLALKKIKQQILAFCLRHGYKYDGGKNHWTQKHLAWLRTIGIDGIYEEILDEYLLTYHTLKDKIERLDRRIEELASDEEYRDKVNKLVCFIGIKTHTALAVIAETGDFNRFKDARSYSAYLGLVPGEDSSGQKRTGLSITKAGNSYIRTLLVEAAQSYTRGQVGYKSKNLRERQGSNPPEIITYADKANERLRRKYYGMTLRNGKRANVAKTAVARELSCFIWGMITANYN

SEQ ID NO: 265273 - protein, 343 aa, unidentified
MEHYAGIDVSLECSSVCVVDATGRVAREGKVASEPEALIGWLGALGLGLAQIGLEAGPLSQWLFAELRKAGLAVELLETRHVRDAFQAMPVKTDRNDARGLAQLIRLGWFRPVHCKSMGAQETRALLTARKLVQSKLHDVEMGLRGLLRGFGLKVGAIAPRSFEGRIRELVGGHSSLEVIAEALLAVRTVLLREFNGLDKRLRTLARHDARARLLMSAPGVGALVSLTFASAIDDPERFKRSKMVGAHFGMTPKKYQSGETDITGRISKSGDKSVRTALYEAAHIILTKPVKGCAALKSWAMRLAKRAGLKKAKVALARKLAVIMHRMLVDAKPFHCTAAAAQ

SEQ ID NO: 265274 - protein, 386 aa, unidentified
MQKLNDLSRSLTALEPNGTLIAVIEMSLSSWLVAGIVPGVERQPLKKLAVDESALLKLLHRWREEAEKAGRRIERIAVAFEAGRDGFWLARWLKARGIEAYVIHASSVAVSREHRRAKTDRLDTELLKRSFLGWLRGERDHCKMVEIPTMQDEDAKRPNREHDSLIGERSRIVNRMKAALVRLGIRGFNPKLKRATTRLDGLHTPEGEPIPPNALAELRRDMERRRLVNNQIRQIEEERLERIEQAPCDGAHVMVRLLARVMGVGIETADMLVHEVLSRNMRDRRAVARYAGLTGSPDESGRKRREKGLARSGHARVRRGMIQLAWRFLLHQKNSALTKWFRSRTENARGTRKPMIVALARKLLIALWRLMREGIVPDGVVLRPAQ

SEQ ID NO: 265275 - protein, 353 aa, unidentified
MDRYIGLDVHSQSCTLAVEDARGKRLTERVLDTNGKVLVECLRGIAGTRHLCLEEGAQSAWLYEVLEPHVAELVVVQPEKRRGNKSDSIDAWALAERLRTGAKTGRVFKAPRRFTALREAVHGYEMATQDLVRAKNRLRAVFRARGISIAREVFADPDRHATAIKKLPPAQQRLAGQLSERLKTAIAAHEVAESWLREQGEALPEVTRLATAPGIGLIRASQIVAIVVAPERFRTSRQFWSYCGLGVVGRSSADWGRDPTTGSWNRQQLTATRGLNRNRNPLLKNVFKGAAMTVITSMPNHPLHADYERQLAAGIKPNLARLTLARRIASTVLAMWKNKEDYDLTKQQPQTAA

SEQ ID NO: 265276 - protein, 312 aa, unidentified
MPLQESPLFIGVDVAKLTLAIQFPDHLWSIANTPAGHATFIAKLSALGAVHVVCESTGGYERALVLGLHAAGIAVSAINARQIRDFARACGRLAKTDDLDAAIIRDYGCRIQPSRDPAPAPGEPEFAELIRARQDLVALITDEINRREHACLPPLLRLSYARQRQLEKQLVTLDALIDAHVAAQADLAAKTERLQQVSGVGRVTALTVVALMPELGTLRDNEAAALAGVAPMNRDSGQHRGQRHIHGGRAALRRVLYMAALTATVHNPILKAFYQRLRQNGKPAKLALTAVMRKLIILLNRLVKNPAFNLVS

SEQ ID NO: 265277 - protein, 361 aa, unidentified
MTGSGLAAAAAQARAVMPLAGRVKVGVEAAGHYHRPVCDHHWPRGWEVLELNPAQVAEQRRVQGRRRVKTDVIDLEAITELVLAGYGRPVTDRDVVIGELSAWATHRSRRVATRTATKNQLLGQLDRAFPGLTLALPDVLGTRIGRLVATEFADPARLAGLGVTRLIRFAATRDLQLRRPVAERLVAAARDALPTGDAVIARRILAADLVLLTDLDDQIQSAQTALGALLPRSPYATLTSVPGWAVVRVSNYAAALGDPQRWPGPRQIYRASGLSPMQYESAHKRRDGAISREGSVALRRALIDLGIGLWLNEPTAKTYAHGLKERGTHGGIIACALAHRANRIAYALVRDHATYEPTRWA

SEQ ID NO: 265278 - protein, 337 aa, unidentified
MYYIGLDIHKKTISYCVKDAAGCVHREGKIGSSRRELDAWVRTLPQPRMMAMEATIFTGWIYDYLLPHAEKLKVAHPLMLRAIAAAKKKNDKVDAAKIADCLRCDFLPECHIAPTEIRDRRRVLRYRNLVVKQMTQMKNRVSGLLMETGVSYNKQRLHKVGYFGEMMSTNADINDAVRPLLNLSRGMIRRSGKLEYDLVSSLERDPLLKERLRRLRTVPGVGSITALTWALEIGDYTRFSSNRQAISYCGLCADEKSSADKVMRMPLSKQRNKHIQRALVEAAKLAPRLSPELAMIRARELERGNPNRATLAVARKMVCYMLAVERRQQDFVQTAAA

SEQ ID NO: 265279 - protein, 458 aa, unidentified
MGRSKSTDRVRRAMAMVHPGYAAIDVGATTHVAAVKADRTPEPVRSFGTFTKDLHRLVDWFAECGVDTVVMESTSVYWIPIFELLDSRGFAVFLVNARDAKHVPGRKTDVSDAEWLQRLHSYGLLRASFRPKGRIVELRAYLRQRERLLEYGASHIQHMQKALTEMNVQLHHVVADITGATGLRIIRAILAGERDPAVLAHLRDSRCHATVETIEKALTGTYRAEHLFALEQALALYDTYQEKASSCDTRIEAVLKELSIRRGREAGPLPSPRQRMRRQPNGMDFDVRAALYALLGKDLTQINGLGPYLALRLIAECGDDLSAWPSAKHFTSWLCLAPSNKISGGKVLSSRTRPSASRAAALLRLAATTVGRTDTALGAFYRRLSARIGKAKAVTATARKIAVLFYNAVRHGMEYVDPGASFYETRYRARVIDNLHRRAKAFGFALQPLEPTAAIPVS

SEQ ID NO: 265280 - protein, 318 aa, unidentified
MNTTFVGIDVAKRTLDVAVRPTHQHWSVAHDPAEFPALIARLQALAPARIVLEASGGLEMLLATHLAAAGLPVVIINPRQARDFAKASGRLVKTDRVDAAVLAHFGEALKPALRALPDAHTQQFEALLTRRRQLVEMLVAEKNRHAQLAHQPTIQRQVASHLQWLEQHLTELDDDLRTTLQQSPVCRTNDDLLQSVPGVGDVTSQTLLAQVPELGQLTHKQISALIGVAPCTQQSGQWQGAAHIRGGRGRVRAVLYMATLTAVRHNPVIQAFYQRLLAKGKKKKVALTACMHKLLIILNAIIRQQQPWQAPPAPAAQA

SEQ ID NO: 265281 - protein, 351 aa, unidentified
MKKYSTEKSSEAIYMGLDLHRKSWHLTIRTQHQELKKMSLPPQWDALRKIIDDCGAERVELVYEAGYFGFSLHDQITAHGARCVVTPPSLMPQESGNRVKTDKKDSAKLARLLAKGELRAVSVPTVEARNHRQVLRQRSQMRNARTRTQLQIKAFLAFHGVPCPEWTGKWSGRFLASLHELDLGDVHLQHSFGLMLEQVACFNAQILRATKHLRELSASPTYREQFRLLRTIPGVGLLTAMEILLELGDMSRFSNAEKLAAYVGLTPTQHSSGDKIRLGHITHMGQGNVRGVLTEASWTLIKKDGVMAQKYERIKARSGGKRAIVAVAHNLLLRIRRILLDGVPYAVGVTG

SEQ ID NO: 265282 - protein, 428 aa, unidentified
MNVEESNRLKEFRQLKKEIRGSEEHLIVGIDVAKNKHHAFFGTATGKTLLKRLVFENDIDGFGRLRDRTEAMKVQHRLSKVVYGVEPTANYHKPLAEYLIKCGHNVVLVSGVAVNKNRELLDGRWDKHDTKDSANVADLISQGKCLYYDYPSMPLRDLRDLLSLKRRLKKQEHGTRVRIRNHLLAQYFPEFDRYFGKGCSESLPIVKWRLNPSMIAGMEYEEFVQLVAPRMKTMGQERRLKSIWGMAIDSIGCEAGDALDFEAKLMVEDLEQVKDSIRVVDDHIEDICLGFPEYSYLLTIPGFGPDVSSKVLGAIGNPFRFDNGKQVLKLAGYDLSANRSGKSSDSAVPVISKRGKAYLRYALYQAAFVASTSNRHFIIYYTNKLRGRDKEKGIKTKMKVKLAAKMLIIAWTLMKKKEPFDPEFLNID

SEQ ID NO: 265283 - protein, 378 aa, unidentified
MTSLETALQDKDTTSQSDLHVSFELGDRSWKLSCSDGIRSPSRYSVNAGDQAAVLDCMDKARARCGLDPRAKAHSCYEAGRDGWWLHRWLREQGIDNIVVDSSSIEVNRRAKRAKTDRLDADKLLALLLRYHRGERRVWSVVHEPTAQEEDARRTHREIARLVHERIAHTNRIGSLLVMHNLRPGRIGGRTWQGWWDAHCMQVPPLLRAEIEREYARLVLAKQQLNALETERRHEVAEGAHPVVAQLAKLGAIGPRGAWILDKELFGWRRFANRRELAGCLGLAPTPYASGTCEGEQGISKAGNKRARTLLVELAWRWLKFQPDSALSQWFRQRFGITGKRSRRIGIVALARRLAIALWRYVEHGEIPAGATLKTVDA

SEQ ID NO: 265284 - protein, 409 aa, unidentified
MELTPIYKRVIGLDVHQAQISACAIVEQADGSSTVERREFGGFKRDRKALAEWARGIGPDVVVMESTGIYWKSPYAALESVGIVAWVVNARHVKAVPGRKTDVADAQWLATLARAGLLRASFIAKADLRSLRHIARQRQKLGGMLASEKNRLHKLLTDAGIRLGVVVSDLHGQSARAMVKAIIAGESVPEVLSLASNRLRASREDIFEALQAEELSPAHRFVLTEIMAHIEDLEARMARFDAELLRSLVEAGYQVPLRLLQTLPGIDLMGAAMLLVEIGADMSVFGSAQRLASWVGMCPGNNESAGKRKSGRIRKGNAWVRRLLCEFAQAAARSRCALKAKFQALSVRKGHKRSIVALGHKMLRTIYAMLSKNTHYVDKTVDYEALMVARNAPRWLQMLVKHGFVPATA

SEQ ID NO: 265285 - protein, 386 aa, unidentified
MLLCVKTYSTILHKYTSIDGAETFAKLFFLCLLKIIIICVMKKAKSIIKISYGIDISSDDFTASQGIYYSDLDREVFIIKKFKNTTRGFDKFLAHVKKQKSKINPDGTIQTWFVMEASGVYYENLAYYLHEKGQKVHVALPNKVKSYIKTLENKSKTDDLDSLAIAQYGLEKQINQWVPPSAEMKELKELSRELSSLKDMSTQAKNQNHAREKAHDINSSSSKRIKEIIKYLNKQIKKVEKDIETAVKSNSELKEKLDKITIIKGVGLQTAVMIIAETNAFEGIENRRQLTSYVGLDVKENQSGKKAGRACISKHGNKYVRKGLYMPALSCKKHDKKFKDLYERVCERHGWKIKKIGIVAVMRKILHIIYALWKNGTAYDPNYKMA

SEQ ID NO: 265286 - protein, 449 aa, unidentified
MSDRSGVSRGDRNRNARLARLREAVPACNAIAAIDLADARQMVVVTDHESRVLARRVFQRRAWQLGAALDWAAGRARAAGYAGVTVAVEPTGHRWRVVGQLAADRQMPLVCVQPLLSSWARRAEDLTFDKTDDKDAVLIARLTGELRCYLPEPADETWARLRHLGSRRARLIAEQTAQVQQMRDLLECAWPAVLDAARQPFKSTTWHAALTTALSRAADGDLGRVTRLGRKRFDAAVRRQVGRWDAVNPWQKIIDGVFAACADPAGVTAMRRGALERVALLLADCRDTRDRLADTETRMVAVLDELRLTELATSITGLSAVGAASVLAETGDPARFTTGRALVKHSGLAPRQRASGNYTGRTRTTGQGRPGLRLAAWRAVWGALKSNPVYAARFHYLTSREHNKLATGQAHAVLAAALLRQLHAVITTGHRWDPVIAAGGRTTQRPAAA

SEQ ID NO: 265287 - protein, 394 aa, unidentified
MRFVGIDIASETHVVAVVDETDAVLVRPTKFTEDAPGYDRLFGLLGTPADTLVALEATGHYWKNLFAVLVTRGFAVALLNPLRTRRFADEELARTKTDAIDARGIARFAAQKRPAPTRLPDRATEELRELVRLRDRLVQDVGDRLRQLHRLVDLGFPEFTRHVKSLDSELATAILHDYPTAAAFRNVSARRLAGLRYDGRHKVGDDLARALLAAATRSVGQHHGAAYRLQVRYACEDLDLLRRRLRTLERDIERTLDDHEIGSLLTTIEGIGPQTAARLIAELGNPAEFRSAAALASYVGVIPAIRQSGTWTSSRAGLHPLGHAALRAALWMPVLTAVRKNPWLRAYYQRLTARGKLPKVALIAAMRKLLIAVYPVAKTRRPFVSQRAPQEARA

SEQ ID NO: 265288 - protein, 347 aa, unidentified
MYIGIDVHKDTHTAVGISPYGEKMFEITVGNYNPDFNKLEEKVEEMKGVLSPYIGLEDVRGYGERLAGYLYDKYPVYHVPSILVDRARQNATHPEKSDSLDALGVAKVMIQSIDTLLPYTISEESQKAKQLKEISIDREDLVLERTRLKNQVHTLLYRIYNTEYEQKFKDPFALKALTYWKNAKPKCDTYLLKTMKRKVRRLLDIHVEVTDLEKDMEQLLKDNYTIQTASGCGVVLASTIVGEIGDINRFTSPGALSKYAGCSPRERSSGKKIRHVKSRSGNRRLNCAFHRMALSQISRMGNDRAKQYFKRKISEGKSKSQALVCLRRQMVNIVWMMLKHKTVYRNA

SEQ ID NO: 265289 - protein, 425 aa, unidentified
MSYKIAGIDIHKRMVAVVVADVAGEGEYQFERHKFGSGGEQLRLLAEWLVANQIEEVVMESTAQYWKPVWGALERDWQPVSRARGAGAKSGSLLLAQAKSNRAPRGRKNDFADAERLLKRLVANELVLSFVPDTEQRLWRTVSRQKLQLTRARVRLQNQLEALLEQAHLKLSSLVSDLLGVSARRMLQALADGEIDAGRLAALAHCRLRATSEQLCDALGAATKLSPVYRRLLQMLLDELKLQERHMEQLDQELSVLLTAHHSAIQRLAEVPGLGVDSAQQILAEVGANAAAFPSAKNLASWVGVCPGEEQSAEVSKSARSPKGNRNLRRLLNQAAHAAVKTKGSVFEWVFGRLRTRLAYQEAIWAIAHRLCRLIWKILHQGVHYEEHGPAVSIQSKRNRTTRMIRELRKLGYRVEPLGAFATNM

SEQ ID NO: 265290 - protein, 309 aa, unidentified
MKEQKVYIGVDVAKAYLDVAWGQQSWRVTNDVLGRSALVQRLDQIAGSLQVICEASGGYERGLLQALQRSEIKVSLVQASRVRQYARASGLLAKTDAIDALLLCRFGEAIRPPATTPPKPQQDKLRELETQRRHLSRLLVAEQNRRAQLTDKALLHLSQRLIQQVKKQIAQIDLLIRELIEQSEELSSKAQKLTAITGVGPRTAALLLAQMPELGELNRREAAALAGLAPFNRDSGTARGKRAIFGGRRAVRCGLYMAALVATRHNPILAEFYQRLRSAGKPPKLALTATMRKLLIALNTALKTDPLLA

SEQ ID NO: 265291 - protein, 339 aa, unidentified
MTKYVGLDVSQRTTALCIVDGEGHRIWRGECTSSPDQIVHTVLQQAGAGASIGIETGPMTPWLVHELRSRGLDVICLDARHARAALRMQLNKTDRNDAEGLAQIMRTGWFRAVHVKSLDAHRARALLGARQQLVGMVTRLSNHIRGVLKTFGMLPGSVRGRSFAERVELLVAERLDVAPIVRPMLAAWSKLREQIAAFDKAIRAEVKQSRECRLLMSVPGIGPVTVLAYVSAIERPDRFRRSRLVGAHLGLTPRQYQSGDVDRSGHISRCGDTLARLCLYEAATVIMTRVKRPLGLKIWAMKIAKRSGTNKARVALARKLAVILHSIWRTGEAFRWGTH

SEQ ID NO: 265292 - protein, 400 aa, unidentified
MKQITIGVDPHKLSATIEVVDQHEEVLGSGRFTTNKTGYAAMLAYVAGWPRRTWAVEGSNGAGRPLAQRLLADGERVVDVPAKLAARARVLDTGHGRKTDAHDAHSVAVAAVRAKELRVLAEDPELESLRMLIDRRDELTRQRVQTVNRLQRLLAELTPGTAKKDITALQAKAILAAVRPRDLAGKTRRRIAADELTDLVAVEKKLKVVTRELKTMIAATGSMLTDLPGVGDIVAARVLAEVGDVTRFADRNRFASWTGTAPLEASSGEQIRHRLSRAGNRRMNHMLHIAATTQIRLDTPGRAYYRRKLAEGKTRMEAMRCLKRRISDGVYRQLLTDAQAASPGAGPGGHCGATKKSSAVDLPPHIDTSDQPLPGPARTTLQLDPRPRKSTNAEPLRTVG

SEQ ID NO: 265293 - protein, 380 aa, unidentified
MDKSSTTLYVGLDVHKDSIDIAVADAPRDAEIRHLGSVAGGVTAVSKSMRRLVSAGHRLHIVYEAGPCGFVLQRHFTALGWRCDVVAPSSVPHPSGERIKTDRRDAMKLARLARSNDLAVVRVPDGADEAIRDLVRARDDAVREQRNGRHRLKALLLRNDTPYAGKCSWTAAHLRWLASVKLEHAAQQISFQEYLHSITESGARISRLEQAMRDALPDWSLRPLVQALQALRGVQLIAAMTLVAELQDFLRFDNARKLMAYVGLVPGEHSSGSKRRQGSITKAGNSAARRMLVEMAWHYQQGARVSASIATRQADLPAAVTAIAWAAQLRLSAKFKRLVARRVMKTKAVVAVARELAGFVWAIGREVQISGWQGVKPATA

SEQ ID NO: 265294 - protein, 388 aa, unidentified
MHYVGIDIGKRHHVAVILDANGQQVGKALRFANDRDGFDQLLARLAELEPDALIGLEATGHYWLALYTLLAEAGYDLVVLNALQIHAYRKSGIRKRKNDRYDAYWIADYIRVSRQPHHQSQQPELLQLRELTRFRASLTDQVGGCKRKIISIIDRVFPEYEQLFSNVFIQTSRRLLAEALTPDEFAEFDLTELTQLLAQSSRGRHGQAKAEELQALARRSVGIGFLTDALRVQMTCLLQQLALLEAQCQQLEAEISALVDQFPQHITSIPGIGPITGAIILAEIGDIHRFAAPEKLVAFAGIDPTVYQSGQFTATQTRMSKRGSPFLRHALWQAAFMATQHDPQLRAYYQRKRAEGKAHGTAVGAVCRKLLHRIYIVLKEQRPYVIRD

SEQ ID NO: 265295 - protein, 356 aa, unidentified
MVARGRTCPDGIVVGVDTHKDEHVAVAVDQRGVHIGQHRLSTTVQGYADLEGWAHRLGEVGVFGIEGTGAYGAGITRFLLARGYQVIEVSRPDRSTRRRLGKSDPIDAEMAARAVLAGVAQGSPKSGVDTVEMIRLLKVTKDSAMKARTQASNQMQAMIVTAPAGLRAELRDLTIGQLVARCSGWRQANMCTPTAAAKYALRLLARRHMELSQETEALNAELARLTAAVAPALVSSFGIGPDTAATLLVTAGSNPERLKSEAAFAALCGVSPIPAASGKTNRHRLNRGGDRQANAALHRIVIVRLRHDDRTKQYLHRRTAEGLTKTEVIRCLKRYVAREVYTILQDPDRCIVTDQP

SEQ ID NO: 265296 - protein, 311 aa, unidentified
MSSSVGIDVSSATLAVHIRPEGVNFSVSNDLKGFQLLVEKLGGYAVSMVLLEATGGYECNVLKALQDADFPVCRINPSRARDFAKSMGKRAKTDPIDAAVLAHLAEVMPPRPCQVMTPERALLRELLMQRDRFVQQRDDDKRRLKQARAPSVCLRLEQHIAYLKGEIQALEQEIAQQAAALPDDRVKQLTQVKGIGLITAGKLMALLPELGQVDKKEIAALVGVAPFNQDSGKQSGKRSIWGGRSQVRRALYMACWVVIRHNKDFCERYKALRAQGKCAKVSVVACMRVLIVRLNAMLKTGTPWKEQIAHS

SEQ ID NO: 265297 - protein, 421 aa, unidentified
MDIVYPVCCGVDVHKKFFVATIIKTTTNQIKADYIKERFSTFNNSILKFKRWLIKNNCYDVCIESTGKYWVPLYNLLEDTIHVTVASPKWVKAVKGNKDDVKDSKWIGELFRIGLVPGSYIPDKFIRILREFTRYRTKLVGCKSSEKNRFQNAFTVCNIALDSVVTDMFGKSASLIEDYLLKSDDEFDPEYCKSLLKGKLKKKADEMIESIEGYSMTTEQKDRMLIVRNHLSYLERTIEKIDMMLYEMIKPYESTIALLCTIPGIDRTSAIIILSEIGTDMSLFENSKRLCCWAGLTPGNNESAGKKKSVRITRAGVYIKPALVQAAHSAVKSNKSDYYRIKYERIYRRRGKKRAIIAIARMILTAVFHMFATGEVWNPTDLFKIDMPQDLKEKQKQKQIAQALKFLLNNGIILPDSVIAT

SEQ ID NO: 265298 - protein, 403 aa, unidentified
MYAVGIDVSKGRSTVAVLEPLGKTVAKPFEVRHTKSGMNDLVNYLNTLDGECRVVLEHTGRYYEPVVRWLSGAGLFVSAVNPKLIKDFDNNSLRRVKTDKADARKIGRFALDKWYKLRQYTAMDNIRTQLKIMNRQMSFYQKQQTAYKNNLIALVDETYPGANKFFTSPKRPNGSEKWVDFIEKFWHMDCVCNISLNVFTEKYQKWCKKHGYIFQPDKPAEIYNASKELIPILAKDDMTKLFVQQAVTQLNAISKSVEELRQQMDSLASQLPEYPVVMSMFGVGKTLGPQLIAEIGDVHKFSKRSQLTAFAGVDPGVNESGDYAQKSVHTSKHGSPYLRRTLFLIMDVLIQNQPADDPVYRFMAKKRDEGKPYYVYMTAGANKFLRIYFGKVKEYLSHLPSEE

SEQ ID NO: 265299 - protein, 412 aa, unidentified
MRLFAGDDWAEDHHDIEVMDEAGKVLAKRRLPEGMAGMAQLHALIGRFLPGDDPDSAEVIIGIETDRGPWAAALIAAGYTVYPVNPLQASRYRERHGVSGAKSDGADAHMLADMVRTDSHQLRPAAGDSPQAAGIKVVARTHKTLIWERTRQVQRLRHQLREYFPAALAAFEDLDAPDALELLAKAPDPARAAKLTRAQVAAALKRARRRTIADKTTVILAALRSDQLGQPAALTAAYAATARALIAVIATLNEQVKALEEQVREHFGRHPDAEIYRSQPGMGAILGARVLAEFGDAPCRYRDGKARRNYAATSPLTRASGKKKAVTARFIHNDRLVDALNAQAFAALGASPGARAFYDQLRARGIGHNDALRRLGNRLVGILHGCLKTRTLYDEATAWGHRENLPQSSVAA

SEQ ID NO: 265300 - protein, 405 aa, unidentified
MRIIGMDIHRVAAEVVALHEGVFKKLGRIPMLRDALEEFAKRELTHDDHVIVEATGNAAAVVELLAPYVDCVVIANPKQVRMIAHAKIKTDAIDAAVLAKLYASGFLPEVWIPDPKTLALRRQVARRTQLVRQRVRLKNLIQSILHTHLVPPCPHLNLTGISGRRWLTRQLLPIDDRQAVARHLSQIDQIEQSLKIVAADIAQHALRDPMIRRLMTLPAVDVTVAAGVAAAIGDIARFTEPQKLVAYLGLNPSVRQSGEGPAYHGRITKQGRGQARGMLVEAAWAAARSPGPLRAFFRKIAARRGQHIAAVATARKLAMIVWHMLIKEADYIWARPALMARKLRSIELRAGMPKNRAKRGAAYDYNIPTKRAEERRRVEEAEVEYEGFTANWRTRPKPKPVENTG

SEQ ID NO: 265301 - protein, 349 aa, unidentified
MTLNKQGLGIVQRLNTYMWYSAMNLPSVGLDISKSNFHAAILKTLDTKPLVKAFNNNESGFAELLSWLQSQGIHQSGVCLEATSTYGHSVARFLHQHDYRVSIVNPLRIKGFGQSQLSRTKNDRADAGLIARYGAMNAPSQWLPPSAQQAAMQQYERQWQAMGQMIEQERNRLETITEPGVIQVIQDHIDYIKTQQQHLLEQIESLMITDPILKTDLKLVQSIPGIGQQTALLLLAELGDVRAFGSARQIAAFAGLTPQEHSSGSSINGKPRLCKIGSSRLRFLLFMPALVALRFNPPIRAMRERLLAAGKAKMQIVGAAMHKLLRLVYGVISSGKPFDPEISDVSVTA

SEQ ID NO: 265302 - protein, 453 aa, unidentified
MVQRKQKISIKPGKSREPLTITHPNAAGIDIGSSSHYVSVPPDRDDEPVREFPSFTVDLNALADWLDACGVDTVAMESTGVYWIPLFELLESRGFKVFLVNARHVKNVSGRKSDVLDCQWLQQLMTYGLLRGAFRPTEDVCVLRALWRQRGMLLRDQGRQVQHMQKALAQMNVQLANVISDVVGETGQKILRAIVAGERDGQVLAAMKNARIRATAAEIAKSLQGNWRAEHLFALKQALDMFDFIGTQLAECDNKIEGQLQNLQVHDGEPAKGKKRGRTRNAPKFDLRSQLFKMCGVDLTRIDGIDVTTALAVISETGTDMSRFPTAGHFASWLGLCPGTKITGGKVMSGKTKRVANRAAQALRLAAAALRSSQSALGAYFRRMCGRMDKPKAVTAAAHKLARMIYTMLTKGEEYTDQGQDYYEERYRERVLRQLVQRAEKMGMKLVAKEQPA

SEQ ID NO: 265303 - protein, 411 aa, unidentified
MQQLVERCAGLDVHQATVVACAQVPGPDGRRLTHSAIFGTTTPDLLALRDWLIELGVSAVAMEAGGVYWKPVYYLLEDAFARVLVVNARHVKQVPGRKTDQSDAQWLCELVGLGLLRASFVPPQPIRDLRDLTRRRKTLIGERQREANRLHKVLEDAGIKLSSVASDVLGVSGRAMLGALCEGTNDPAALADLARGRMRQKLAALEKALAGRFREHHAFLVADLLAHLEYLEERIEALGVRIEERIAPFAETMERWMSLPGIGQRTAEVLLAELGTELGATFPSAGHLASWAGLAPGTHQSAGHRRAVGTTHGNRYVRAALYEAAMQAVRAPETALGRRYRRLHARRGHRRAVVGVSHALIALGWQLDRTRTLYLEPEPQDLDAREQARRRRRAVAQLQRLGYQVRLEAVA

SEQ ID NO: 265304 - protein, 392 aa, unidentified
MVAHSERVVIGMDPHKRSVTIEVMAADEQVLGGGRFGTDIAGFKAMLDYVTRWPNRVWAIEGCNGIGRHVALRLLAEGHEVLDVPPKLSARARVFATGQGRKTDATDAHSVALVATRMAGLRPVVNDEQLAVLRLLVDRRRSLGDDHTRMISQLHQLLLELIPGGAKKDLSAAQAKALLAKVRPRDVVGKVRRRVAAELIADLERTYARKKAADKELKELLATTGTSLMDLHGIGPSGAARLLVEVGDITRFPNRDHFASWNGTAPIDASSGDNVRHRLSRAGNRQINRVLHIMATVQLRNPTEGRAYFDRRKADGKTSMEAMRALKRRLSNIVYKTMLDDALTAAGTGPGGQRGSDSDSSAAGSQPQHRHFGQATPGPVTTQPRTPLPRVS

SEQ ID NO: 265305 - protein, 343 aa, unidentified
MDYFVGLDVSVKDTSVCIVDDAGRIRREVKVASEPDALLTVLTNPAYRFKRIGLEAGPLSQWLFSALAEADLPVICVETRHMRAVLKAQINKTDRNDARGIAQMMRVGLYRPVHVKTLRSQKLRMLLTHRKLLQAKAIAVENDLRATLRNFGLKIGVVGTIKFEARVKELVDNFPDLVTLVEPLLVVRRVLREQINILHRRVLAAVRDDEVCRRLMTVPGVGPVVALTYRTTVDVPARFRKSKSVGAVFGLTPARDQSGESDRPGAISRCGDEMMRTTLYEAAQVMLLRSAKWSWLKAWAMKIARRRGIKKAVVALARRLAVIMHRIWIDGTEFRWTREAAAA

SEQ ID NO: 265306 - protein, 406 aa, unidentified
MIFVGIDWSEAHHDVCVLDEQGTVLAKGKVSDDVSGVGRLHAMAAEHAEDPSDVVVGIETDRGLLVGSLVQAGYRVYAINPLAASRYRDRHAVSRAKSDPGDAKVLADLVRTDRQNHREVAGDSELAEAVKVLARAHQNLIWSRQRQVNALRNTLREFYPGALRAFTTSQLATIEACSVLAMAPTPTWARDKLTLQRLRRSLSASGRKRNLDRRAKQILHALQAPELSAPALVEQAYGDVVGSLVVVIDGLTHQIAKLEAELAERFEGHPDAEIITSLPGLSSVLGARVLAEFGDDPTRYQDARARRRYAGTAPITRASGTRLVVLARVARNRRLFDACYLWAFSSITRSAGARRYYDAHRARGKTHHQALRALANRWIGILHGCLTRHEPYRESVAWVAPVEAAA

SEQ ID NO: 265307 - protein, 313 aa, unidentified
MIESGIYVGIDVSKSYLDVFIPEEGAFRVEYTDAGLAELLEKLSGFEVAMAVMEATGKFETLCATALANNKIPVAVVNPRQVRDFARSTGRLAKTDAIDAEMISRFGEAIKPAAKELRSEDEERFDELLTRRRQLLGMTTTEKNRVGMVRDRKVRRRVVAHIKWLEREVKDVDREMSDAIKESPIWRVKDALLRSVPGVGEATSKVLLGELPELGRLNSKEIASLVGVAPMNRDSGKMRGKRTTIGGRSMVRTALYMAALSATRHNPELRSFYLRLVEAGKPKKVALTATMRKLVILLNAIVARGTGWQPERP

SEQ ID NO: 265308 - protein, 415 aa, unidentified
MALKIVYQICCGIDVHKTFAVACIASTNKQGVTTYKRHRFSTFTQGLKMLLQWLLENNCKDVCMESTGKYWIPVYNVLDKDCTIVLAHPKYVKAIRGKKTDKKDAKWIADLFKHDLVAGSFMPPADIRQLRDLMRYRYKLTCFMSSEKNRLQNCLTVSNIQLASVVSDTFGKSSMRILDKILENPKDVSFDIEPLIHGSMKNKLPELELAIDGFISPEQAGKLKVIKKHFGNLESRKAELEELILALASPYQQELDLILTAPSFKNAFTAIGIISEIGVNMEAFPSAKHLCSWAGLTPTNNESAGKKKSVRVSKAGCYIKPLLVQCANSVVKSEKHPEIRNRYLRLRKRRGHKKAIIAVARMLLTALYNMLKNKEPYNAELYRKSDVLPVNREITVEQAVLMAQFQGYKIKSATE

SEQ ID NO: 265309 - protein, 411 aa, unidentified
MEAAVITAVGIDVSKSKSTVAVRRPGGEIALRPFEVHHTNSDLKKLASTLKKLGGDIRIVMEHTSTYWRPIALTLKEAGFFVSVVNALLIHDFSDNTIRKLKTDRADALKIANYALTFWDTLPPFNNEEETRLLLKMQSRANERITATATALRNGLIALADQTFPGVNIAFDPNTKNANGHEKWVDFFLRYWHKDCVCQYSMEAFTESYRGWCKRKNYKFRTDTAHKIYLLAQEGVATFPKCESTKMLITQACKSLNAVCEAKQSTQLEMQRLAAMLPEYEVVMQMEGAGPITGPALMAEIGDVRRFKNKKALVAFSGIDAPPFQSGAFESTSRHVSKRGSPHLRRTIFIVSNIILTRSNPENAVYCFMDKKRSEGKHYYVYTVAGSAKFLRVYYARVTEFLRSQPSPDAC

SEQ ID NO: 265310 - protein, 417 aa, unidentified
MKKHSNSLKQSEAPAKRRKLGVVVERKPQEVMAELVVKLAGQLDVEIVPAVEGKKDGRDAVRPNLDRLTVGVDLGDQWSNYCILGLGGETLVEGQFRTRKQEVAEFFQALAMSRVVVEVGTHSAWVREIIAGFGHEVLVANPRLMEGSKRRRRKSDRIDAEKLARLGRMDPKSLHPIEHRSTEVREDLVILRARDALVKSRTELINSVRGQVKSMRGRVTGCSSVAFSQKAIAEIPEEVHETLQPLLRLIATLSEEIKTFDQRIEKLAAEKYMQTQLLRQVSGVGPVTALAFVLTLETPLRFARSRDVGPYLGLVPKQEDSGDIQPQLGISKAGDRMLRKLLVGSAHYILGPFGPDTDLRRFGMRLCERGGKNAKKRAAVAVARKLAVLLHRLWASGEVYEPLGHGSVTRPAQAVAA

SEQ ID NO: 265311 - protein, 422 aa, unidentified
MSENQREIQYAAFLAIDWADEKHVWSLQEAHSSTRERGEVGHMPEAIEAWVAQMSQRFAGRPIALAVEQTRGALVFLLSKYEQLHIFPVPPAMTASLRKAFYSSGAKNDPGDADLLLDLVQRHREKLRRLSPDTEATRRIQNLVEERRKLVDEKTAQSNRLEAHLKIYFPQIPHWFEDVDSPLVCALLERWPTLEALQKTGPATLRSFFRKHHCRKEELIESRIKAIGAAMPALKDRAVVEAKVAVVRVLVQMIQVLREGTEGLNQQIQEAAEAHPDFFIFESLPGAGAAMAPRLLAAFGSQRERYQNAAEVQTLAGIAPVTESSGKSNWVHFRFACPKFLRQSFHEFAAYSIPRSQWARVYYEQQRRRGKKHHAAVRALAFKWIRVIYRCWKERVAYDENVYLAALAKHNSPLVATTKAAL

SEQ ID NO: 265312 - protein, 326 aa, unidentified
MHTHFLGIDIAKSKFDCALLRPDGKVRNKVLPNNALGFTQLLTWLHAHGVSSSELHQLHVCMEATGIYWEALAEFLCDQGIAVSVINPAQIKSYGASRLMRSKTDKIDANLIANFAKERSPAPWTAPAAHERVLRSLVLRLEALQNMLTQESNRHQVANPAVQPQIQSHIDWLNAEIKALAKLIKDHIDKHPDLRQKRDLLDTIPGIGERTQAIMLAYFGSTEQFDNARKAVAFVGLDPRQHESGSSVKGKPRMSKVGHAFVRKALYMPAMAALYKTDWGKRFRQRLANAGKPPKLIIGAMMRKLIHVAFGVLKSNKPFNSALHCA

SEQ ID NO: 265313 - protein, 413 aa, unidentified
MNEGYRRCCGMDIHKDTVVVCALPPVGEEGQKVRKVYGTFRNDLIRMRVWLKQLKVTEIAMESTGVYWRPLWSVLEEEGFRLLLVNPVQVKALAGRKSDGRDARRIAEYLQDGRLDGSFVPSPEIRQLRMMLRHRISLLEQRNEVHNQIRDLFETANFKLSSVITDLMGVTGRGIVEALIAGEDSPDRLSWKVRGSLRKKEKLVKESLKGYFNDFHRSMLESHYKHYQFLTKEVAVFEERIAKAMEPYASQVELLTSIPGIDRMVAWHLLAELGIDLKAFPDAAHCCSWAGMVPGENESAGKQKSSRCRKGNKTLRRVLTQAAWAVSHCKAGYLRAFFHRVKARRGWAKAIVATSHKILVIAFQVLKTRTPYVELGSDYFDRLNPARTARRLVQRLEALGLQVQISPIVGSNA

SEQ ID NO: 265314 - protein, 347 aa, unidentified
MDYYAGIDVSLECSSVCVVEANGKIVREGKVSSEPGALIGWLKPLGYELSRIGLEAGPLSQWLYAAMREAGLAVELLETRHVRKAFEAMPVKSDRNDARGIAQLMRLGWFRPVHCKSMGAQETRTLLTARKLVQSKLRDVENSLRGILRGFGLKVGKTTDRSFAGRIRELAAGHPSLETVAEALLAVRAVLLREFNGFEKQVRRMARSDAKAKLLMSTPCVGPIVALTYASAIDDPTRFKSSKQVGAHFGMTPKKYQSGETDYTGRISKIGDASVRTALYEAAHIMLTKAVKGCSELKSWAMRIARRAGMSKAKVALARRLAVIMHRMLLDGTPFNPAAKQTAAAAA

SEQ ID NO: 265315 - protein, 470 aa, unidentified
MAVVMIGVDPHKASHTAVAISAAEEPLGELRVRACAAQAERLLAWAAAWPERTWAVEGAGGLGHLLAQQLLAAGDRVVDVPPKLGARVRLLAAGDTNKNDPNDARSVAVAALRSAGVREVRSDDHAVVLKVWSKRYRDLGRTRTQVVCRLHAVLCDLVPGGVSRPIYASHAARILQQITPPDAVAAARCELAAAFLEDLRRIDAQLRETRKKLAVAVQAAGTSLIGLFGVGPVIAAAVIGDVRDVSRFGSRDHFAACNGTAPIEVSSGPRKIYRLSRRGNRRLNHAIHMAAVTQVRHRHSQGRAYYDKKLAEGKTPKEALRSLKRQVSNAIFACLQADARRAAARAEGPGGQQGNDSAASAAGLHPRHRLFGQATPGPGHHTTTAAASPAPGPAHARGGAGHSPVAASVPPATPQGQAERLQPSEDERPGGAARRRPHPAARKARGQRSPAKTQRPKGTSHAAKRTDGTP

SEQ ID NO: 265316 - protein, 471 aa, unidentified
MHTIGIDLGVKGEHKAIVVDERGRFVTHLITFRTEPASLTRLLAEASRDNPDAQLQAVMEPTGMAWFPVAVFLIRHGVTVYLVNSQQVADLRRYYQKHAKSDRIDARVLAKLPLVDAEKLHRLELAGAQALACQRGCKQLDRLLKQHTACKNRLIALDRFAWPGLEETVFADLFGPAALWFRRHWYNPVRVCQAGDETLRQAWQTSGLDPEDPGEWIVPLVLLAEQVIGLYGEEGAYLDYELLQAEATREQDYLAFVDQMHHHLQLKTVRPLYRKLHVSRHLETIPGVGQDGAAVYVSYIGNPLRFNSLRAHRGWSGMVPNSKQSADSQSSGLKITQAGPSLIKKFAYLDTEAARHRDPQIAALYYDQMVHCGKHHMQAICTCSAHLLDRVLVVLREDRPYELRDVDGTPVSKEQALEIIAERYTVPEEVRRRNNKRSRRERGERRAERKQQKRESRSANGQLKAPKQQAR

SEQ ID NO: 265317 - protein, 345 aa, unidentified
MDKISVIGLDLAKNVFQVHGIDYDGEVVVRKQLTRSQLRRLFAKLAPCLIGMEACGGSHYWSRELTRLGHTVRMMAPVFVKAYLKSNKNDRNDAETICEAVQRPSMRFVQPKTPEQQAVLHLHHGRRLLVRQRIALSNHMRGVLSEYGIVLPQGAKAISQRLPELLEDADNALPMLARHLLAELKEGHDQLIERIERIEVWIKAWYANNSVSQRLASIPGIGVLTATALAATVGEGQDFRNGRQLAAYLGLVPRQISSGGKERLLGISKRGDSYLRGLLIHGARAVIYHIQRRLKASQPGGNPWVEQLLLRCHPNEVAVALANKMARIAWVLMARNETWRAVHPV

SEQ ID NO: 265318 - protein, 344 aa, unidentified
MKTFIGIDVSLESSAVCVLDEHGQVVKRAQIASEPESLVGLIKGLPWQVEAVGMEAGPLSQWLHAGLAKADIGLTLMETRQVKAVLKAMPVKTDRRDAEGIAQLLRMGWFRPVHCKSVSAQEMRALLSARKTVQRALLDIEGSLRGVLRNFGLKLGPISKGRYEQRVGELVAGNRMLQTASTAILQARVALRKELATVEQRLRELARQDEVCRCMMTMPGVGAIVALTVRSAIDDPTRFRSSRNVGPWVGLTPRREQSGERDVVGHITKAGDATLRTALFNAATVMMHRGRPCWLRAWGMQVAKRRGQKRATVAVARRIGVILHRMWMDGSEFRLKRDTEAAAV

SEQ ID NO: 265319 - protein, 409 aa, unidentified
MIVNTESLIIGMDIGKYHHMVVALMPDGIFKKPVKITNDLKGYRELLGLIAAWKNECTTEKVMVGMESTGHYWEIPARWLIGQGITVVQVNAAHTKRAKELEDNTPGKTDQKDARIIAGLIRYGKYFSCMLPEGVYAELRELTKIRQRLIGELTEKRNYLRRLLDTVFPEIFILFKKSDSKTLLHLLTEYPLPDDVMSAGAQKIKTTLQQKYKNLVTKRFDTLWCLARDTVGVSVGHLSYRVAIRTTVERILSLKDSLTKIEGDLAALLSRIPEAPYILSLKGLGTVSAAIIIGETGGLSRYTHAEELLKLAGLNLYEISSGTHKGKVRISKRGRPLLRQGLFLLATVMVKKGMPFHEEYSRLRNRGMETIKALTAISRKVCRLVFALARDKRFFSQEAPQRMQQKKAA

SEQ ID NO: 265320 - protein, 390 aa, unidentified
MERPVKRNDLSRSLIAFDQATTLVVVVELSRGSWLAAGLVPHLTRQPLKKLPADPDALLGLLLRWRDQAIKAGGRIKRTVLAFEAGRDGFWLARWLRARGIEAYVIHPASIPVSREHRRAKTDRLDAGLLMRAVLGWLRGEPKHCNMAAIPTVAEEDARRPTRERETLVREQTRAVNRIKSTLIRFGIRTVKVKLRQASKHLEELRGPEGEPLPPNTMAELRRDLTRLQLIRGQIREIERARLERLKRAPRQGTHPMMRMLARIMGIGIETADMLVHEVLSRKLRDQRGVARYGGLTGSPDESGSKRRERGLARAGNARVRHGMIQLAWRWLQFQNKSALAQWYRTRTAGAKPGLRKAMIVALARKLLIALWRYVTIGEVPAGTVLRPAI

SEQ ID NO: 265321 - protein, 402 aa, unidentified
MEKDPQRFIGLDIHKEYFVAVGVNPQREVIFGPQKVSNYRLDDWIVRCLTPEDAVVLEMTTNTYLFYDSLLPHVHSVIAVHPPNVALVTNAQVKTDQKAALALAQLHAVGMLTGVWIPPHPVRDLRALIAQREKMVRLSTIAKNRLHALLHRKHLLLPEKPFAPEQQVWWESLSLSATEQFLVHSDLETLAFAQKQVEQIEVCLKQQSAQDERIPSLIQLPGVAMLSAITILAAVGDITRFPNAKKLVGYAGLGTRVHDSGMTHTSGRITKTGRRDLRRAMVNAANHAVEHHPHWKMEFERLEPHLGRSKAIVAIARRLLVAVWHVLSQQEADRFADPGNVASSFLRFAYKVGVKNLPKGQSALAFTRTQLDRLNLGMDLQEVPWGKTHYKLPPSKLPHGKD

SEQ ID NO: 265322 - protein, 410 aa, unidentified
MEAIIERVAGVDVGQATVVATVLVGAAHERARKETRTFRTVTRELLEMREWCLAKGVTHVAMEGTGVYWRPVYELLEDAFEMILGNAQHIKNVPGRKTDVKDSEWLADLARHGLIAKSFVPPKPLRQLRELLRYRRKLMESRTAERNRLLKLLETANIKLASVVTDVFGVSGRLMLDALIEGTATPATMAALAKGVLRKKTRDLEHALEGRVEAHHRFLLGLQLRRLDQADADLAVLDARIDEALTPYQPQCQLLQQIPGVNRVVAAVVVAELGTDMGVFRSAQHAAAWAGVCPGNNESAGKHKGAGARKGNVHLRTALVEAAVAASHKKGSYLRDKFYRLRARRGTKRAAMAIGHKILIAAYHMLATGLPYRDLGATYLVGVEKRRTTRNLVRRLERLGYEVTLGTKAA

SEQ ID NO: 265323 - protein, 345 aa, unidentified
MSDGPICWFGRFKKLTSIYVVDDAGRRLWRGQCRSDPEQIQQAVQGHAGDDASIGIETGPMTPWLVHELRKRGLNVVCLDARHASAALKMQMNKTDQNDAEGLAQIMRTGWYRSVHVKSLDAHRTRALLGARAQLVGMTTRLSNHIRGVLQTFGILPGAMRGLPFDRRVETLLADLDDLAAIVRPMLTAWRKLREQIAVFDKAVRALAKKDPTCRLLMSVPGIGVVTVLAYVSTVEDPARFSRSRSVGAHIGLTPRQYQSGEVDRSGRISRCGDTLARTLMYEAAVVILSRVKKASGLKDWAQAIAKRCGIGKARVALARKLCVILHSIWRSGEPFRWSAQPAAA

SEQ ID NO: 265324 - protein, 401 aa, unidentified
MASVRDNARRVKRFRELKATLRTDPHRLLVGLDIAQAEHVVHVRHAHTRVVTPALTIPNTTRGFTQLWARLQSAQRATGCREVVCGLEPTGTYHEAVATFLETQGADVVLISSSVAYWNRRTQDGTWDKHDRKDAANCAELLEQGKVLFYRQPDGPLAELRRLVKCLRRARTELAACKARWRTTLRPALGPMGEPLPQRLWAELPAVLQAWERPAPGRPAVAKGRLPLGLATACTDLGAQVTAVQARIAALEQACIPLAERLPAYALLRTIPGVGPTVGAILLAEIGDIAWYTKFSQLRKLAGLDIVRVQSGQAAGQARISKCGRGLLRWALYHAAMGVARTAAGRTRLAALKAKRLGDRFAGFKAIVELAAKVLRVVWGVWRSGVPYDPTRAGGLRRQPR

SEQ ID NO: 265325 - protein, 390 aa, unidentified
MIYVGIDVAKTTHYAAAADSDGVVLVEPFAFDNDAPGFAKFISKIASFPKEQLIIGLESTGIYSENLICFLFDSGYKLAVINPIQTATLRKTNIRKTKTDKVDTLLIIKSLMVNSYRLYTEQDTQSLKLKSLCRFRQSLKKSKARLKIQLSGYVNLLFPELLSFFKSGIHISTCYTLLKRCSSPAEIAALRLDSLSRLLSNASRGRFSRSTAEALKSLAKSSVGVKNPYISIQIAQTIQQIELLEQQIDEIENVIKDTICKLDSVIMSIPGIGAIDGAMILGEIGNIDRFASPAKLLAYAGLDPTVCQSGKFKARSTKMSKRGSKILRFALINSAWQLTLKNDTFFNYYQLKLSQGLSHYGALGHVAHKLVRVIFTLLKHNVLFDPTRLV

SEQ ID NO: 265326 - protein, 351 aa, unidentified
MPRRSTVCAVTTIGIDMGKNTLHMVGLNSLGAIVLRERVSRGRITSRLANLPPCLIGIEAGMATHYVARELAALGHDVKQVPPAYAKPFRQGHKNDFRDAHAVAEAVQRPTTRFVPAKTNEQLDLQALHRVRSRLVSERTAVINQIRGFLLERGIIVRQGLRFLRHLLPDILAKRTDVLSPRMVRIVSDLVGDWRQLDERIETVTDEIETLAKSDDSCRRVMTVPGIGPLISSAMVAAIGNGTAFAKGRDYSAWLGLVPRQMSTGDRTILGRLSKRGNGYLRMLFMQAARVILLRPANWPKHGFGAWLVRAAQRLHPNVLAAALANKLARIAWTVLAQERSYEARVTKAAA

SEQ ID NO: 265327 - protein, 358 aa, unidentified
MTKHTTIIGIDLGDKHNQFCVLDNEAGEIEEEGRVKCDAKSMRRFFAARKPALIAMEAGTHSAWVSRLAASEGHEVVVANPRKLRAIYENERKSDKLDARMLARLVRADPKLLHAVQPRSAHTQADLALLKSRQAAVEARTKLINHARGIVKSFGGRLPACSTTSFHAKTLEAIPEELRAALEPVYEAIAKLTETIKTYDHRIKKMCESEGYETTELLQSVPGVGPLTALAFVSVLEDPALFATGRSVSAYLGLTPRKAQSGQRDPALRITKAGSPFLRKLLVGCAQYILGPFGPPGALRDWGHKLIERGGRAAKKKAVIAVARKLAAILHRLWSTGELWRPFPDAPDDEACMAEDMA

SEQ ID NO: 265328 - protein, 437 aa, unidentified
MTYVGVDWSDNFHVVYVTDETGDSLAAFKVDHTPEGIESLFLKVKEHAQNPAEVLFALETPKGLLSSAILEAGFTLYPINPKAVDRYRDRYKVSGKKDDYFDAMVLANILRTDRQNHRALVPDSLLTRELRAYTDGYQALVKTQTRLTNQITSCLKNYYPVALGIFGKIDQSITLSFLSRFPTPDSFRRGSKAKIENLLKKNHYPGAREKMLEIYALSKKPQFEIEEPIARANSLLLLSLARQTKETLSSLKEFELKIAELLEQHPDTDVFSSLPGAGKITTAKLISNFGDNRERYGKVSCVQADAGTCPVTIGSGKSLRVSFRYSCRKPFRAAITQFAFTSLQKSEWAKQRYDKYRHNNSKDHNLALRCLGNAWLEIIYPMWRDRKPYDVEKHLIGVFKEQGIFSKDVKMPVFASEPMIARNYRGSSPQVSTIGLT

SEQ ID NO: 265329 - protein, 382 aa, unidentified
MENNTFIGLDVHKASISVAVARGERGGEVRHWGSVPNRPDHIRKLVEKLAAGGVPLQFCHEAGPCGYGLHRQLVEMGHDCIVVAPSLIPVKAGDRVKAGDRVKTDRRDAVMLAKLHRAGELTAVWVPDAAHEAMRDLIRARATAMRVTSKARQHLQGFLLRHGRIYPGKKGWTGAYRRWLALVGFAHPAQQIVLQDYIDAVADAEARVERLTGQIADLLPQWSLAPVVAAVQAMRGVGFIVAVTVVAEVGDFQRFDSTRQLMAYLGLTPSEHSSGASVRRGGITKAGSGLARRALIEGAWSYRMQARVSVKLLARIETLPKLVRDIAWKSQLRMCQRYRHLIAAGKAKVVVVTAIAREMLGFIWAIARAITTHTTTPVAMAL

SEQ ID NO: 265330 - protein, 390 aa, unidentified
MGSHTFIPRDYDVFAGLDVDKRSISVTFTDHQGFLKSLRMPYSVGHLLSHVRKHFPDKKVAFAYEAGPTGYGLYDGLKAQAYKCVIASPSMIPKAPGQRVKTNRLDSRGLSENLRGGQLKGIHVPSPVYRELRHLTQLRDTLVSEAAAMKQRIKSLLLMEGIEFPPAPAGSQWSLLVKEKLRKLPCSHPVRFKLDQLLDSLAFAEQQVLKATKEIRRFCQTDPELSQCIKYVMTVSGIGWIVASHLLARIGDWRELKNVRQLGGFLGLVPTEHSTGERTERGAITHTGDGRLRSKLIQASWSAIRQDGELREFFRSVAKTHPRNIASRVAIVAVARKLSGRISVVLMKQRPYVVREKVQSAPLTQEETVPQGTPRRQAELGEKTSERFDP

SEQ ID NO: 265331 - protein, 387 aa, unidentified
MKRPKEKLIAGLDLHSNNVMIGVINQDGKRVTHRKLDCDLDAIVEFLQPLKPQLQSMAVESTFNWYWLVDGLRARGYPIDLANPAKIEQYSGLKHVNDTDDAFHLADLQRLNILPQGHVYDPELRPVRDLFRRRTKLVHQRTGLLLSFKSLYARTTGQALSLSEAKSLEPKEASKLYEHPANQLIAQVQAEHIGALDKSIARLEKAVLACAREIPIYEKLLSLPGVGRILGMTITMEVGDVQRFKSDGDFASYCRMVDAKRLSNGKCKADNNQKCGNKYLAWAFVEAANFARRYDENCRRWYDRKAAKTSKVIATKALGCKLAKAAWHVMSQRADYDQSRMFPELAVKKSKDLESRRQPAKGLDPEPSCLIGGGGSRHPRKQTMKPS

SEQ ID NO: 265332 - protein, 425 aa, unidentified
MKYSQNEKIRQVSADTLVIGVDIASEVHYARGFDWRGMELGKVLRFDNDLDGFACLSTWIQELQRAAGKNAVLVGAEPTGHYWFCLAHHLQQQKMKLVLVNPFHVKRSKELDDNHPSKTDLKDPKTIAKLVIEGRYIEPYIPQGLYGELRVLMECRQRIMDALTVTKNQIHRWLSIYFPEHCKVWNSFEAESSLMVLRVAPLVADILALGIEGVNRIWRQAKLRAVGIKRATSLYAAASRSVGCPGGEAARMELALLLADYDTKKGQYDEVMAAVERLCEQLPEVAAMLTVKGVGLVTVASFVAEVGDIRRFDSPKQIQKLAGLAIRQISSGKSKGSSGISRRGRARLRTALFRAALSLARTNPEFAALHRYYTTRQGNPLKKKQSIVALSCKLIRVFFALASKQTEYDPQRLMGDIHRPQPLAA

SEQ ID NO: 265333 - protein, 415 aa, unidentified
MCSSVVSEWTARSEDVPLRQLIAVPVDVGKSSAAVMAVDVTGRAVMPATDFEITRDGVAGMLARLRRALPAGVQLVRVGIEAAGHYHRPLTAPGVWPEGWQVVELNPAHVTAQRRVNGSRGVKTDRVDLAAIADLLLAGRGLPVVAADEALVELSAWAAHRRRRIEVRTATKNQLLGQLDRAFPGVSRALPNVLGTKAGRLVAAHFADPARLVRLGEDRFRAFAAHRGVRVSGVMAARLVQAARAAIPMPEAAIARQVLAADLALLGDLDTQIGDAEDRLAVLLPATEYAVLATVPGWGVVRVAAYAAACGPSGRWASAARIYRAAGLTPVIYESAGRRRDGGISREGSVQLRRALLDLGTGLWLQDQPARGYARTLRQRGKPGGIISCALAKRASRIAFAMVRDQLPYDPARWR

SEQ ID NO: 265334 - protein, 404 aa, unidentified
MEVYLGIDWSEKSHTAVFVDRWGKELCQRTVDHSAKGFIELDRLREQLGVGAGDCIVGLETAHNLIVDWLWGHGYQQVYVIPPNVTRSRQASYRQSGARTDESDGNLIGNLLRTDRQRLIPWQPDSELTQRLRAKVRMRRQLVTDKVVHVNQLRQVLHRYYPAALEAFDLKSYIGLDFIQRYPAPEDAQALSQSEFQAFAREHAYGTRRTAAAYAKLKAPYPQASPVIVTAYQDEAVMLAQMLVQVKRFISQVEKGIATLYAEHADAPIFASLPGVGKHLAAALLVKFGDHRERFPYSGAVQALAGTAPVTVKSGKRHTVHFRQACDHEFRTYAQQWAVASLRCSPWAITYFHQVRNRGHSYNHACRALANRWLAILWKLWQTGQSYDEAHHLAQALLFRERSQ

SEQ ID NO: 265335 - protein, 346 aa, unidentified
MEQFVGLDVSQDITHVCVIGSDGKIVWQGTCPSTPEGISNAVRARASNAIRIGLESGPLSTWHWHALKAEGFPVICLDARHAKAALNMQMNKTDKNDAHGLAQIVKAGWYREVGVKSLDSHTIRSMLGARAQLIAMRVEVSNQIRGMLKTFGIVLRRHDGLSFEALVSEACERDIGRVSHTVRTLLAVYIGLKAQILCLDRELARYARGSALCRRLMTIPGVGLLSAIAFITAIDDPVRFAKSSSVGAYLGLTPRRYQSGEMDHNGKISKCGDPLVRAYLFEAATTLLTRVGRWSALKAWGLRIAKRSGMKKAAVAVARKMAVIMHRVWTTGETFRWTSTPELEAS

SEQ ID NO: 265336 - protein, 353 aa, unidentified
MTSEKYVGLDVHKATIVAAVHDELGRCLMTSVIETKAETIRAFMKGLSGTVRVTLEEGTHASWLSDLIKPLVTEVVVCNPRHNALLKSGNKNDKVDANKLAHLLRTGMLKPVYHEAHGTQSLKQMAQCYETLVVDTIRVMNRIKALYRGRGIDCSGNGVYCVSQQKDWLAKLEEPGARSRAQLLYSQLESLKKLRRQARNELIKESRRHPAYKLLTPVPGLGPVRVALIMATVVTPFRFRTKRQLWTYVGLAVVTKTSAEYEIVGGRVHKRNKPTSTRGLNRNYNRRLKKVFKSAALDSTRTEPFASYYRALIEKGTSPEIARVNIARKLAALVLSMWKRGEEYDRQRMKKSA

SEQ ID NO: 265337 - protein, 321 aa, unidentified
MEQRKTSTKIAGIDIAKAHLDVALHGAEPGSADEARFANDADGMARLGDWLARRCVRRVGLEASGGYEKSVVRFLQDSGFETVLHQPMEVRLFARLKRKRAKSDRLDARLIAAATAQVEAVKAAADPYLAELAERMTAYEQAADLLAQARTHREHTRLADLRADLADHIRILAARKKSLAADLVRRIRARADLARRFDLVASLPGVGAINAAALVIRMPELGAMDHGQASALLGVAPFDRDSGAWKGQRFIGGGRQRPRRLIYMAALAARRTDPGLKAFADRLTARGKPPKVVLVAVMRKIIEAANLVLKRGTPWTPAICT

SEQ ID NO: 265338 - protein, 344 aa, unidentified
MYYIGLDVHKKTISYCVKDAAGHVHREGKIGSTRRELDAWIKTLPEPRMIAMEATIFTGWIYDHLLPYAEKVKVAHPLMLRAIAAAKKKKNDRIDAGKIADCLRCDFLPECHMASTAIRDRRRTLRYRNLVLRQMVQMKNRVSGLLMETGVSYDKQRLHKVGYFTDLLSTNEEISQSIRPLLRLSREHIQRAQRLDRALTSSLERDPLLSERLRRLRTIPGVGPITALTWVLEIGDYTRFRSVKEAISYCGLCSAEKSSADKAMRMPISKQRNKHIQHVLVEAAKLAPRYLHEFALVRDKELQRGNPNRATLAVARKIVAYMLAVERRQQDFVPAEEMAGKAVA

SEQ ID NO: 265339 - protein, 430 aa, unidentified
MKSNTQNAKIEAITEKTLVLGIDVGSETHYARAFDYRGIEYSKKPFKFSNNEAGFVTFKAWILELKEKHDKDKVVPGMEPTGHYWFNLGKFLQDNEMKPVLVNPHHVKKSKELDDNNPTKNDRKDPKVIAGLVREGRYMIPYLPNGVYADLRTASNMRFQLQAELTRIQNRINRWFSIYFPEYQTVYGQPDAKSGMLILKVAPLPEDILTLGIDGVNQIWRDAKLRAVGKARAKTLVEAAEHSVGSKEGSISARMEIRMLLEDYESRNTRLQEVMTLIGELVKQIPMAEKLLEIKGVGIKTVSGFLAEVGDIGRFNNPKELQKLAGLALVENSSGKHKGETTISRRGRKRLRYLLFEVAMSLVAKNAEFRELHCYYTTRKLNPLKKMQSLMAVASKLLRVFYAMLTKGVDYDPKKMISDIKRPEDYLQAA

SEQ ID NO: 265340 - protein, 386 aa, unidentified
MTDKTLQTHDTQPVRLLVALELSLKTWRLAMAVAGAPKKRFKTIAGGDYVALGQAIEECKTKCGLDVAAPVVFCYEAGRDGFYPYRQLTAAGHTVWVIDSASIEVSRRQRRAKSDGIDADQLLGLLQRYAGGETTALRVVRVPAVAVEDWRILPRERETLLQERQRLRNRIESALFGQGYRELPKTAKRLAAWLQERTDVGDYLKARLDREVARLALVEAQLREVDARQAEVIQTESGTAAAGEVLRMAQALQGLVGIGLVGAWVLACELFGWRDFHNRREVGGALGLTPTPYSSGEDPREQGISKAGNRRARSMLIELAWLWRRYQPDSALSQWYRTRFASGGKRPRRVGIVALARRLAVALWRYVKTGAVPEGAKLKPVSVAAN

SEQ ID NO: 265341 - protein, 425 aa, unidentified
MQQPTRFIGLDVHKETIVVAVTAAGDTGKATAYGSIANTAAALDKLVGRLHQGGGGLRFCYEAGPCGYGVHRRLTRLGEDCVVVAPSMIPRKSGQRQKSDMRDAASLAELHRGGLLTAVWVPDAAHEAMRDLIRARLAAVRAVRAARQQLSAFLLRHERVYPSGRTPWTKAHRGWLADQRFSEAAQQIVLQESIEAVRAGEQRRDRVEAHLRAQIPGWTLFPLVRNLSALRGLDIIAGAGVAAAIGDPSRFATAPHFMAYLGLVPSEDSSGPKRRIGSITKAGDVHARTLLIEAAHAYRFPARVARTKLATLDAVPEAVREIAWKAQVRLCRRYRAMMAAGKLKPVVVTAIARELAGFVWAIACITSDPPGCALAAPVVPDEVAVSEAPARSRAPRRRPLKDPARGIERSTAATGSRQRRTGAMT

SEQ ID NO: 265342 - protein, 314 aa, unidentified
MKTSEQSPAYAGVDISKDMLDVSVIGRDPWRSANSAAGIAQLIKALASLPVPVQVICEPSGGYERALLEALWAAGIAVSLVNAARVRSFARAQGLLAKTDAIDAAVLRELGERLQPAAVAAPSAPRQQLADLVQRREQLVTILAMEEQRLTQARDARVRKMGVRLIKELKKQIEELEALIDAQIDDDDTLRGQSERLQQVKGVGKVTASTLLAELPELGQLSGNEIGALAGVAPYNRDSGLHRGRRTIRGGRVKVRRVLYMAALVAARFNPILKAFYQRLVAAGKPKKVALTAVMRKLVVLLNHLIKNPQFKLA

SEQ ID NO: 265343 - protein, 358 aa, unidentified
MMYLGIDLHKKSSVWVMMDEKRNVAWHASIASHPLDISAGIKKIPVPLSEVKVAIEPVTGWRWVTKQLEEAGLEVHIAHPQKVRMIAESKQKTDFNDARTLADLLRAGMLPESYRVEEELYELRVILRERCFLVSKRTDVKNRLHGIVTTQGLHLVAGNNPLQKRGKKWIEEGSNETMKELLEVIGELDVHIDLLTKKIGGMIKEIPQAGLLMTVPGVGPITALTVVSEVGDFSRFPTAKKIASFAGLVPRQRSSGEKVKLGSITHLGSKYLRTALVETAMRIRADYAPELYKFVSDLTPSCGAKRARIALARKLLVLMWAMERNNVPYDPKYLENKRSSPSSSAIRNESYLDLTPGA

SEQ ID NO: 265344 - protein, 523 aa, unidentified
MMKAVVAVENAVCAFSKELVDAVCASTAPAASTARGGRMRSSRIRKSTSSAASSGAPWGPCAPAPGMDLRPDEGVRDVDPVGSRAASASTGVMRPHGELSAQEDIALNPERWFVGIDWAPHAHEVCILDGAGHVCERRQVDHTAPGLGTFAEALLARAQGDPARIAIAIEVPRGALVELLVERGFGVYAINPKQLDRFRDRFTVAGAKDDRRDALVLGDSLRTDPHAFRRVRLDHPLVIELREWSRVDEDLQVELSRLTNRLRDLVHRVAPEVLALCPAADEPWFWALWRQAPTPVAQHRLSERQVARLLREHRVRRVTAAQVRAVLQRPPLYTAPGVVEAVAAHCQLLAPRVELVGAQRRECGRQLERLLEALEAQEPAAGDQREHRDVAILRSMPGVGSRVAAAVLAEASQPLGDRAYHTMRTCMGVAPVTKQSGRRRTVSMRYACNERLREAAYHWARVGMQHDPGSRAYYVALRARGHKHGRALRSVADRFLRVFFALLKHGQLFDPAHGQHSLVGARA

SEQ ID NO: 265345 - protein, 316 aa, unidentified
MVYQKRLPNDLPTILEVLAPHHAEIKGLVVESTYNWYWLVDGLMEAGYRVHLANPAAMQQYSGLKYSDDHSDARWLAHMLRLGVLPEGYIYPKAARAVRDLLRKRAHWVRQHTANVLSVQNIMVRNTGARLSVKRIRELPKKELEGLLPEADQVLAITSSLAILDCLSQQIKALEKIVHQRLHHTPSYEQLLTVNGIGTILAQTITLETGDINRFPTVGNYASYCRCVDSNKISNGKRKGQGNVKNGNPYLGWAYMEAAQFALRFNPSAQRFYQRKLAKSNNNTTLARKAVAHKLSRACYYVMRDLVPFEATKAFG

SEQ ID NO: 265346 - protein, 346 aa, unidentified
MKKVVAGIDLHSNNVVIGIMDMDGKRVVSRKLPCQLNEVLGFLAPFKKRMARVAVESTYNWYWLVDGLRAQRYSVALANPAGMQQYSGIKHADDTNDAFFLAELLRLGILPAGHIYDERLRPVRDLLRRRLMLVHQRTALMLSFKSLYTRTTGEEMSLGELKGMKIKAAQDLYEHPANQLIAGLQIKQIEELSASISKIEKAVMACVKELPAYSKLTTLPGVGIILGMTITLEVGDIGRFKHPGEFASYCRTVAAKRTSNQKSKGENNSKCGNKYLAWAFVEAANFSRRFDEQCRKWYDRKAAKTSNVIATKALACKLAKAAWHLMAEGTDYDSRRMFGQPAIKAA

SEQ ID NO: 265347 - protein, 514 aa, unidentified
MTDKVGSFGNESNLWQRSSSSVGVWYPLVSFASRNSAIHFGDTVSAAFPYGSVPLISIASLSHKLLYYLTIKSKVMAKETIFETVHENVAGIDIGAEQIYVSPDGKEVTVFETFTSGYHACGLYLKEKGIKKVAMEATGVYWIALYFLLEELGMMVCLVNPKETKQVKGRKTDVKDCQWIQRLFTAGILRHSFIPEGKYMELRMLVRERLDIIDMGSTYVSKMQKCLELMNIKLKEVISQIHGASGIRMIKSILGGNRDSASLLKLCDERIQKYKGEKVLKALEGSYNDTYLFMLQQNMELWEIHQNRIEKIDAKIAQLLDELSMDKEEVPTEETKRIRHHAPNIDGLHSTMARLYGVDLSSISGMNDYTVLRLIGETGVDMSRFPTAKHFIAWLCLAPKMHKSGKIKKNVRGTPCNPAGQIFKECAQGLMNSKFIAIGAFMRKLRGRKDSGIAIKAGARKLALAYYNALTKGMAYVEQGTKQYEEQIKRRELASLKKLAKKYNMQLVENQIAA

SEQ ID NO: 265348 - protein, 393 aa, unidentified
MFYIGIDIAKNSHEVCFLDESGNVLDGNSFKITNTASGVDKLQKMFGKHALSPGNSIVGMEATGHYWLVLYSWLVEKGFDVKVINPIITDAYRNMLIRKTKNDRIDAQVVAKVLMLGEYQESPVSDKDTLALRQFCRFRLWQVQSCADLKKKVIALLDQIFPEYEKLFSDVFGLTSKEILKNYTSPEEIASINTRKLTHLLEKASKGRFGKEKALEIKAVANHSLGIQLAIDAFSFQLRQLIEQIEFVEQQIALLDQQIENYMEKLQSPVTTIPGVGPVYGAIILAELGNIKRFPSGKQVVSYAGLDASVHESGDFVGTRSHISKRGSPYLRRALWGAAFVASWADPELSAYYHRLRARGKHHNVAVGAVARKLCYILYAVLSENRPFDKRPI

SEQ ID NO: 265349 - protein, 363 aa, unidentified
MNSVYHTELSSLEETRGQFNGGKADIKLGIDVHQDFYVVVMQVGGSNPKPPQRFHKQAFLLWAAKLKSRSAEVHAVYEACGFGFSLQRQLSQLSIHCYVSCPQKLDEHNKRVKTDSLDAKALCLRLDRFVRGNREALAMVRVPSEEEERSRAIHRQREQLVKVRKILEAQGRSLMLNHGIEPVKNWWKRNNFAALPLPAWIKELLQNSQPILIALQQKISALTLQLQVAAAFNQPRGLGAMTSVMIDREIGDWHRFNNRRQIASYTGLCPGEYSSGHTRLQSCVTKHGNPRLRAALVELAWRLVRFQPNYSAVRKWKERLAKGTLTTGAARKKAIVALARQLAIDLWRIRTGRLSAEALGLEI

SEQ ID NO: 265350 - protein, 428 aa, unidentified
MVNKSQKGSHDRNIVFVGIDWADSLHAFHLLTAEGTEQHGSFQQNPAEIDSLFATWRKSFPQATLAVAIEQSRGPLISALLKYDDVIIYPVNPASLASYRKAFAHGGGKNDPVDARLLAQYLLNYHEQLRPLKQDEPLTRELATLVTDRRQLVDQRAALANELRAVLKQYFPAILQMRPAQMYADFVLRLLLAYPTLEQAQRVTPRKLSDCLRGGTADKVQQRIDIIRNATPLSEEDVLLRTSARRVTALCRRMAVLNDIIEQYDNDISRLVRRHENYEIVASLPATSDVTQARLIAALGDDRTRFENASALQAASGIAPLTIQSGRMTLVTTRWACTKFMKQTFHEFAGLSVRKSEWAKAYYQLQRSRGKSAQTALRALAFKWIRIIYRCWQENIPYNEQQYIQRLKDTRSPLFELIENNRKTLQTT

SEQ ID NO: 265351 - protein, 470 aa, unidentified
MTPRYHNQGCRPSARARLRVTHPHAAGIDVHATVHWVAVPAQDAPAPPPDHPPNLPPHVRSFGACTADLIALADWLTICRIRTVVMESTGIYWIPLFELLESRGFAVLLVEPRQSRHAPGRPKSDVLDCQWLQRLHSYGLLSGSFRPAEQIVVLRSYLRQRQMLIRHAGQHVQHMQKAMEQMNVKLTEVVSDVSGVTGMAIIRAILNGQRNPLELAKLRNDKCKRTQAEIARALYGNWRAEHLFALQQAVTLYDCYREQLRVCDEQMQKYLATFADRSQGRPRPRRHGRARRERRRNDPAFDVAGVLFRMSGVDLTVLEGIDPNTALVLMSEIGPDVSRFPTVKHFCSWLGLSPQHQLSAGKIRKRRVQRGASRAGRALRMAAQASHHAQNVLGAFYRRIQARAGAPKAIVATAHKLAERVYRLLKHGSEYVCQDLEAYEAAYRQRVVKGLARKAATLGYRLEPTTATGT

SEQ ID NO: 265352 - protein, 312 aa, unidentified
MIAHPVHVGADVSKATIELGSTLFAVPASILNTPAGFRPLLKILARSPAPIHVICEATGPYHKAFVAALHQARISVSVVNPRLPRDFARARGRLAKTDAIDALLLADYGQTMKPAPTPQPDEQMTLLDDLVTRRAQLVGDRAGERNRLQQTTCAEALVSVKSHLRHLDSQIKSLLARIAEVVASTPALRAKVALLIQVKGVGSLTASALLATLPELGTLSKNEVSALAGLAPFNRDSGAMRGTRTIYGGRIAVRTALYMAALSASRTNPILKAFYQRLRTAGKAHKVALVAVMRKLLIYLNSILKKHALAPV

SEQ ID NO: 265353 - protein, 341 aa, unidentified
MGEVSTIGLDIAKSVFQVHGVDVAGSVVVRKRVSRAKVLEYFGGLPCCLVGIEACPSAHHWGRELQALGHQVKLIPPSYVKAYLKRSKNDANDAAAICEAVTRPSMRFVPIKTKEQQTVLMLHRTRQLLVRQRTMISNALRGHLAELGIVSAKGRNGTAELLRIIADRRVSPAVCDILEVLVRQYSAIGTEIASIDKNIMVLHRACEASRRLAEIPGIGPLSATALVAEIGDWSTFSSGRGLAAWIGLVPKQHSTGGKDKLGRITKQGNRYLRWLLVVGAMAVIRYARKYSSKKRPWLARLMERRPTKVAAVALANKIARMAWAIMTRGERYREPKLSLAA

SEQ ID NO: 265354 - protein, 313 aa, unidentified
METIVVGIDVSKDRLDVAIRPAGESFAVSRDSQGLRNLIARLRPLAPGMIALEATGGYETVVAASIAAAGLPVAVVNPAQVRAFAQALGKRAKTDPLDAGVIAHFAEATKPALRALPDTDTQRLADLVARRSQIIEMMVAERQRLKRLTERRIRKSIERLLAALQKELSALDGDIDAAVRGSSAWRAREDLLASVPGVGKVIARTLIAELPELGTLDRRRIAALAGLAPWTRQSGHWRGKSFIGGGRASVRAALFMGAMVAAQHNPVLKAFRDKLVAAGKPKMVALIATARKLLTMLNALVRDGKTWEAAKHA

SEQ ID NO: 265355 - protein, 376 aa, unidentified
MKQFNDIYVGLDVHKDTIAVAIVRGLRSKPTYFGEIPNTPAAITKLLHQLSPDGEVLNFCYEAGPCGYEVYHQLTKLGQSCSVVAPSLIPRMPGVRIKTDRRDAMSLAKLHADGSLTAVWVPDKEQEGIRDLSRAREDFKQTETKARQRLGAFLLRNGKIFTGKSKWTVAHWRWMETLTFETPMQHIVMQEYVEALKEASRRLLGIEKQILLAVRGWSLEPVLNSLLAMRGVNTITAVTLLAELGDITRFDNPKQLMSYLGLVPSEYSSGSKRQQGSITKTGNGHVRRVLVEAAWNYRFPARKSRTIEMRAEKTSDRVQAIAWEGQKRLCGRYQKLLSLGKLKQKVCTAVAREMVGFVWAIACEASGRVHASRATA

SEQ ID NO: 265356 - protein, 321 aa, unidentified
MTHVLGIDVSKAKLDVALRRPDGKLRSTVVQNSPSGFVALTAWLDTHGVHRLHACMEATGIYWEAVAEYLADAGHTVSVVNPAQIKAFGGAGLVRTKTDRVDAKLIAAFCVAQCPPPWQAPPAAVRALRALVARRDALDAMRTQERNRLGVATDAVRPGIEAHLAYLEQALADIEAAIRQKIDNDPGLGAQRQLLDSIPGLGDKTIPTLLAYYGGPLRFDTAKQAAAFAGLDPRQHESGSSVRGKPRLSKVGHARLRKALYMPAMVATTRTAWGRALKQRLAAVGKPPMLILGAMMRKLVCVAYGVLRSGRPFDPALHQLA

SEQ ID NO: 265357 - protein, 359 aa, unidentified
MTTLTPAPGTFTGGVDTHADLHVAAALDHLGGVLGTAEFRTTAAGYRKLLAWLGGFGPLHQVGVEGTGSYGAGLARHLSEQGVTVVEVARPNRQLRRRHGKSDSIDAIAAARAVLSGEASATPKTHDGPVEALRALKVVQRSANKARTQALNQLHALVLTAPDELRERLRTLKTAELVRTCAAFRVAADDDSLTAIVRLALRELAQRIGHLEAQLKTVVARLHRITKTTAPELVAIHGVGPDVASTLLITAGDNPHRLRSEASFAALCGASPLPATSGKKQNRHRLNRGGDRHANAALWRIAIVRLSHDQRTKDYLARRTTDGKNTGEILRCLKRYIAREVFTALPRELVEIEPRTAAA

SEQ ID NO: 265358 - protein, 319 aa, unidentified
MTRNHIGVDLSKDFLDVCDPRRGAARVPNRPEEVSGWVAGLGADDVIVFEATSGCDRVLRRAVQAAGIPGVRLNPLHAWHFARSLNLAKTDRVAQNARFQRDAAMLARLGAERQPEPDPAPDPAREDLRALGQRRDQLKRMEVQEKNRRAACPLEAVAAGIGEMLAILAAHIERIDKAIAEHVSRHPGLKSADRLLRSIPGFGAVAAVTMLAHVPELGTVSRRAAASFGGLAPRARDSGRHRGRRFIGDGRRHVRRVLFMAAMSLMHRPGFLADFIARKKAEGKPGKLILIAVARRLLTIANAVLRTGIPFQPNTRPAT

SEQ ID NO: 265359 - protein, 355 aa, unidentified
METQTNLEKSFFENKELFVGMDVHKAKWVVTVRSYDLELKTFSMQPLAETLEKFLLSTYPKAKYKIVYECCFSGFWIYDYFFEKGYSIIVTPTNRIYKDGNTIKTDKIDSRKLAFQLSRGLLREVMVPAKKIREYKYIFRIYDKQKMRKGQILRQVKAFLEQKNHPLKWEKWNKGLIEKLKLLTFEDKLFDLKFGNLLKEYEYVVSQIKDSEEIIERIKEDEVLGPRITRIEKINGIGIISSVRMSVYLFDRKDRFESSEKLNHHLGLTPSERSSGDKVNRGRSGMCGNRQLRSIIIQLAWKSVRKDGALLDKFERVYKKSGSKQKAIVAVARKLMSKLYAIIIKEEAYRVNLAA

SEQ ID NO: 265360 - protein, 420 aa, unidentified
MTSANIIPADAVLVAIDIAKVRNEVLIEDPSHKRRRRLQVLNNRAEHDRLIEVLQTYGRSVVCGFEATGNYHRPIAWRLAEAGFEVRLVSSLALARTREALHNSWDKNDPKDAQVMLHMLKIQATQFYHDPLRAGINDAQELSKTHEAIARAKTEIQHRILTHYLPLYFPEIERFRGNSRSDWFFAFLDAFPTPASIVVLSKEEFVKAAWGVVGRKVSKTQILMDIYETASTSIGLPLPLEAPAVRMFRMVVAEARSLIRQRNEIEAQADELLRHSQDYQLLRQIPGVGPIIALTIIAEAGDLRRFHHHRQFLKFCGLDLSTQQSGQYRGQTRLSKFGNARLRRALWIAGQVAIRQRENGFRHKFERYIAKDRDNPDLRRKALTAITAKMARVVHAVIKSGSDYRPFVEGRVPGGRTSLS

SEQ ID NO: 265361 - protein, 321 aa, unidentified
MSRILVGVDVCKDFLDTHARPSGQRQRFANTPDGIEQLLAWVRTLAPERIVFESTGPYQKAAVGVLLAAGLPAVVVNARQVRDFAKGTGQLAKTDVIDAGILAHFGEVVATVVRPLPDKESLEFRDLCDRRGQLVRMLAAEKNHRHAAQGASAKVLKNIDKHIAFLQRQIDDLEQRMDKIVSTSETFKAKDDILQSIVGIGPQVSRTLLVHLPELGQGNRQTIAALVGLAPFADDSGTCSGIRHIRGGRAKVRIALYQAAVAAIRYCPTMKAFYAALKGRGKASKVALIAVARKLLVLANALLRDGTRYQPRTNSVCPKTA

SEQ ID NO: 265362 - protein, 355 aa, unidentified
MAKNNKRFQGTTIGLDVGDRSSSLCVLDPDGEIVEESKIPTTPKALEARFLNCEPVRVVLETGTHANWMHDALEAMGHEVIVADSRELRSISESDRKDDRTDATKLARMGRSELKLLRPVDPRSPEIRKDLEFLRARGLLVVMRTMAVNHIRGVVKSFGLRMPECSAESLHKHPLPPDLQPGLELMMAQLKSTSAAIKAYDKKIEELAATKYPQTMVLMQVHGVAALTALCFVLLIGDPRRFKKTRDVGSFFGATPRRRQSGDSNPKLRITKSGDPMMRTLLVLGAQHILRRSSPDCDLKRFGTRIAKRGGAHAKQRAVVATARKLSVLLLSMWKTGEVYEPLRSSPKAKAQPKS

SEQ ID NO: 265363 - protein, 426 aa, unidentified
MSEIEAKQEPQFAAFVGIDWGDEKHVWCLQAAGSQKRESGELEHTPEAVEAWVGQLCQRFGKGPIAVALEQSRGALVFMLSKYEPLHLFPVPPTMSASMRKALYPSGSKDDPRDADLLLDLLLLHRDKLRRLSPDTEATRRIQNLVEERRKLVDEKTAQTNRLTGDLKIYFPQMLDWFERLDTELVCALLERWPTLEELQKVPPRELRTFFHKHHCRDQELIERRLLAIRQAIPAIRDRAVIEAKGMVVKVIVQVIPCLVQGIADLDKKIEEAAAAHPDFFIFDSLPGAGAVLAPRLLAVFGSKRERYDSAWEVQCYSGIAPVTEKSGKMKWVHFRWACPKFLRQSFHEWAGHSIAYSVWARSYYQQLRSRGKGHHAAVRALAFKWIRVLFRCWKDRVAYDESKYLASLARRGSPLSAIVATGKTL

SEQ ID NO: 265364 - protein, 336 aa, unidentified
MSVYVGIDVHRKRSQVAVVTEDGTVQLNKNVVNGSEPMLRLIGDLPSGTPVAFEAAFGWGWLVELLEDYGFDPHLVHPLRCKAIASARLKNDKVDAAILAQLLRADLLPEAWIAPPTVRQLRALLRHRISLVRLGTQLRNRIHAVAADHGYDRPASYWTGPGRGWLAELDLPAVSREIVTDCLAVIDGLAPVIERINGELHQHAKADPRVKVLRTLPGVGEFTALVMLAEIGDISRFATARKLASWAGLTPTVRGSDLKVRHGHISKQGSAWLRWALNQAAQTAKRSPEFAATYAAIARRRGKKIATIAIARKLLTRAWHLLAQMQATDASPPRRP

SEQ ID NO: 265365 - protein, 344 aa, unidentified
MKITTVGIDLAKNVFQVHGVNEFGKTVVKKQLRRDQVAQYFVNLPACLIGMEACGSAHYWARKLQGFGHTVKLMAPQFVKPYVKTNKNDAADAEAICEAVARPNMRFVPIKNVEQQAVLALHRVRQGFVKARTAQANQIRGLLGEFGLIVPQGIGYIATRVPELIEDASNELPGSFRVLVQRLLDHLKELDRQVGELEVQIQTWHRSSEVSSKLAKIPGIGPITASALVASIGDAKSFDSGRQVAAWLGLVPKQHSSGGKQNLLGISKRGDTYLRTLLIHGARSVIYRAGQKPESCSWINGVINRRNKNVAAVALANKNARIVWALLAHDREFRSDYTTANAAM

SEQ ID NO: 265366 - protein, 411 aa, unidentified
MEQIHDRVAGLDVHRDQVTVCVRTPGPRGGAQTEKARFATTTGGLAALAEWLAGHAVTLAAMEATGVYWKPVYYALEERFVVWLCNAHHVKNVPGRKTDMSDAEWLADVAAHGMVRPSFVPPPPIRELRELTRYRKTQIDVRAAEIARLEKVLQDAGIKLTSVASKVLTQSGRAMVEALIAGERDPVALAGLAKGKLRPKIPQLTAALHGHFGAHHAIVAARILAHLDFLDDTITALDREVGARIAGRYQSAARLLAEVPGLERRSVEVIIAETGADMSCFPSPAHLASWAGLCPGNHESAGKRRRVGTTPGNPWLRRTMIESARAAARTKDSYFGAQYRQIARRRGPNKAAVAVAHSLLDVIWHMLTTGEVFADLGADFFTSRHDKEHQTLHLVRQLEKLGYTVQLAPSA

SEQ ID NO: 265367 - protein, 370 aa, unidentified
MKKNILYIGLDVHKFTIDIAIGEGRANSEVRSYGKIDHRFGVLDKVIGKLQSKGLELQFIYEAGPCGYKLYRHLTAKGYLCSVVAPSLIPKRCGDRIKTDRRDAINLVRLFRAGELTSIYIPSEEDEAMRDLLRCRDDMRRLERKARQRLLAFLLRNGHQYSATKHWSKAHMQWLAGIKFAHIPQQIVFQEYLDTVDECSERIERITGQIRSQVPDWSRAPFVKAYQALRGVSLIVATTVVAEIGDMSRFKNPKELMAYLGLVPSEHSSGKTVRRGPITKTGNSHVRRVLVEAAWTYKVRPQKSQTILKRQQGLPKSICDISWKAQMRLSTRYWRLLARGKSRQTAITAIARELSAFIWAIDREVQQVTV

SEQ ID NO: 265368 - protein, 381 aa, unidentified
MSIVALDIASESATFCVLGTQGIQSQGSLTFDHDGFSSFIASTQVSDASLFVMESTGGYHLPLYHFLLNHGRKARIINPLLVKHFHDGQTLRRTKTDVLDAVTIARYAQANLSALQEDRMQLDSESKMLARRRARNAEDLAKAKTILKSDLSVAFPELLRFNVFTKTLLEFLSIYGCAKDVLGVTDGQLQRALDVQKGRKSEEITVQNIKDLAQTSIGVSYRAAMVRDSAKAVLTCQERDEDLTKALVELEKALHKRQMEILTSIPGIGEVTASHFLSEIPDIFQFATYQKLIAFAGTDPGIYESGDTSKNLRISKRGNAVLRKYLYLMADSCKRHNIVFNAYYHKKREAGFPHRKAMVATMNKLVRTLHALLTKDEMYSL

SEQ ID NO: 265369 - protein, 422 aa, unidentified
MAETEEPSIFVGIDWGSETHQVCVIDATRKVLREASFAHSGSGIEELVETILAAAGNRAERVAAAIEVPRGAIVETLMEKGIAVFSINPKQLDRFRDRHTVAGAKDDRRDALVLADSLRTDRQSFRPVRLGDPLLVELRELSRLHDELKADKNALGNRLREQLQRYFPQILAIDSVYEASWLWELLEMAATPETARRVSLAKLRSLLGRHRIRRVTPEQVREALSAPPLHVAPGVSEACRKHVASLIPRLRLAHAQKTQVEHDIETLLEQLAAPDAGKAEHRDARLLQSLPGLGKLVCATMLAEAWQPLESRDYSTLRSLCGVAPVTKRSGKQYSVSMRHTCSHRLRTAVHYWAGGAVQRDQHWKARYAALRASGQSHARALRGIGDRLLATLVAMLRTNTLYDPERRRGALGPAQQQAASA

SEQ ID NO: 265370 - protein, 404 aa, unidentified
MFYVGIDVAKEKHYVCILDDTGEIAVKPFWIYTDILGLRRLIERFADLSLDNDDFIIGLESTGAYSENLYEYITDSDYKAVLLNSYQTAKFRDFSTMKKIKNDTIDALVIAELLFAGKYKESHISNDAYHSLKMLGRTRKSLMDKIKTIKREISTVMATVNPEITKVFPNIFSKTALVVINQYPTAMHLQKATPKKLTRLFRHIKGNNFSEDKAKYLIDLAQTSVYAGRAHKARASTITSYIRILELYCQEKKQIELQIKQLIVEEIDTIDNCVENLQSIPGISDKTISAILGECGDLRRFDSAKAFIGYLGLYPTQYQSGNSLSVGRLAKRGIPIAKHALYMAAVGSVLHNPQLNKLFRDKVSSGKSKKEALIILSKKIAVIMYSVVKHNKPYDSHRVFIPNR

SEQ ID NO: 265371 - protein, 361 aa, unidentified
MTNATAATPTTATDTILAIDLGRFKSVACVYRRATRAATFHTLDTGRDDFATFLARHPAAVVVVEACGNAGWAADLAAECGHPVKVANTSSEAWRFTHLKRKTDRDDARRLAELEALGQLPTVALPDAATRQRRALIAARQTLVGRRTATQNRIRALFAGQGLPTPRGHRAWTEVGLAGLDLQAKPLADCAPAELWRGLLHLALGDYRHLLARIAEAEAALDRLAEADDATQLLETAPGVGRRTAEAVAAHLGDATRFASGKQVSAYAGLVPRQYQSGATDRKGRITRRGPGVLRKLLVECAWASLRYNAWARATYARLTRGGVTRKKPAIVALARKLLVRLWAMLRDGVPWRSEPRSAAA

SEQ ID NO: 265372 - protein, 334 aa, unidentified
MLYAAIDIHKHAFQAAVLDAESGEVVEERFAADRESLTRWTERWRGRVVAVAIEATTGWRWVWRELEREGFDVRLAEPVQTRALLGRRRSAKTDRLDARWLARLLAKEMLPESWIPPAQIQELRDRTRLRKALAEDRRRWGQRLHAHLLHEGWPCSRSNLLRPPGLRWAAALKLPDHARLQVDSLLSVMAALEEQLDRVDGELRRFARRDQRCQALQSIYGIGPILACHLLAEIGEARRFRRAEQITRLAGLDPVVDESGESRRRGHLAKAGSPHLRWALVEAAVHAHRPTAPDLALYRATRQRRDTTVARLTIARKIGKRAFHALRELELTAA

SEQ ID NO: 265373 - protein, 341 aa, unidentified
MSESALIGIDLGKHSFHLHGQDKSGREVFRKKLSRPQMMQFFGNLKACTVVMEACAGAHFVARQLIAMGHQAKLISPQFVRPFVKGNKNDFVDAEAICEAASRPSMRFVSPKTEAQQTLSVLHRLRESLVHDRTKATNQMHGFLLEFGISLPKGLAIMKRLPSILAEHELPVRLTMQLQRLHDHFVYLDEQIKELDRELASQLAVDDLGSRLLSLPCVGPITASLLAVEMGDGQQYKCSRDFAAAVGLVPRQYSTGGKANLLGISKRGDKHLRQLLVQCARVYMQRLEHQKGALADWVRSLLMRRHSNVVACALANKLARIAWAIAAHHTQYETGPDALNA

SEQ ID NO: 265374 - protein, 403 aa, unidentified
MTVRPLVWVGIDVGKTSHHACAVDETGKVLWNQKVSNEQRAIEQLIARAHKGADEARWAIDLTSPMALMLITVLLGAEQSVVYVPGHVVNTMTGAFRGEGKTDAKDARVIAETARMRSDLSEVAMPDELVVELAQLTGYRTDVMADWVRGVNRLRSLLGSIFPGLEAAFDYSNRTPLILVAHLCTPAEIRAAGSKGVTAYLGDNGGWPTAIAKTAATAVAAAKQQPLALPGEAGTAALVNRLARKLLDLDHEIKDIDKTITERFRDHPYAHIIESLPGFGPGLGAEFVVVTGGDLASFATAGRLASYAGLVPVPRDSGRISGNLHRPKRYNRRLRRVFYMAALSSIRGDGPSRQFYDRKRGERLIHSQALLALARRLVDVLWALLRDGREFTPDKPTPATAAA

SEQ ID NO: 265375 - protein, 341 aa, unidentified
MQITTVGLDIAKHVFQVHAIDAEEMVVIRKQLRRGQVMRFFEELPPCLVGLEACATSHYWARELSKLGHEVRLMPAKDVKAYVKRNKNDAADAEAICEAVRRPTMRFVQVKSAEQQAHLMQHRARDLLMHQRTQLINSMRSHLAELGIIASQGREGVKELLAIVAKDANPHLPDDARASLVVMAAQLQALQTTIGAIEKRIIVQHRTNKESRRLQTVPGIGPIGASAIAATVTNPKIFRSGRDFAAWIGLVPRQMSTGGKAKLGPISKQGDRYLRRLLVVGAVSTLRRAKLNPQRYPWVTRLLARRPFKVVAVALANKMARIAWALLMSGKTCRSARFAAA

SEQ ID NO: 265376 - protein, 343 aa, unidentified
MKRNTIGLDLAKNIFHVVILDHNGKQILRKQLRRKQVANWFAQQPVCLVGMEACSGSHYWARTLKALGHEVKLVAPQHVKAFVRGQKNDYNDAAAIAEAVTRPQMHFVPIKSAAQLDLQALQRLRTRLIRERTGLSNQLRGLLAEHGIVIPRSLALLRRRLPELLEDADNGLSALFRRLLHTGWQHLLQIEEQVKALNQELDRAVAQDKDCQRLMTILGYGPVVASEFSVTVGDGRCYRRGRDVSAMLGLVPRQHTTGGKPKLLGISKRGDNMLRVHLIQGARSVLMHAEGKDDPLCRWALKIRAERGFNKATIAVANKLARIGWAVLRNQTTYQPGYRLHTT

SEQ ID NO: 265377 - protein, 340 aa, unidentified
MNDVAVIGLDLAKSVFQLHGVDAAGQVVVRQRLTRGRLLKFFSRLQPCLIGMEACASSHHWARELIALGHDVKLMPAQYVKPYVKRGKNDAADAEAICEAVTRPTMRFVGIKSPEQQSAMMLHRVRLILTRQRTQLSNALRAHLAEFGIVAPVGRRGIDQLLAVVADAQDRRVPANARACLDMLAAQLCLVKEQILENDRRIIANARDTEVGRRLMDIPGVGPLLASALVATVSEPILFRSGRNLAAWVGLVPRQNSSGGKERLGGITKAGNRYLRQMLIVGAMAVVRYAERNGTKRPWLVQLLARRTAKIAAVALANKTARIAWAMMTSGERYREPQVA

SEQ ID NO: 265378 - protein, 451 aa, unidentified
MARPKRSRPMRDISPTHPNAAAIDIGAKMHVAAVPPDRDAEAVRTFGTFTGDLHRMADWFESCGVRTVAMESTGVYWIPAFEVLDQRGFEVVLVNARDAKHVPGRKTDVSDAQWLRQLHEYGLLRASFRPKGELATLRAYLRQRERLLDYAASHIQHMQKALMQMNVQLHHIVSDITGATGMRIIRGIVAGERDPAALAAHRDRRCHASAEEISAALAGNWREEHIFALGQALDLYDLYQAKVAESDARIEQVLARLRTASERPACRLPPARHRDNSANAPAFDARAILYSVLGVDLTQIHGLGPSLVLKLVGECGTDLSPWPDAKHFTSWLCLAPGNKISGGRVLSSRTRRSGSRAAALLRLAAVTVGRTQTALGAFYRRLSARIGKAKAVTATARKIAGLYYNAVRHGMVYADPGASYYEERYKARVLANLRRRATSLGFVLQKAPSSA

SEQ ID NO: 265379 - protein, 404 aa, unidentified
MNMNAVGIDVSKGKSMVAILRSYGEIISKPFEVKHTVSGIRSLIEQIQSIDGESRIVMEHTGRYYEPLVRELSKADLFVSAINPKLIKDFGDNSLRKVKSDKADAVKIARYTLDSWTELKQYSLMDEIRNQLKTMNRQFGFYMKHKTAMKNNLIGILDQTYPGVNTYFDSPAREDGSQKWVDFAAAYWHVDCVRKMSLNAFVDHYQKWCKRKKYNFSQSKAEEIYGKAKELVPVLPKDAITKLIIKQAVDQLNSASATVESLRTLMNETASKLPEYPIVMAMKGVGASLGPQLMAEIGDVSRFTHKGAITAFAGVDPGVNESGSYEQKSVPTSKRGSSDLRKTLFQVMDVLIKTHPQDDPVYQFLDKKRAQGKPYYVYMTAGANKFLRIYYGRVKEYLSSLPES

SEQ ID NO: 265380 - protein, 356 aa, unidentified
MSQEVTLIVGIDVHKHTHAAALIDDRGGLVDALTVANSPKGFRELIDWLVDRDAARAVIGVESPGSYGRCLVAAMAGAGFEVLQVPAWRTHRERHRRGPGKTDPGDALSIAKVVMTDRADLGPAQEPELVRALGMLELQRRRFVHDRTQAIQRLRGDWTQFDPVAEAGTIRCDRKRELRKLKRITLGDSLVQRTAARCLRELAEDIDDLNDRIAVLDTEIADLLAEHGRPLEQLHGVGSNLAAVIVAQAGDVRRFRNASAFARFCGAAPIPCGSGKTAGRHRLHRGGNRQLNAALYRIAIVQQRHHPQAQAFLERKIREGKTPREARRALKRHLANVLYRHLIAWANTTPAMNHLT

SEQ ID NO: 265381 - protein, 463 aa, unidentified
MAKKNATSRKSKSKARKNVLERINPNAAGIDIGANFHLVAIPEDRTEENIRKFGPFTSDLHRLADWLSEHHIETVVMESTGVYWIPVFQILEQRGFEVKLVNAAHVKNLPGRKSDVSDCQWLQQLHTFGLLNGSFRPKDQVCILRTFMRLRDILVKDCSSHISRMQKALTEMNVQIHRVLSDITGYTGMAIIRAILAGERDGLKLAQMKHPQVRASTEQIVKALEGDYRPEHLFALQTTIELYDAYQLKITECENKIEQQLKHFETKLDVGQVLEQSGALKARSAKVRQELQRQAYLASVCGVDLTRLPGLSTLAVEVIISETGLDMNCWKSEKHFCSWLKVCPDKRISGGKLLSSRPRKTKNRAAGMFRLAAQGAMQSRTAVGAFIRRLRARLGAPTAINAGANKLARLFYRMLKFGAAYVEQGQTYYEQRYKERLLHNLSKRAKEFGFQLTPFQPATVSVS

SEQ ID NO: 265382 - protein, 410 aa, unidentified
MTMLEVALDPATVIVAVDPGKVSNRVWVSDGSGLLVDPVSLPVAREGISRLERLLVEHASVDPVIAVEATGSLHRSWVVELERRHPGSVRLFAPSETKAARIQLGSGRFKTDDRDCAALTYLARQGAGRLHADVSAVDALRAAVRHRRGLVADRRVAQQRMHDQLNALCPGLSAPAGHGRSLPLDSPTGLAVLACAAAFAGRPPRLQSLIRRARGRLTTSTAQYWVQRWRGCLPPPADADQRARRLGRDLDRYRRLQSDIAAVDEEIVGLLAATDGQVLTTLAGVGTIRAAAFAAHSLPIERFPDAEHLYSATGLAPALYQSATLHRRGRISRQGLAEHRDALMGIAWGLSQCSPSFIARDTELRARGMAPVQARVAVARHACRLVYRLLRTQQPFDEQRYRRGRLGRER

SEQ ID NO: 265383 - protein, 354 aa, unidentified
MKRLVKQVLGIDVAQDELVVCLGKMYDDWTPELVAHKTFANTVKGFSALLEWVGKLTDKSIPTGYVMESTGVYHELFAYFLHDQGLNVHIILPNKISNYARTLNVKTVTDRTASEAIAMFGLERKLDTWEPPKGIYRQLQQLTRERGQLMDESTVIKNQLHAENAGAKPHKKSIDRATRRLELIGRQLKEIMVELSELIHTDSETQIIILLICTIPGIGLLTAATILGETNGFELIRNKKQLASYAGLDVREKQSGTSVKGKPSISKKGNRHLRKAMHLPALTAIRHDDRFKAIFARLVSRHGIKMKAVVAIQRKLLEMTYTVFRTGKKYDREHFKNEQVKKEGNLVEVIVGEE

SEQ ID NO: 265384 - protein, 322 aa, unidentified
MQYIGIDVSKATFVVAYSSDKGGEIRTFNNTTAGIKQFIGTLPKDGSIHCVMEATGNYSALLLYMLNVAGITVSMENPLKVKNFARAMLSTVKTDKIDARLIALYGEKMNPQPFKIQGEAILRLRQKRTVIRQLTKQITAMSNLRGSLACLPVPDKGATHTVDETIKFLEKRRDRLQSELTDLVEVEFSRQLALLTTIKGIGITLATALILTTGGFTYFQNAKQVSRYLGICPTYEQSGTSVNIRGHINRNGDAYTRGLLYIAAWPASRFNAQCKETYTRLRQNGKPGKLAMIAVANKLVRQAFAVVAHDKEYIDGFVSNRP

SEQ ID NO: 265385 - protein, 414 aa, unidentified
MNTLVSNTSLSGTLIALDIAKKHHDAKIRHPDGRTSFLRIENTLEGFNRLLALTASPHDDIIAAFEPTADYHRNIAWWLHKQGVKCHLVSSVRCARAREMLFKTWDKNDRKDASVIMYLLEQGLSSPFYDPLANGIIDIQEISNTYHQVTLARTRCLNSLVNHYLTLYFPEAEQFLHMSRAEWFCQFLLQFPTPSCITSLNRDVFVKQSWDVVGRKQYKQQFLEHLYDVAADSIALPLSEDSLAVTTFRLQLHRYVGLSVQRLQLEKQAENYLQERSDYRHLRTIPGIGAIIALMIIAESGDLTRFAHYRQYLNFCGFNLSASQSGQKHSGYRLSKRGNARLRYAFWLAATVAVRTRENSFRYKYERYIRENGDKPDQKRKAMTAVATKVARVAHAIVKRDIDYKGYYEISHGT

SEQ ID NO: 265386 - protein, 381 aa, unidentified
MGDHISAFVAFDTSKLRNAVAIAEEGRTGEVRFFGEVDNTSEATAKLVRKLAAKYERLAFCYEAGPTGYGLYRQISDLGQECMVVAPSLIPKKPGDRVKTNRRDALGLAKQLRAGELTAVWVPDGRHEAMRDLTRARGAAVQDARMKGQQVSAFLLRLGRHYDADKKTWTKAHMNWLASQKFEHPEQRIAFEELLLAVRQARERVARLEEAIRLAVPDWSLAEVVPALMAMRGIDMVTATAFLAEIGDLTRFRTPRQLMAYLGLVPSERSTGDTVVRGPITKAGNRRARRLLIESAWAYRHPPRVGKDKQAKVAAAPRAVREIAWKAQHRLYARYRALTRNGKLKTVAITAMARELAAFIWAVGREIANTGGAAAQQGIRG

SEQ ID NO: 265387 - protein, 358 aa, unidentified
MSNSGARVGVDLSKRVYQVHAVDGAGRTVLAKAMAVDRFFAWCAQLPQGCMVAMESCGGAHHAARRLRLLGLDARLLAGHFVTPYRMAGKSGKNDANDAAAICEAAGRPHMRFVPVKTAEQQGQLALHRLREGYKEERTALINRIRGLLTEFGLVFAQGPDALRLVLAGVLEDASNELPALARLALQRAQLHWIDIELQICWCDERIAAHVRCDARAAKAATLLGVGPTTASALIASVGELGQFANARQFGAWLGLVPSQNSTGGKARLGGITKRGDDYLRTLLIQGAKSAVMSAAKRRDRISQWLVQLKERVGWQKAVVALANKNARILWAVLTRDGPFDPNHVPQIPVARQKPAPT

SEQ ID NO: 265388 - protein, 343 aa, unidentified
MKLSRVGIDLAKNVYQLHGVDRTGKTLWKRRLKRYQWFKALLDKTEPDCVIGMEACAGAHHWGRQLQARGYTVKLIPPQFVKPYVKSNKSDANDAEAICEAMSRPNMRFVTVKRVEQQDIQATHRIRAELMTQRTAKANQVRGLVAEYGLVAPKHLSSLRAAIPCWLEDAENGLTGDFRNLLHGVWNDLLGLDDRVCEMDKLIKRLAENNEDCVRLQQLRGVGPLIATAMVATVGDARQYHKSRQMAAAIGITPRQHSSGDRDRMLGISKRGDVYLRTLMIHGARSAVAVAKHKDDRLSRWVTEIAKRRHPNVAAVALANKTARMAWAMLRNETNYDPDFAIR

SEQ ID NO: 265389 - protein, 338 aa, unidentified
MNTSVIGLDIAKNIFHLYTLNADNKVIKKKLKRAQVLTFFANYPVSTIGIEACGSSHYWARELTKLGHEVMLLNAKFVKSFLVGNKNDFNDAQAIFDAVGRPNKRVVAIKTEVQQDMQLLHNLRQDLVKRRTAVVNQIRGALLERGIAIHKGVDQVRKQLPDILEDAENGLTALCRELIAEQAERLRELDKAIKEQDKRLGRLSQADALSRRMLDVPGVGPITATIVASDIGDGKGYASSRDYAASLGLVPGQHSSGDKPRYLGISKRGNRYIRTNLIHGARAVVRNCAGKTDQLSRWLQALVERRGFNKAAVALANKNARILWAMTMKNEAYQGAPA

SEQ ID NO: 265390 - protein, 340 aa, unidentified
MTQHKIIGIDLAKNIFFLFEINHKGKNLCRKKLQRSKLLSYIANKAPCTIAMEACSGAHYWAREFSQFGHEVILYAPQHVKTQRRKQKNDYNDAEAIAEVALYKRPHPVPHKSVEQQDIQSLIRMRRLLVTERTRIVNQVRGLISEYGIIMPKGAAAFRKAIPEILENDENQLSCILRELLSHQYERYLYIDEQVKWFDDKLNQTIKQFENAKRLMSIPGFGPLTSQAVAVWLGSGQQFKTGRDASAAMGLVPKQDTSGDKVILLGITKRGNAYIRSLLVHGARAALRRAKFKSDNLSKWMLELQERRGPNRAAVALANKLMRIAWAVITKNEEYQPKQS

SEQ ID NO: 265391 - protein, 401 aa, unidentified
MESPIVSIDVSNGNSHYMCFIKNNKRFGKVKKIDHDIEGFKRLLEDIQKLEAETNEKVCAVFEATGVYTKPLERFLNKNSIKTYMINPLESARKRKEEIHNKKTDKLDPISISKVYYDKEEMMELKKKDETYNWLRKKNRLYEDQLNHLRKYKVTFQNQLSICFPGYLDLFKDGYSDIPMTILKKYPHPDLLKNKKAETVARYLEKNTCHTHKVSLEYALKIIEFAKKTYPGCEKDDVEVEIFKILLDKVIETQRECEKTLNEMITVASTLEEYRYISSIDGIGPNLAARIIAEIGDIEEFKSREALVAYAGLDPHIYQSGDQDGKHLKISKKGNKYLRCLLFLAVGCSIRGAKDNPVNRFYQKKKQQSNPLNSKAAKTACTAKLLKIIYGICKNKTTYER

SEQ ID NO: 265392 - protein, 356 aa, unidentified
MPKVKQLNFEGQTIFCGIDVHKKTWRVNIRNDEFELEDYSQEASVEQLVNHLQKKYPGASYQVAYEAGFCGFSIHRFLSKLGVNCIVANPADVPSTDKEKRRKNDKIDARKISRHLSKTELPPIYVPDLEAEHARTLVRQRGRLVQDQTRCKNRIWHLLMFSGLKLDVDKPQQYWSRKFIATLQSLSCQTESLKMALNIALEEYLLVRKLLSVATKQIRTLSVHPNYTAVQKLLQSILGIGIVNAMIIMAELQDMNRFKTLDKLCSYVGIVPDTGSSGENDVIKGITQRGNHYLRPAIVESSWVIIRKDPAMLMLYKKYCSTMIPNKAIIKIARHLLSRIRHVWRNQVEYEIGIVG

SEQ ID NO: 265393 - protein, 380 aa, unidentified
MGSLRIDHSPQGLAKLNTFLQQIIGTEPKEQMACIIETSHGLLIAHLLEAGWPVYPVNPRTVDRRRSASGAKTDSIDAYLLAKTGRADWADLRRLSPDSEVVAELKMLTRDQDGLIKTQTRLTNQLTACLKAYYPVALELFSKLPQRTTLIFLRTYPTPHAAMGASSEQIGGVLKEAGHPTAKATASSIVERLHGPHLLADSVTTRSKSRLMLALVSQLLPLNEQIAQYDKEIDTLFLTHADQVIFSSLPRAGQRLAPRLLAEIGEDRQRYRDAASLQALAGTSPVLFQSGMYSKAHRRLGCIKPLRNALHQFAWQTTQSEAWARDYYQRKRAEGKSHTVAVRALANVWVRIIFAMWFNRTCYESAIFEQAQQQHARPAA

SEQ ID NO: 265394 - protein, 319 aa, unidentified
MDGPCFVGIDVAKRTLDGCFRPGPRFQHDNTSAGITQVVARLAAQPVRLVVVEATGGLEVPLVRALQRAGIAVAVINPRMARDFAKASGQLAKTDTIDAAVLAHYAEAMRPEPRLLPDEDAQFLDALVTRRRQLIDMRTMEQNRLGACMDKHVRADILAHLDWLSKRLKNTERDLADAIRTNPDWQARDQLLQSVPGIGKVVSHTLLAGLPELGTLTARKLTALVGLAPFADDSGRHQGKRRIFGGRAEVRAKLYMAALTAGRSHSPLGRFYQRLRDAGKSAKVALVAVARKLLTIVNAVVRTGRSYDAEFAPLVLTGA

SEQ ID NO: 265395 - protein, 373 aa, unidentified
MSFTSDTILVALELSDSLWLVGTRMPGAQKSHMHRVNAGDTAVLLRLLSGLQSRQRAQGTPAPIAVCFEAGRDGFWLHRLLTMHDIPTHVVEPTSILVNRRARRAKTDRLDAEGLLRVLAAYLAGDSQICSMVHVPTPDEEDGKRVHREREYLVQERTRIENRISALLVTQGIRSRPSLRSWERDMALLETGDGRKLPQLLAAELNRLRRRLVLVRDLICELDTERDEHLAITSGDAITTKVTALSGIYGIGDNFAAVLAREVFYRHFGNRKQLASYVGLTPMPHQSGNVDKDRRIGRAGNARARKTLVQAAWLWLRYQPESELASWFRQRVGDLKGRARRIAIVAMARKLLIALWRYTENGEIPAGAVFRAA

SEQ ID NO: 265396 - protein, 337 aa, unidentified
MGLYCGIDLHSNNHVLTVIDEADRRIYERRLPNDLAITKAALEPYRRELVAVAVESTFNWYWLVDGLMEAGDAVRLVNTAAVRQYEGLKHTDDEHDAFWLAHLMRLGILPTGYIYPKSERGLRDLARQRMRLVQHRSSLITSVQNQVWRSTAVRLSSHTIKGEGKKPWPEISDPDIALSLKAGRAVIDTLTVQIERLEKLLLKRVGLSAQFRMLKTVTGIGPILAMTIALEVGDIHRFASVGEFASYCRCVDTQRLSNGKKKGEANRKCGNRYLAWAFMEAAHFAIRLLPAAKRFYERKRRQRHALLAVKALAHKLARACFYVLRDQVPFAPERLFV

SEQ ID NO: 265397 - protein, 350 aa, unidentified
MTKRLKQCVGIDCSMNTLDCTMSYLTDNLEVEQQSFIVFDNNEKGFKQLVKWSAKFAVQNVALQFVIEATGVYHQRVASHLADHKYRVSVVLPSRAKYFAQTLSIKTVTDKVSSKTISILGLEKKLDDWKKPDAVFNTLKLLTREREDLVLEGGQIKNQMHAQEHSAWTHAPTIKRMKQRLHLIEKQIASIEIDIKQLIASQKELSERIKNICTIKGIGLITAVTIVAETDGFSLIRNQRQLVSYAGLDVIEKQSGISVKKKPRISHKGNSHIRKALYFPSLSTIRANEFIRSWYLQMLERHQIKMKSIVAVQRKLLVLVYTLWKKNEAYNPPALKYLEQPQVTALTELD

SEQ ID NO: 265398 - protein, 429 aa, unidentified
MTRISVGVDVSKNRSTVCIIDRDGKVIMRPFLVWHSTEELDFLADTLKRLNGEVRVIMESTSIYQYPIALHLKEKGIFISIVNAYKVKKFANTDFIGGKTDKKDSRTIASYGISYWDKLVEWQIPKDTYFNLDLLNRTYMNAKKHRQIILQELQHYIDCAMPGMDKELHSLNLNTKKDFMLDFVEKFWHRDEIVNMTEAEFTEVFTAWAKKKGYRPVEGKAAKIYAIAKSCIPYYPANPTVKTILQCIVDKLSGVNRTLVTIVTQMIEEAKKLPEYQIVREMPGVGDPLAARFFGSAGDIRRFKNSKALVAYAGIDSPPDESGDFSSTHRHITKKGSKVFRDTGYEIMMALRAQKRTWEKVRKNPEVYDYMLRKEAEEKPRKVAKIAALNKFLRIVYARIKELYDNMALAERAKAKTKSKTKAKTKATA

SEQ ID NO: 265399 - protein, 375 aa, unidentified
MSVYVGIDVHRKRSQVAVVTGDGLVQLNRNVVNGREPILKLIGGLPAGTPVAFEAAYGWGWLVELLEDYGFDPHLVHPLRCKAIASARLKNDKVDAAILAQLLRADLLPEAWIAPQPVRQLRALLRHRASLVRLGTQLRNRIHAVAADHGYDRTGSYWTGPGRGWLAELPLPPVSREIVTDCLASLDALAVTIGRLDAEVRQRAKADPRVKVLTTLPGVGQFTALVMLAEIGDITRFPNARKLASWAGLTPTVRGSDLTVRHGHISKQGSAWLRWVLNQAAQTAKRSPEFSAAYAAIAKRRGKKIATIAIARKLLTRAYHLLAAAQAGQAPDTTTANSFTGTTGEAPADGGGSPSPGHARSSGMSRPPGRARSSD

SEQ ID NO: 265400 - protein, 412 aa, unidentified
METVVERPAALDVHKEQVTACVRVPARDGSREQHVAEFPTTVAGLLTLFDWLEAFGVTQVVMEATGVFWRPVWAILEDGFECVLVNARHVKQVPGRKTDVSDAAWLCQLAEAGLLRASFVPPKPIRALRNLTRYRKTQIQERAREANRLHKALEDTGIKLDCVASDILGKSGRAMLDALVNGTRDPEVLAELARGRMRAKIPALKEALEGRFDHLHAVWIGAILEHIDFLDGQIASLTGAIGEQIAPFEQAVELLCTIPGVQRRTAEVIIAEIGVDMAVFPTDKQLASWAGMCPGNDQSAGKRRSGKTRNGSKWLDWALEESAMAAIRTKDVYLAAQYARLRPRRGHKKALGAVKHSILIACWHMLSTGELYVDLGGDYFRQRDPEKITKRLVAQLESLGHKVILEEVPQAA
